United States Patent Application Publication US 2024/0327476 A1 - sequence listing, part 112

SEQ ID NO: 214077 - DNA, 513 bp, synthetic construct
  misc_feature 1..513: note = Description of Artificial Sequence: Synthetic coding sequence
  source 1..513: mol_type = other DNA
atggaccgtgcgattgggcaggctggaagcttgacgtcatctgaagatacactgacagtggtcacagctgatcattctcacgtgtttaccttcggcggatatactccccgaggcaattctattttcggactggcccctatgctctcagacaccgataaaaaacctttcacggcaatactgtatggtaacggaccaggctataaggtggttggaggtgagcgggagaatgtgtccatggtggattatgcccacaacaattatcaggcacagtccgcggttccgttgcggcacgagacccatgggggagaggatgttgcagttttctccaaaggcccaatggcgcacttactgcacggagtgcatgaacagaattacgtccctcatgtgatggcttatgctgcctgtatcggtgccaatctcggacactgtgcccctgccagttctgcgggttcactcgccgctggacccttattgctggcgctggccctataccccctgagcgtgttgttctag

SEQ ID NO: 214078 - DNA, 1575 bp, synthetic construct
  misc_feature 1..1575: note = Description of Artificial Sequence: Synthetic coding sequence
  source 1..1575: mol_type = other DNA
atgataagcccttttttagtcctggctattggaacatgcctaaccaatagcctggttcctgaaaaagaaaaggatccaaagtattggcgggatcaagcacaagaaactctgaaatacgccctagagttacaaaaactgaataccaacgtggccaaaaatgtgatcatgttcctcggcgacggtatgggcgtttcaaccgtgaccgcagcgagaatcctaaaagggcaactccaccataaccccggtgaagagactcgtctggaaatggacaagtttcccttcgtcgctctgtccaagacctataatacaaatgcacaagtgccagattccgcagggaccgcaacggcgtatctgtgtggtgtgaaggctaacgagggaacagtgggggtatctgcagcaactgagcgatcccgctgtaatactactcagggaaatgaggtcaccagtattctgcggtgggcaaaggacgcaggaaagagcgtgggcatagttacgacaactcgggtaaaccatgccacaccctcagccgcatacgctcactccgcagacagagactggtactctgacaatgagatgccccctgaggcactctcccaagggtgcaaggacatcgcgtatcagctgatgcacaatattagggatatcgacgtgataatgggaggcggaaggaagtatatgtaccctaagaacaagactgacgtcgaatatgagtccgatgagaaggcgagaggcactagactcgatgggttagaccttgttgacacttggaagtcttttaagcctcgctacaagcattctcacttcatctggaatcgcacagaactactcacactagaccctcataatgttgattatcttctggggcttttcgagccaggggatatgcagtatgaactgaataggaataatgtgactgatccctcgctttcggagatggttgtggtcgctattcagatcctgcggaaaaaccctaaaggttttttcctgcttgtggaaggtggtcgtattgatcatggacatcacgaagggaaagcaaagcaggctcttcacgaagccgtggaaatggacagggctatcgggcaggcgggaagcctgacaagtagtgaggacaccctcaccgtcgtaacggcagaccactctcatgtgtttacctttggagggtacactcctcgaggcaacagcatctttggactcgcgcctatgctatctgataccgacaaaaagccattcaccgcaatcctctatgggaacggacccggatataaggtcgttggcggagagagggagaacgtgtcaatggtggattatgcacacaataattaccaggcccaatccgcagtgcccctacggcacgaaacacatgggggagaggacgtggctgtgttttccaaaggtcccatggcgcacttattgcatggtgtgcacgagcagaattatgtgccacacgttatggcatatgcggcatgtatcggcgctaacctcggacactgtgcgccagcttcatccgcaggctcattagcagcaggccctctgttgctggccttggccctttaccccctcagcgtcctcttctag

SEQ ID NO: 214079 - DNA, 1575 bp, synthetic construct
  misc_feature 1..1575: note = Description of Artificial Sequence: Synthetic coding sequence
  source 1..1575: mol_type = other DNA
atgatctccccattcctcgtgctggctattgggacttgccttaccaactccttggtccctgaaaaagagaaagacccaaaatactggcgagaccaggcccaggagacactcaaatacgcattagagctccaaaagctgaacacaaacgtcgctaagaatgttatcatgttcctaggcgacggtatgggagtttccacagtcacagctgcgcgtattttaaagggccaactgcatcacaacccaggcgaggaaacacgtctggagatggacaaattcccatttgttgcactctctaaaacgtacaacacaaatgctcaggtgccggactccgctggcacggccactgcctacttgtgtggggttaaggctaacgaggggaccgtcggggtcagcgcggctacggagcgttcacgttgtaatactacacagggcaacgaggtgacatccatcttgcggtgggccaaggacgcgggaaagtctgtcggaatcgtaacaacaaccagagttaatcacgccacaccatctgcagcttacgcgcacagcgcagatagagactggtattcagataatgagatgccccctgaagcactttctcaggggtgtaaagacatcgcataccaactgatgcataacataagggacattgatgtgataatgggtggaggcaggaagtatatgtaccctaaaaacaagacagatgttgaatacgagagcgacgaaaaagcccgtggtacccgcctggacgggctcgacctggtggacacatggaagagtttcaaacctagatacaaacattcacacttcatctggaatcgaaccgagctgctgactcttgacccacacaatgtggactaccttctgggactttttgagccgggagatatgcagtatgaattgaaccggaacaatgtgacagatccgtctttgagtgaaatggtggtcgtggctattcagattcttcgaaaaaatccaaaaggattcttcctgctggtagaaggcggaaggattgaccatggtcatcacgaggggaaggccaagcaagcccttcatgaggcagttgaaatggacagagccattggccaggcgggaagcctgacatcatctgaggacacactaacagttgtgaccgcagaccacagccacgtattcaccttcggcggttacacgcctagaggtaattcaatcttcggactggctcctatgctttcagacacggataagaaacccttcaccgccattctgtacggcaacggccctggatacaaagtggtgggcggtgaacgcgaaaatgtgtccatggtggattacgcacataacaattatcaggcacagtctgctgttccactaaggcacgaaactcacggaggcgaggatgtcgcagtcttttctaaaggcccaatggcccacctgttacacggtgttcacgagcagaactacgtcccacatgttatggcatacgcagcgtgcataggagccaacctcggtcactgcgcaccagcctcatccgcaggctctctcgccgcaggcccattgttactggccctggctctgtacccgctctcagtcctcttttag

SEQ ID NO: 214080 - DNA, 1575 bp, synthetic construct
  misc_feature 1..1575: note = Description of Artificial Sequence: Synthetic coding sequence
  source 1..1575: mol_type = other DNA
atgatcagcccttttcttgttctggcaatcgggacatgccttacgaattcacttgtccctgaaaaggaaaaggatcccaagtattggcgggaccaggcgcaagagactttaaaatatgccctggagctccagaagctgaatacgaacgtggccaaaaatgtgattatgttcctgggagatggcatgggggtaagcacggtgactgctgctcgcatcctgaagggacagctacatcacaatccaggtgaggagacccgcctggaaatggataagttcccgttcgtggctttgtcgaagacttacaacacaaacgcccaagtgcctgatagtgcagggacggcaactgcctacctgtgtggggtgaaggctaatgaagggacagtgggcgtgtcagccgcaactgaacgcagcaggtgtaacacaactcaggggaatgaggtcacatccattctgcgctgggctaaagacgccggtaagtcggtgggaatcgtgacaacaacaagggtgaatcacgcaacaccaagtgccgcttatgcacattcagctgatagagactggtacagcgacaacgaaatgcctccggaagccctgagtcagggctgtaaggatatcgcatatcagcttatgcataatatcagagatatcgatgtgattatggggggaggcagaaagtacatgtacccaaagaacaaaaccgacgtggaatacgagtccgatgagaaggctaggggaacgagattggacggactggaccttgtcgacacatggaagtcatttaagcctagatacaaacattctcatttcatatggaatcggaccgaactgctgaccctggacccacataatgtggattatcttctcggcctttttgaacctggagatatgcagtacgagctgaaccgcaataacgtcactgatccctctctgtctgaaatggtggtggtggcaatccagatcctcaggaaaaacccaaaaggattctttcttctggtggaaggcggtaggatcgatcatggtcaccatgagggaaaagccaagcaagcgctacatgaggccgtggaaatggatagggctattggccaggccggatcactcacgtcttccgaggacaccctaaccgtggttaccgccgatcactctcacgtcttcacatttggtggatacacaccaagaggcaattccatcttcgggctggccccaatgctcagcgatactgacaaaaaaccgtttaccgctatcctatacggcaatggcccaggctacaaagtcgtgggtggtgaaagggagaacgtgtctatggtggattacgctcataacaactaccaagcccagtctgcagttccactccggcacgaaactcacggcggagaggatgtggcagtcttctctaaagggcctatggcccacttacttcacggtgtccatgagcaaaactatgtaccccacgttatggcctatgctgcgtgtattggcgcaaacctcggccattgtgcccctgcctcatcagctggctccctggcagctggtcccctccttctggctctggcactgtatcctttgagcgtactgttctag

SEQ ID NO: 214081 - DNA, 1344 bp, synthetic construct
  misc_feature 1..1344: note = Description of Artificial Sequence: Synthetic coding sequence
  source 1..1344: mol_type = other DNA
atgccctggtccttcagaagctctactcctacctggcttaggatgtccagttgctcatgggagatgacctataacaccaacgcacaagtaccagactccgctggcaccgccactgcctatctgtgtggcgtgaaggcaaatgaaggaaccgtgggagtatccgccgcaaccgaacgctccagatgcaacacaacacaaggaaatgaggttacaagcattttaaggtgggctaaggacgcgggaaaaagcgtcggaattgtgaccacaacccgcgttaaccacgcaacaccatctgcggcttatgctcactcagcggatcgcgattggtattcggacaatgagatgcccccagaggcgttatctcagggatgtaaggatatcgcttaccagttgatgcataatatacgggacatcgacgttatcatgggcggtggcagaaagtatatgtatccaaaaaataagactgacgtcgaatatgaatcagatgaaaaggcaagggggacacggctggacggactggatctcgtggatacatggaagagttttaaacccagatacaagcactcccactttatatggaataggacagaacttctgacgctcgatccacataacgtggactacctccttggactgttcgagccaggtgatatgcagtacgagcttaatcggaataatgtgaccgatccctcactcagcgagatggtggttgttgcaattcaaattcttcgcaaaaaccccaaggggttcttccttctggtggagggtggcaggatagaccacgggcatcatgaggggaaagctaagcaggcattgcatgaggcggtggaaatggaccgggctatagggcaggccggaagcttgacatcgtcagaggatacactcactgtcgtaacggctgatcactctcacgttttcactttcgggggatatacccctaggggaaacagtattttcggcctggctccgatgctgtccgacacagacaaaaagcctttcacggcaatcttgtatgggaacggccctggttacaaggtggttggaggcgaaagagagaacgttagtatggtagactacgcccataacaactaccaagcgcagtctgccgttccactccggcacgaaacccacgggggtgaggatgtggcggttttcagcaaggggccaatggcacacctattgcacggagtccacgagcaaaactacgtaccacatgtcatggcctatgcagcctgtatcggagcaaatcttgggcactgtgcgccagcaagttccgcgggatctctggctgccggaccgttgctgctagccctcgcactgtacccgctgagtgtcttgttttag

SEQ ID NO: 214082 - DNA, 1410 bp, synthetic construct
  misc_feature 1..1410: note = Description of Artificial Sequence: Synthetic coding sequence
  source 1..1410: mol_type = other DNA
atgttcttaggagacggtatgggcgtgagcacagtgactgcagcgcgtattctgaagggacaacttcaccataatcctggagaagaaactcgactcgagatggataagtttcccttcgtggccctatcgaagacatataacacaaacgctcaagtccccgattcagccggaacagccacagcctacctctgtggagtgaaggctaacgaaggaacggttggagtttctgccgctactgagcgatcaaggtgcaatacaactcagggcaatgaagtgacttcaattcttagatgggctaaagacgccggtaagtcagtgggcatcgtgactacaactcgagtcaaccatgctacgcctagcgcagcatacgcgcatagcgccgatcgggattggtacagtgataacgaaatgcccccagaagcgctctcgcagggatgtaaggatattgcttatcagctcatgcataatattcgggatatcgacgtgatcatgggagggggacgcaagtacatgtatccaaagaacaagaccgacgttgaatatgagagtgacgagaaagcccgaggcaccaggcttgacgggctggatctggtggatacgtggaagagttttaagcctcgctacaaacatagccacttcatctggaacaggaccgaattacttactctagatccccacaatgtggattatcttctggggctgtttgagcctggcgacatgcaatatgaattgaatcggaataatgtgactgatccatctctgagcgaaatggtggtggtagcaatacagatcctgcgaaagaaccccaaggggttttttctgctggtggaagggggacggattgatcacgggcaccacgagggcaaggccaaacaagcactgcacgaagcagtcgaaatggatcgggcaatcggccaggcaggctccctcacttcatcagaggacaccttgactgtcgtgacagcagaccattcgcacgttttcactttcgggggttatacccctcggggaaacagcattttcgggttggccccaatgctttccgataccgataaaaaaccttttactgctattctctacggcaacggccctggatacaaagtcgtgggtggggaacgtgaaaacgttagcatggtggactacgcgcacaacaattaccaggcccagtccgctgtccccctgagacacgaaactcacggaggggaggacgtcgccgttttctctaaaggacccatggcgcacctccttcatggagtacatgagcaaaattacgtcccacacgttatggcgtatgccgcatgcattggggctaacctggggcattgtgctccagcctctagcgcaggttctttagctgctggaccgttactgttagctctggcactctatccgctctcagtccttttttag

SEQ ID NO: 214083 - DNA, 1608 bp, synthetic construct
  misc_feature 1..1608: note = Description of Artificial Sequence: Synthetic coding sequence
  source 1..1608: mol_type = other DNA
atgctaggcccatgcatgctgctgctgctgctccttctcggcctcaggttacaactaagcctgggtattatacctgtagaagaggagaatcctgacttctggaatcgggaggcggcagaggcattgggcgctgccaagaaattgcagcccgctcaaacagctgccaaaaatctgatcatcttcttaggcgacggcatgggagtctccaccgtcacagcagccagaatcctcaaagggcagaaaaaagataagctgggtcctgaaattcccctggccatggacaggtttccctacgtggctctgtccaagacgtataacgtggataaacacgtgcccgattccggagccaccgccactgcttatctctgtggcgtcaaggggaatttccaaacaattggcctgagtgcagcagcacggtttaaccagtgtaataccactcgaggaaacgaggtaatctccgtcatgaaccgcgctaagaaagctggcaagtcagtgggtgtcgtcaccaccacgagagtgcagcatgcctctcctgctggcacctatgcacacaccgtgaatagaaattggtattccgacgccgatgttcccgcttccgcccgacaagaaggttgtcaggatattgccacacagctgatttctaacatggacatcgatgtcattctggggggaggtaggaagtatatgtttagaatgggcacaccagatccagaataccccgatgactattcacagggcggtaccaggctggacggaaagaacttggtgcaagagtggctcgccaaacgacagggagcaaggtacgtttggaacagaactgaactcatgcaagccagcttggatccatccgtcacacacttaatgggtctatttgagccaggtgacatgaagtacgagatccacagagattccactctcgatcctagtttgatggaaatgactgaagccgctcttcggctgctgagcaggaaccccaggggcttcttcctcttcgtagaaggcggtcggatcgatcatggccatcatgagagccgcgcttaccgggcactcacagagacaataatgttcgacgacgccattgaacgcgctggccagcttacgagcgaggaagataccttaagcctcgtgactgcggaccactcccatgttttcagctttggaggctatcctcttcgcggaagcagtatattcggacttgcgcctgggaaagccagagataggaaggcgtacactgtcctattatacggaaatggacccggatacgtgcttaaagatggcgctcggcctgatgtgacggaaagtgaatcagggagtccagagtacaggcaacagtcggccgtccccctggatgaagagactcacgccggtgaggacgtggcagtatttgccaggggaccacaggcccatttggtgcatggtgtgcaagaacagacttttatcgctcacgtgatggccttcgctgcatgtcttgaaccctacacagcctgcgacctagccccaccggcaggaaccacagacgccgcacacccagggaggtctgtggtgccggcactcctgcccttgctcgctggcactctactcctcttggaaacagcaactgctccatag

SEQ ID NO: 214084 - DNA, 1599 bp, synthetic construct
  misc_feature 1..1599: note = Description of Artificial Sequence: Synthetic coding sequence
  source 1..1599: mol_type = other DNA
atgcaaggaccgtgggtgttgttgttgctggggttgcgtctgcagcttagcctgggcataatacccgtcgaggaagaaaatcctgacttttggaaccgacaggctgccgaggccctgggagctgccaaaaagctgcaaccagcgcaaacagcagcaaagaatctgatcatttttctcggtgacggcatgggtgttagcactgtgactgcagctcgtatcctgaaaggtcagaagaaggacaagcttgggcctgaaacctttctggcaatggacaggtttccctacgtggctttatccaaaacatactccgtggacaagcacgtcccagatagcggagctacagccaccgcttatctctgtggcgtgaaggggaacttccagactattggcttgagtgccgcagccaggttcaaccagtgcaatacgacccggggtaatgaggtcatctctgtcatgaaccgcgctaagaaagccggaaagtccgtcggcgtcgttaccacaacgagggtgcagcacgcatcgccagcaggggcttacgcccacaccgtaaatcgcaattggtattccgacgctgacgtacccgcttcggccagacaggaaggatgtcaggatatcgctacacagttgatctccaacatggacatcgatgtgatactgggtgggggacgaaaatacatgtttcccatgggcaccccagacccagagtacccagacgattattcccagggcggtacaaggctcgacgggaaaaatttggttcaggagtggctggcaaagcaccagggggctcggtacgtgtggaacaggactgaattgcttcaggcttccctcgacccatccgtaacgcacctgatgggactctttgagcctggagatatgaagtacgagattcaccgtgactccactctcgacccgtcactgatggaaatgacagaagctgccttactcttactgagcagaaaccccaggggatttttcctgtttgttgaggggggtagaatcgaccatggtcatcacgagtcacgggcatatcgagcgctgaccgaaactattatgttcgacgatgccattgagagagcaggtcagctcacctctgaagaagacactctctctctggtaactgctgatcattcccatgtgttcagttttggtggctacccccttagagggagcagtattttcggcctggccccaggtaaagcacgtgatcggaaggcctacacggtcttgctatacggcaacggtcccggttacgttttgaaggacggcgctaggcctgacgttacagagtccgagtccgggagcccagagtaccggcagcagagtgcagtgccactcgatggcgagacacatgccggagaagatgtggcggtgtttgccagagggcctcaggcacacttagtccatggcgtgcaggagcagactttcattgcccacgtgatggccttcgctgcttgcctggaaccgtatacagcctgcgatctagcccctagggccggaactactgatgccgctcaccctggcccttctgtcgttcccgcactcctaccactgcttgctggaacgctcctcctgctcggcacagccaccgcaccgtag

SEQ ID NO: 214085 - DNA, 474 bp, synthetic construct
  misc_feature 1..474: note = Description of Artificial Sequence: Synthetic coding sequence
  source 1..474: mol_type = other DNA
atggacaggttcctcgtgaaaggagcccagggcggactcctgcggaaacaagaagagcaagagcccaccggtgaagagcctgccgtcctgggcggagacaaagagagcacccgcaagaggcctcgcagagaggccccaggcaatgggggacactcagcgggacctagctggaggcatatccgtgcggaagggttggactgcagctacacagtgctctttggcaaagccgaggcagatgaaatttttcaggaactggaaaaggaggtggagtacttcacagggatcaaaatggctgttacgaccagtggcagtacagagatgatgaaggagaactggccactcggagctccattgccattgtcaccttccgtgccagcagagacgctgagttccggaatcaggattcctgtgggaaaggcccctcctggtgggtggaggtggagtggctgcagatggcctacaggggcttactag

SEQ ID NO: 214086 - DNA, 2958 bp, synthetic construct
  misc_feature 1..2958: note = Description of Artificial Sequence: Synthetic coding sequence
  source 1..2958: mol_type = other DNA
atgatcaggcatgctggtgccccagctcgaggcgacccaactggccctgtgcccgtcgtgggaaaaggcgaagaggaagaggaagaggatggcatgcgcctttgtctgccggcaaatccaaaaaactgcttaccccataggcgaggcatctccatccttgagaaactgattaagacgtgcccggtgtggctgcaactgagcctgggacaggccgaagtggcgcgtatcctgcatcgagtggtggcaggaatgttcctagtgagacgggatagctcctccaagcaactggtcctctgcgtccactttccttctctgaacgaatcctcagctgaagtgctggaatacactataaaggaagaaaaatccatcctgtacctggagggcagtgctctcgtgttcgaagatatattccgactgatagcgttctactgcgtgagccgtgaccttctgcctttcactctcaggctgccccaggctattcttgaagcctctagctttactgatctggagactattgcaaacctcggccttgggttttgggactcttctctcaacccgccacaggaacgaggcaaacctgcagagcctccaagagatagagctcccggattccctttggtttccagcttgaggcccaccgcacatgatgccaactgcgcgtgcgagatagaactgtccgttggtaacgatagactgtggttcgtgaatccgatctttattgaggactgcagctccgccctccccacagaccagccccctctgggcaattgcccagccaggcctctcccccctacaagcgacgccacctctccgacctcgcggtgggcccctaggcgccctccaccgccaccacccgtgctaccgctccagccatgctcccctgcccagcccccagtccttcccgctcttgcccctgcacccgcatgtccgctgcctacaagtcccccagttcctgctccccacgttaccccacatgcccctgggcctcctgaccaccccaatcagcccccaatgatgacgtgtgaacgcctaccctgccctactgccggactcggacccttacgcgaggaggctatgaaaccaggcgcagcctccagtcctctgcaacaagtgcccgctccgcctcttcctgcgaaaaaaaacctgccaaccgcgcctccccgaaggcgggtgagcgagcgggtgtctctcgaggaccagtcccccggtatggcggcagagggcgatcagctgtctctgccaccccagggaacctctgacggcccagaggatacacctagagagtccacagagcagggtcaggacaccgaagttaaagccagcgatccccacagtatgccggagcttcctcgaacggcgaagcaaccccctgtcccaccgcctcggaaaaagcgaatctcaaggcagctcgcaagtacacttccagctccgctcgagaacgccgagttgtgtactcaggctatggctctggagaccccaacccctggcccacccagggaagggcagagccccgcttcgcaggccggaacccagcatccgcctgcgcaggcaactgcccattcccagtcttcacctgagttcaaaggctctctagcttctttgtctgattcactcggggttagcgtgatggcaactgaccaggattcttattctacctcctctactgaggaggagctggagcaattttcgagcccctctgtgaaaaagaagccaagcatgatcctgggtaaagccaggcaccgtttatccttcgccagtttcagctctatgttccatgctttcctgagcaacaatcggaagctctacaagaaggtggtcgaactggcccaagacaagggatcttattttgggtctttggtgcaggattacaaggtctatagcttggagatgatggcacggcaaacgtccagcaccgagatgctgcaagagatcagaactatgatgacacagctcaagtcatatcttctccagagcacagagctcaaagctctagtcgaccctgctttgcactccgaagaggagttagaagccatagttgagtccgcgctgtataagtgtgtactgaaaccactcaaggaagccatcaattcttgtcttcaccagattcattctaaggacggaagcctacagcaactgaaggaaaatcagctggttatcttggctacaacaaccacggatctaggggtgactaccagtgtccccgaggttcccatgatggagaagattttgcagaaatttacttctatgcacaaagcctactccccagagaagaagattagcatcttgctaaaaacatgcaagcttatctatgatagcatggcattagggaatcccggaaagccgtacggagccgacgatttcctgcctgtgcttatgtacgtgctcgccaggtccaacctgacagaaatgctccttaatgtcgagtacatgatggaactcatggatcccgctctccaactcggcgagggctcttactacctcacaaccacctacggcgctttggagcacattaagagttatgataaaattacagttactaggcagttgtctgttgaggtgcaagacagtatacatagatgggagcgcagacgcaccctgaataaagcacgcgcaagccgttcctctgttcaggattttatctgcgtgagctatctcgagcccgagcagcaggccagaactctggcctctcgcgctgatactcaggcccaggcattgtgcgctcagtgcgccgaaaagttcgcagtcgagagaccccaggctcacaggctgttcgtcctagtggatggtaggtgcttccaactggccgacgacgccttacctcactgcattaaaggctacctgctccgtagcgagccgaagagggactttcacttcgtgtataggccgcttgacgggggagggggagggggtgggggttcaccgccttgtcttgtagttcgcgagcccaacttcttatag

SEQ ID NO: 214087 - DNA, 786 bp, synthetic construct
  misc_feature 1..786: note = Description of Artificial Sequence: Synthetic coding sequence
  source 1..786: mol_type = other DNA
atggaccggtttctcgtaaagggtgctcagggtgggcttctgaggaagcaggaggaacaggaacctacgggtgaagaaccggctgtccttggaggcgataaagagtcaacgcgtaagaggccacgaagagaggcacccggtaacggaggtcacagtgccggtccttcttggagacatatcagggcagaaggcctcgattgctcatacactgtcctcttcgggaaggccgaggccgacgagatatttcaagaactagagaaagaggtggagtacttcaccggggctctagccagagtgcaagtctttggaaaatggcattcagtgcctaggaaacaggctacctacggagatgctggcctcacctacaccttcagtgggctgacactgtcacctaagccttggattcctgtgctcgagcgaatccgagatcacgtgtcaggcgtcacagggcagacttttaactttgtcctcatcaatagatataaagacggttgcgaccatattggcgaacaccgcgacgacgagcgcgagctggcaccagggagccctattgcctccgtttcattcggcgcatgccgcgatttcgtctttcgccacaaggattctagagggaagagcccctcccgcagagtggctgtggttcgcctaccactggcacatggctctctgttaatgatgaaccaccccactaacacacattggtaccactcactgcccgtccgaaaaaaggtattagcacccagagtaaacctgacatttcgaaaaattcttttaaccaagaaatag

SEQ ID NO: 214088 - DNA, 786 bp, synthetic construct
  misc_feature 1..786: note = Description of Artificial Sequence: Synthetic coding sequence
  source 1..786: mol_type = other DNA
atggacagattcctggtgaagggagcccaaggtggcctgttgagaaagcaggaggagcaggaaccaacgggcgaagagcccgctgttcttggaggagacaaagagtccacccgcaagagaccgaggagagaggcacctggtaatggcggacactctgccggaccatcatggaggcacatccgcgctgaaggattggattgttcatataccgtattattcggaaaagcagaagcagacgagatcttccaggaactggagaaagaagtcgagtattttacaggcgcactggccagggtgcaagtatttggtaagtggcactcagttccgagaaagcaagctacctacggggatgcaggccttacatacaccttctcgggactcactctctccccaaaaccctggattcctgttctggaacggatccgcgaccatgtctctggtgtgaccggccagacctttaatttcgttctgataaacagatataaggacggctgtgatcatatcggcgagcatagagacgacgaacgcgagctggctcccggaagccccatcgcctctgtctcatttggagcttgccgcgactttgtttttcgccataaggactcacgaggtaagtctccaagtcggcgagtcgccgtggtgcgtctgccactggcccatgggagcctgctgatgatgaatcatcccacgaacacccattggtaccactccctccccgtcagaaaaaaggtcctggctcccagagtcaatttaacattcagaaagatcctgctgaccaaaaagtag

SEQ ID NO: 214089 - DNA, 786 bp, synthetic construct
  misc_feature 1..786: note = Description of Artificial Sequence: Synthetic coding sequence
  source 1..786: mol_type = other DNA
atggaccgctttctcgtcaaaggcgctcagggaggtttgttgagaaaacaggaagaacaggagcccacgggtgaagagccggcagtgttagggggagacaaggaaagcacacgcaagcgccctcgaagggaggcaccgggtaatggcggacattccgcgggacctagctggagacatattcgggcagaggggttagactgctcctacacagtgctgttcgggaaagcagaggcggatgagatcttccaggaactcgagaaggaagtcgaatatttcacgggcgctcttgcccgagtccaggtgtttggtaagtggcatagcgtgcctcgcaaacaagccacttatggggatgccggtctcacctacaccttcagtggccttactttaagtccaaaaccttggatccccgtgcttgagcggatccgggaccacgtgtcaggcgtcacgggccagaccttcaactttgtattaatcaatcggtataaagacgggtgcgaccatattggtgagcatagagacgatgaaagagagctggctcctggttctcccatcgcgagtgtgtcttttggggcatgtcgcgactttgtctttcgccacaaggacagccgtggtaagtccccaagccgaagagtggctgtggtgcgcctccccctcgctcatgggtcgctcctgatgatgaaccatccaacgaatacacattggtatcactctctcccagtgcgcaagaaagtgctcgctccgagggttaatcttacctttagaaaaattctactgaccaagaaatag

SEQ ID NO: 214090 - DNA, 453 bp, synthetic construct
  misc_feature 1..453: note = Description of Artificial Sequence: Synthetic coding sequence
  source 1..453: mol_type = other DNA
atggatagattcctggtgaaaggagctcagggaggactcctgcggaagcaggaggagcaagagccaaccggagaggagcccgctgtgctgggaggcgacaaggagtccactaggaaaagaccacgtagggaagccccaggaaacggtggacacagcgccggtccaagctggcgacatattcgggctgaaggcctggattgttcttataccgtcctcttcggtaaggcggaggctgacgagatttttcaagagctagagaaggaagtggagtatttcacaggcgctttagccagagtgcaagtgtttggtaagtggcactcagtccctagaaagcaggccacctacggagacgcaggtctgacctacaccttcagtgggctgacactgtctccaaagccgtggatacctgttctcgaacggattagggatcatgtcagcggcgtgaccggatag

SEQ ID NO: 214091 - DNA, 366 bp, synthetic construct
  misc_feature 1..366: note = Description of Artificial Sequence: Synthetic coding sequence
  source 1..366: mol_type = other DNA
atggacaggttcctggtgaaaggggctcagggcggactcttaagaaagcaggaagagcaggagcctaccggggaggaacccgcagtgctgggaggcgataaggagagcactcgaaaaaggccaaggcgcgaagccccaggcaacggcggtcactccgccggtcctagctggaggcacattagagctgagggattagattgctcgtataccgtgctctttgggaaagcagaagcagacgagatcttccaagagctggagaaagaagtcgaatactttacaggggcactcgctcgagtgcaggtgtttggtaagtggcattccgtcccaagaaaacaggcaacttacggtgacgccggtctcacctag

SEQ ID NO: 214092 - DNA, 483 bp, synthetic construct
  misc_feature 1..483: note = Description of Artificial Sequence: Synthetic coding sequence
  source 1..483: mol_type = other DNA
atggatcggttcctggtgaagggggcacaaggaggccttctaagaaagcaggaagagcaagagccgacgggggaagaacccgctgttcttgggggagataaggagagtactcgcaagcgcccacggagagaggcccctggtaatggaggacacagtgcaggtccttcctggcgacatatccgtgctgagggattggactgcagttacactgttctgttcggaaaggcagaagccgacgagatcttccaggagctcgaaaaagaagtggaatacttcaccggcgcactggctcgtgtacaagtgtttggtaaatggcactcagtgcctcgaaagcaggcaacatatggtgatgcaggcctgacctatacgttctctggtttaacactttctcccaagccatggattcccgtccttgagcgcattcgcgatcacgtttcgggggttactggccagacctttaacttcgttctgatcaataggtag

SEQ ID NO: 214093 - DNA, 861 bp, synthetic construct
  misc_feature 1..861: note = Description of Artificial Sequence: Synthetic coding sequence
  source 1..861: mol_type = other DNA
atggaagaaaagcggagacgagccagggtccagggtgcctgggcagctcccgtcaaaagtcaggcgatcgcccagccagcgaccaccgcaaagagccatttgcaccagaaacccggtcagacatggaagaacaaagaacatcatttgagcgaccgggaattcgtcttcaaggagcctcagcaggtggtgcggagggctccggagccgagagtgattgatagggagggagtgtacgaaatttcattgagccctacgggggtatcacgcgtatgtttataccccggttttgtggatgtcaaagaggctgactggatcctcgagcaactctgccaggacgtgccctggaaacagcggacgggaatccgcgaagacatcacttaccagcagcctaggctcactgcttggtacggagaattaccatatacttattccagaattaccatggagccgaatccccattggcatcctgtcctccggactctgaagaataggattgaagagaatactggccataccttcaactctttactgtgcaacctgtaccgaaatgaaaaagattctgtagactggcacagtgatgacgaaccctccctcggacggtgccctataattgccagcctgtccttcggggcaacgcggacatttgaaatgcgtaagaagccaccaccagaagagaatggggattatacctatgtggaacgagtgaaaatccccttagatcacggcaccctgcttataatggaaggcgcaacccaggcggattggcagcaccgcgtgcccaaagagtaccattcacgcgaaccgagagttaatcttacattccgtaccgtgtatccagaccccagaggcgctccatggtag

SEQ ID NO: 214094 - DNA, 513 bp, synthetic construct
  misc_feature 1..513: note = Description of Artificial Sequence: Synthetic coding sequence
  source 1..513: mol_type = other DNA
atggaagaaaagcggaggcgcgcaagagtgcagggagcatgggcagctcccgtcaagtcccaggctatagcccagcctgccactacggccaagtctcacttacaccagaagcctgggcagacctggaaaaataaggagcatcaccttagtgacagagagttcgtttttaaggagccgcagcaggtggtgcgccgagccccagagccaagggtgatagaagagggggtttacgagatcagcctgagcccgactggggtgtcaagagtttgtctctaccctgggtttgtggacgtaaaggaagccgattggatattggagcagctgtgtcaggatgtgccttggaagcaacggaccggcatcagggaggactcaatcctgcaattgacatttaagaaatccgccccagtctctggaactgctaccgcccctcagtcctgctggtacgaacgaccgtccccccctcacattcccggtccagcaatcttgactcgcaccagactgtgggcaccttag

SEQ ID NO: 214095 - DNA, 183 bp, synthetic construct
  misc_feature 1..183: note = Description of Artificial Sequence: Synthetic coding sequence
  source 1..183: mol_type = other DNA
atggaggagaaacggagaagggctcgcgtacagggggcatgggcagctcccgtcaaatcccaggcgatcgctcaacctgcaaccacggccaagtcccacctgcatcagaagccaggccagacgtggaaaaacaaggaacatcacctgagcgatcgcgaatttgtcttcaaggagccacagtag

SEQ ID NO: 214096 - DNA, 909 bp, synthetic construct
  misc_feature 1..909: note = Description of Artificial Sequence: Synthetic coding sequence
  source 1..909: mol_type = other DNA
atggccgctgccgcagccgaaacgccagaagtcctccgcgagtgcgggtgcaaagggatcaggacctgtttaatttgcgagcgccaaagaggctccgatccaccttgggagctgccccctgcaaaaacgtacaggttcatttactgctctgatacaggctgggccgtgggaacagaggagtcagatttcgaaggctgggcgttcccgttcccaggcgtcatgttgatcgaggactttgttacacgggaggaagaagccgagttggtacggctcatggaccgtgatccatggaagctgtcccaaagcggcagacggaagcaggattatggccctaaagtgaattttcgcaagcagaaactgaaaactgagggcttttgcggactgccttcctttagcagagaggtggtccggagaatggggctttaccccggactcgagggtttcagaccagtggaacagtgcaatctcgactattgccctgaacgagggtcagctattgatccccatttagatgacgcgtggctgtggggagagcggctcgtaagcctgaatttactgtcacctacagtccttagtatgtgtcgggaggctcccggtagtctcttgctgtgctctgcccctagtgctgctccagaagcattagtggattcagtgatagcgcctagccgaagcgtgttgtgccaggaggtggaggtcgccattcccctacccgctagaagtctgcttgtcctgacaggagccgctcgacaccaatggaaacacgccatacaccggagacacattgaagctaggagggtgtgcgtcacttttagagaactgagcgccgaattcggcccaggcggaagacagcaggagctggggcaggagcttcttaggatagcactttcctttcagggcaggccggtgtag

SEQ ID NO: 214097 - DNA, 1377 bp, synthetic construct
  misc_feature 1..1377: note = Description of Artificial Sequence: Synthetic coding sequence
  source 1..1377: mol_type = other DNA
atggcagccgcttccggatatactgatcttagggaaaaactgaagtccatgacttctagagataattacaaagctggcagccgagaagctgctgcagcggctgccgcagccgtggcagctgctgccgctgcagcggctgcagccgagccttacccagtttccggggctaaacggaaataccaagaagacagcgatccagagcggagcgactacgaggagcagcagctgcagaaggaggaagaagccagaaaagtgaaatcagggatccggcagatgcgactcttctcccaggacgagtgcgctaagattgaggctcgaatcgacgaagtagtctctagggctgaaaagggactgtacaacgaacatacagtggatagagcacccttaagaaacaagtacttcttcggggaaggttatacctacggcgcacaactgcagaagcgcggacccggtcaggagcgactctaccccccaggcgacgtggatgagattccagagtgggttcaccagcttgtgattcagaagctggtggagcatagagtgatccccgaggggttcgtgaatagcgccgtgatcaacgactatcagccaggtggatgtatcgtgagccacgtcgaccccattcatatattcgagaggccaatcgtgtccgtaagtttcttttcagactccgctctgtgcttcggctgcaagtttcaatttaaaccgatccgcgtgagcgagcctgtcttatcgctacccgtgcgacgcggatctgttaccgtgctgtctgggtatgcggctgacgaaatcacccactgcatccgcccacaggacattaaggagagaagggcagtgatcattctgcgcaaaacccgtctggatgccccacggctggaaaccaaatcgttgagtagtagtgtgttgcctccatcgtatgcgtctgatcgcctgagcggaaataacagggatccagctctgaagccaaagcgctcccataggaaagcggaccccgacgctgcacataggccacgcattctcgaaatggataaggaagagaaccggagatccgttctgctgcctacacaccgaaggcgtgggagtttcagtagtgagaactattggcgcaagtcatatgaaagctctgaagattgttcagaagcagcgggatctccgggaaactctggctctagcttgagaagctgtcctagtttctgtttcgaaggatttgtgttcgtgcactggggggtgtttgtgttctgcttcttgttttttctgatactttacatctttccctggttctgctgccttttgggcttgaagaataggataggtcaggatctcggcagccatatcctaggtattccacctggatggaaagggtgttggcaccaatag

SEQ ID NO: 214098 - DNA, 1185 bp, synthetic construct
  misc_feature 1..1185: note = Description of Artificial Sequence: Synthetic coding sequence
  source 1..1185: mol_type = other DNA
atggccgcagcttcgggctatacggacctccgggaaaagctcaagtccatgacatcacgagataattataaagccggaagcagggaagcggcagctgccgctgccgcagcagttgccgctgccgctgcagcagcggcagctgcagaaccctacccggtgagtggcgctaagcgcaagtaccaggaggactctgaccccgagaggagcgactatgaggagcagcagctccagaaggaagaggaggctcgaaaggttaaatcaggtattagacagatgcgtttgttctcgcaggatgaatgcgccaagattgaggccagaattgacgaggtggtgagccgggctgaaaaaggcctgtataacgagcatacagtcgaccgggcacctttgaggaataaatatttcttcggagaagggtacacttacggggcacagctacagaagcgagggccaggacaggagagactttaccccccaggtgacgtggatgagatccctgaatgggtccatcaattagttatccagaaactggtcgaacaccgggtgatcccagagggctttgtaaacagcgccgtcatcaatgactatcagccagggggatgtatcgtctcacatgtagacccgatccacatctttgaaagaccaatagtgtccgttagtttctttagcgactccgcactatgttttggctgcaagttccagtttaaaccaattcgcgtgtccgagccagtactgagcctgccggtgaggaggggtagcgtgactgttctgtcgggttacgcagccgatgaaatcacccactgtatacgacctcaggatattaaggaacgccgtgccgtgataattttacgcaagactcggctcgacgcaccaagactggaaactaagagcctgtccagttctgtgctgcccccatcctatgcttcagacagattaagcgggaataatcgggaccccgctctcaaacctaaacggtcgcaccgaaaggcagatcccgatgctgcccatcggccacggatcctcgaaatggataaggaggagaataggcggtcagttctgcttcctacccatcgcagaagagggtcttttagttccgagaactattggcgcaagtcatatgagagctcagaggattgtagcgaggcggctggttcgcccgctcgcaaagtcaaaatgagacgacactag

SEQ ID NO: 214099 - DNA, 1152 bp, synthetic construct
  misc_feature 1..1152: note = Description of Artificial Sequence: Synthetic coding sequence
  source 1..1152: mol_type = other DNA
atgcgacgctgtcggagaccgtgccccgcaggcagaggggagggtggtggcggacgctcccccgcagccgctgctgcagtagcggctgccgcagcagctgcagcggcagcagaaccataccccgtgtccggggcaaagcgtaagtaccaagaagatagcgatcctgaaagatccgactatgaagaacaacaactgcaaaaagaggaggaagctcggaaggtcaagtccggcatcagacaaatgcgcctcttttcccaagacgagtgcgcgaagatcgaggcacggattgacgaggtggtgtcgcgcgctgagaagggcctctataacgagcatacagttgaccgtgctcctctgcgcaacaaatacttctttggcgaaggctatacctacggggctcagcttcaaaagcgtgggccaggtcaagagaggctgtaccctcctggtgatgtggacgagattcccgagtgggttcatcagctggtaattcagaagctggtggaacacagagtaatccccgagggattcgtaaactctgcagtgatcaatgattatcagccagggggatgtatcgtgagccacgtagatcccattcacatctttgagcgtcctattgtttctgtctccttcttctccgactcagccctttgctttggctgcaagtttcagtttaagccaatccgtgtctctgagccagtgttaagcttacccgtacggagaggatcagtgaccgtgctatccggctacgcagctgacgaaatcacccactgcattcggcctcaagacatcaaagagcgaagggcagttatcattctgcgcaaaacgcggttggacgccccacgcctcgaaacgaaatcattgtcaagctcagtccttccaccctcatacgcctccgatagattaagcggaaataatagggaccccgctctgaagcccaaacggtctcatcggaaagctgacccagacgccgctcatcgccctcggatcttagagatggacaaagaggagaacagaaggtcagtcctgctcccaacccaccggaggcggggaagtttttcctccgagaattattggcggaaatcttatgaatcgtccgaggattgcagtgaagctgctggatcaccggcacgaaaggtgaagatgagaagacactag

SEQ ID NO: 214100 - DNA, 717 bp, synthetic construct
  misc_feature 1..717: note = Description of Artificial Sequence: Synthetic coding sequence
  source 1..717: mol_type = other DNA
atggaggagcaggatgccagggtgcccgcattggaacctttccgagtagaacaggcacctcctgtgatctactatgtgcccgactttattagcaaagaggaagaggagtacctcttgcgacaggtgtttaatgcacccaagcctaagtggacccaactttctggcaggaaactgcagaactggggagggctgccacatcctagggggatggtccctgagcgacttcccccttggctccaacgatatgttgataaggtttcaaatctgagtctgtttggaggattgccagcaaaccatgtgctggtgaatcagtacctacctggggagggcatcatgccgcatgaagatggacccttatactatcctacagtttctacaattagtttggggtctcacaccgttctggatttttacgagccccgtcggccagaagatgatgaccctaccgagcagccgagacccccacctcggcctacaacctcacttctccttgaaccccgttctctcttggttctgcgaggcccagcttacacaagactgttgcacgggatcgcagcggcacgggtggacgcactcgatgccgcttcttcccctccaaacgcggctgcctgccctagcgctagaccaggagcatgccttgtgagggggacacgcgtctccctgaccatacggcgagtcccacgcgttctgagagccggtctgctgctggggaagtag

SEQ ID NO: 214101 - DNA, 801 bp, synthetic construct
  misc_feature 1..801: note = Description of Artificial Sequence: Synthetic coding sequence
  source 1..801: mol_type = other DNA
atggccggaagagggatgggaatgctaaacttggagattggaggcgatgcaggagggaggattggctgcaaagaactcgtgctgatggaggagcaggatgctcgagtgcctgccctggagccattccgggttgagcaagcccctccagttatctactacgtccccgactttatcagcaaggaggaggaagagtatttgttgcgacaggtctttaacgctccaaagcccaagtggactcaactcagcggtagaaagctgcaaaactgggggggtctcccacacccacgaggaatggtgccagaacgacttcctccatggctccagcgctatgtggataaagtgagtaacttatcgctgtttggcggtctgccggctaaccatgtcctcgtgaatcaatatctgcctggtgaggggatcatgcctcacgaagacggccctctttactaccccaccgtgtcaacaatatcactgggttcacatacagtgctcgatttctatgaacccagaaggcccgaagatgacgatccgacagagcagcctagacctcctccaagacccactactagcttactacttgagccgaggtcgctcctcgtactgcggggtcccgcatatacaagactgctgcatgggattgcagctgccagagtggatgccctagatgcagcgagctctcccccaaacgccgcagcttgtccatctgctcgccctggggcttgtctggtccgcggaacgcgagtgtccctgacaataagaagggtaccccgtgtcctacgagccggacttctgttggggaagtag

SEQ ID NO: 214102 - DNA, 717 bp, synthetic construct
  misc_feature 1..717: note = Description of Artificial Sequence: Synthetic coding sequence
  source 1..717: mol_type = other DNA
atggaagaacaggatgctagagtgcccgcactggaaccctttcgtgtggaacaggccccacctgtgatatattacgtgcccgatttcatctcgaaagaggaagaagaatatttgcttcggcaagtctttaacgccccaaagccaaaatggacgcagcttagcgggagaaaattgcagaactggggagggctccctcaccccagaggtatggtgcctgagagacttcccccttggcttcagcgatatgtagataaggtttcaaacttgtcacttttcgggggattacctgctaaccatgtgctcgtaaatcagtacctgcccggagagggtatcatgccacatgaagatggtcctctatattacccaactgtatccacaatctccctgggcagccacacggttctggacttctatgaacctcgcaggcctgaagacgacgaccccacggagcagcctcgacctcccccaagaccgacaacaagcctgctcctggaacctagatccctcttggtgttgagaggtccagcctacaccagattgttgcacgggattgctgccgctcgggtggacgctctggatgccgcttctagcccccctaacgccgctgcgtgccctagcgccaggccaggcgcttgtcttgtgcgcggtactcgcgtatctctcacgatccgaagagtacctagagttcttagggctggcctgttgctcggaaagtag

SEQ ID NO: 214103 - DNA, 666 bp, synthetic construct
  misc_feature 1..666: note = Description of Artificial Sequence: Synthetic coding sequence
  source 1..666: mol_type = other DNA
atggctggcactggattgctcgcactgcgcactctgccaggtccatcttgggtgagagggagcggaccgtctgtattgtctcgtcttcaggacgctgccgtggttcgcccaggcttcctgtcgaccgccgaagaggaaaccttatcgcgcgaacttgaacctgagctccgcagacgaagatatgaatatgaccattgggacgccgcaatacatggctttagggaaacggaaaagtcccggtggagtgaggcctccagggctatactccagagagtgcaggctgccgctttcggccctggacagaccttgctctctagcgtgcatgtcctggatctagaggcaaggggatacataaaaccccacgtggatagtatcaaattctgcggagctaccatagcaggactgagtctgctctcacccagtgtgatgcgccttgtgcatacgcaggaacccggagagtggctggaattgctgttagaacctggctctttatatattctacgaggtagcgccaggtacgacttctcccacgaaatcctcagagacgaggagtccttctttggggagcgcaggattcccaggggccgtcgtatctcggtgatctgtaggagtctccctgaaggcatgggaccaggggaaagcggccagccgcctcctgcatgctag

SEQ ID NO: 214104 - DNA, 1995 bp, synthetic construct
  misc_feature 1..1995: note = Description of Artificial Sequence: Synthetic coding sequence
  source 1..1995: mol_type = other DNA
atggatagcaatcatcagagcaattataagctgtcgaaaacggaaaagaagttcctgagaaagcagatcaaggccaagcacaccctgctgagacacgaggggattgaaacagtgtcttatgcgactcagagcttagtggtggctaacggtggcttaggcaatggggtgagcaggaatcagctgctgcccgtgctcgagaaatgcggcctcgtggatgcactcttgatgccacccaataaaccttactctttcgcacggtaccgaacaactgaagaatcaaaacgcgcatacgtcacactgaatggcaaagaggtcgttgatgatttgggacagaagataactttgtacctgaattttgtggaaaaagtgcagtggaaagagttacgaccacaggcactgccgccaggtctgatggtggtggaggagatcatctcatccgaggaagagaaaatgctcctcgaatccgtggattggacagaagatactgataaccagaacagccagaagagcctgaagcaccgcagggtgaaacattttggctatgagtttcattatgagaataataacgtggataaagacaagccactttccggaggcctgcctgacatctgtgaatcatttctggagaagtggctgcgcaaaggttatattaaacacaagcctgatcagatgaccattaatcagtacgagcctggccagggcatccctgctcatatagatacacacagtgcattcgaggacgagattgtgagcctgtcactgggatccgaaattgtcatggatttcaaacatcccgatggcattgctgttcctgtcatgctccccagacggtctctactggttatgacaggcgagagtcggtatctgtggacgcacggaatcacttgtcgaaagttcgatacagtacaagccagcgagagcttgaagtcaggcataattacaagcgacgttggcgacctcacactgtccaaaaggggactgagaacctcatttaccttccggaaagtaagacagactccttgcaactgctcttatccactggtctgtgattcccagcggaaggaaacaccacctagtttccctgagtccgataaagaggctagccggctcgagcaggagtatgtccatcaggtgtatgaagagatcgcgggtcatttttcctctacacgtcatacaccatggcctcatattgtggagttcctcaaggcactcccgtccggatctatagtggcagatataggttgcggcaatggcaagtacctgggcatcaataaggaactgtacatgattggttgtgacagatcccagaacctggtggacatttgtagagagaggcagttccaagccttcgtctgtgatgcattggctgtcccagtgcgcagcggttcctgtgacgcatgcatctcgatcgcggtgatccatcacttcgccacggctgaacgccgagttgcggctttgcaagagattgtaagactactgcgtcccggaggcaaggctctgatctacgtgtgggcaatggaacaggaatataacaaacagaagtccaaatacctccgaggaaatcgaaacagccaaggtaagaaagaagaaatgaacagcgacacctctgtgcaaagatccctcgtagagcaaatgagagatatgggtagtcgggactccgctagctccgtccctcggatcaatgactctcaggaggggggatgcaacagtcgacaggtcagcaactcaaaactgcccgtgcatgtgaatcggacttccttttatagtcaggatgttctggtcccttggcacctcaaggggaacccagacaagggaaagcccgttgagccattcggtcccattggatcccaagatcctagcccggttttccaccggtattatcatgtcttccgggagggtgaactggagggagcttgtagaaccgtctccgatgtccgtatcctgcagagttattacgaccaggggaactggtgtgtgatcctgcaaaaggcttag

SEQ ID NO: 214105 - DNA, 2004 bp, synthetic construct
  misc_feature 1..2004: note = Description of Artificial Sequence: Synthetic coding sequence
  source 1..2004: mol_type = other DNA
atgtttgccatggattccaaccatcagagcaactacaagctaagcaagacagaaaaaaagtttctgaggaagcagattaaagccaagcacacattgctaaggcacgaagggatcgagaccgtctcctatgcgacgcaatccctcgttgtcgctaacggcggactcggtaatggagtttcgcgcaaccaactgctacccgttctggagaagtgcggcttggtagacgcgctgctaatgccaccgaacaagccctactccttcgcacggtaccgaacaaccgaggaaagcaagcgagcatacgtcactctgaatggcaaagaggtggtggatgacttaggacagaaaatcacactgtatctgaactttgtcgagaaggttcagtggaaagaacttcgtccccaggcgctccctcctggactcatggtggttgaggagatcatttcctcagaagaagaaaagatgctgctggaatctgtggattggacggaagacaccgacaaccagaatagccagaagtcgttgaaacaccgcagagtcaaacatttcggttacgaattccactatgagaataataatgtcgataaggacaagccactctctgggggtcttccagacatatgcgagtcctttctggagaagtggctcaggaagggatacattaagcacaagcccgaccagatgactatcaatcaatacgaacctgggcaagggatccccgctcacattgatactcattcagcattcgaggacgagattgtatctctctctctcgggtccgaaattgtgatggattttaagcacccagacggaatcgccgttccagtgatgttgccacggagaagcttgctggttatgacaggagagtctcggtacctgtggacccacggtatcacctgccggaagttcgacaccgtgcaggcctcggagtctttaaagtcaggaatcatcacaagtgacgtaggggacctcaccctttccaaacgcggactccggacaagtttcacctttaggaaagtccgacagaccccttgtaattgcagctatcccctggtgtgtgactcacagagaaaagagactcctcccagttttcctgaatccgataaggaggcctctcggctggaacaggagtacgtgcaccaggtgtacgaagaaatcgcaggtcatttcagcagcacacggcacacaccttggcctcacattgtcgaatttctgaaggcgctcccttcaggctcaatcgtcgcagacattggatgcgggaacggcaagtacctgggcataaataaagaattgtacatgattggctgtgatcggagtcaaaatctggtggacatttgcagagagaggcagttccaagctttcgtgtgcgacgctctcgcggtccctgtgagatccggctcgtgtgacgcatgcatttccattgccgtgattcatcactttgcaacggccgaacggagggtggcggctctgcaggagatcgttcgcctcctgagaccaggcggaaaagccctgatttatgtgtgggccatggagcaggagtacaacaaacaaaagtcaaagtatctgagaggtaaccgaaattctcagggaaagaaggaggaaatgaattccgacactagcgtgcagcgctctctcgtggagcagatgcgggacatgggatcaagggattcagcctccagcgttccaaggatcaatgacagccaggaagggggttgcaattcccggcaggtgtctaattcaaaacttcccgttcatgttaaccgcaccagcttctatagccaggacgtgcttgtgccctggcacctgaaagggaatcccgataagggaaaaccggtcgaacccttcggcccaataggctctcaagacccctcgcccgtgtttcataggtattaccacgtgttccgagagggtgaattagagggggcttgccgcaccgtgtcagacgttagaatactgcaatcgtactacgatcagggcaactggtgcgtcatacttcagaaggcatag

SEQ ID NO: 214106 - DNA, 1995 bp, synthetic construct
  misc_feature 1..1995: note = Description of Artificial Sequence: Synthetic coding sequence
  source 1..1995: mol_type = other DNA
atggactctaatcatcaaagtaactacaagctgagcaaaacagaaaagaagttcctaagaaaacagatcaaggccaagcataccctcttgcgtcatgagggtatcgagaccgtctcatacgctactcaaagcctggtggtcgccaacgggggactgggcaacggcgtttcacgtaatcaactgctaccagttctggaaaaatgcggcctcgttgacgctttgctgatgccacctaacaaaccctattccttcgctagatatcgtacaacagaggagtccaaacgggcttatgtcacgctgaatggtaaagaagtggttgatgatctgggtcagaaaattactctgtacctgaattttgtcgaaaaagtccagtggaaggaactcagacctcaggcccttccccctggactgatggttgtggaagaaattatcagctccgaagaggaaaaaatgctgctggaatcagtagactggaccgaggatacagataaccagaactcgcagaagtcactgaagcaccgcagagtaaaacacttcgggtacgaatttcactatgaaaacaataacgtagacaaagacaaaccgttgagcggtggactgccagatatttgcgagtcttttctggaaaagtggctgcggaaggggtatattaaacacaagccggaccagatgacaattaaccagtatgagccagggcagggcattcccgctcatatcgatacccatagcgctttcgaagacgaaatagtttccctgtctcttgggagcgagattgtcatggactttaaacatccagacggtattgcagtcccagtaatgctgccaagacgctcactgctcgttatgactggggagagtagatacctgtggactcatggtatcacatgcaggaaattcgacacagtgcaggcgtccgagtcactgaaatccgggatcattaccagcgatgtcggtgatcttaccctgagtaagcgaggactgcggacctctttcacttttcgaaaagtgagacagaccccgtgcaattgttcgtaccctctcgtctgcgattcccagcgaaaggaaacccctccctcatttcctgaaagcgacaaggaggcgagtaggttggagcaagaatacgtccaccaggtgtatgaggagatagcaggtcacttttctagcacccggcacacgccctggcctcacattgttgaattcctgaaagccctgccatctgggagtatcgtggccgatattggctgtggcaatggcaaatacctgggtatcaataaggaactgtacatgatcggctgcgatcgcagccaaaatctggtggatatttgtagggaaaggcagtttcaggcttttgtgtgcgatgctctggcagtgcctgtcaggtccggatcttgcgatgcttgtatttcgatcgctgtgattcaccattttgctacagctgagcggagggtagcagctctgcaagaaatcgttaggctactccggcctgggggaaaggcactgatttacgtatgggctatggagcaagagtataataaacaaaaaagcaaatacctccggggtaatcgcaactctcagggcaaaaaagaggagatgaattcagacaccagtgtgcaacggagcctggtggaacaaatgagggacatggggagccgggattcagcttcttccgtccctagaatcaacgactctcaggagggaggctgtaatagtagacaggtatcaaactccaaactacctgtacatgttaatagaacgtcattctattcccaggatgtgttggtcccttggcaccttaaaggcaatcccgacaaaggaaaaccagtcgaacctttcggccctatcggctcacaggatccaagtcctgtcttccataggtattaccacgtctttcgggaaggcgagctggagggcgcttgtaggaccgttagtgatgtgagaattctgcagagctactacgaccagggtaactggtgtgtgattctccaaaaggcctag

SEQ ID NO: 214107 - DNA, 675 bp, synthetic construct
  misc_feature 1..675: note = Description of Artificial Sequence: Synthetic coding sequence
  source 1..675: mol_type = other DNA
atggatagcaatcatcaatctaactacaaactgagcaagacggagaagaaatttctgcgaaagcagattaaggccaaacatactctccttcggcacgagggcatcgaaactgtgagctatgcaactcagtccctggtggtcgccaatgggggacttggcaacggggtaagcagaaatcagctccttcccgtgctggagaagtgcgggctggtggatgctttacttatgcctcctaacaagccttattcgtttgccaggtaccgcactactgaggaatctaaacgggcatacgttacccttaatggcaaagaagtggtggacgatctgggacaaaaaatcaccctgtatctgaattttgtggaaaaggtccagtggaaggagttacgccctcaggccctgcctcccggactgatggtcgtggaagagattatttccagtgaggaagaaaagatgctgctggagagtgtcgattggacggaagacaccgataaccaaaactcacaaaagtcactgaaacatagacgcgtgaagcacttcggttatgagtttcattacgaaaacaacaacgttgataaggacaagccgctgtccgggggtttgcccgacatttgcgagtctttcttggaaaagtggctcaggaaggccgagaaaaacctcgaggtaggcattcactag

SEQ ID NO: 214108 - DNA, 1338 bp, synthetic construct
  misc_feature 1..1338: note = Description of Artificial Sequence: Synthetic coding sequence
  source 1..1338: mol_type = other DNA
atgaaaaatccagaggcccagcaggatgtttctgtgagccaaggattccgcatgctcttttacactatgaaaccttccgagacaagttttcagaccctggaggaggtcccagactacgtcaagaaagctacccctttttttatatcacttatgctgctggaactcgttgtgagctggattctgaagggaaagcccccaggccgtctagacgacgctcttacttcaattagcgccggagttctgtccagactgcctagcctctttttccggtcgatcgagctgacttcttatatttatatttgggaaaactataggctgttcaaccttccctgggatagtccgtggacctggtattcagctttcctgggggtagactttgggtattactggttccatcgcatggcccatgaggtgaacattatgtgggccggacaccaaactcaccactcctctgaagactacaatttatcaactgcactacgtcagagtgtcctgcaaatatatacttcatggatcttctatagcccactcgctttgttcattcctcccagcgtctacgccgttcatctgcagtttaacctgctgtatcagttttggatccacactgaggtgattaacaatctaggcccactggagctgatacttaacacaccatctcatcatcgagtccaccacgggagaaaccgctactgtatagacaaaaactatgcaggagtgctgatcatttgggataaaatctttggcacctttgaggcggaaaacgaaaaggtggtttacggattgacgcaccctattaacacatttgagccaatcaaggtccaattccatcatctgtttagtatatggaccacattctgggctacacctgggttctttaacaagttcagcgtaatttttaaagggccaggatggggtcccggaaagccaaggctgggcttgagcgaggaaattccagaggtcacagggaaggaggtgcctttctcctcctcttccagccagctgctgaagatttacaccgtggttcagttcgctctaatgttggccttttatgaagaaacattcgctgatacagccgctctgtcacaggtgacactgctgctgagagtatgttttattattttgactctgacaagtatcggttttctgctggatcagcgtccaaaggctgcaattatggaaacccttaggtgcctgatgtttttgatgctctacagattcggtcacttgaaacccctggtgccgagcctgtcgagtgccttcgaaatcgtcttctccatctgcattgcattctggggcgtccgctccatgaagcagttgactagccatccctggaagtag

SEQ ID NO: 214109 - DNA, 1977 bp, synthetic construct
  misc_feature 1..1977: note = Description of Artificial Sequence: Synthetic coding sequence
  source 1..1977: mol_type = other DNA
atggcagaagcggctgctgcagccggtgggaccgggttaggagcaggtgcctcatacggttcagccgcagatagagatcgcgacccagacccagaccgggctggcagacgcttacgcgtcctgtcaggtcacctgctgggcagacccagggaagccctcagcaccaatgaatgcaaggcacgccgagccgcttctgctgctacagccgctcctacagctacccccgcagcacaggagtctggcactatcccaaagaagcggcaggaagtgatgaagtggaacgggtggggctataacgacagcaagtttatctttaataagaaaggacagatagaactcaccggaaagaggtatcccctgagcggcatggggttgcccacgttcaaggagtggatccagaacaccctgggagttaatgtggaacataagaccacctccaaggcatccttgaacccgagcgacactccgcctagcgtggtgaatgaggattttctgcatgacctgaaagagaccaatatctcttacagccaggaggcagatgacagagtctttcgcgctcatggacactgcctgcatgaaatatttctgttaagagaaggcatgttcgaacgtatccctgatattgtactgtggccgacatgccacgacgacgtggttaaaattgtcaacttagcatgcaaatacaatctgtgtatcatcccgatcgggggaggaacaagtgtaagctatggcttgatgtgtcctgcggatgaaacaaggactatcattagcctggatacaagtcagatgaacaggattctgtgggtagacgagaacaacttgacagctcatgttgaggcgggtatcaccggccaggaattggagagacagctgaaggaatcgggctattgcactggtcacgagccagactctctggaattctccaccgtaggaggctgggtctccacccgagccagcggcatgaagaaaaatatctatggtaacattgaagatttggttgttcatatcaaaatggtaacgccccgaggtattatcgaaaaaagctgtcaggggccacgcatgtcaacaggacctgatatccaccactttattatgggcagcgagggcacgctgggggtcatcaccgaggccaccatcaagattcgtcctgtacccgagtaccagaaatacgggagcgtcgcgtttcctaacttcgagcagggggtggcctgccttagggagattgcaaagcagcggtgcgcccctgcatctatccggttgatggacaataaacagtttcaattcggccacgcacttaagcctcaggtatccagtatcttcacttctttcctagatgggcttaagaagttttacatcaccaagttcaaaggcttcgaccccaatcagttgagtgtggccaccttgttattcgagggggaccgtgagaaggtgctgcagcacgaaaagcaggtatatgatatagcagccaagtttggcggactggctgccggtgaggacaacggacagcgaggatacttgttgacctacgtgatcgcctatatcagggacctggctctcgaatactacgtgctcggtgagtcattcgagacttccgccccttgggatagagttgtggacctctgtcggaatgtgaaggagcgcattaccagggaatgtaaggaaaagggcgtccagtttgcaccattcagcacttgtagagtgacacagacatacgatgcaggtgcctgcatttatttctatttcgcctttaattataggggaatctcagatccgctcacggtttttgagcaaaccgaggctgccgctagggaggaaatcttagcaaacggcggatccctatcgcatcaccacggtgtgggtaagttgcgcaagcagtggcttaaggagtctatcagtgacgtgggattcgggatgctgaaaagcgttaaagagtacgtggacccaaataacatctttggcaaccgaaatctcctgtag

SEQ ID NO: 214110 - DNA, 966 bp, synthetic construct
  misc_feature 1..966: note = Description of Artificial Sequence: Synthetic coding sequence
  source 1..966: mol_type = other DNA
atggatcccaagtatccttggtccaaatgtgggcacaaaactacctctaaggcgagtttaaatcccagcgacaccccacctagcgtggttaatgaagatttcctgcatgatctgaaggagacaaatatctcatactctcaagaggctgatgatagagtcttcagggcccacggccactgtcttcacgagatatttttattgagagaggggatgttcgagcgcatccccgatatcgtcttgtggccaacctgtcatgatgatgttgtgaagatagtaaacctggcatgcaaatacaacctgtgtataatcccaatagggggaggaacaagtgtctcctatgggctgatgtgtcctgctgatgagacgcggacaataatcagccttgacacttcccagatgaataggatcctgtgggttgacgaaaataacttgacggcccatgtggaagccggaataaccgggcaggagctcgagaggcagctgaaagagtcaggatattgcactggccatgagcccgattcactggagttctctaccgtcggcggttgggtgtcaaccagggcaagcggcatgaagaagaacatctacggcaacatcgaggatctagtggtgcacattaagatggtaactcctaggggcatcattgaaaagtcatgccagggtcctagaatgtcaactggtcctgacattcaccactttattatgggttcggaaggcactctgggtgtgatcactgaagccaccataaagatcagacccgtgccagagtaccagaaatacggatctgtcgctttccctaacttcgagcagggggtcgcatgtcttcgtgaaatcgccaagcaaaggtgcgcgcctgcaagcatacgtctgatggataacaagcaattccaatttggccacgctttgaagccgcaggtatcctcaatcttcaccagcttccttgacgggcttaagaaattctactag

SEQ ID NO: 214111 - DNA, 1176 bp, synthetic construct
  misc_feature 1..1176: note = Description of Artificial Sequence: Synthetic coding sequence
  source 1..1176: mol_type = other DNA
atggatatggcctcagagtctgtaggcggaaagattctgttcgccactgacgatttctttgctcctgccgaaaacctcatcaagtcagatagcccttgtttcaaggaacatgagtatacagagttcggcaagtggatggacgggtgggagactcggagaaagcgaatcccaggacatgactggtgcgtgttgcggttgggtattcagggggtcattagggggtttgacgtcgatgtgtcttatttcaccggggattacgcaccgagagtgtcaatccaggctgcaaacctcgaagaggacaagctgccagagatcccggagcggggtacacgcactggagcagctgcaaccccagaggagttcgaggcgatcgcagagctgaagtcagatgactggtcctacttagtgcccatgacagaactaaagcctgggaatcccgctagcggacataattacttcctcgtgaattcccaacagagatggactcacatccggctgaacatctttccggacggcggaatcgctcgacttagggtctttggtacaggacagaaggattggacagctacagatccgaaggagcctgctgatttggtggcaatagcctttggaggggtgtgcgtcggcttctccaacgccaagttcgggcaccctaacaatataatcggggtgggcggtgccaagtctatggccgatggctgggagaccgcccgaagacttgatagaccaccaatcttagaaaatgatgaaaatggaatcttgttggtgcccggttgcgagtgggccgtttttcgcctcgctcaccccggtgtgatcactagaatcgagatcgacactaagtattttgagggaaacgcgccagacagctgcaaagtggatggctgcatcctcacaacacaggaagaggaggccgtgattaggcagaagtggatcctgccagcccacaaatggaaacccctcctcccagtgacaaaactttccccgaaccaatcccacctgttcgattctctgaccctagaacttcaggatgttataacccacgctcgtctgaccattgttccagatggtggggtgagtaggttacggttgagaggtttcccaagctcaatttgtctcctccgaccaagagaaaagccaatgttgaagttttcggtgagcttcaaggcaaatccatag

SEQ ID NO: 214112 - DNA, 486 bp, synthetic construct
  misc_feature 1..486: note = Description of Artificial Sequence: Synthetic coding sequence
  source 1..486: mol_type = other DNA
ggaaggaaggcctccgagaaaacaggaggcagggagggggagcctgccgaccggggattgcagctgggaggtaaggcctttgggctactgaaagcccagcaggaggagcgattggatgaaatcaacaagcaattcctagatgaccctaagtactctagtgatgaagatctgcccagcaagctggaaggtttcaaggagaagtatatggaattcgatctgaatgggaacggtgatattgatatcatgagcctcaaaagaatgctcgagaagctgggggtgcccaagacccacctcgagctcaaaaagctaattggcgaggtctcgagcggctcaggcgagactttttcatacccggattttctgaggatgatgttgggcaagagatccgctattcttaagatgattctaatgtacgaggagaaagcaagagaaaaagagaagccaacaggacctcctgctaaaaaggctatatctgagctaccctag

SEQ ID NO: 214113 - DNA, 282 bp, synthetic construct
  misc_feature 1..282: note = Description of Artificial Sequence: Synthetic coding sequence
  source 1..282: mol_type = other DNA
atggagttcgaccttaacgggaacggcgacatcgacatcatgtccttgaagaggatgcttgagaaactgggagtccctaaaacccacctggagctcaaaaagctcatcggtgaggtgtcttcggggtctggagagacattctcctacccagactttctgaggatgatgctgggaaagagaagtgccatccttaagatgatcctgatgtacgaggaaaaggccagagaaaaagaaaagcccaccgggcctccagccaagaaggccattagcgaattaccctag

SEQ ID NO: 214114 - DNA, 444 bp, synthetic construct
  misc_feature 1..444: note = Description of Artificial Sequence: Synthetic coding sequence
  source 1..444: mol_type = other DNA
atgagccaaacacgcgaccttcagggaggcaaggccttcggcctgctgaaggctcagcaggaggagcgcctcgacgagatcaataagcagttccttgatgacccaaagtattccagcgatgaggatcttcccagcaagctggagggatttaaggagaagtatatggagttcgatctaaatggcaacggagatattgacatcatgtcccttaaacgcatgctggagaagctgggtgtgcctaaaacccacctggaactcaagaaactgatcggcgaggtttcctcggggagcggtgaaaccttctcctaccctgatttcctgcgcatgatgcttggcaagcgtagtgcgatcctcaaaatgatccttatgtacgaggaaaaggccagagagaaagaaaagcccaccggaccacctgccaagaaagctatcagcgagttaccatag

SEQ ID NO: 214115 - DNA, 282 bp, synthetic construct
  misc_feature 1..282: note = Description of Artificial Sequence: Synthetic coding sequence
  source 1..282: mol_type = other DNA
atggagttcgacctcaacggcaacggcgacatcgacattatgagcttaaagcgcatgctcgagaagctaggcgtgcccaaaacgcacttggaactcaagaagctgatcggcgaggtgagtagcggctctggcgagacattttcttacccagactttcttcggatgatgctgggaaaaaggtcagccattcttaagatgattctaatgtatgaggaaaaagccagggagaaggaaaagccgacggggcctcccgctaagaaggcaatctcagagctcccttag

SEQ ID NO: 214116 - DNA, 444 bp, synthetic construct
  misc_feature 1..444: note = Description of Artificial Sequence: Synthetic coding sequence
  source 1..444: mol_type = other DNA
atgtcacagactcgagacctgcaagggggaaaagcattcggactgctaaaagcccagcaagaagaacgtctggacgaaatcaacaagcagttcctggatgaccccaaatacagcagtgacgaggacttaccatccaagctggagggcttcaaggaaaaatacatggagttcgatctgaacggtaacggcgatattgacatcatgtccctcaagcgcatgttggagaagctgggggtgccgaagacacaccttgagcttaaaaaactgattggcgaggtgtctagcggttcaggggagactttctcctatccagattttcttcgaatgatgctggggaaacggagcgctattctcaaaatgattctgatgtacgaagaaaaggcacgcgaaaaggagaagccaaccggcccacccgcaaagaaagcaatctccgaactgccatag

SEQ ID NO: 214117 - DNA, 486 bp, synthetic construct
  misc_feature 1..486: note = Description of Artificial Sequence: Synthetic coding sequence
  source 1..486: mol_type = other DNA
ggacgaaaagcgagcgagaagacaggtggaagggagggcgagccggctgaccgcggactgcagctcggcggaaaggcgttcggtctgctgaaagcacaacaagaagaacgccttgatgaaataaacaagcaattcctcgatgatcccaagtattcgagcgatgaagacctgccttcaaaactggaggggttcaaggagaaatatatggagtttgacctaaacggaaatggcgacatcgatattatgtcacttaagagaatgctggaaaaactcggggttccgaagactcacctcgaactgaagaaactgataggggaagtgtcctcaggctctggggagacgttttcgtacccggatttcctgaggatgatgctaggaaaacgaagtgccatcctgaagatgatactaatgtatgaggagaaagccagggagaaagagaagcccacaggccctcctgccaagaaggcaatctcagaactcccttag

SEQ ID NO: 214118 - DNA, 444 bp, synthetic construct
  misc_feature 1..444: note = Description of Artificial Sequence: Synthetic coding sequence
  source 1..444: mol_type = other DNA
atgtcccaaactagggatttgcagggcggaaaggcttttggcttactgaaagcccaacaggaggaacgtctggatgaaataaataagcagtttctcgatgatcctaaatatagcagtgacgaagacctgccctccaagcttgaaggttttaaggaaaagtacatggaattcgacctgaatggcaatggcgatattgacattatgtcactcaaaagaatgctggaaaagctgggtgtgcctaaaacacacttggaactgaaaaagctgataggagaagtgtcgtctgggtcaggcgaaactttctcataccccgattttctacgcatgatgcttggaaaacgatctgccattttgaagatgattctaatgtacgaggagaaagcaagggagaaggaaaaacccactgggccaccggctaaaaaggccatctccgagctgccttag

SEQ ID NO: 214119 - DNA, 444 bp, synthetic construct
  misc_feature 1..444: note = Description of Artificial Sequence: Synthetic coding sequence
  source 1..444: mol_type = other DNA
atgtctcagacgcgcgacttacagggaggcaaagcttttgggctgctgaaggcccaacaagaagagaggttggacgagatcaataagcagttcctggatgaccctaaatacagtagtgacgaggatttgccctcgaaactcgagggcttcaaggaaaagtacatggaatttgacctcaacggaaacggagacattgatattatgagcctcaagcgtatgttggagaagctgggcgtgcccaagacacatctagagctgaagaagctgattggcgaagtgagctccgggagcggcgagacgttctcataccctgactttctgcgtatgatgctcggaaagaggagcgcaattctgaagatgatcctaatgtatgaggaaaaagccagggagaaggagaagcccacgggacctccagctaaaaaagctatctcagagctgccctag

SEQ ID NO: 214120 - DNA, 282 bp, synthetic construct
  misc_feature 1..282: note = Description of Artificial Sequence: Synthetic coding sequence
  source 1..282: mol_type = other DNA
atggaattcgatttgaatggcaacggagacattgatataatgagcttaaaacggatgctagagaagctgggcgtgccgaaaacacatctagagctcaagaagctcattggcgaggtgtcatctggctcgggggagaccttcagctaccccgatttcttgagaatgatgctgggaaaaagatccgcaatccttaaaatgatcctgatgtatgaggaaaaagctcgcgaaaaggaaaaacccaccggaccccctgccaagaaggcgatttcagaactaccttag

SEQ ID NO: 214121 - DNA, 282 bp, synthetic construct
  misc_feature 1..282: note = Description of Artificial Sequence: Synthetic coding sequence
  source 1..282: mol_type = other DNA
atggagttcgacctgaacggtaacggagacatcgatataatgtccttgaagagaatgctagaaaaactgggtgtcccgaagacccatctagagcttaaaaaactcataggcgaggtctccagcggctccggggagacgttttcatatcccgattttctgcgaatgatgctggggaaaaggagtgcaatcctcaagatgatcctaatgtatgaggaaaaggccagggagaaggaaaaacctaccggtcctccagccaagaaagccattagtgagttgccatag

SEQ ID NO: 214122 - DNA, 486 bp, synthetic construct
  misc_feature 1..486: note = Description of Artificial Sequence: Synthetic coding sequence
  source 1..486: mol_type = other DNA
gggagaaaggcctcagaaaaaactgggggaagggagggcgaaccagcggatagagggctacagctaggaggtaaggccttcgggctacttaaggcccagcaggaagagagattggacgagattaataaacagttcctagacgaccccaagtatagctccgacgaggacctccccagcaaactagaggggtttaaggagaagtatatggagttcgacttgaacgggaacggagatatagatatcatgtcgctgaaaaggatgctcgaaaaactgggcgttcctaaaactcacctcgagctaaagaaacttattggagaggtgtcctcgggaagcggcgagaccttctcttatcctgatttcctgcggatgatgctgggcaagcgctctgcaatcctcaagatgatcttgatgtacgaggagaaagcacgcgagaaggagaagccaactggtcctccagcaaagaaagcaatcagtgaactgccctag

SEQ ID NO: 214123 - DNA, 282 bp, synthetic construct
  misc_feature 1..282: note = Description of Artificial Sequence: Synthetic coding sequence
  source 1..282: mol_type = other DNA
atggagttcgacctgaatggtaatggggatatcgatatcatgagtctgaagagaatgcttgaaaaactgggcgtcccaaagacccacctggagttgaagaaactcataggggaagtctcctcgggcagcggcgagaccttcagctacccagacttcttgagaatgatgctaggcaagagatccgcaattctgaaaatgatcttgatgtacgaagagaaggcccgtgagaaagagaagcccactggccctcccgctaagaaagccatctcagaactgccgtag

SEQ ID NO: 214124 - DNA, 282 bp, synthetic construct
  misc_feature 1..282: note = Description of Artificial Sequence: Synthetic coding sequence
  source 1..282: mol_type = other DNA
atggaattcgacctcaacggcaatggtgatatcgatattatgtctctgaagcggatgctggagaaactcggagttccgaagactcacctggaactgaagaagctgatcggcgaagtctctagcggcagcggcgagacattttcttatccagattttctgcggatgatgttgggtaaacggagcgcgatccttaagatgattctcatgtacgaagaaaaggccagagagaaagagaaacccactgggccaccagccaaaaaggcaatcagcgagttgccatag

SEQ ID NO: 214125 - DNA, 444 bp, synthetic construct
  misc_feature 1..444: note = Description of Artificial Sequence: Synthetic coding sequence
  source 1..444: mol_type = other DNA
atgtcacaaactagggacttacaggggggtaaggcctttgggcttctgaaggcgcaacaagaagagcgactggacgaaatcaataagcaattcctcgacgacccaaaatactcctcagacgaggacctcccttctaagcttgaggggtttaaggagaagtatatggagtttgacctcaacggcaacggtgacattgacatcatgagtctcaagagaatgttagaaaagttgggcgtcccaaaaacccatctagagcttaaaaagctgataggtgaagtctcaagcggctctggtgagacattctcctaccctgatttcctacgcatgatgctaggaaagcggagtgccatcttgaagatgatcctcatgtacgaagaaaaggcccgagagaaagaaaaacctacaggtccacccgcaaaaaaagcaatatctgagcttccctag

SEQ ID NO: 214126 - DNA, 486 bp, synthetic construct
  misc_feature 1..486: note = Description of Artificial Sequence: Synthetic coding sequence
  source 1..486: mol_type = other DNA
ggtcgtaaagcctctgagaagacgggcggacgggaaggggaaccggctgacaggggattacaactgggcggtaaggctttcgggctcctaaaggcccagcaggaggaaagattggacgaaattaacaagcagtttctcgatgaccctaagtactcaagtgatgaagaccttcctagtaagctggaaggttttaaggagaagtacatggaattcgacctgaacggaaacggcgatattgatatcatgtccctgaagaggatgctggagaaattaggcgtgcctaagacccacctggagctcaagaaactgatcggagaggtgtctagcggaagcggtgagactttctcgtaccctgacttcctgcgcatgatgctgggcaagcgctccgcaatattgaagatgatcctgatgtacgaagaaaaagcacgcgaaaaggaaaagccgaccggcccaccagccaagaaagccatctccgagttaccctag

SEQ ID NO: 214127 - DNA, 444 bp, synthetic construct
  misc_feature 1..444: note = Description of Artificial Sequence: Synthetic coding sequence
  source 1..444: mol_type = other DNA
atgtcccagaccagagacctccagggcggaaaggcgttcgggctgctcaaggctcagcaggaagagcggctggacgagattaataagcagttcctggacgatccaaagtacagtagtgacgaggatctaccttccaagctcgaggggtttaaggagaaatacatggagttcgacttgaatggaaatggagatatcgacattatgagcctgaagcgaatgttggaaaagctcggagtgcctaaaactcaccttgagttgaaaaagctaatcggggaagtatcgagcggaagcggggagaccttcagctatcctgatttcctccgtatgatgctcggtaagagatccgctattctcaaaatgatcctgatgtacgaggaaaaggccagagaaaaagagaagcccacaggccctcccgcaaagaaagcaatttcggagctgccttag

SEQ ID NO: 214128 - DNA, 486 bp, synthetic construct
  misc_feature 1..486: note = Description of Artificial Sequence: Synthetic coding sequence
  source 1..486: mol_type = other DNA
gggaggaaggcctctgagaagactgggggtagggagggtgagccggctgaccgtggactccaattgggcggtaaagccttcgggctgttgaaggcccagcaggaggaaagattggacgaaatcaataaacagtttttggatgaccctaagtattcatctgacgaagaccttccctccaagctggagggttttaaggagaaatatatggaattcgacttaaatggcaacggggacattgacattatgtcattaaagagaatgttggaaaagctgggggttcccaaaacccatctggagctcaagaagctgattggcgaagtcagttctggaagtggtgagacattctcttatcctgacttcctccgaatgatgctaggaaaacgcagtgcaattctaaagatgattctgatgtatgaggaaaaagctcgagaaaaagagaaacctactggccctcccgctaagaaggctatcagcgagctgccctag

SEQ ID NO: 214129 - DNA, 486 bp, synthetic construct
  misc_feature 1..486: note = Description of Artificial Sequence: Synthetic coding sequence
  source 1..486: mol_type = other DNA
ggaagaaaggcttctgagaagaccgggggacgtgagggcgagccggctgatagaggactgcagcttggcggtaaggcatttggcttgctcaaggcacagcaggaggagcgattagacgaaatcaacaaacagtttctggacgatcccaagtactcttctgacgaagacttgccaagtaagctggaaggatttaaggagaaatacatggagtttgacctaaacggaaacggcgatatcgatatcatgagtctcaaacggatgctggagaagctgggggtgccaaagacccatcttgagcttaaaaagctaataggtgaggtcagtagcggcagcggagagacattctcttatcccgatttcctcagaatgatgcttggcaagcggagcgccatcctgaaaatgatattaatgtatgaggagaaagcacgcgagaaagaaaagccgactggcccacctgctaagaaagccattagcgaacttccgtag

SEQ ID NO: 214130 - DNA, 282 bp, synthetic construct
  misc_feature 1..282: note = Description of Artificial Sequence: Synthetic coding sequence
  source 1..282: mol_type = other DNA
atggagtttgacttaaatggcaacggagacattgacataatgtctttgaagaggatgctcgagaaactgggcgtgccaaaaacacacttagaactgaaaaaactcataggcgaagtctcatcaggttcgggagagacgttttcctatcccgattttctgcgcatgatgctgggaaagcgcagtgcaatccttaaaatgatcttaatgtacgaagagaaggctcgagaaaaggaaaaacctactggcccacctgccaagaaagcgatcagtgaattgccttag

SEQ ID NO: 214131 - DNA, 1062 bp, synthetic construct
  misc_feature 1..1062: note = Description of Artificial Sequence: Synthetic coding sequence
  source 1..1062: mol_type = other DNA
atgagtaagccgcctgatctgctgctcaggttgcttagaggggctcccaggcagagggtatgtacactgttcattattggcttcaaattcaccttctttgtgtcaattatgatctactggcatgttgtgggcgagcccaaagagaaaggacaactctataaccttcctgctgagataccttgcccgaccttgacgccgccaactccccctagccatggacccaccccgggtaacatctttttcctcgagacttctgatcgcactaatccaaattttctcttcatgtgcagcgtcgagtctgcagcaaggacccatcctgagagtcatgtcttagtgcttatgaagggacttcccggagggaatgcctccctcccgcgacacctaggaatctcgctgcttagttgttttcctaatgtgcagatgttgccgctggatttgagggaactgttcagggacacccccttagccgattggtatgccgcagtccagggcaggtgggaaccatacctgctgccagtactatccgatgctagccgcatagccctcatgtggaaatttgggggaatttacctggacacggatttcatcgtgcttaagaatctgcgcaacctcacaaacgtgctgggcacccagtcccggtatgtattgaacggagcttttctcgcctttgagcggcgtcatgaatttatggcattgtgcatgagggacttcgtagaccactacaacggttggatttggggccatcagggtccacagctgctaacccgagtttttaaaaagtggtgctcaatccgctcacttgccgaaagtagggcctgccgaggtgtcactaccctacccccagaggccttctatcctataccatggcaggattggaagaaatatttcgaggatattaatcctgaggaattacccagactgctctcagccacatacgctgttcatgtgtggaacaaaaagtcacaaggcacccgattcgaagccacttctcgtgcactccttgcacagctgcacgcaaggtactgccccaccactcacgaagcaatgaaaatgtacctgtag

SEQ ID NO: 214132 - DNA, 1062 bp, synthetic construct
  misc_feature 1..1062: note = Description of Artificial Sequence: Synthetic coding sequence
  source 1..1062: mol_type = other DNA
atgtccaaacctccagaccttctattgcggctcctgagaggagccccacgccaacgtgtttgtaccctattcatcatcggatttaagttcacttttttcgtatcaatcatgatttattggcatgtcgttggggaacccaaggagaagggccagctctataatctccctgcagaaatcccatgtcccacactcacccctccaacaccaccgtcccacggacccacgcctggaaacattttttttctggaaacctctgaccggaccaatccaaattttctctttatgtgttctgtggaaagcgcagcacggacacaccctgagtcgcatgtgctcgtcctgatgaaggggcttccagggggaaatgcttctctgccccgacatcttggcatcagcttgctgagctgcttccccaacgtacaaatgctccccctcgacctccgggagctctttagggacacccccctggcggattggtacgcggctgtgcagggccgatgggagccgtacctcctgccggtcctgtcagatgctagccggatcgctttaatgtggaagtttggcggaatctacctggatacggattttatagtgcttaagaatttgagaaacctcactaacgttctcgggacccagagccggtatgtccttaatggcgcatttctggccttcgaaagacggcatgaattcatggccctctgtatgcgagatttcgttgatcattataatggatggatctgggggcaccaagggccacagctcctgactcgcgtattcaagaagtggtgcagcatcagatcactggccgagtcccgagcctgccggggtgtgaccacattgcctccagaggcattctaccccatcccatggcaggactggaaaaagtactttgaggatattaacccagaagaattgcctaggttactgtctgcaacatacgctgtgcatgtctggaacaaaaagtctcaggggacacgatttgaggccacaagcagagccctgcttgcccaattgcatgccagatactgcccgacaacgcacgaggccatgaaaatgtatttgtag

SEQ ID NO: 214133 - DNA, 1062 bp, synthetic construct
  misc_feature 1..1062: note = Description of Artificial Sequence: Synthetic coding sequence
  source 1..1062: mol_type = other DNA
atgtccaagccccctgacctgctgctgcgattgttgagaggtgccccaaggcaaagagtctgcacgctcttcataattggcttcaaattcacgtttttcgtcagcataatgatatattggcacgttgtgggggaacctaaggagaaggggcagttgtataatctgcctgcagagataccctgtcctacactcaccccacctaccccaccctcacacgggccaactcccggtaatatattttttctcgagacctcagacagaacaaacccaaacttcctcttcatgtgctccgtcgaatccgccgcacgtactcacccggaaagccacgtcttagtcctgatgaaaggcctgcccggaggaaatgcttcactgccacgacacctcggcatctctctcctgagttgctttcccaacgtccagatgttgcctcttgatctgagggagctcttccgcgatactcccctggccgattggtatgcagccgtacagggcagatgggagccatacctgctgcctgtactctcggatgcaagccgcatcgccctgatgtggaaattcggaggcatctatctagataccgatttcatcgttctcaagaatctgaggaacttaacgaatgtcctgggtactcagtcaaggtacgtgctaaatggtgcttttttggcttttgaacggaggcacgaatttatggccttgtgcatgcgcgacttcgtggaccactacaatggatggatctggggtcatcaaggaccacagctcctgacacgcgttttcaaaaaatggtgctctatccgttcactcgcagagtccagagcatgtcgaggcgtgacaacactccctcccgaggctttttacccaatcccctggcaagactggaaaaagtattttgaagacatcaatccggaggagttgcccaggctgctctccgcaacctatgccgtccatgtgtggaacaagaaatctcaaggcaccaggtttgaagcgacctctagagcgctgctcgctcagctgcatgcgagatattgtcccacaacccatgaggcaatgaagatgtacctttag

SEQ ID NO: 214134 - DNA, 1311 bp, synthetic construct
  misc_feature 1..1311: note = Description of Artificial Sequence: Synthetic coding sequence
  source 1..1311: mol_type = other DNA
atgtctaaacccccagacctcctgttgcggttattgcgaggagctcctaggcagcgcgtttgcaccctgttcattataggttttaagttcacctttttcgtctctattatgatttattggcacgtagttggggagcctaaagaaaaggggcagttgtacaatctgcctgcagagattccgtgtcctaccttaacgcccccaacccccccttcacacggcccaacccctgggaatatctttttcctggagacaagcgaccggaccaatcctaattttcttttcatgtgttctgtggagtccgctgccagaactcatcccgaaagccatgtgttagtgctgatgaaggggctgcccggaggcaacgcgagcctccccagacacttggggattagccttctatcttgttttccaaacgtccaaatgctcccattggacttgcgcgaacttttccgcgacacccccctggctgactggtacgctgcagtgcaaggcaggtgggagccgtatctcttaccagtgttgagtgacgcctcaaggatagctctgatgtggaaattcggcggaatttacctcgacaccgacttcatcgtgctgaagaaccttcgaaatctcactaacgtcttagggactcaatcccggtacgttctgaatggggcttttctggcatttgaacgcaggcatgaatttatggctctgtgcatgcgggattttgtggatcactataatggatggatttggggtcatcagggaccccagctgctgacaagggttttcaagaagtggtgttccatccggtcactggccgaaagccgcgcttgcagaggtgtgacaacactacctccagaagcattctaccctataccttggcaggactggaagaaatatttcgaagatataaatcccgaggagctccctcgcctgctgagcgccacatacgccgtgcacgtctggaataaaaaatcccagggaacagccggtccagctgcatgcccactgcttccccatgacgcaagaggccacgagaacgtccttgtaaggggacctccaggtcatctgcctaatctcttactgatgggccactgggccgctctgcctggggaggccaggctccgcgcaagagaaagggaagccagggctgcgaccgggctcaggcaggcagtagaagaactctgggagcaggcccaatgggaagcggttgacacaccacgtaccgtctcctgcttagaagcgggactgactcacggggctatcgcaagcgggggacggagtgtgtctgccccaggcctcctcgacaatcggcaggagggatag

SEQ ID NO: 214135 - DNA, 309 bp, synthetic construct
  misc_feature 1..309: note = Description of Artificial Sequence: Synthetic coding sequence
  source 1..309: mol_type = other DNA
atggctctactgaaagcaaataaggacctcattagcgctgggctgaaggagttttctgtacttctcaatcagcaggtcttcaacgatccgcttgtgagcgaagaagatatggtgaccgtggtggaggactggatgaatttttacataaattactatagacagcaggtcactggcgagccacaggaacgggataaagctctgcaggagttacggcaggagctgaatacgctcgccaaccccttcctcgctaaatacagagacttcctcaagtcccacgagttgccaagccaccctccgcctagctcatag

SEQ ID NO: 214136 - DNA, 1488 bp, synthetic construct
  misc_feature 1..1488: note = Description of Artificial Sequence: Synthetic coding sequence
  source 1..1488: mol_type = other DNA
atgtccatgctggtcgtttttttactgctctggggcgttacctgggggcctgtcacggaggctgcgatcttttacgagacacagccctctctgtgggcggagtcagagagcctccttaaacccttagcgaacgttaccctgacctgccaagcacacctggagacccctgatttccaactctttaaaaacggagtggcacaggagcctgtacacctcgatagtccagccatcaagcaccagtttctgctgaccggagatacacagggccgatatagatgtcggtccgggctgagcacgggttggacccagctctcgaagttgttagagttaacggggccaaagtcacttcccgcaccctggttgagcatggcacccgtttcatggattactcctggcctgaaaactacagcagtgtgccgtggtgttctgcgcggagttacattcctgctcaggagagagggagatcacgaatttctcgaggttccagaggcccaagaggacgttgaggccactttccccgttcaccagcccggaaactactcatgcagttaccgtacagatggtgaaggcgctctgagtgagccttcagccactgtgacaatcgaggagttagcggcacccccaccccctgtgctcatgcaccacggagagtctagccaggtgctgcaccccggtaacaaagtgaccctgacttgtgttgctccgctgtccggagtggactttcaattgcggaggggggaaaaggagctgctggtgcccagatcttccaccagcccagaccgaattttcttccatttgaatgcagtggccctgggcgatggcggtcactacacatgtcgatacaggctgcatgacaatcagaatgggtggtccggtgacagtgccccagttgagttgatccttagcgatgagacacttcccgctccggagttcagtcctgaacccgaatccggccgtgccctccgtctccgatgccttgccccattagagggggcacgctttgcactagtccgggaagacagaggcggacgtcgagtgcatagatttcagtcacctgccggaactgaggccctctttgagctccataatatcagcgtcgcagattcagctaactactcctgcgtgtatgttgatttgaagccacccttcgggggttctgccccatctgaaagattggagctacatgtagacgggcctcccccaaggccccagctccgggcaacatggtctggagccgtgctggctgggagggacgccgtgctacgatgcgaaggccctatcccagatgtcacattcgagctgctcagggagggagagacgaaggccgtgaagactgtccggaccccaggagctgccgcaaatctggagctcatctttgtaggccctcagcacgctggcaattatcgatgcaggtacaggtcctgggtccctcataccttcgagtccgagctgtcggaccctgtcgagctgctcgtggcagaatcgtag

SEQ ID NO: 214137 - DNA, 1059 bp, synthetic construct
  misc_feature 1..1059: note = Description of Artificial Sequence: Synthetic coding sequence
  source 1..1059: mol_type = other DNA
atgcgtagccttggggcactacttctcttactctcagcctgtctggccgtaagcgccggacctgtgccgactcccccagataatattcaagtccaggagaacttcaatattagccggatttatggtaagtggtataacctagctattggaagcacctgtccttggctgaaaaaaatcatggatcgtatgaccgtgtctactttggtattgggggagggagccacagaggccgaaattagtatgacatctactcgctggagaaagggggtttgcgaagagaccagtggcgcttatgagaaaaccgataccgatgggaagttcctataccacaaaagcaagtggaacataactatggaatcttatgtggtacacaccaactacgacgaatacgcgatcttcctgactaagaagttttctaggcaccacgggccaacaattaccgccaaactctacggtcgcgcaccccaactgcgtgagaccctcctccaggatttcagggtggtggctcagggcgtgggcattcctgaagattctatttttaccatggctgatcgcggagagtgcgtaccaggagagcaagaacctgaacctattctcatcccgcgagtacggagagcggtactgccacaggaagaagaaggcagcggcggagggcagctggtgactgaggtgacgaagaaagaggatagctgtcagctgggctactcggccggtccctgcatgggtatgacgtcccgatacttctacaatggaaccagtatggcctgcgagaccttccagtacgggggatgtatgggcaacggcaataattttgtgacggagaaagagtgcttacagacatgtcgtaccgtggccgcatgcaatctaccaattgtgagaggcccatgtagagcctttattcagctttgggccttcgacgctgtcaaagggaaatgtgttctgttcccctacggcggatgccaaggcaacggcaacaagttctactcagagaaggaatgccgggaatattgtggggtcccaggtgatggtgatgaggagctactgaggtttagcaattag

SEQ ID NO: 214138 - DNA, 813 bp, synthetic construct
  misc_feature 1..813: note = Description of Artificial Sequence: Synthetic coding sequence
  source 1..813: mol_type = other DNA
atggatcgtatgaccgttagcacgctcgttttaggcgaaggcgctacagaagccgagataagtatgacatctacacggtggaggaaaggcgtgtgcgaggagactagtggggcatacgaaaagacagataccgatgggaagtttctgtaccacaaatctaaatggaacatcactatggagagctacgtagtgcacacgaactacgacgagtatgccatctttctgacaaaaaaattcagtcgccaccacggcccaacaatcacagcaaaactgtacggtcgggcaccccagttaagagaaactcttctgcaggattttcgggtcgtggctcagggggtgggaataccggaagattctatctttacgatggccgatcggggagagtgcgtcccaggagaacaggagccggaacctatcctaataccccgtgtccgtcgggcagtgttgcctcaggaggaggagggaagcgggggtggtcagctggtaactgaggtgacaaagaaggaggactcgtgccagctcgggtattccgctggaccttgcatggggatgaccagccggtatttttacaatggtacttcaatggcttgcgagacatttcagtatggaggatgcatggggaatgggaataactttgtgacagagaaagaatgccttcagacctgcagaaccgttggggagtgtggatcaccgcctctgtgcgccctccacccacaggacccagtcccacctgttaatcacctcagaattgaaaaagttgccaaccgtggtcactcatcaggcagaaccccaggaggatttttaaagtcttag

SEQ ID NO: 214139 - DNA, 897 bp, synthetic construct
  misc_feature 1..897: note = Description of Artificial Sequence: Synthetic coding sequence
  source 1..897: mol_type = other DNA
atggtgcgcatggtgcctgttctgttgtctcttctgcttctgctgggtcctgccgtgccccaggagaaccaggatggacgctacagcttaacctacatctatacaggactgtccaagcatgtggaggacgtcccggcttttcaggcactggggtcactaaacgatttacagttttttaggtacaatagtaaggataggaaatcgcagcccatggggttatggaggcaagtcgagggaatggaagactggaaacaggacagccaactgcagaaggcaagagaagacatctttatggagacactcaaggacatagtagagtactacaatgatagcaacggctcccatgttctgcaggggaggtttggatgcgagattgaaaacaacaggagttctggtgcattctggaagtattactacgatggaaaagactacattgagttcaataaggagatccccgcatgggtgccctttgacccagctgcacagatcaccaaacagaagtgggaagctgaaccggtgtatgtccagagagccaaggcctacctggaagaggaatgtcccgctactctgcgcaaatacctgaaatactccaagaacattctggataggcaggacccgccttcggtggtggtgacctcacaccaagcccctggagagaagaagaagctaaagtgcctggcatacgacttttatccagggaagatcgatgtgcattggacacgcgcaggcgaggtccaggagcccgaactccgtggtgatgtcctccacaacggcaacggtacttaccaaagctgggttgtggttgcagttcctccacaagatacagcgccatactcctgtcacgttcaacactcctctctagctcagcctcttgtagtcccctgggaagcgtcctag

SEQ ID NO: 214140 - DNA, 1104 bp, synthetic construct
  misc_feature 1..1104: note = Description of Artificial Sequence: Synthetic coding sequence
  source 1..1104: mol_type = other DNA
atgaagtccttggttcttctgctttgtctcgcccaactctggggatgccacagcgccccacatggacccggtttaatatacagacaacccaattgcgatgacccagagaccgaggaagccgctctggtggccatcgactacattaatcagaatctgccctggggctacaaacatacactgaaccagatagatgaagtcaaagtatggcctcaacaaccttctggcgagctgttcgagattgaaatagacaccctggagaccacatgtcacgttttagatccgacccccgtcgcacgctgtagcgttaggcagctgaaagagcacgccgtagagggtgattgcgacttccagctactaaaactggacgggaagttctccgtggtttatgccaaatgtgattcaagccccgattcagccgaagatgtcagaaaggtttgtcaagattgtcctctgctagcaccgctgaatgatacccgggtagtgcacgctgccaaggccgcattagcagccttcaatgcccagaacaatggatccaactttcagttagaggaaatttcccgggctcaactggtgcctctacctccctctacttatgttgagttcactgtgagcggtacggactgtgtggccaaggaagccaccgaagcagctaagtgcaatcttttggccgagaaacagtacggattttgtaaagccacacttagtgaaaaactcgggggagccgaggtagccgtaacgtgtatggtcttccagacacagcccgtgagttcccagccacaaccagaaggtgccaacgaagccgtgccaactcctgtagtggaccccgatgctccaccttcgccccctttgggtgcgcctggcctccctcctgcgggaagtccccctgattcacatgtcctcctggctgccccacctggccaccaactgcaccgagcgcattatgatttgagacacacgtttatgggagtcgtaagtttaggaagcccaagcggcgaggtatcgcatccaagaaagactaggacagtagtgcaacccagtgtgggcgctgcggctggtccagtggtgccaccgtgccctggacgcattcggcacttcaaagtgtag

SEQ ID NO: 214141 - DNA, 1302 bp, synthetic construct
  misc_feature 1..1302: note = Description of Artificial Sequence: Synthetic coding sequence
  source 1..1302: mol_type = other DNA
atgttcgccggatgcttctttttcctgctgaatcagagtcggaatcaccctgtttctctttgcaatagctcagggcgactgcaacagattaataaggctcaccatccgccatgggtctatctgtctcagcagtccacttgggttggtccggaagctagtaatcatttacatgcatgccaggggctgtccggcgcagccatgaagtctttggttctccttctgtgtcttgcccaactctggggctgccacagcgcacctcatgggcctggcttaatatacaggcagcctaactgcgatgatcccgaaacagaagaggccgcactggtggcaattgattatataaatcagaatcttccttgggggtacaaacacactctgaatcagattgatgaggtgaaggtttggccccagcagccaagcggtgagctgttcgagatcgagattgacactctagaaactacctgccacgttcttgatccgactccggtagcgaggtgttctgtgcgccagctgaaggaacatgcagtcgagggcgactgtgatttccagttgctcaagctggatggcaagttcagtgtagtgtatgcaaaatgcgattcctcacccgactccgccgaagatgtgcgtaaagtgtgccaagattgtcccctcttggctcctcttaacgacaccagggtggtccacgccgctaaagctgctttagccgcattcaatgcccagaacaatggttctaatttccagctcgaagaaatttcccgggctcaactggtgcccctgcctccatcaacctatgtcgagttcactgtgtcaggtacggactgcgtggcgaaggaagccactgaggccgctaagtgcaatcttctcgccgaaaagcagtacggcttttgtaaagccactttatccgaaaagcttggcggagcagaggtggccgtcacttgcatggtgttccaaactcagcccgttagttcccagccacagccagaaggcgcaaatgaggctgtgccgacaccagtcgtggatcctgacgctccccctagtcctcctttgggagccccaggattgccgccagcgggatctcctccggactcgcacgtactcctggccgctccacctggccatcaactgcacagagcccactacgacttacggcatacttttatgggcgttgtgtcactgggctccccgagcggcgaggtgtcccacccaaggaagacacgaactgtcgtgcagccatcagtcggggcagcagcaggaccagtggtccccccttgtccgggacggattaggcacttcaaggtatag

SEQ ID NO: 214142 - DNA, 4425 bp, synthetic construct
  misc_feature 1..4425: note = Description of Artificial Sequence: Synthetic coding sequence
  source 1..4425: mol_type = other DNA
atgggaaagaataagttgctgcacccctctttagtgttgcttctgcttgtgctgctgcccacggatgccagcgtctccgggaagccccagtacatggtccttgtcccttcgctcctgcacaccgaaaccaccgagaagggctgtgtccttcttagctacttaaacgaaacagtaacggtttcggcttctttggaaagtgttcgaggcaatcgatcgctgtttacagacctagaggctgagaatgatgtactccattgcgtggccttcgcggtcccaaagtcgagcagcaatgaagaagtgatgtttctcacggtccaggtgaaaggaccgactcaggagtttaaaaaaagaaccacagtgatggtaaagaacgaggacagccttgtattcgtgcaaacagacaagagcatttataagcctggccagaccgtgaagtttcgggtggtgagtatggacgagaatttccacccgctaaatgaactgatccccctcgtgtacattcaagatcctaaagggaacagaatcgcccaatggcagtcattccaattggagggcggacttaaacagtttagcttccccctgtcctccgagcccttccaaggctcttacaaggtcgtggtccagaaaaagtctggcggtcgaactgagcacccatttacagtcgaggagttcgtcctacccaagttcgaggttcaggtcaccgtgccaaagatcatcaccattctggaagaagaaatgaatgtctccgtgtgcgggctctacacctacggcaagcctgtcccaggccatgtgacggtgtcaatatgccggaagtattccgacgcctccgattgccatggggaagactcccaggctttttgtgagaagttctctgggcaactcaattcccacggttgcttttaccagcaggtgaagaccaaggtcttccaactcaagaggaaggaatacgagatgaagctgcacacagaagcgcagatccaggaagagggcacagtggtggagctcactggccgacaatccagcgagattacgcgcacaatcaccaagcttagcttcgttaaggtggactcacacttcaggcagggcattcctttcttcggtcaggttcgactggtggatggaaagggcgtacctatccctaataaggtgattttcattaggggcaatgaggctaactactactcaaacgccaccaccgatgagcacggcctcgtgcagttctctattaacactacaaacgtgatggggaccagcctgacagtaagagttaactacaaggaccggtcaccgtgctacgggtaccagtgggtgagcgaagagcacgaagaagctcatcacactgcttacctggttttctcaccaagcaaatcttttgtacatctggagcccatgtcgcacgagctgccctgcgggcacacacagaccgtccaggcccactatattctgaatggagggaccctcctgggcttaaaaaaactcagtttctactaccttatcatggcaaaaggaggcatcgtgcggactggaactcacggcctccttgtgaagcaggaagatatgaagggacacttctccatctcaatcccggtgaaaagcgatatcgctcctgtggccagactgctcatttacgctgtccttcctactggggacgtgatcggcgatagtgcgaagtatgacgtagagaattgcttggctaacaaggtggatctgtcatttagccctagccagtcgctgccggctagccacgcccacctcagggtaacagcagctcctcagtctgtttgtgcactgcgggcagttgaccagtctgttcttctaatgaaacccgacgccgaactatccgcctcttccgtatataatctcttacccgaaaaggacctcactggctttccaggaccccttaatgaccaagacaacgaagattgtatcaacagacataatgtgtatatcaatgggataacttatactcccgtatcttctaccaacgaaaaggacatgtacagcttccttgaagatatgggcctgaaggcttttactaactctaagataaggaagcccaaaatgtgccctcaactccagcagtatgaaatgcacgggcctgagggacttagagtaggattctacgaaagtgacgttatgggcaggggccacgctagactcgttcacgtcgaggagccccatacagaaacggtgcgcaagtacttccccgagacgtggatttgggatctcgtagttgtgaattctgccggtgtggccgaggtaggcgtgactgtccccgatacaattaccgaatggaaggctggtgctttttgcctgagcgaggacgccggacttggaataagctccaccgctagcttacgtgcatttcagccgttctttgtggaattaacaatgccttatagcgtcatacgtggcgaggcttttaccctcaaagcaactgtacttaactatttacctaaatgcatccgggtgtctgtacagctggaggcttctccagctttcctggcagtacccgtcgagaaggaacaagctccgcattgcatctgcgcgaacggtcgacagacggtcagctgggccgtgacacccaagtccctaggcaacgtcaacttcacggtgtctgccgaagccttggagtctcaggagctgtgtggtaccgaagtgccttctgtacctgaacacgggagaaaggacacagtgattaagcctctgctcgtcgaacccgagggacttgaaaaggagactacatttaactccctgttatgcccttctggcggagaagtatctgaagagctgtctcttaaattgccccctaatgtagtggaagagtcagcacgggcatccgtgtcagtgctcggcgacattcttggatctgccatgcagaacactcagaacctgctgcagatgccttacgggtgcggggagcagaacatggtacttttcgcccctaacatttacgtgctggattacctgaatgagactcagcagctgacccctgaaataaaaagcaaggcaatagggtatttaaacaccggctaccaaagacagctcaactacaaacactacgacgggtcgtacagtacctttggcgaacgatatggtagaaaccaagggaacacgtggttgacggctttcgtcctaaagacttttgcccaggccagggcctacatctttatagacgaggcccacattacccaggctctcatctggctgtctcagagacaaaaggacaacgggtgtttcagatctagcgggtctctgttgaataacgctatcaaaggcggagttgaagatgaagtcaccctcagtgcttatattacaattgccctcctagagattcccttgactgtgacccaccctgtcgtccggaacgcgctcttctgcctggaatctgcttggaagacggcccaggagggggatcacggttcacacgtgtacactaaggctctcctggcttacgcattcgccctggcaggaaatcaggacaagcgcaaggaggtgttaaagagtctcaatgaagaggccgtgaagaaagacaattctgtccactgggaacgccctcagaagcctaaagcccctgtgggccacttttatgaaccacaagctccttctgcagaagtggagatgacctcttacgtactactggcataccttacagcccaaccagccccaacctctgaggatctgacgtctgccactaatatcgttaaatggattactaagcagcaaaatgctcaggggggattttccagtacccaagataccgtggtggcactccacgctctatcaaagtacggggcagcaacctttacccgaaccggtaaagccgcacaagttaccatccagtctagcggaacattctcttctaagttccaggtggacaacaacaacaggctgctcctgcaacaggtcagtctacccgagctgccaggcgagtactctatgaaggtcactggcgagggatgtgtctacctccagacatctcttaaatacaacattcttcctgagaaggaggagtttccatttgccctaggcgtgcagaccctaccacagacatgtgatgagcctaaggcccacaccagcttccagatttccttgtcagtgtcatacaccgggtcccgaagtgcttccaacatggcaatcgtggacgtaaaaatggtgtctgggtttattccattgaaaccaacagtcaagatgctggaacggtcaaaccacgtatctaggaccgaggtctcgagtaatcatgtacttatctacctggacaaggtgagcaatcagactttgtctttgtttttcactgtgctacaggacgttccagttcgagacctcaaacccgcaatcgttaaagtctatgactactacgaaactgacgagttcgccattgccgagtacaatgcaccatgttccaaggatctgggaaacgcttag

SEQ ID NO: 214143 - DNA, 507 bp, synthetic construct
  misc_feature 1..507: note = Description of Artificial Sequence: Synthetic coding sequence
  source 1..507: mol_type = other DNA
atgggaaaaaacaagctgctgcatccgagtttagtcctgcttcttctggtgttgctgcctacagacgcctccgtgtcgggaaagccacaatatatggtcctcgtgccctccctgctacacactgaaactaccgagaaaggctgtgtgcttctgtcctacctgaacgagaccgtcacagtctcggctagtttagagtctgtgcgagggaatcgtagtctctttacagacctggaggccgagaatgacgtgctccattgcgtggcattcgctgtgccgaagagcagttccaatgaggaagtgatgttcctcacggtgcaggttaagggccctactcaggagttcaaaaaacggacaacagtgatggtgaaaaatgaggattcgctggtgtttgtgcaaaccgataaaagtatttataaaccgggacaaaccgttaagttccgcgttgtgagcatggacgagaactttcatcccctcaacgaacttattccgctcgtgtatatacaatag

SEQ ID NO: 214144 - DNA, 4470 bp, synthetic construct
  misc_feature 1..4470: note = Description of Artificial Sequence: Synthetic coding sequence
  source 1..4470: mol_type = other DNA
cgggtgcagtatgtgtgttccccacctgctccaagtttctgtaacatgggaaagaataagctccttcaccctagtttggttcttctcctgctggttctccttcccaccgatgcaagtgtgtcgggtaaaccacagtatatggtgctggtccctagcctcttgcatacagagaccactgagaaaggttgcgtgttattgagttaccttaacgaaacggtcaccgtgtctgcctctctcgagtctgttagaggcaatagatcgctctttactgacctggaagcggagaacgatgtcttgcactgcgtcgcatttgccgtgcccaagtcctcttccaacgaagaagtgatgtttctcacggtacaagtgaaaggacccacccaggagttcaaaaaacgcacgaccgtaatggtgaaaaatgaagacagtctggtcttcgttcagaccgacaaatccatctacaaacctggtcaaaccgtgaaattccgggttgtttcaatggacgaaaactttcatccactaaatgagctcataccactggtttacattcaagacccaaagggcaataggatagctcaatggcagagcttccagctggaaggtggcttaaaacagttctctttcccactctcttccgagcctttccaaggctcctataaagtggttgtgcaaaagaagtcaggtggccgtacagagcatccctttacagtcgaggagttcgtcttaccaaaatttgaagtgcaggttacagtccccaaaatcatcactatcctggaggaagagatgaatgtcagtgtttgtggactttacacttatgggaaacctgtgccaggacatgttacagttagcatctgcagaaagtactcagacgcgtccgactgccacggcgaagattcgcaggcattttgtgagaaattttcaggccaactgaatagccatggatgcttctatcaacaggtgaaaaccaaggtgttccagctgaagagaaaggagtacgaaatgaagctgcacaccgaggctcagatccaagaagagggcacggttgtcgaactgactgggaggcagtctagtgagatcacaaggactattaccaaactttcctttgtcaaggttgactcccattttcgccagggtatcccctttttcggccaggtccgactagtggacgggaagggggtgcccatcccaaacaaagtgatcttcattcggggaaatgaggccaactactatagcaacgccacgaccgatgaacatggccttgtgcagttttccattaatactactaacgtgatgggaacctccctgacagttcgggtgaattataaggataggagtccctgttacggctaccagtgggttagcgaggagcatgaggaggctcaccacaccgcctacctcgtgttctcgccaagtaaaagctttgtgcacttagaacctatgtcccacgagttaccgtgcggccacacccagacagtgcaggctcattacatcctgaatggcggtacactgcttggcctgaagaagctctccttctactatctgatcatggccaagggtgggatagtgcgaaccggcacacacgggcttctggtcaaacaggaggacatgaagggccacttctccatcagcatccctgtaaaatctgacatcgcacctgtggctcggctcttgatctatgctgtgctcccgaccggtgacgtgataggcgattctgctaagtacgatgtcgaaaactgcctggccaataaggtcgatctcagcttctctccttcccagagccttccggctagccatgcccatctacgagttaccgccgctccccaaagtgtttgcgctctaagagcagtggatcagagtgttctgcttatgaaaccggatgccgaattaagcgcctcatcagtctacaatctactccccgagaaagacttgacaggatttccaggacccctgaacgaccaggataatgaggattgtatcaaccgtcacaacgtgtatatcaacggtattacctacacaccagtttctagcaccaatgagaaggacatgtacagcttccttgaagatatgggcctgaaagcgtttacaaacagtaaaatccgcaagccaaagatgtgccctcagctgcaacaatacgaaatgcacgggccagaaggtcttagagtgggattttacgaatccgacgtgatgggacggggacacgcacgactcgttcacgttgaagaaccccatactgagaccgtcagaaagtacttcccagagacctggatctgggatttggtcgtggtcaattcagcgggagttgcagaagtgggcgttacagttccagacacaattaccgagtggaaggcaggcgctttctgcctgtccgaggacgccggtctcggtattagttcgacagccagcttaagggcctttcaacccttcttcgtagagctgaccatgccatactccgtcataagaggggaagcttttacgttgaaggcgactgtgctcaattatctccctaagtgtatacgcgtgagtgtgcagcttgaggcttccccagctttcttggctgtgccagtcgagaaagagcaagcccctcattgtatttgcgcgaatgggcgacaaacagtgtcatgggccgttaccccgaagtcgctgggcaacgtcaatttcacagtgtccgcggaagcccttgagtcacaggagctctgcggaactgaggtgccttccgtaccagaacatggcagaaaggataccgttatcaaacccctattggtagagcctgaggggttagagaaagaaacaacttttaattcactgctgtgcccatccggaggagaggtgtccgaggagttgtcattgaaattgccccctaacgtcgtagaagaatcagcccgagcgtccgttagtgtgctgggtgacatactggggtcggccatgcaaaatactcagaacttgctccagatgccatacggatgcggagaacagaacatggtactgttcgcacccaatatatacgtgcttgattacctgaacgagactcagcaactgacgccggagatcaagtctaaagctataggttaccttaacaccggttatcaaagacaactaaactataagcactatgatggcagttactccacctttggggagcgctatggtcgcaaccaggggaacacgtggttaactgctttcgtgttaaaaacttttgcccaggcccgtgcgtacattttcatcgacgaggcacacattactcaggccctgatctggctgtctcagcggcagaaggataatggatgtttccggagctctggatcacttctgaataatgcaataaagggcggagtggaagatgaggtgacgctatctgcatatattaccatagccctcctggagatccccctgactgttacccatcctgtcgtgaggaacgctttgttctgcttggaatcggcctggaaaacagcccaggagggggatcatggatcacacgtgtatacaaaagccttgttggcttatgctttcgcgctggcgggtaaccaggataaaaggaaagaagttttaaaaagtttgaatgaggaagctgttaagaaggacaattctgtgcactgggagcggcctcagaaaccgaaagcgccagtgggacacttctatgaacctcaggcccctagcgcggaagtggagatgacaagctacgtgttgctcgcatatttgacggcacagcctgccccaacgtccgaagatctaactagtgccactaatatagtgaaatggataacgaagcagcaaaacgctcagggagggttctcatctactcaggacacagtcgtggctctgcacgcactcagcaaatacggtgctgccaccttcactcggactgggaaggcagctcaggttaccattcaaagctctggcactttttcctccaagtttcaggtcgacaacaacaatcgtctactgttgcagcaggtgagtctgcctgagttgccaggagagtactcaatgaaagtaaccggtgagggctgcgtttacttgcagacatctctcaagtacaatatcttgcccgaaaaggaggagttccccttcgctttaggggttcaaaccctaccccagacctgtgacgagccaaaagcccatacgtccttccagatcagcttgagtgtctcatacacaggatcaaggtcagcaagtaatatggctattgttgatgtcaaaatggtaagcggattcatcccgctaaagcccaccgttaagatgcttgagagaagcaaccacgtgtctcgtaccgaagtgagctccaatcacgtcctcatctatctcgataaagtcagcaaccaaacacttagtctgttctttacggtcctccaggatgtaccagtaagggacctgaaaccagcaatcgtgaaggtatacgactattatgagacagatgaattcgccatcgccgaatacaatgctccttgctccaaggacttggggaatgcctag

SEQ ID NO: 214145 - DNA, 4365 bp, synthetic construct
  misc_feature 1..4365: note = Description of Artificial Sequence: Synthetic coding sequence
  source 1..4365: mol_type = other DNA
atgtgggctcagcttcttttgggaatgcttgctctctcccctgccatcgccgaagagctgccaaattacctggttacacttcctgctaggctgaacttcccaagcgtgcagaaagtgtgtctcgacctttcccccggatacagcgacgtcaaattcactgttaccctcgaaaccaaggacaaaactcaaaagctgctagagtatagtgggctcaaaaagcgccatcttcattgcatttccttcctggtgcccccaccagcgggaggaaccgaggaagtagccacaatacgcgtttccggcgtgggcaacaatatctcttttgaagaaaagaagaaagtactaattcaacgccagggaaatggcacctttgtgcaaactgacaaacccctctacacccctggtcaacaggtctactttaggattgtaacaatggacagcaactttgtccctgtgaatgacaagtattctatggttgagttacaggaccctaatagcaatagaatcgcgcaatggctcgaggttgtgccagagcagggaattgtcgatctctcctttcagctcgcccctgaggcaatgttagggacttatacagtggctgtggccgaaggcaaaacatttggaacattctcggtggaagagtatgtcctgcccaagtttaaggtagaggtcgtggaacccaaggagctctccaccgtgcaagagtccttcttggtaaaaatctgctgtaggtacacctacggcaaacctatgctcggggcagttcaagtcagcgtgtgtcaaaaagctaatacctattggtaccgagaggttgagcgggaacagttgccagataagtgccggaacctgagtggtcagactgacaagactggctgtttttccgccccagtcgatatggccaccttcgacttgattggctacgcctacagtcatcagattaatatcgtggccaccgtcgtagaagagggaaccggagtcgaagccaacgccacccagaacatctacatttctccacagatggggagcatgacatttgaggacactagcaacttctaccatccaaattttcctttcagtggcaaaatcagggtgcgtgggcacgacgactcattcctcaagaatcatctggtgttcttagtgatttatgggactaacgggacgtttaatcagactcttgtaactgataacaacggcctggcaccgtttaccctggagacctcggggtggaatgggactgacgtctccctggaggggaagtttcagatggaagaccttgtgtataatcccgaacaggtccccagatactatcagaacgcatatctccacctgcggcctttttattcgacgacacgaagtttccttgggatccaccggttaaacggcccactcaaatgcggacagcctcaggaggtccttgtggattactatatagatcccgctgatgctagtccagaccaagaaatctccttttcttattaccttataggcaagggttccctggttatggaggggcagaagcatctgaatagcaaaaaaaaggggctgaaggccagcttttctctgtcattaactttcaccagccgcctcgcacccgatccaagtctagtgatttatgcgatctttccgtctggcggtgttgtggctgataaaatccagttcagtgtggagatgtgctttgataatcaggtcagccttggcttcagtccgagccagcagctccctggggctgaggtggaactgcagctgcaggcagcgccaggtagcctttgtgccttgagagccgtagatgaatcagtgctgctgctgagacctgacagggagttgtcaaacaggagcgtctacggcatgtttcctttttggtacggacactacccttaccaggttgcggagtacgatcagtgtcctgtgtcagggccatgggactttccgcaaccactgattgatcccatgccccaagggcattcaagccaaagaagcattatctggaggccctcattcagcgaaggaaccgacctctttagcttcttccgtgatgtagggcttaagatcctgtcaaacgccaaaatcaaaaaacctgtggactgttctcacagatcacccgagtatagcaccgccatgggcgcagggggtggccatcccgaggcttttgagtcttcgacccctcttcatcaggcagaggattctcaagtcaggcaatattttcccgaaacatggctctgggacttgttcccgataggaaattctggaaaagaagcagtgcacgtcacagtgccagacgcgattactgagtggaaagctatgagcttctgtacctcccaaagcagaggctttggtctcagccccacggtaggtctcactgccttcaagccattcttcgttgacctgactctaccttactccgtggtgagaggggaatcattcaggttaacagctactatttttaattatctcaaggattgcattcgcgtgcaaacagatctcgcgaaatcgcacgagtatcaattggaaagctgggccgactcccagacgtcaagctgtctgtgtgccgatgacgccaagacacaccactggaatataaccgcagtaaaattggggcacatcaatttcacaatatcaaccaaaatcttggattccaacgagccatgtggaggccagaaaggttttgttccacaaaaggggagatcggatacactgataaaaccagtgctagtgaagccagagggggtgctggtcgagaagacacattcctccctactgtgccccaagggcaaggtggcaagcgagagcgtgtccctggaattgcctgttgatatcgtaccggatagcactaaagcttacgttactgtgctcggggacatcatgggcacagcgctacagaacctcgacgggcttgtacagatgccatccggatgtggagagcaaaatatggttcttttcgcgccaataatatacgttttgcagtacttggagaaggccggtctgttaacagaggagatccgctcgagagccgtgggatttctagagatcggatatcagaaagagttaatgtataagcactccaatgggtcgtattccgccttcggggaaagagatggaaatggtaatacgtggctgaccgctttcgtcaccaagtgttttgggcaggcccagaagtttatcttcatagatccgaaaaatattcaggatgcactgaagtggatggccggtaaccagctgcccagcggctgctacgccaatgtcggtaacttactacacactgccatgaaggggggagtagacgacgaagttagcctgactgcctacgtgaccgctgcacttttggagatgggaaaagacgtagacgatcccatggtcagccagggacttaggtgtctgaaaaattccgccacctcaaccacgaatctatatacacaggccctattagcctatatttttagcctggccggagagatggacattagaaacatcctgctgaagcagctggatcagcaggccattatctccggcgaatctatctactggtcacagaagcccacacccagttcaaacgcgtccccatggtccgagccagctgctgtagatgtcgagttgaccgcctatgctctgctcgcacagcttaccaaaccctccctaacacagaaagagatcgcgaaggcaacatctatagtggcatggcttgctaagcaacacaacgcctacggagggttttccagtacccaggacaccgtggttgctctgcaggccctggcaaagtatgcaacaaccgcttacatgccaagcgaggaaattaatctagtcgtcaagagtaccgagaattttcagcgcacgttcaacattcagagcgtcaacagactggtgttccagcaggacacactgccaaatgttccaggcatgtatacgctcgaagcctcagggcaggggtgcgtgtatgtgcaaaccgtgttgaggtacaatattcttcccccaaccaatatgaaaacgttcagccttagcgtagagattggcaaagcacggtgtgagcaacccacatctcctcgttccttaacccttactatccacactagttacgtgggctctcgctcgtcctccaacatggccatagtggaagtgaaaatgctcagcggcttctctccaatggaggggactaatcaactgcttttacaacaacctttggtcaagaaggtcgagtttggaaccgacacacttaacatctacctcgatgagctgataaaaaacactcagacatatacatttacaatcagtcagtccgtgctggtgaccaatctaaaaccagctaccattaaggtgtatgactactatttaccagacgagcaggcaaccatacagtactccgacccgtgtgagtag

SEQ ID NO: 214146 - DNA, 4365 bp, synthetic construct
  misc_feature 1..4365: note = Description of Artificial Sequence: Synthetic coding sequence
  source 1..4365: mol_type = other DNA
atgtgggctcagctgctcctggggatgcttgctctgagtcctgctattgctgaggaattgccaaactatctggtcaccttgccagcgaggctcaactttccttcagtgcagaaggtctgcctggatctgagtccagggtattcagatgtgaagtttactgtcacgctcgagacaaaggacaagacccagaagttactggaatactcaggcctgaagaaaaggcacctgcactgtatcagttttctcgtcccacctccagctggtggaaccgaggaagtggcaactattcgcgtgtccggtgtgggaaacaatatcagctttgaggagaagaaaaaagtgctgatccagcggcagggtaacgggacattcgtccagaccgataaacccctctataccccaggccaacaggtctatttccgaattgttacgatggattccaacttcgtcccagtgaatgataaagtatcatgggaggaaggccaggaccccaactctaaccggattgctcagtggctcgaggtggttcccgaacagggaatcgtcgatttgtctttccagctggctcccgaagctatgctgggtacttatacggttgccgtggccgagggcaagacctttggaactttcagcgtggaagaatatgtgctccctaagttcaaggtggaggtcgtcgagccaaaggaattaagtacagtgcaggaatccttcctcgtgaagatctgttgcagatacacatacggcaaacccatgttaggagctgtgcaggtttccgtgtgccagaaagccaacacctattggtatagggaggtggaacgtgagcagcttcccgataagtgtcggaatttaagcggccagactgataagactggttgttttagtgcgccagtagatatggccactttcgacttgattggatacgcctatagccatcagattaacattgtggctacagtcgttgaggagggcaccggggttgaagccaacgctacacagaacatttacatcagccctcagatgggtagtatgacttttgaagatacatctaatttctatcatccaaacttcccattctccgggaagattcgggttagaggccacgacgactctttcttaaagaaccatctggtcttcctggtcatctatgggacaaatgggacattcaaccagaccctggtaacagataataacggccttgccccttttaccctcgagacttcggggtggaatggtaccgatgtgagtttggagggaaaatttcagatggaggatctggtgtataatcccgaacaggtgcccaggtactaccagaacgcctatctgcatcttaggccgttttattctacaacacgcagtttcctgggtatccaccgcctgaatggaccgttgaaatgcggacagccacaggaggtgctcgtggattattatatcgatccagccgatgcaagcccggatcaagaaatttcttttagttactacttaatcgggaaggggagtttggtgatggaggggcagaaacacctgaattctaagaaaaaggggttaaaagcaagcttctcattatctctcacattcacctcaaggctcgcaccggacccttcattagtgatctacgcaatcttcccaagtggaggggtggttgcagacaagattcaattcagcgttgagatgtgcttcgacaaccaagtatcgctaggttttagccccagccagcagctccccggagctgaggttgagcttcagttacaagcagctccaggcagcctgtgcgccttgcgggcagtggacgaaagcgttctgctcctgcggcctgatagggaactctccaatcgcagcgtctacggcatgttccccttttggtacggacattacccttaccaggttgccgaatacgatcaatgtcccgtcagcgggccatgggattttcctcagccgcttatcgatcccatgccccagggacatagcagccaacggtcaattatttggagacccagcttcagcgaggggaccgacctgttcagcttttttcgagacgtcggccttaagattctttctaatgcgaagatcaaaaagcccgtggattgcagccacaggagccccgaatactcaaccgccatgggggcaggaggcggtcaccccgaagccttcgagtctagtacccccctccaccaggctgaggactcccaggttagacaatacttcccggaaacatggctttgggacctgttcccaattggaaactctgggaaggaagccgtgcacgtcacagtaccagatgcgattactgagtggaaagcgatgtcgttttgcacaagccaatcccgaggattcggactgtcccccacggtcggccttacagcattcaagccgtttttcgtggacctaacactgccttactccgttgtgagaggcgaaagttttaggcttactgccacaatcttcaattatctgaaggactgcatcagagtccagactgaccttgcaaagagtcacgaataccagcttgagagttgggcagattcccagactagtagctgtctctgtgccgacgacgctaagacacatcactggaatatcaccgccgtaaaattagggcacataaattttacaatctcaaccaagattctcgactccaacgagccatgcggcggacaaaagggtttcgttccccagaaagggcgttctgacactctgatcaagccagtgctggtcaagccagaaggtgtcctggtggaaaaaacacacagttccctcctttgccccaagggcaaagtcgcatcagagtccgtgtctttggaacttcccgtcgatattgtcccggatagtacaaaggcttacgtgactgtactcggggacattatgggcacagcactgcagaatctggatggactcgtccaaatgccaagcggatgcggagaacagaacatggtactcttcgccccaatcatctacgtgctgcagtacctcgaaaaagccggattgttgacagaggaaataagatcaagagcagtcgggttcctggaaatcggataccagaaagaactgatgtacaaacactcaaatggatcttactcagcttttggagaacgggatggaaacggcaatacgtggttgacggcattcgttaccaagtgctttggtcaggctcagaaatttattttcatcgacccaaagaatatccaggacgcccttaagtggatggctggcaatcaactgccctccggatgttacgccaatgtcggaaatctgttacacacggcaatgaaaggtggcgtagacgacgaggtttctctcaccgcatatgtgacagccgcactgctcgagatgggtaaagatgttgatgatcccatggtgagccaaggcctgcggtgtctgaagaactccgccacttccacgacaaatctgtatacgcaggccttactggcatacatcttcagtcttgccggtgaaatggacatcagaaacatactgctgaaacagctggaccaacaggctataatctctggtgagagcatatattggagccaaaagcccactccaagcagcaatgcttctccgtggagtgaacccgcagccgtagacgtggagctgaccgcttacgcactcctcgcgcaactgactaaaccttccctgacacaaaaagagatcgccaaagccacttccattgtcgcttggctcgcaaagcagcacaacgcttatggcggttttagctcaactcaagataccgtggtcgccttacaagctcttgctaagtatgccacaactgcttacatgcctagcgaggagatcaatctggtggtgaaaagtaccgaaaacttccagcgaacattcaacatccagtctgtgaaccgcctcgtcttccagcaggacaccttgcctaatgtgcctgggatgtacactctagaggcaagcggccaggggtgcgtgtacgttcaaactgttctgaggtacaatattctgccacccactaacatgaagacttttagcttatctgtcgagatcgggaaagccaggtgcgagcagccgacctcacctcgttccctcaccctgaccatacatacctcttacgtcgggagccgcagctctagcaatatggccatcgtggaggtaaaaatgctgtccggtttctcaccaatggaagggacaaaccagctactactccaacaaccactggttaaaaaggtagaattcggcaccgacactctgaacatctatctcgacgagctgataaaaaacacccaaacctacaccttcaccatctcacagtccgtgcttgtgacaaacttaaagcctgccacgatcaaggtctatgactactatctgcccgatgagcaggcaacaatacagtactctgacccctgtgagtag

SEQ ID NO: 214147 - DNA, 3015 bp, synthetic construct
  misc_feature 1..3015: note = Description of Artificial Sequence: Synthetic coding sequence
  source 1..3015: mol_type = other DNA
tctttcctcggaattcataggttgaacgggccacttaaatgcggccagccccaagaagtgctcgtcgactactacatcgatcctgcggacgcctctcctgaccaggagatcagtttttcatactacttgatcgggaaaggaagcctggtgatggaaggacagaagcatttgaattccaagaagaaaggccttaaggccagcttctccctctctttgacctttacctcccgcctcgcgccagacccttcccttgtgatttatgcgatttttcctagtggaggtgttgtcgcggataaaatccagttctccgtggagatgtgctttgataaccaagtgtcactgggattctctccttcccagcagttgcccggagccgaggtggaactccaactacaggcggcaccaggcagcctgtgtgctcttagggcagtcgacgagtctgtccttttactacgcccagatcgtgaactgtcaaaccgctctgtgtacgggatgttcccgttttggtacggccattacccttatcaggtggcggagtacgatcagtgtcccgtgagtgggccttgggactttcctcaacccctgatcgaccctatgccccaaggccattcatcacagagatcaatcatttggaggccctccttctctgagggtaccgacctcttcagtttcttccgagatgtggggttgaaaatcttatccaacgccaagatcaagaagccagttgactgtagccaccgctcccctgaatattccaccgctatgggcgcaggcggaggtcatccggaagccttcgagtccagtacacccttgcatcaagccgaagactctcaggtgcgtcagtatttccccgagacatggttatgggacctgtttccgataggcaattcgggtaaagaagctgtacatgtcacagttccagacgcgatcacggagtggaaggcgatgtcgttctgtacctctcagtcgagggggtttggactgagtcctacagttgggcttaccgcattcaaacccttttttgtggatctgaccctgccatattctgtggtgagaggcgagagcttccgtctgacagctacaatattcaactatcttaaagactgtattagagtccagactgaccttgctaagagccacgaataccagctagagtcctgggcggacagtcagacaagtagctgcctttgcgctgacgacgccaaaacacaccattggaatatcacagctgtgaagctcgggcatatcaactttacaatctcaacgaaaattctggattccaacgaaccctgcggagggcagaagggttttgtgcctcagaaaggcagaagcgataccctgataaagcctgtcctggtgaaacccgagggcgtcctggtcgagaaaactcattcctcactcctgtgcccaaaaggcaaagtagcttccgaatccgtgagccttgaactgccagtggacatcgtgccagacagcaccaaggcctatgtcacagtgctgggcgacattatgggaacagcacttcagaacttggacggcctcgtccaaatgcctagtgggtgtggggagcagaacatggtgcttttcgctcctattatctatgtcttgcaatacctggagaaggccggtctgctgaccgaagagatcagaagtagagccgtgggatttctggaaattggatatcagaaggaactgatgtacaaacacagcaacgggtcttactcagcattcggagaacgggacgggaacggcaacacctggttgactgcctttgtgacgaaatgtttcggacaggcccagaagtttatcttcatcgacccaaagaacatccaggacgcgctcaaatggatggctggtaatcagttgcctagtggatgctacgccaatgtgggtaatctgctccacacggccatgaaagggggtgtcgacgacgaggtgtccctgactgcctacgttactgccgcacttctggagatgggaaaggatgtggatgatcccatggtaagtcaggggctgcgttgcctaaaaaacagcgccactagcacaacgaatctttacacccaggccctgctggcttacatcttctcactagccggtgaaatggatattcgtaatatactgctgaaacagctggaccagcaggctataatcagcggcgagtcaatctactggagccaaaagcccaccccgagctccaatgcctcaccatggtccgagcctgctgccgttgacgtggagttaacagcctatgctctattagctcaactaacgaagccttcccttacccagaaggagattgctaaggcgacaagtattgtggcatggttggcaaaacagcacaacgcctatggaggctttagttctacccaagacactgtcgtggccctgcaggcacttgctaagtatgctacaaccgcatacatgcctagtgaggaaatcaatctggtggttaaatcgactgaaaattttcagcgcacctttaacatccagagcgtaaatcggctagtgtttcagcaggatacactgcccaatgtgcccggtatgtacaccttagaagcttccgggcagggatgcgtgtacgtgcagacagtcctaagatataacatactgccaccgaccaatatgaaaaccttcagtctttctgttgagataggtaaggccaggtgtgaacagcccacctccccgaggagcttaaccctcacaatccataccagctacgtgggatctaggagcagttctaatatggccattgtggaggtcaagatgctatctggcttttcccctatggagggcacaaatcaactgctcttacagcagccacttgtgaagaaggtggagttcgggactgacactcttaatatctacctggatgagctaatcaagaatacgcaaacttatacgtttaccatatcacaaagcgtcctggtcaccaacctgaagccggctactattaaagtttacgattattacctcccggacgagcaggctacgatacaatattctgacccatgtgagtag

SEQ ID NO: 214148 - DNA, 1830 bp, synthetic construct
  misc_feature 1..1830: note = Description of Artificial Sequence: Synthetic coding sequence
  source 1..1830: mol_type = other DNA
atgaagtgggtggagtctatctttttaatcttcctgcttaattttacagagtcccggactctccaccgcaacgaatacggcatcgctagcatccttgattcttaccaatgtaccgccgagatctccttagccgatcttgctacaattttcttcgcgcaattcgtccaggaggcaacctacaaagaggtgtctaaaatggtgaaggatgccttgactgctatcgagaagccaacgggtgacgagcagtcttcagggtgtctggaaaatcaattgcccgcatttttggaggagctgtgtcacgaaaaagaaatactggagaagtatggccactcagactgttgttcacagagtgaggaggggaggcacaattgtttccttgctcataagaaaccaacccccgcatctatcccattgttccaggtgcccgagccggtcacatcctgcgaagcctacgaggaggaccgcgaaacctttatgaataagttcatctacgaaatcgccaggcgtcacccatttctgtatgcacccaccatccttctttgggccgctcggtacgataagattatcccctcttgctgcaaagcggagaatgcggtcgaatgctttcagactaaagccgctacagtgactaaggaacttcgcgagtcttctctgctgaatcagcacgcctgtgcagtgatgaagaacttcggaacccggacattccaggcgattactgttaccaagctgtcccagaagttcactaaggtgaattttaccgagattcaaaaactggtgctggatgtcgctcacgtgcacgaacattgttgcagaggcgacgtgctggattgcctacaggacggtgaaaaaattatgagctatatttgttcgcaacaggataccctgtccaacaagatcaccgagtgctgcaaactcacgaccctcgagcgcggacagtgtattatccatgccgagaacgatgagaagcccgaggggttgtctcctaatctgaaccgttttctgggagatagagacttcaaccagttttcctctggggagaagaacatctttctcgcctctttcgtccacgagtacagtagacgacatccacaattagcagtgtccgtaatactgagagtggcgaagggctatcaagaacttctcgagaagtgcttccaaactgaaaatccactggaatgccaggataaaggagaagaagagctgcaaaagtacatccaggagtcgcaagccctcgccaaacggagttgcggcctattccaaaagctaggagaatattatctgcaaaatgcctttttggttgcatacacaaagaaggcgccacaactaacctcttctgagctaatggccattacacgcaagatggcagctactgctgcgacatgttgccagctgtcagaggataaactcctggcctgtggagaaggcgcagctgacatcatcatcggacacctgtgtatacgccacgaaatgactcctgtgaatcccggagtgggccagtgttgcacatcaagctatgccaacagaaggccctgtttttcatcactagtggtcgacgaaacctacgtaccacctgctttctctgacgacaagttcatttttcataaggacctttgtcaggctcagggtgtcgcactccagaccatgaagcaagaattcttaatcaacctggtcaagcagaagccccagataaccgaggagcagttagaagcggtgatcgctgacttttccggtctacttgagaagtgttgccaggggcaggagcaggaggtttgctttgccgaggaaggccagaagctaattagtaagacaagggcagcccttggcgtctag

SEQ ID NO: 214149 - DNA, 3735 bp, synthetic construct
  misc_feature 1..3735: note = Description of Artificial Sequence: Synthetic coding sequence
  source 1..3735: mol_type = other DNA
atgaataatcagaaggtggttgccgtgctcctgcaagaatgcaagcaggttcttgatcaactcctcctagaggctcccgatgtcagcgaagaagacaaaagcgaggatcaacgctgcagggcgctgctgccatctgaattgaggacccttatccaggaagcaaaggagatgaaatggccctttgtacctgagaagtggcagtataagcaggccgtcggtccggaggataaaacaaacttgaaggacgttattggagccggtctccaacaactgctggcctccctgagggccagtattttggcgagggactgtgccgcagccgctgcaatcgtctttctcgtggaccgatttctgtacggactagatgtttcgggcaagctcctccaagtcgccaagggcttacacaaactgcagcctgctacccccatagcccctcaggtagtgattaggcaggccagaatttccgtgaacagtggcaaacttttgaaagccgagtacatcctctccagtctgataagtaacaacggagctacaggcacctggctgtacagaaatgaatcagataaggttctggttcagtctgtttgtattcaaattcgaggccagattttgcagaaactcggtatgtggtatgaagcagcagagctaatctgggcaagcattgtgggataccttgcgctcccccagccagacaaaaaaggactgagcacgagcttgggcattctggccgacattttcgtatctatgtctaagaatgattacgagaagtttaagaataacccacaaattaacctgtctctgttgaaggaattcgaccaccatcttctgagtgccgcagaagcttgcaagctggccgctgccttcagcgcctacaccccattgttcgtcctgaccgccgtgaatataagggggacatgtctactatcatacagttcctcgaacgactgtcctcctgagttgaaaaatttacacctgtgcgaggccaaagaagccttcgagataggactgttaactaagcgcgatgacgaacctgtgacaggcaagcaggagctgcacagttttgtgaaggcggcttttggtctgacgaccgtacaccgaagacttcacggtgagaccggtacagtgcacgcggcatcacagctgtgcaaggaggccatggggaaattgtacaacttttcaactagctcccgttcccaggatcgagaagccctcagccaggaggtcatgagtgtgattgctcaggtcaaggaacatttgcaagtccagtcgtttagcaacgtggacgacaggtcctatgttccggagtcatttgaatgccgcctggataagctaattctccatgggcagggggacttccagaaaattctggacacatacagtcaacaccacacgtcagtgtgcgaggtcttcgaatcagattgtggaaataataaaaatgagcagaaggatgccaagacgggggtctgtattacagccctgaaaactgaaatcaaaaacattgataccgtcagcacgactcaggagaagccacactgtcagcgagatactggcatatcatctagcctgatgggtaagaatgttcagcgggaactgcgcagaggtggtcgccgtaattggactcactccgacgcattcagagtgagcttggaccaggacgtggaaacggaaacagagcccagtgactattccaacggcgaaggcgcagtgtttaacaagtctctgtctggaagtcaaacttcctcagcttggagtaatctgagcggattcagctcttcagcatcatgggaggaggtgaattaccacgtggacgatcgaagtgcacgaaaagaacctggcaaggaacatctggtcgatacgcagtgctctactgctctatccgaagagttagagaatgatagggaaggccgtgctatgcactcactccattcccaactgcacgatctctcactccaggaaccaaacaacgataacctggagcctagccaaaatcagcctcagcaacagatgccattgaccccattcagtccccacaatactccaggcattttcctggcacctggggctgggttactggagggtgcccctgagggaatccaggaagtgcgcaacatggggccaagaaataccagcgctcactcccggccttcctacagaagtgccagctggtcttccgattcaggacgtcctaagaatatgggaactcacccttctgtgcagaaggaggaggcttttgaaataatcgtggagttccctgagaccaactgtgatgttaaggataggcaaggaaaggagcaaggtgaagagatcagcgaacggggagctggcccaacattcaaagcgtccccatcttgggttgaccccgagggcgagaccgcagaaagcactgaggatgccccactcgatttccacagggtattacacaacagcttaggcaatatatctatgctgccttgctcatcgttcacaccgaattggccagtgcagaaccccgacagccgcaagtccggtggcccagtcgccgagcagggcatcgacccagatgcgagcacagttgatgaggaaggccagcttctggatagcatggatgtgccctgcacgaacggccacggtagccacaggctgtgtatcctgcggcagccgcctggacagagggcagagacacccaactcatcagttagtggcaacattcttttccccgtgctgtcggaggactgcaccactacggaagaaggtaaccagcctggcaatatgcttaactgttctcagaattctagcagcagttcggtctggtggttaaagtctcccgctttcagctcagggtcctcggagggagactcaccatggagttatctgaactcatcaggctccagctgggtgtccctgccaggaaagatgcgtaaggaaatactggaggccagaacccttcagcccgatgatttcgagaaactcctggcaggggtaaggcatgactggttgttccagaggctagagaacaccggtgtctttaagcccagccaattgcatagagcccatagtgcccttctgctgaaatattcaaaaaaaagcgaactctggacagcccaggaaacgattgtatacctcggggactacctcacggtgaaaaagaaagggagacagcgcaacgccttctgggtgcatcatttacatcaggaggaaattttaggcagatacgtgggaaaagattacaaggaacaaaaaggattgtggcaccattttacagatgtcgagcgccagatgacagcccaacactacgtcaccgagtttaacaaaaggctgtacgagcaaaacattcccacgcagattttctatatcccctccaccattctgcttatattagaagacaaaactatcaagggatgtatctcggtggagccttacatactgggagaattcgtcaagctaagtaacaatactaaggtggtaaagacagagtacaaagccaccgagtacggcctggcctacgggcatttttcttatgagtttagcaaccacagggatgttgtcgtggaccttcaaggctgggtcactggaaatggcaagggtctgatctatctaaccgatcctcagattcacagtgtagaccagaaggtgttcactactaactttggtaagagaggaatattttacttttttaataaccaacatgtagagtgtaacgagatctgccatcggctgtctctgacccggccatctatggaaaagccttgtacttag

SEQ ID NO: 214150 - DNA, 429 bp, synthetic construct
  misc_feature 1..429: note = Description of Artificial Sequence: Synthetic coding sequence
  source 1..429: mol_type = other DNA
atgaataaccagaaagtcgtggccgtgctgctacaggagtgcaaggcccttttgccctcggagctccggaccctgattcaggaagctaaggagatgaaatggccttttgtgccagaaaagtggcagtacaagcaggcagttggcccagaggataagacaaacctgaaggatgttatcggggctgggctccagcagctgctggcctccctgcgcgcatccatcctcgctcgagattgcgcggctgccgcagcaatcgtcttcctagttgaccggttcctctatggcctggatgtgtcgggaaagctgttgcaagtcgctaagggactgcacaaactccagccagccacaccaattgccccacaggtggtcatacgacaagccaggatctctgtgaatagtggctcacatccggctaagcattccatgtag

SEQ ID NO: 214151 - DNA, 3735 bp, synthetic construct
  misc_feature 1..3735: note = Description of Artificial Sequence: Synthetic coding sequence
  source 1..3735: mol_type = other DNA
atgaacaaccagaaagttgtcgccgtgctgctgcaagaatgcaagcaggttctcgatcagctcctgcttgaagctccggacgtctcagaggaggataagtctgaggatcagcggtgccgagccctgctacccagcgaactgaggaccctcatccaggaggccaaggaaatgaagtggccattcgtgccagaaaaatggcagtacaagcaagctgtgggacctgaagataaaactaatctgaaagatgtgatcggagccggtctgcaacaactgctggcctccttgcgcgcaagtatcctggccagagactgcgctgccgcagccgctatcgtgtttctggtcgataggtttctgtacgggcttgacgtttctggtaagctgttgcaggtcgccaagggcctccacaagctacaacccgctacgcctatcgcccctcaggtcgtgataagacaggcccgaatcagcgtgaatagtggcaagctactaaaagcagagtatattttaagcagtcttataagtaacaacggagctactggcacttggttgtatcggaacgaatcggataaggtgctggtccagtcagtctgcatccagatccgtgggcagatccttcaaaagctgggcatgtggtacgaggccgcagagctaatttgggcctctatcgtcggctatctcgctctaccccagcctgataaaaaaggcctgagtacatcccttggaattttagccgacatttttgtttcaatgtccaaaaatgactacgaaaaatttaagaacaatccccagatcaatttgagcctcctgaaggagttcgaccatcaccttctgtccgctgctgaggcgtgtaagcttgcagccgctttctctgcttatactccgttgttcgttcttaccgcagtaaatatccgaggcacttgcctactttcgtattcctcgtctaacgattgccctcctgaactgaagaaccttcacctgtgtgaggccaaagaagccttcgaaattggtttgctaacgaagcgggacgatgaacctgtgactggaaagcaggaactgcattctttcgtgaaagcagcctttggactcactaccgtccaccgcagactgcacggggaaacaggtacggtgcatgccgcatcccagctgtgtaaggaggccatgggaaagctttacaactttagtaccagctcccggagccaagaccgggaagctctgagccaggaggtaatgtccgtcattgcacaagtgaaggagcacctgcaggtgcagtccttctccaacgtggacgatagatcttacgtgcctgagtcttttgagtgccgactagacaagctgattttgcacggacagggagacttccagaaaatcctggatacttatagccagcatcacacatctgtgtgcgaagtcttcgagagcgactgtggaaacaacaaaaatgaacagaaagatgccaaaaccggggtgtgcatcactgccctgaagaccgaaatcaagaacattgatactgtcagtaccacacaggaaaaaccacactgtcagagggatacagggatttcaagctctttgatgggcaagaacgttcagcgggagctgaggcgcggtgggagaagaaactggacacactctgacgcattcagggtatcactggatcaggacgtggaaacagagaccgaaccttccgattatagcaatggcgagggagctgtctttaataagtcccttagtggtagtcagacaagcagcgcctggagcaatttgtctggattctcctcttcagcctcctgggaagaggtcaattatcacgtggacgaccggtccgcccgtaaggagcccggtaaggaacacctggtggatacgcagtgttccacagccctttccgaggaattggaaaatgatagagaaggtcgagctatgcactcacttcacagtcagctccacgatttatcacttcaggaacctaataacgataaccttgaacccagccaaaatcagccacaacagcagatgcccttgacccccttcagcccacataacacacctgggatatttctagcacctggtgcaggccttctcgagggagcgccagaagggatccaggaggtgaggaatatgggtccgaggaacacgtcagcacactcccgcccttcatacaggagcgcctcctggtcttccgactccggaagaccaaagaatatgggtacgcaccctagcgtgcagaaagaagaagcattcgagattatcgtggagtttccggagacaaactgcgatgtaaaagaccggcagggcaaggagcagggggaggagattagtgagcgtggcgctggccctacatttaaggcatccccatcatgggtggaccccgagggtgaaaccgctgagtctacagaagacgccccactggacttccatcgcgtcctgcacaattccttaggaaacatcagcatgttgccctgttccagctttacacccaactggcctgtgcagaatccggactctcgcaagagcggcggacctgtcgccgagcaggggatcgaccccgacgcctctaccgtcgatgaggagggccagctgttggattcgatggatgtgccgtgcacaaatggccacggtagtcacaggctctgcatcctgcgccaaccccctggccaaagggccgagacacccaattcttccgtctcagggaacattctattcccagtgttgagtgaggactgcactaccacggaggaaggcaaccagcccggaaatatgctgaattgctcacagaatagttcgagcagcagtgtatggtggctgaaaagtccagccttctcttccggcagctccgagggcgacagcccctggtcctatcttaatagttccggttcctcctgggtttctctccccggaaaaatgcgaaaagagattttggaagccagaaccctccagcctgatgacttcgagaaattactggctggtgtgcgacacgattggttattccagcggcttgaaaataccggggtctttaaaccctcacagttgcacagggcccactcagccctgcttctgaagtatagtaagaagtccgagctctggacagcccaagaaactatcgtgtatctaggagattatctcacagtgaaaaagaaaggtcggcagaggaatgcattctgggtgcaccacttgcatcaggaggaaatcctcggacggtacgtcggaaaggactataaagaacagaagggtctctggcatcacttcacagatgtcgaaaggcagatgaccgcacagcactatgtaactgaattcaataagcgcctgtatgagcagaacatcccaactcagattttctatatcccttccactattcttctaattctggaggacaagacaataaaggggtgcatttctgtggagccctacattctaggggagtttgttaagctgagtaacaacacgaaggtagtcaaaaccgaatacaaagcgacagaatacgggctcgcttatggtcacttcagctacgaattcagcaatcacagagacgtcgtggtcgatcttcagggttgggtaactggaaacggtaagggattaatctacttaaccgatccacagatccattcagtggaccagaaggtcttcaccaccaattttggcaagcgaggcatcttctactttttcaacaaccagcacgtggagtgtaacgaaatttgccacagactgagcctaacaaggccgagcatggagaaaccctgcacgtag

SEQ ID NO: 214152 - DNA, 3501 bp, synthetic construct
  misc_feature 1..3501: note = Description of Artificial Sequence: Synthetic coding sequence
  source 1..3501: mol_type = other DNA
atgtgcaggaagaggacacgggctagaaccagcgcagcagaagctagcctgagggcgagcatcctagcacgcgattgtgctgccgcagctgccatagtgtttctcgttgatcgcttcctgtatggcctcgatgtctcaggaaaactcctacaggtagctaagggacttcacaagcttcagcccgcaactccaatcgccccacaggtcgtcatccgccaagctaggatttcagtgaattccggcaagctgttgaaagcagaatacatcctctcgtcccttatctcgaataacggggcaacaggcacatggctttataggaatgaaagtgataaagtgctggtgcaaagcgtgtgcatacagattaggggtcagatcctgcagaagttgggaatgtggtacgaggcagctgaactgatctgggcctccattgtggggtacctggctctgcctcagccagacaagaagggattaagcacctcattaggaatcttggccgacatcttcgtaagtatgagcaagaacgactacgaaaagttcaaaaataatccccagatcaacctgtctcttctgaaggaattcgatcaccatctactgagcgccgctgaggcttgtaaactggccgctgccttcagtgcttacactcccctcttcgttctgacagctgttaacataagaggcacatgcctgctctcatactctagcagtaacgattgtccaccagagctgaagaatctccatctgtgtgaagctaaagaggcatttgaaataggcctgctcacaaagcgcgatgatgagcctgtgaccggtaagcaggaactgcatagcttcgtcaaggcggcttttggactgacaacagtgcatcgccgactgcatggggagacaggtacagtgcacgctgcaagccagctttgcaaagaggccatgggaaaactctacaacttcagcacatcatctcgaagccaggaccgggaggccctctcacaagaggtgatgtcagtgatagcccaggtcaaggagcacctgcaagtgcaatccttcagcaatgtggatgatcggtcctacgtccccgagagctttgaatgccgtttagacaagctaatccttcatgggcagggcgactttcagaagatcctggatacatattcccagcatcatacctcagtttgcgaagtgttcgagagtgactgtgggaacaataaaaatgaacagaaggatgcgaaaacaggcgtgtgtatcaccgcgctcaagaccgaaattaagaatatagacaccgtatccaccactcaggagaagccacattgccagcgagacaccgggatcagcagtagcttgatgggaaaaaatgtccaaagagaactgaggagaggtgggcgaaggaattggactcattccgacgcctttcgcgttagtttggatcaggacgtcgaaaccgaaactgagccctcagactacagcaatggtgaaggggcagtgttcaataaatctctgagcggttctcagaccagctcagcctggtcaaatctatctggcttcagttccagcgctagctgggaggaagtgaattaccatgtggatgatcggagtgcaagaaaagagccaggtaaggagcacctggtcgatacccagtgttccaccgccctgagcgaggaactagagaacgaccgggagggaagggccatgcactcactccattctcagttgcatgacctctctctgcaggaaccgaacaatgataatctcgagccctctcaaaatcagccgcagcaacaaatgcctctgacccctttttcccctcacaacacgcccggtattttcttggcgccaggtgccggactccttgaaggcgctcctgagggcattcaagaagtgcgaaatatgggccctaggaacacttctgcccattctcgccctagctaccgctctgctagttggagctctgatagcggtagaccaaagaacatggggacccatccatccgtacagaaggaagaggcgttcgaaatcatcgtagagtttcccgaaacgaattgcgacgttaaggatagacagggaaaagaacagggtgaggagatctcagagcgtggcgcaggacccaccttcaaagcttccccttcctgggttgacccggaaggagaaaccgctgagtcaactgaggatgcccctctcgacttccaccgggtgctacataattctctggggaacatctcaatgctcccttgttcctcattcaccccaaattggccggtacagaatcccgattccaggaaaagcgggggtcctgtggctgaacaaggtatcgacccagatgcatctactgtagacgaggaaggccagctgttagatagtatggatgttccatgtacgaacggtcacggatctcataggctgtgcattctgcggcagccaccaggccagagagccgagaccccgaacagctctgtctccggtaatattctatttccagttctatccgaagattgtactaccactgaggagggcaatcagcctgggaacatgctgaattgcagccagaattcctcatctagctcagtgtggtggcttaaatctccggctttctcttccggctcaagcgaaggagatagtccctggtcctaccttaacagctccggctcttcatgggtaagcctgccaggaaagatgagaaaggagatcctcgaagcaaggaccctgcagcctgacgacttcgagaaactcctggccggtgtgagacacgactggctgtttcagagactggagaacactggggtgttcaaaccatcccaactgcatagggcacatagcgcgctgttgcttaaatactcaaagaaatccgaattgtggacagcacaggaaaccatcgtttatctgggagactacctgactgttaaaaaaaagggacggcagaggaacgccttctgggtgcaccacctgcaccaggaggaaatcctgggtagatacgtgggcaaggactataaagagcagaaggggctctggcatcactttactgatgtggagcgccaaatgacagcccagcattacgtgacggaatttaacaagagactttacgagcagaatatccctacccagattttttacataccgagtacaatcctgctgattctagaagataagactataaagggctgtatttctgtcgaaccttatatcctgggcgagttcgtgaaactctctaataatacaaaggttgttaaaacggagtataaggccacggagtatggactggcgtacgggcacttctcctacgagttctcaaaccacagggatgtggtggttgatcttcagggctgggtcaccggcaatggaaaaggcttaatttatctgacggacccccagatacattccgtggatcagaaggtcttcaccaccaactttgggaaaaggggcatcttctacttctttaacaatcaacatgtggagtgcaacgagatatgccacaggttgtcattgaccagacccagtatggagaagccctgtacttag

SEQ ID NO: 214153 - DNA, 1149 bp, synthetic construct
  misc_feature 1..1149: note = Description of Artificial Sequence: Synthetic coding sequence
  source 1..1149: mol_type = other DNA
atggctttgcagggtatatccgttgttgagctatcaggtctggcccctggccctttctgcgcaatggtgctggccgactttggcgctagggtagtgagagtggatcggcctggctcccgatacgatgtgagccggttgggcagaggaaaacggtcattggtcctcgacttgaagcagcctagaggtgcagccgttcttcgaagactgtgcaagcgcagcgatgtgctgctggagccgttccgacggggagtaatggagaaattgcaactcggtccagaaatcctgcagagagaaaacccgagactgatctacgcacggcttagcgggttcggacagtccggaagcttctgcagacttgccggacacgacatcaactatctggccctctcaggtgtattgtccaaaattggaaggtcaggggagaacccttatgcacccttgaacttgctagccgattttgccggaggcggattaatgtgtgcgctggggattatcatggctctgttcgaccgcacacgtacaggcaagggacaagtgatcgacgctaacatggtggagggtactgcttatttatctagcttcctctggaagactcagaaactgtctctgtgggaggccccaagaggacaaaatatgctggacggtggcgctccattttacaccacatatagaacagctgacggtgagttcatggctgtgggggctattgagcctcaattctacgagttactcataaagggcctcggcctgaaatctgacgagttgccaaatcaaatgagtatggacgactggccagaaatgaagaaaaaatttgctgatgtgttcgcagagaagaccaaggccgagtggtgtcagatctttgacgggactgacgcttgcgtcacgccagtcctgacgtttgaagaagtggttcatcacgaccataataaggagcgcggatcgttcataaccagcgaagaacaagacgtgagccccagaccggcacctttactactgaacacccccgcaattccctcctttaagcgggacccattcattggcgagcacacagaagaaatccttgaggagtttggattcagccgcgaggaaatttaccaattgaattcagacaaaatcatcgagtcaaataaggtcaaagcttccttgtag

SEQ ID NO: 214154 - DNA, 597 bp, synthetic construct
  misc_feature 1..597: note = Description of Artificial Sequence: Synthetic coding sequence
  source 1..597: mol_type = other DNA
atggcactgcaggggattagtgtggtggagctgtccgggctggccccagggcctttctgtgctatggtgctggccgactttggtgctcgggtcgtcagagtagacagacctggaagtagatacgacgtgtctaggctggggaggggcaagcgatcgctggtgcttgacctgaaacagcctaggggagcggctgttcttcgtcgtctgtgcaaacggtctgacgtgctcctggaacctttcagacgaggggtcatggagaagcttcaactgggcccagagattttacagcgcgaaaaccccagattgatctacgccagactaagcggatttggtcagagtggctcgttctgcagacttgccggtcacgatatcaattacctggccctatcgggtgggcgaaattctatatttaaatttttcagtgtcgagaattcagagatagagagtgtgggttccacctctcggactgagcacgtaggttggtggtccaccttcctgtacgatcttcaagattccagatggggcatccatgggtgctggtcaaatcggacgcctgttctgagggcagcagatcagcggacctggaccaaggtgtag

SEQ ID NO: 214155 - DNA, 690 bp, synthetic construct
  misc_feature 1..690: note = Description of Artificial Sequence: Synthetic coding sequence
  source 1..690: mol_type = other DNA
atggctttgcagggtatctcagtcgtcgagctctctggtcttgccccaggccctttctgcgctatggtcctggccgacttcggggcacgcgtagttcgggtagacagacctgggagcagatacgatgtctcccggctggggagaggaaagcgatctttggtgctggacctgaaacagccaagaggtgccgcagtgcttcggcgtctctgcaaaaggagcgatgtgctgctagaaccttttagaagaggagtaatggaaaaattacagctgggacctgagattcttcagagagaaaatccacgcctgatctacgctcgactctcaggctttgggcaatctggctctttctgtcgcctagctggccacgacatcaactatttggctctgtctggaggacggaactccattttcaaatttttctctgtcgagaactctgagatcgagtctgtgggcagcaccagcaggaccgagcacgtcggatggtggtctacctttctgtacgatctgcaggatagccgctggggaattcacggatgctggagcaaccgaacaccagtgttacgggcagcagaccaacggtctcttataccgtactttaatctttatctgcagtttctgaacatttcgatgcagaacctttttaaggttcacaccctgctgcgaccctgttacttccttggtcaaaaatag

SEQ ID NO: 214156 - DNA, 1185 bp, synthetic construct
  misc_feature 1..1185: note = Description of Artificial Sequence: Synthetic coding sequence
  source 1..1185: mol_type = other DNA
atggcacttcagggtatctctgttgttgaactgagcggactcgcacctggacctttttgcgccatggtcttggccgatttcggcgctcgtgtagtgcgggtggatagaccaggcagtcgttacgacgtgtctagattaggaagaggcaaaaggtcattggtgttggatctcaaacagccaaggggggctgcggtcctgagacggttgtgcaaacggtctgatgtactgctggagcctttcagaagaggagtgatggaaaaacttcagttaggaccagagatcctgcagcgcgagaacccaagactgatctacgctaggttgtcaggcttcggtcagtccggctctttctgtagactcgctggtcacgatatcaattatctcgcactaagcggcgtgctctctaaaatcggccgatctggcgagaatccctacgctcccctcaatctactcgcggactttgctggagggggtctgatgtgtgctctgggcataatcatggcactctttgaccgcacccggactgggaagggccaagtaatcgacgccaacatggtagagggcaccgcatacctgtcctcgtttttatggaagacccaaaaactctccttgtgggaagcccctcgcggacaaaacatgttagacggaggcgctcctttttacaccacctatcgtaccgcagatggcgaatttatggcggttggtgccatcgagccccagttctacgaactcctcatcaaaggcttaggcctgaagtccgacgagctgcctaaccaaatgtccatggatgactggccagaaatgaagaagaaatttgccgacgtttttgcagaaaagaccaaagccgagtggtgccagatctttgacggaaccgacgcctgcgtgacacctgtgctgacatttgaggaagtggtacaccacgaccacaacaaggagcgaggatctttcatcaccagcgaggaacaggacgtgagccctaggcccgcacctttgttgctcaacacgcccgctatcccatccttcaagcgcgacccttttatcggggagcatacagaggaaattctcgaggagttcggattttcccgagaggaaatatatcagttaaacagtgataaaatcatcgagtccaataaggctggctcaaaattctggatcctgtatccgacgcactccaacatacaaaaatag

SEQ ID NO: 214157 - DNA, 1002 bp, synthetic construct
  misc_feature 1..1002: note = Description of Artificial Sequence: Synthetic coding sequence
  source 1..1002: mol_type = other DNA
atggcggcaggttgctgtggcgttaagaagcagaagctatcgtccagccccccttctggctctggcggtggcggtggcgcatcgtcatctagtcactgctcgggtgagtcccagtgcagggcgggagagcttgggctgggtggggcaggaactcgtctaaacggtttggggggattaacagggggaggatcaggcagtggatgcacgttaagtccacctcaaggctgcgggggagggggtgggggtattgcactgagcccaccgcctagctgcggggtcgggactctgctgtcaacacctgctgccgcaacgagctcctctccttcctcctcaagtgccgctagcagttctagcccgggtagtaggaaaatggtggtaagcgctgagatgtgctgcttttgcttcgatgtgttgtactgccacctatacggctaccagcaacctagaacaccacgatttacgaacgaaccatacccactgtttgtgacttggaaaattggcagggacaagagactgagaggctgtataggtaccttttcagctatgaatttacacagcggattaagagagtatacattaacatccgctttgaaagactcaagattcccaccaatgactcgggacgagctgcctagactgttttgtagcgtgtcattgctgaccaatttcgaagatgtgtgcgactatctggattgggaggtgggcgtgcacgggattaggatagagttcatcaacgagaagggcagcaagaggacagccacttatctcccggaggtcgcaaaggagcagggatgggaccacatccagacgattgactcgttactgcggaagggaggatacaaagctcctattacaaatgagttcaggaagacgatcaaactgaccagatataggtctgaaaagatgacccttagctatgcagaatacctggcacaccgccaacatcaccatttccagaatggaatcggacacccccttccaccctataatcattattcatag

SEQ ID NO: 214158 - DNA, 633 bp, synthetic construct
  misc_feature 1..633: note = Description of Artificial Sequence: Synthetic coding sequence
  source 1..633: mol_type = other DNA
atggtagtatctgccgaaatgtgctgtttctgcttcgatgtactgtactgccatttgtacggctaccagcaacctagaacccccaggttcactaatgagccctatcccctgttcgtaacgtggaagatcggtagagacaaaagactgcgtggttgcattgggactttttccgcaatgaatttacattctggattgcgcgagtatactcttacttccgcactgaaggattctcggttcccgcctatgacgcgagacgaactgccaaggcttttttgctccgtttccctgttgactaacttcgaggatgtttgcgattacctggactgggaggtgggagttcacggtatcaggatcgagtttataaatgaaaaggggtcaaaacgcacagcaacatatctgcccgaagtggccaaagaacaggggtgggaccacattcaaaccatcgatagcctccttcgaaaaggcggatataaagcccctattacaaatgaattcagaaaaacaattaaactcacaagataccggtctgagaagatgacattgagttacgccgagtatctcgcgcatcgccagcatcaccacttccagaatggtattggccaccccttgcccccttataatcactattcttag

SEQ ID NO: 214159 - DNA, 891 bp, synthetic construct
  misc_feature 1..891: note = Description of Artificial Sequence: Synthetic coding sequence
  source 1..891: mol_type = other DNA
atggctgccggatgttgtggtgtgaaaaagcagaagctctcctcctctcctccctctggctcgggtggcggaggcggagcaagctcctcatcccactgctctggggaatctcagtgcagagccggagagcttgggctgggtggcgctgggactcgattgaatggcctggggggattaactggtggagggagtgggtctggatgtacactctctcctccccagggctgcggcggaggaggagggggtatcgcactgtcgcccccaccttcctgtggcgtgggaactttgctgtctacacctgccgctgcaacgagttctagcccctcctcatcatccgccgctagtagcagcagccccggttcccggaagatggtggtgagcgccgaaatgtgttgcttctgcttcgatgttctgtattgccacctctatggctatcagcagccacggacaccacggtttaccaacgagccctatgccttgaaagactcacggtttcctccgatgactcgtgacgagctcccacgcctcttctgctcggtttctctgttaactaacttcgaagacgtgtgtgactatttggactgggaagtcggtgtgcacggaattcgaatcgagtttatcaacgagaagggctctaaacgtacggccacttacctgcccgaagttgcgaaagagcagggttgggatcatatacagaccatcgactcactgctcagaaagggagggtacaaggcaccaatcacaaacgaattccggaagaccatcaagctgacacggtatcggtcagagaaaatgacgctgtcttacgctgaatacctcgcacaccgtcagcatcaccactttcaaaacgggataggacaccccctgccaccctacaatcactattcctag

SEQ ID NO: 214160 - DNA, 2862 bp, synthetic construct
  misc_feature 1..2862: note = Description of Artificial Sequence: Synthetic coding sequence
  source 1..2862: mol_type = other DNA
atgtgtaacccagaagaggctgccctgttgcggctagaggaagtgttttccgccaccttagcccatgtcaattcgctcgtgcttcagcctctgctcccagctgcgccagatcccagtgatccttgggggagagagtgcctccggctcctgcaacagttacacaagagctcacagcagttatgggaggtcacggaagaaagcttgcactctctccaggaacggctgcgctatccggattccaccggcctggagtctctgctcttgctgcggggagcggatagggtattacaggcccacattgaatacatcgaaagttatacttcctgtatggtggtacaggctttccagaaggcagctaaacgcaggtcagaatactggcggggacaacggaaagcactcaggcaattactcagcggagtatcttccgaggggtctgtgggtgcttccttgggccaagccctccaccagcccctggcgcatcatgtccagcagtatgtgctgctgcttctgtcgttgggggacaccataggggaacaccaccctacaagggagttggtagtcaatgccgtgacactgttcggtaatttacagagctttatgaagcaagagttggaccaggccgtcgcgacccaggccctctggcacacacttcgagggcgtctgcgggatgtactctgcactcctgcccataggctgttgcaggatagccaggatgtacccgtgactgtggcacccctgagagctgagagggtgttattgtttgatgacgctttagtgcttctacagggacacaatgtccacacgtttgacctgaaactggtctgggttgacccaggtcaagatgggtgcacattccaccttcttaccccagaggaggagttcagcttctgcgccaaagattctcagggccaagctgtgtggcagtggaaagttacatgggctgtccatcaggctctccacggaaagaaggacttccccgtgctgggcgctggcctggaaccctctcaaccccctgactgtcgctgtgctgagtataccttccaggcggagggcagactatgccaggcaacttacgaaggcgagtggtgccgtggcaggccacacgggaaggggactctcaagtggccggatggacggaatcacgtgggaaatttctgtcaaggtttggagcacgggttcggaattcgcctcctgccccaagcgtcggaggataaatttgattgttacaagtgtcattggagagaggggagcatgtgcggttacggcatctgcgagtattccacggacgaggtgtacaagggatacttccaggaaggactccgccacggttttggggtactagaaagcggccctcaggcaccacagccgtttaggtacactggacattgggagaggggacaacgcagcggctatggcatcgaagaagatggagataggggggaaagatacattggcatgtggcaggccggtcaacgacatggccctggagtcatggtcacccaggcaggggtgtgttaccaaggtaccttccaggctgacaagaccgtgggccctggtatacttctgtcagaggatgactccttatatgaaggaaccttcacacgcgacttgaccctgatggggaagggcaaggttactttcccaaatgggtttaccctggaagggagctttggaagcggggcaggacgcggactgcacacccagggggtcttagataccgcagcacttcccccagatcccagcagcacatgcaagcgtcaactcggagttggtgcctttccagtcgaatccagatggcagggcgtctacagtcctttccgggacttcgtgtgtgctggctgtccacgggatctgcaggaggccttgctggggtttgacgtccagagttcccgggagctacgccgatcacaggattatctgagctgcgagagaacccaccctgaggattcagtcggctcaatggaggacattctggaggagctgttacagcacagggagcccaaagccttgcagttgtacttaaggaaggctctgtctaactctctgcacccgctaggcaagttactgcgcaccttgatgctcacattccaggccacttatgctggagtgggagctaataaacacctccaggagcttgcgcaagaagaagtcaagcaacatgctcaggagttgtgggccgcttatcgaggtcttttgagggtcgctctggagcgaaaaggccaggcactggaggaggatgaagataccgaaacacgagacctgcaggtccatggcctcgtactcccacttatgctaccctctttttactccgagttgtttaccctctatctccttctgcacgagcgcgaagacagtttttattcccagggtattgccaacctatccctgttccctgacactcagctcctcgaatttctagacgttcagaagcatttatggccccttaaggacctcactcttacgtctaatcagaggtactcgctggttagagataagtgcttcttatcagccaccgagtgcctgcagaagattatgacaacagtggaccccagggaaaaactggaggtgctcgaacggacatacggagaaatcgagggaacggtgtcccgtgtgctcgggagagaatataagctccccatggatgacctactgcccctgctgatttatgtggttagtcgggctagaatccagcatttaggggctgaaatccacctgataagggacatgatggacccgaaccatacaggtggtctgtacgactttctgctgactgcacttgagtcatgctatgagcatatccagaaggaagatatgcgactgcatagactgcctgggcattggcactcacgagaactgtggtag

SEQ ID NO: 214161 - DNA, 903 bp, synthetic construct
  misc_feature 1..903: note = Description of Artificial Sequence: Synthetic coding sequence
  source 1..903: mol_type = other DNA
atggaggacatcctggaggaactgctacagcaccgggagccaaaggctcttcaactgtatctgaggaaggctttgtccaatagtttgcacccgctgggcaaacttttgagaactttgatgctgacttttcaggccacatatgccggagtgggggcaaacaagcatctgcaagagctggcacaggaagaggtgaagcagcatgcacaggagttgtgggcagcatacagagggctgttgcgggtggctctggagcggaaaggccaagccctcgaggaggatgaggatacagaaactcgagacttgcaggtgcacggcctggtgctgccactcatgctgccctccttttactccgagctgtttacgctgtacctgctgttacacgagagagaagattctttttacagccagggcatcgcaaacctgtctctcttccctgacacacagttactcgagtttttggatgtccaaaagcacctgtggccactgaaggatcttaccctgactagtaaccagagatattcactggtcagagacaagtgttttttgtctgccacagaatgtttacagaagattatgaccactgtggatccccgagagaagctggaagtgctcgaacgaacctatggggaaatagaggggacagttagtcgcgtgctcggtcgtgaatataaattacccatggacgacttgctacccttgctgatttatgtggtgtcacgagctcggattcaacatttaggagcagagatccacctcatcagagatatgatggaccctaatcacacagggggattatatgacttcctcctgacagctcttgaatcctgctacgaacacatccagaaagaggacatgagactccaccgtttaccagggcattggcatagccgggaactatggtag

SEQ ID NO: 214162 - DNA, 2862 bp, synthetic construct
  misc_feature 1..2862: note = Description of Artificial Sequence: Synthetic coding sequence
  source 1..2862: mol_type = other DNA
atgtgcaatcccgaggaagcagcactccttaggttggaggaggtgttcagtgcaacactagcacatgtgaactctctcgtcctccagccgttgttacccgctgcaccagaccctagtgatccgtggggccgtgagtgtctaagactcctgcagcagttacataagtcctcacaacaactgtgggaggttacagaggaaagcctccactccctgcaggaaaggttaagatatccagacagcactgggttagaaagcttgctcctcctcaggggcgctgacagagtcctgcaggcccatatcgaatacattgagtcctacacctcttgtatggtcgtgcaggctttccagaaagctgccaagcgtcgatctgaatattggaggggccaaaggaaagccttacggcaactgctgagcggcgtttcgtcggaaggtagcgtgggcgcttcactgggacaagcgctgcaccagcctttagcacaccatgtgcagcagtatgtcttgcttctgctttctcttggagatactataggggagcaccatcctacacgagaactggtcgtcaatgcagtgaccctgttcgggaacctacagagtttcatgaagcaggagctggaccaggcggtagcaactcaagcgctgtggcatacacttcgcggacgcctccgggacgttctatgtacgcccgcacataggctcttgcaggacagtcaggatgtgcccgtcaccgtcgcacctctcagagccgaaagagtactccttttcgacgatgccctggtgctcctccaaggacacaacgtgcacacattcgatctgaaactcgtgtgggttgacccagggcaggatgggtgtactttccacctcctcactccagaagaagaattttcgttttgcgctaaggattcgcagggccaagctgtgtggcagtggaaggtgacgtgggctgttcatcaagctctgcacggaaagaaagattttcccgttctgggcgcaggactcgagccctctcagccacctgactgcaggtgcgccgagtacaccttccaggctgagggaaggctgtgccaggccacgtacgaaggagaatggtgtcgcggacggccacatgggaaggggacactgaagtggccagacggccgaaatcacgtcggaaacttctgccaggggctggagcacggattcggtatccgactgctgccccaggccagtgaggataaattcgattgctacaagtgccactggagggaaggaagcatgtgcggttatggtatttgtgagtactccacggacgaagtgtacaaaggctatttccaagagggcctaagacacggattcggtgtgctggaaagtggcccacaggcaccccagccctttcgctacactgggcactgggaaagaggccagaggagtggatacggtattgaggaggatggtgatcgcggtgagcgatatataggtatgtggcaggccggacaaaggcatggccctggcgtgatggtgacacaggcaggtgtatgctaccaagggaccttccaggccgacaagaccgtgggtccaggcatactgctgagcgaggacgattccctttatgaggggactttcacccgggacctgactttaatgggaaaggggaaggtgacatttcctaacggcttcaccttggagggtagttttggctcgggcgcaggaaggggcttgcatactcagggcgtcctcgacacagccgctctcccaccagacccctcatcaacgtgtaaacgccaactgggggtgggagcctttccggtggagtcaaggtggcagggggtttatagcccctttcgggacttcgtgtgcgccggttgtcctagggacctgcaggaggctctgctcggcttcgatgtgcagtcctcccgcgaactacggcgttcccaggactacctgtcttgtgagcgcacacatccggaggactcagtcgggagcatggaggacattctggaggaactactgcagcaccgagagccgaaggctctgcagctctacctccgaaaggcactcagtaatagcttacaccccctcggtaaactcctgaggactctgatgctgacatttcaggccacctacgctggagtgggagccaacaaacatctacaggaactcgctcaggaagaggttaaacagcacgcccaggagctctgggctgcatatagaggattgctgcgcgtcgctcttgagaggaaggggcaggcccttgaggaagacgaggacactgagacacgggacctgcaagtccatgggctcgttctccctttgatgctcccaagcttttactccgaattgttcacactgtatctcctgctacacgagagagaagatagcttttactcgcagggcatcgccaacctttctctgtttccagacacccagctcctggagttcctggatgttcagaagcatctctggccactaaaggatcttaccttaacgtcgaaccaacggtactcactggtccgtgacaaatgttttctgtcagctactgagtgtctacaaaagatcatgaccacagtcgaccccagagagaagttggaagtgctagaacggacttacggcgaaatcgagggtaccgtgagccgagtactgggcagggagtacaagttgcctatggacgatctgctcccactgttaatctacgtcgtgtcacgtgcacgcatccagcacctcggcgcagagatccacctcataagagatatgatggacccaaaccatacaggaggactgtacgactttcttctcacggcactagaatcgtgttacgaacatatccagaaggaggatatgagactgcacaggcttccgggtcattggcactccagggaactgtggtag

SEQ ID NO: 214163 - DNA, 12504 bp, synthetic construct
  misc_feature 1..12504: note = Description of Artificial Sequence: Synthetic coding sequence
  source 1..12504: mol_type = other DNA
atggagccagaggacctgccttggcctggggagcttgaagaggaagaagaggaggaagaagaagaagaggaggaggaggaggaagccgcagcagccgcagctgctaatgtcgacgacgtggtggtggtggaagaggttgaggaggaggcgggtagggaactcgatagcgatagtcattatgggccacaacatctcgagtcaattgacgatgaagaagacgaagaagccaaggcatggctgcaagcgcacccaggacgcattttaccccctctgtcccccccacagcataggtattcagagggagagaggaccagtctcgaaaagatcgtgcctctcacctgtcacgtgtggcagcagatcgtgtatcagggaaatagcaggacccagattagcgacaccaacgttgtttgtctggagactacagcccaaaggggctccggtgatgatcaaaagacagaatcatggcactgtctcccacaggaaatggacagctctcaaactctagacacttcccagacacgctttaacgtgcgtaccgaggacaccgaggtgaccgatttccccagcctcgaggaaggaatccttacccagagcgaaaaccaagtgaaagaacctaatcgggatctattttgtagtcctctgctggtaattcaggacagttttgctagcccagaccttccgctgttgacctgtctgactcaagatcaagaattcgctccagactcattgtttcaccagtcagagctgtccttcgcaccgctcagaggaattcccgataagtctgaagatactgagtggagcagcaggcctagcgaggtttcagaggccctctttcaggcgactgctgaagttgccagcgacctggcatcgagtcgattctcagtttctcagcatccactgatcggcagtaccgccgttggctcccaatgcccgtttctgccctctgagcagggtaataatgaagaaaccatatctagcgttgatgagctaaaaatccccaaagactgcgatagatacgacgatctctgtagctacatgtcatggaaaacacgcaaggacactcagtggcccgaaaataatctggcagacaaggaccaagtttccgtggctactagctttgatattactgatgaaaatatcgctacaaagaggagcgatcactttgacgctgcccgatcttacggacagtattggacccaggaggattcaagtaaacaggcagagacctatctaaccaagggactacaggggaaagtcgagagcgatgttattacgctcgatggactgaacgagaacgccgtggtgtgttctgagcgcgtcgcagagctgcaacgcaaaccaacccgtgagtccgagtatcacagctcagaccttcggatgctacgcatgagccctgataccgtccccaaggctccgaagcacctgaaagcaggagatacgtccaaaggcggtatagcaaaggtcacccagtcaaatctcaaatccggaatcactacaacccctgtcgacagcgacattgggtcgcacctgagcttgagtctggaggatctctctcagctggccgtgagcagccttgaaactacgacaggccagcacacagatactctcaaccaaaaaacgctcgctgacacccacctgactgaagagacgctgaaggtgaccgctatccccgagccggcagaccagaagactgccactccaaccgtactttccagcagccatagccacagaggcaagccatcgattttctatcagcaggggttacctgactcacacctcaccgaggaagccttgaaggtttccgccgctccgggactggccgatcagacaacaggcatgtcaaccttgacctctacttcctatagccaccgtgagaaacctgggactttttatcagcaggaactgcctgagtctaacttgacggaggaaccactggaagtgtcagctgctcctggcccagtagagcagaaaaccggcattcccactgtttccagcactagtcacagccacgtggaagatctcctatttttctatcgtcagacattaccggacggacacctaactgatcaggcactcaaggtgtctgcagtttctggcccagctgaccaaaaaaccggcactgcaacggtacttagcactccacacagccatcgggagaagcctgggatattttaccagcaagaattcgcagactcccaccagactgaggaaaccttaaccaaagtgtcggcaacacctggccctgccgaccagaagacggagatccctgcggttcaaagtagctcctatagccagcgcgaaaagccttcgatcctgtatccacaggatctcgccgattcccatcttccagaagaagggctaaaagtgagtgcagtggcaggccctgccgatcagaaaacaggcctaccaactgttccatccagtgcttacagccatcgcgaaaagctcttggtgttctaccagcaggcactgctagattctcatctccctgaagaggctctgaaggtgagtgcagtctcaggcccagcagacggaaaaacggggacacccgctgtcacctctacctcgagcgcaagttcttcactgggtgaaaagccatccgcattttatcagcagacattacccaatagtcacctaaccgaagaggcgctcaaggtaagcattgtgccgggaccaggcgatcagaagacaggaataccatctgccccaagctcattctattcccatcgagaaaagccaatcatcttctcacagcaaacccttcccgactttttgtttccggaagaggccctcaaggtttccgctgtcagtgtcctggctgcgcagaaaacaggaaccccaaccgtctcgagcaatagccattcccattctgaaaaatcaagtgtcttctaccagcaagaattgccagattccgacctccctcgggaaagcctcaagatgtccgccatccctggacttacagatcagaagaccgtgcctacacctactgtaccctccgggagcttctcccacagagagaaacctagcattttctaccaacaggagtggccagattcttacgctacagagaaagcactcaaagtgtccaccgggcctggcccagcagaccagaagacagagatacctgcggtgcagtctagcagttatccccagcgggagaagcctagcgtgctgtatcctcaggtgcttagtgacagccacctgcccgaggaatcccttaaggtcagcgccttccctggaccagccgatcagatgactgacactccagcagtacccagtactttctactcacagcgcgaaaagccaggcatcttctaccagcaaactctccctgaatcccatctaccgaaagaagccctcaagattagcgtggccccaggcctggcggatcagaagacggggaccccaacagttacgtcaacgtcatactcccagcaccgtgagaagccctccatcttccatcagcaggctctgcccggtactcacattccagaggaggcccagaaggtgtcagcagtgaccggacctgggaaccaaaaaacctggatcccacgggtgttgtctactttctactctcagagagagaaacctgggatcttctatcagcagacactgccaggatctcacatccctgaggaggcccagaaagttagcccggttttgggcccagccgatcagaaaacgggcaccccaaccccaacatccgcctcctactcccacacagaaaaacctggaatcttctaccagcaagttctgccagataatcatcccacagaagaggcacttaagatcagcgtagcttccgagccagtcgatcagaccactggaactcccgcagtgacttcaacctcctactcccagtatcgggagaaaccatcaatattttaccagcagtcactgccttcaagtcatctaactgaggaggcaaagaatgtgtctgccgttcccggtcccgctgaccagaaaacggtgattcccattctgccatcaacattttactctcatacagagaaaccaggagtgttttatcagcaggtgctgccacatagccatccaacagaggaggcgcttaagatctccgttgcgtccgaacctgtggaccagaccactggcacaccaaccgtcacatctactagttattcccaacacacagagaaacctagcatattctaccagcagagccttcccggaagccatctcaccgaagaggccaagaatgtgtcggccgtccctgggccaggcgatcggaaaaccggcataccaactctgccaagtactttttacagtcacaccgagaaaccgggaagcttttatcagcaggtgttaccacatagtcatctgcctgaagaggccttggaggtgtccgtcgccccaggcccagtggatcagacgattggcaccccaactgtgacatctccctcatcatccttcggagagaagcccatcgtcatctataaacaggcattccctgaaggtcacctgccggaggaaagcttgaaggtttctgtggctccagggcctgttggccagaccaccggggcaccaactattacgagtcccagctattctcaacatcgtgctaagagcggctcattttaccagctggcccttcttgggtcccagattccagaagaagcactgagggtcagtagtgctcccggacccgctgaccagactaccggcattccaaccataactagcacctcctattccttcggtgagaagcctatcgtcaactacaagcaagcgtttccggatggccatcttcctgaagaggctctaaaggtctcgatcgtgtccggtcctaccgaaaaaaaaacggatattcccgctggccctcttgggagctcggcactaggggagaaacccattaccttttacaggcaggcccttctagatagtcccttgaataaagaagttgtgaaagtgtcagccgctccgggacccgctgatcaaaaaacagagaccctccctgtgcatagtacgtcttactcaaaccggggaaaacccgtgatcttttatcagcagaccctctcagacagccacctacccgaggaagcactgaaggttccacccgtccccggtcccgacgcccaaaaaactgagaccccatccgtgtcgagcagcctgtatagttatcgcgaaaaacccattgtgttctatcagcaggcactgcccgacagcgaacttacccaggaggcactgaaggtgtctgcagtcccccagcccgcagatcagaagacaggccttagtacggtaacatctagcttttattctcatactgagaaacctaacatctcttaccagcaggagttgccagattcacacctcacagaagaggctctgaaggtgtccaatgttcccggaccagcggatcagaagaccggagttagcaccgttactagtacctcttatagccatagagaaaagccaatcgtgtcataccaacgcgagctgccccacttcaccgaggcaggccttaaaatccttagggtccccggaccggcagatcagaaaaccggaatcaatattctcccctctaacagttacccccaacgtgagcacagcgtgatctcgtacgagcaggagctcccagatctgactgaggtgacccttaaggctattggcgtaccaggtcctgctgatcagaagacgggcattcagatcgcatcttcttccagctactctaaccgtgagaaagcctcaatttttcaccagcaagaactgccggatgtcacggaagaagcacttaatgtgtttgtggtgccaggacagggagataggaagacggaaatcccaaccgtacccctttcttattattcccgacgtgagaagccttctgtgatttctcagcaggagctgcccgacagtcatctgacagaagaagcgctcaaggtctcccctgttagcatcccagccgaacagaagaccggcatccctatcggcttgtccagtagctattcacactctcataaagaaaagctgaagatttccaccgtgcacattccggatgatcagaagaccgagtttcctgcagccactctgagtagctactcccaaattgaaaagccaaagatctcaacagtaattggccctaacgaccagaagacacccagccagaccgcatttcattcatcatattctcagaccgtcaaaccgaacatcctcttccagcagcagctgcctgatagggatcagtccaagggcatccttaagatttcagcggtgcccgagctgacggacgtcaacacaggaaagcctgtgagtctgtccagttcctacttccaccgcgagaagtcaaatatcttcagtccacaggaattgcctgggagtcacgtcacagaggacgtactcaaagtgagcacgatcccaggtcccgctgggcaaaagactgtcctgcccacagcactgccatcctcattctcacatagagagaagcctgatatattttatcagaaggatctgcccgatagacacctgactgaggatgcactaaaaatctcttctgcgctggggcaagccgatcaaattacaggattacaaaccgtgccctcaggtacctacagtcacggtgaaaatcacaaactggtttcggaacacgtgcagcggctcatcgataacctgaacagttctgattccagcgtgagttcaaataatgttctgctgaattcacaggcggatgacagagtggtgattaataaaccagagtctgccggtttcagggacgttggttcggaagaaatccaggatgccgagaatagcgccaaaacgctgaaggaaatccgaacactcctgatggaggccgagaacatggccctgaagaggtgcaattttccagcacctttggccaggtttagggacatatccgatatttcttttattcaaagcaagaaggttgtgtgcttcaaggagccttcgagcaccggcgtcagcaatggcgatctgctccaccggcagccattcacagaggagagccccagctcgcggtgtattcaaaaggatatcgggacgcaaacaaaccttaagtgccgtcgcggaatcgagaattgggagtttatatcctctaccacagtaagaagtccattgcaggaagcggaatctaaggtatctatggccctagaagagactctgcgacagtaccaagcagccaaaagtgttatgcggtcagagcctgagggctgtagcgggacgataggaaataagattattatcccgatgatgacagttataaaatcagactccagttcggacgcctctgacggtaacggctcttgctcttgggacagcaatttaccagagtcactcgagtcagtctcagatgtcttactcaatttttttccgtatgtgtcgcccaaaactagcatcacggattcccgggaggaggaaggagtctcagagtctgaagatggaggcggaagctccgtcgatagtttagctgcccatgttaaaaaccttttgcaatgtgagagcagtttaaatcacgcgaaggagatcttaaggaatgccgaggaggaggagtcacgcgtgcgcgcacacgcctggaacatgaagttcaacctggcccatgactgtggatatagtattagcgaacttaatgaggacgacagacgaaaggttgaggagatcaaggccgagctctttgggcacggcaggactactgacctgagtaaaggcctgcagtcacccagaggaatgggctgcaagccagaggcagtctgttcccatattatcattgaaagccatgagaaggggtgttttcgcactctgacttctgagcatccacaacttgacaggcatccctgcgccttcaggagcgccggtccaagcgaaatgacccggggacgccaaaatccctcttcttgccgagctaaacatgttaacctgagtgcttcccttgatcaaaataacagccactttaaagtttggaattccctgcagctgaagtcacacagtccctttcagaacttcatacccgatgagtttaagattagcaaaggcttacgcatgccctttgatgagaaaatggacccatggctcagcgagcttgtcgagccagccttcgtacccccaaaagaggtggactttcattcctcgagccagatgcccagcccagagccaatgaaaaagttcactacatctataaccttcagctcacaccggcatagcaagtgcatcagcaattcaagcgtggtcaaggtgggggtgacggaggggtcgcagtgcacaggcgcttcggtcggtgtcttcaacagccatttcactgaagagcagaatcccccacgtgatcttaagcagaagacttcttccccatctagcttcaaaatgcactcaaattcccaggataaagaggtcacgatcctcgctgaaggaaggcgccagagtcagaagctccctgtcgatttcgagagatcattccaggaggaaaagccactggagcggagcgattttaccggctcacatagcgagccttccacgagagctaattgctcgaatttcaaagagattcaaatctcagacaatcacaccttgattagcatgggccgaccgtccagtactctcggagtcaaccgctcaagctcccggcttggcgtgaaggaaaagaatgttacaatcactcccgaccttccatcctgcatcttcttggagcagagggaactatttgagcaatctaaggcaccacgggctgacgaccatgtgcgaaagcaccattccccttcaccacagcaccaggactatgtggctccagacttgccttcctgcatattcctggaacagagagagctgttcgaacagtgcaaagctccgtacgttgaccaccagatgcgggagaatcacagccctctgccacagggtcaggacagcatcgcatcggatcttccctcaccaatcagtctggaacagtgtcaatcaaaagcccctggcgtcgacgatcaaatgaacaaacaccactttccactgccgcagggtcaagactgtgtcgtcgagaaaaacaatcagcataagccaaagtcccatatctccaacataaatgtcgaggctaagtttaacaccgtcgtcagtcagtcagcccctaaccactgcactttggccgcttctgcatcaactcccccatccaatcggaaagcgttatcttgtgtgcatattacattgtgccctaagactagtagcaagcttgactccggaaccttagatgagcgctttcactccttggacgccgcatcaaaggcccgaatgaactcagagtttaattttgatctgcacactgtctcatctcggtcactggagcctacgtccaagttgttgaccagcaagccggtcgctcaggaccaggaaagcttaggtttcctaggacctaagtcctcactggactttcaggtggttcagccatccctccctgactccaataccatcacgcaggatctgaagacgattccaagccaaaacagccagatcgtgacctctcggcagatccaggtgaacatcagcgatttcgagggtcattccaaccccgaagggacacccgtttttgccgatcgactgcctgaaaagatgaagacaccattatccgctttcagtgaaaaactttcctccgacgctgtcacccagattaccactgagagccccgagaagaccttattcagtagtgaaatcttcattaacgccgaggatcggggacacgaaattatagaacccggtaatcagaaattacgcaaggcacccgttaagttcgccagttcaagctcagtccagcaggtgaccttttctcggggtactgacggccagcctctgctactcccctacaaacccagtggatctactaagatgtattacgtgcctcaactccgccagatacctcctagccctgattccaaatctgatacgaccgtggagtctagccactccggctcaaatgacgcgatagcacctgattttcctgcccaagtgctagggacccgcgacgacgatctgtcagctacggtgaacataaagcacaaagaaggaatatacagcaaaagggtggttaccaaggcgagtctgcctgtcggcgagaaaccattgcagaacgagaacgcagatgccagcgtgcaggtgctgatcaccggcgacgagaacctcagcgataagaagcagcaggaaattcattcaactcgagccgtcaccgaggcagctcaagcaaaagagaaagaatcacttcagaaggacacagccgactctagtgccgcagcggcagccgagcactctgcccaggttggagatcccgagatgaagaacctgcccgacacgaaagcgatcacgcagaaggaggagatccacaggaaaaagactgtgccggaggaggcttggccaaataataaggagtctctgcaaattaacattgaggaatctgagtgtcatagcgaatttgaaaataccacccgatccgtgtttagaagtgccaaattttacattcatcatcccgtacatttgcccagcgaccaggatatctgccacgagagcctgggcaaaagcgtatttatgaggcactcatggaaagatttctttcaacatcacccagacaagcaccgagagcatatgtgtctgcccctgccttaccagaacatggacaagaccaagacagattacacgcgaattaaaagcctcagcatcaacgttaacctgggaaataaggaggtgatggacaccactaagtcgcaagtgagagattaccctaaacataacggacagatttcagacccccagcgagatcagaaggtgacccctgagcaaaccacccagcatacagtttcccttaacgaactatggaacaagtacagagaaagacagaggcaacaacggcagccagagctaggcgaccggaaggaactgtccctggtcgaccggctcgataggctcgcaaagatcttgcaaaaccccattacacattcgctgcaggtcagcgaaagcacgcatgatgacagtcggggtgagcggtcagtgaaggaatggagtggtcggcagcagcagcgtaacaaattacaaaaaaagaaaagatttaaaagcctggaaaaatcccacaagaacaccggcgagctcaaaaagagtaaagtactgtcacaccacagggccggaagatctaaccaaataaagattgaacagatcaagttcgacaagtacatcttgtccaagcagccaggattcaactatatatcaaatacctccagcgattgccgaccaagcgaagagtcagagctgttaaccgacactactactaatattctgtccggaaccacgagcacagttgagagcgatatcctcacgcagaccgacagggaggtagccctccacgaaagatcatcaagtgtgtctactatcgataccgcacggctgatccaggcattcgggcacgagagggtgtgtctgtccccgagaaggatcaaactctactcatctataacgaaccagcaacgcaggtatctggaaaaacgctccaagcactcaaagaaagtccttaacaccggacaccctttggtgacatccgagcatacgagacgacgccacattcaggtcgctaaccacgtgatttcatccgactctatcagtagctccgcctcctcattcctgtcttctaatagcaccttctgtaacaaacagaatgttcacatgctgaataagggaatccaagcagggaacctggagattgttaatggcgctaagaagcatacgcgcgacgtcggcataaccttccccacaccctcctcttccgaagcaaagctggaagaaaacagtgatgtcacgagttggtccgaagaaaaacgggaggagaaaatgctcttcacagggtaccccgaggatcggaagctgaagaagaacaagaaaaattctcacgaaggcgtcagttggtttgtccctgtcgaaaatgtggagagcaggagcaaaaaggagaatgtacctaacacttgcggacctggaatctcttggtttgagccgattaccaaaacccgcccatggcgcgaacctctgagagagcagaattgtcagggtcagcatctggacggtaggggttacctggctggacctggaagagaagctggcagggacctgctacgcccattcgtgcgtgccacgttgcaagagagtctacagtttcatagacccgattttatcagccggagcggggagcgaatcaaaagattaaagctgatcgtgcaggagcgcaaactccagtccatgctacagactgagcgcgacgctctattcaatattgaccgggaaaggcaagggcaccagaatcgcatgtgtcccctgcccaagcgcgtctttctcgcaattcagaaaaataagccaatcagcaaaaaagaaatgatccagcggtctaagaggatatacgagcaactccctgaagttcagaaaaaaagagaagaagagaagcggaaaagcgaatacaagtcctatcgactcagggcgcagctctacaagaaaagagtgacaaaccagctactgggaaggaaagtgccatgggattag

SEQ ID NO: 214164 - DNA, 7685 bp, synthetic construct
  misc_feature 1..7685: note = Description of Artificial Sequence: Synthetic coding sequence
  source 1..7685: mol_type = other DNA
atggagcctgaagacctgccctggcccggagagctcgaggaggaagaggaagaagaagaagaagaggaggaagaggaagaggaagccgctgccgctgccgcagcaaacgtcgatgacgtcgtggtggtggaagaggttgaggaggaagccggacgtgaacttgactcagattcccattacggcccacaacatctcgaatctatcgatgatgaagaggatgaggaggccaaggcctggttgcaggcccacccgggaagaatactcccaccgttgtccccacctcagcaccgctacagcgaaggggaacgtaccagcctcgagaaaatcgtccctctgacatgtcatgtctggcaacagattgtgtaccagggtaacagccggacccagatctcggacactaatgtagtgtgcctggaaaccactgcacagagagggtcgggcgacgaccagaagaccgagagctggcattgtctcccgcaggaaatggacagtagtcagaccctggatacttcccaaacaagattcaatgttcgcaccgaggataccgaggtcacagattttccatcccttgaggaaggtattctgacacaatctgagaaccaggtcaaggagcctaatcgagaccttttttgttcacccttactcgtgatacaggatagttttgcatcccctgatctgcctctgcttacctgcctaacccaggaccaggagttcgcacctgattcactgtttcatcagtcagagcttagtttcgccccactcagaggcattcccgacaaatcagaggataccgaatggagctcccgcccttctgaggtgagtgaagcactgttccaagccaccgctgaagtcgcatcagatttagcaagttcaaggttcagcgtatcccagcatcccctaatcggcagtactgccgtgggatcccaatgccccttccttccttcggagcaagggaacaacgaagaaacgattagcagtgtggatgaactgaaaatacccaaggactgtgacagatacgacgacttatgctcctacatgagctggaagacccgcaaggacactcagtggcctgagaacaacctggctgacaaagatcaggtgtccgtggcgacttcatttgatattaccgatgagaacattgccacaaaacggagtgaccacttcgatgctgctcgaagttatggccagtactggacacaggaagattcttccaagcaagccgagacttacttgacgaaaggtctccagggtaaagtggaatcagatgtgataactttggatggattgaacgagaatgccgttgtatgttcagagagagtcgcagagttacagcgaaaaccaacccgggaatccgagtatcacagctccgacctgcgaatgcttagaatgtctccggacaccgtccccaaagcccctaagcacctgaaggctggggacacatctaaaggcggaatagctaaagtgacacaaagcaatctcaagtcaggcataacaaccacaccagtagattcggacattggaagccatttgtccttatcgctggaggatctgagccaacttgcggtcagcagtctggaaacgaccactgggcagcacaccgatacgctgaatcaaaagacacttgccgacactcacctaaccgaggaaactcttaaggttaccgctattcccgagcccgctgatcaaaagaccgccacacctacagttctctctagctcacattctcacaggggaaaacctagcattttttaccagcagggactgccagactcccatttgactgaagaggccctgaaagtgtccgccgcacccggacttgctgaccagaccactgggatgagtactctgacaagtactagttacagccaccgagaaaagccaggaacattttaccagcaagagctgcctgagagcaatcttactgaagaacctctggaggtgtcagcagccccaggaccagtggagcagaaaacaggaatccccaccgtgagctccaccagtcactcacatgtggaggacctgttgttcttctaccgccagacactacctgacgggcacttgacagatcaggctttaaaggtttccgccgtttctgggccagccgaccaaaagacggggaccgctaccgttctttcaactccccacagtcatagagaaaaacccggtattttttatcagcaagaatttgccgactcacatcagacagaagagacgctaacaaaggtgagcgctacacctggccctgcagatcaaaaaacagaaatccctgctgttcagagctcgtcctacagccagcgggagaaaccatccatcttatatcctcaggacttggctgacagccacctgccagaggaggggctgaaagtcagcgcagttgccggaccggcagaccagaaaactggtctgcccacggttcctagcagtgcatactcccaccgagaaaagctcctggtcttttatcagcaggctttgctggactcccacctgccagaggaggcactgaaggttagcgcggtatccggtcctgccgacgggaagaccggtacccccgctgtcacatccacctcctccgcatcttcatcactgggcgaaaagcctagtgctttctaccagcagaccctgcctaatagtcacctcaccgaagaggcgctcaaggtatcaatagtcccaggtcctggcgaccagaaaacaggaatccccagcgccccatcaagtttctatagccaccgcgagaagccaattatattttctcagcagacactgcccgacttcctttttccagaggaagcactgaaggttagcgccgtatccgtgctcgccgctcagaaaacaggtactccaacagttagcagtaattcacacagccacagcgagaaaagcagtgtgttttatcagcaggagctgcctgacagtgaccttccgcgagaaagtctgaagatgagcgccatccccggactcactgaccagaaaacagtgcccacccctaccgtgccgtcaggtagcttctcccaccgggagaaaccgagtattttctaccaacaagagtggcccgacagctacgcgacagagaaggcgttgaaagtttccactggccctggacccgcagaccagaaaacagagatacctgccgtccaatctagttcctacccgcagcgcgagaagccaagcgttttgtatccacaagtgctgtccgactcacatctgcccgaggagtccctaaaggtgtcggccttccccggacccgcagaccagatgacggacaccccagccgttcctagcacattttattcacagagggaaaagccgggaatattctaccagcagaccttaccggagtcgcacctaccgaaggaggccttgaaaataagcgtagcacctggcttggcagatcaaaagaccggaacgccaacagtgacatccacttcctactcacagcatagggagaagcccagcatctttcaccagcaggccctacccggaacccacatccctgaggaggcgcagaaggtgagcgcggtcactggacccggtaatcagaagacatggattccccgagttctatcgacgttctattctcagagggagaaacccggaattttctatcagcagacgctgccgggaagccacatccctgaagaggcgcagaaggtgagtcccgtcctgggtcccgctgatcagaagactggcacgccgactcctacttcggcatcctactcgcacacagagaaacctgggattttctaccagcaagtgctccctgacaaccatccaaccgaagaagctttgaagattagtgtggccagcgagccagtggaccagactacaggaactcctgctgtgaccagcacatcctactctcagtatcgtgaaaagcccagtatcttctaccagcagagcctgccatctagccaccttacggaggaggccaaaaacgtgagtgcagtcccaggacctgctgaccagaagacggtgataccaatcctgcctagtacattttactctcatactgaaaaaccaggtgtgttctaccaacaggtgttgccccattctcatcctacagaagaagcgctcaagatctcagtcgccagtgagcccgtcgatcagacaaccgggactccgacggtaactagcacaagctattcccagcatacagagaagccgtccatcttttaccagcagtctctgccaggatcgcacctgactgaagaggctaaaaacgtcagcgccgttcctggccctggggaccgcaaaaccggcattccgactcttccttctactttctatagtcacaccgagaagcctggtagtttctaccaacaggtgctgccccatagccatttgcccgaggaggccctggaagtatcagtcgctccaggtcctgtggatcagacgatcggtacacctaccgtgacatccccaagttcttcttttggcgagaaacccatagttatctacaagcaggcctttccggaaggccatctgccagaggagtccctgaaagtaagtgtcgcccctggaccagttggccagaccacgggcgcaccaaccataacttctccctcctattcacagcaccgggctaagtccggaagtttctaccaacttgccctgctgggtagtcagatccctgaagaggcactgagagtgagcagcgccccaggcccagcagaccagactaccggtataccgactattacatcgacgagctattcattcggagagaaaccaatcgtcaactataagcaagcttttccagatggccacttacctgaggaagcacttaaagtctccatcgtttcaggccctacagaaaagaagactgatattcctgcgggtcctttggggagttccgccctgggcgaaaaacccattaccttctacagacaggcactgctggattcaccactgaacaaagaggtggttaaggtgtctgcagcccctggcccagcagatcaaaagacggagaccctccctgtccactccacgagctacagtaaccgcggaaagcctgtgattttctaccagcagaccttatccgacagtcacctccccgaggaagcccttaaagtgccccctgttcccggacctgacgcccagaaaacggaaacgccatcagtgtcaagctccctgtactcctaccgggagaaacccattgtgttctatcagcaagctctgccagactccgagctgacccaggaggccctgaaggtgtcagccgttcctcagcctgctgaccagaagactggactgagcacagtgacgtctagcttttattcacataccgaaaaacccaatatctcataccagcaggagctccccgactcacatctcactgaggaagccctcaaggtttccaatgtgcctgggcctgcagatcagaagactggcgtctcaaccgtcacttcgaccagttacagtcatcgcgaaaagcctattgtttcttatcaaagagaactcccacacttcactgaggcgggtctgaagattctgcgagtacccggtccagcggatcagaaaaccggcattaatattcttccatccaattcatatccacagcgagaacactcggtcatcagctacgagcaggaactgccagacttgacagaggtgactctaaaagctattggggtccctggcccagccgatcagaagacaggtatccagattgccagctcttcctcctacagcaatcgggaaaaggctagtatcttccatcagcaagaactgccagatgtcaccgaggaagccctgaatgtgtttgtcgtccctggccaaggcgatcgcaagaccgagataccaacagtccctctaagctactattctcgacgggaaaagccttcagtgatatcccagcaggaactcccagattcacatctcacagaggaagctctgaaggtttcccctgtatcgatacccgcagagcagaagacaggtatccctatcggcctcagttcatcatacagtcactctcacaaggaaaaactcaagatttccacagtgcacatacccgatgaccagaaaacagaattccctgctgcaacattgtcttcctacagccaaatcgaaaagcccaagattagtacagtcatcggaccaaatgatcagaaaacaccttctcagacagccttccattcatcctacagtcagaccgtgaagccaaatattctcttccagcagcagttaccagatagagaccagtccaagggtatcctaaagatctctgcggtcccagagctgactgatgttaatacaggcaagcccgtgagtctctcctctagctatttccacagagaaaagtctaacattttctctccccaagagctgccagggagccacgtcacggaagacgtcctgaaggtatctacaattccagggcctgccggacaaaagacagtcctaccaaccgcgttgccaagctcattctcccaccgagaaaaacccgatatcttctatcagaaggatctaccagaccgtcatctgaccgaagacgcgctcaagattagctcggctttgggtcaggctgaccagatcactggcttacaaactgttccatctggaacatactcgcacggcgaaaatcacaaactggtctcagagcatgtgcaacgtttgatcgataacctaaacagttcagacagctccgtgagttcaaacaatgtgctgctgaacagtcaggcggacgacagagtggttattaacaaacctgaatctgctggtttccgagatgtcggatctgaggagatacaggatgcagaaaactctgccaaaacgttgaaggaaatacggaccctcctgatggaagctgagaatatggcactcaagcgctgcaattttcctgctcctctcgctcgttttcgcgacatatcagatatcagcttcatacagagtaagaaagtagtctgctttaaggaaccatcctcaacaggagtgtccaacggggatctgctccacaggcagccatttaccgaggaatccccctccagtcgctgcatccagaaggacatcgggacccagacaaatttgaagtgcaggcgcggtatcgaaaactgggaatttatttcaagtaccactgtcaggtctccactccaggaggctgaaagcaaggtgtccatggctcttgaagagacactgcggcagtaccaggccgctaaaagcgtgatgcgaagcgaacctgaggggtgttcagggacaattggcaataagatcatcatccctatgatgaccgtgattaaatcagattctagctccgatgcttctgacggaaatgggagctgctcctgggatagtaacctgcccgagtccctggaaagcgtaagcgacgtgctgctgaacttttttccctacgtgagccccaaaacaagtatcactgatagccgcgaggaagagggggtctcagagtccgaggacggcggaggctctagcgtggacagcctcgctgcccacgtaaaaaacctgttgcagtgtgagtcttctctgaaccatgctaaggaaatcctccgaaacgctgaggaagaggaaagtagagtcagggcccacgcctggaatatgaagttcaacctggcacatgactgcgggtattctatctccgagcttaatgaggatgatcgccgtaaggtcgaagaaatcaaagccgagctgttcggccacgggagaactactgatttgtcaaaggggctgcagtcata

SEQ ID NO: 214165 - DNA, 1944 bp, synthetic construct
  misc_feature 1..1944: note = Description of Artificial Sequence: Synthetic coding sequence
  source 1..1944: mol_type = other DNA
atggctgcgcctgccggagggggaggaagcgcggtcagcgtgctggcacctaatgggagacgacacacggtgaaagttactccttcaaccgttttgctccaggtactcgaggatacatgtcgaaggcaggacttcaatccctgtgagtatgacctcaagttccaacggtctgtgttggacttgagcctgcagtggcggtttgctaacctgcctaataatgcaaagctagagatggtgccagcgtcacgctccagagagggtcctgagaacatggtccgtatcgcccttcaactggacgatgggtctcgtctgcaggatagtttctgcagcgggcagacgctgtgggagctcctcagtcattttccacaaattagagagtgccttcagcacccaggtggcgcaacccctgtgtgcgtgtatacgcgtgatgaggtcactggcgaagctgctctgcgcggaactaccctacagtcacttggcctgacaggaggcagtgccaccatccggtttgttatgaagtgctacgacccagtggggaagactccaggttctttagggtctagtgcctctgctggtcaggcagcggcttcagctcccctgccattagagtcgggcgaattgtccagaggagacctctcgagacccgaagatgctgacacctcaggaccatgttgtgagcacactcaggaaaagcagtcaactcgcgctcctgctgcagcacctttcgtgccattctccggagggggtcaacgtctgggcggaccccctgggccaacccggccattgacatcctcaagcgctaagctgcctaagagtctgagctcccccggtggcccatctaagcctaaaaagtctaagtctggacaggatcctcagcaggagcaagagcaagaaagagagagagatccgcagcaggagcaagagagagagcgacccgtggatcgggagccagtggacagggagccagtcgtgtgccacccagatctagaggaacgcttacaggcctggcctgccgagttgcccgacgaattctttgagcttactgttgacgacgtgagacgaagactcgctcagctaaaaagcgagaggaaaaggctggaagaagccccactcgtaaccaaggcttttcgcgaagcccagatcaaggaaaagctcgagcgttatccaaaagtcgcattgcgcgtcctgttccctgatcgatacgtgcttcaaggcttttttcgcccttctgaaacggttggtgatctccgcgacttcgtccgcagccacctgggcaacccagaactgtctttctatctcttcattactcccccaaaaacagtgctcgatgatcacacccaaacactcttccagccccaactcggtgacagggtggcaccttttacacttggtcccagtctgaagcgctgcttggggcctgaacaacgtacacggctccctgttgtcggggatggaggggacgtggatagcggcaggttgctgttctggggcccttcaagaggccgagcttccccctctaccggccagccaccctgccaccctgtgtgccggcctagctcccctccctctccaaggccctccagtggtgatccgtcccgcgtcaaggcgggtcacaagcacgtgggcactggtagagccaatcttttccctgccgctcttgtacaccttggggctgaggagccagcaggggtgtacctagaacccggtctgctagagcacgcaatatcaccgagcgcagccgatgttctggtggccaggtacatgagccgggcagctgggtcacctagtccgttacccgctccagaccccgctcctaagtccgaacccgcagctgaagagggcgcactagtgcccccagaaccaatcccagggaccgctcaaccagtgaagcgctctcttggaaaggtgcctaaatggctgaaactccctgcctcaaagcgatag

SEQ ID NO: 214166 - DNA, 1662 bp, synthetic construct
  misc_feature 1..1662: note = Description of Artificial Sequence: Synthetic coding sequence
  source 1..1662: mol_type = other DNA
atggctgctccagccggaggtgggggatctgcagtgagcgtcctggcccctaatggcagacggcatactgtgaaagtgactccttcgaccgttctgcttcaagtgcttgaagatacctgcagacgccaggatttcaatccatgcgagtacgatctcaagttccagcgtagcgtcttggacctgtcgcttcagtggcggtttgcgaacttgccgaacaacgccaagctcgagatggttcctgctagccgtagccgcgagggtcctgagaatatggttcgtattgctttgcagctagacgatgggtctaggctgcaagactcattctgtagcgggcagaccctgtgggagctattatcccatttcccgcagatccgcgagtgtctgcaacaccccggtggcgcaacacccgtttgcgtgtacaccagggacgaagttacaggggaagcagctctgaggggtaccacccttcagtccctcggcttgaccggtggatccgctaccatccgattcgtgatgaagtgctacgaccccgttggcaaaactcctggatccctcggaagctcagctagcgccggacaggcggcagcctcagctccattgccgctcgagagtggagagttgagcagaggggacctgtccaggccagaggacgccgacacttctggcccatgctgcgaacatactcaggaaaaacagtctacgcgggctcctgccgctgccccatttgtccctttttcagggggagggcagagactgggcggaccccctgggcctactagacccctgacaagtagcagtgccaaattacctaaatctctctcctccccaggcggtccatccaagccaaaaaagtctaagtcaggacaggacccccaacaagagcaggaacaggaacgcgaaagggatccgcagcaagaacaggaacgcgagagaccagtggatcgcgaacctgtggaccgcgaaccagttgtatgtcatcccgatcttgaagaacggcttcaggcatggcctgctgagttgccggacgaattctttgagcttactgttgacgacgttcggcgtcggttagcccaactgaagtcagagcggaaaagactagaggaggctccccttgtaaccaaggccttcagagaggcccagattaaagagaagttggaaaggtatcccaaagttgccctgcgtgtgctgttcccagatcggtacgtgttacagggcttctttcgccctagcgaaacggttggagatctcagagattttgtgcgctcccacctgggtaaccccgagctgtcgttctacttgttcatcaccccccctaagaccgtgttggacgatcatacccagactctgtttcaggcgaacttgttccccgcagccctggttcacctgggcgcagaagaacctgctggcgtttatttggagcctggattgctcgaacatgccatcagtccttctgcagccgatgtcctggtggccagatatatgtcgagggccgctggttcaccttcacccctgcccgcacccgatccagcccctaagtccgaaccggcagcggaggagggggctctcgtacccccagaacccatcccagggaccgcccagccagtcaagcgctccttgggaaaagtgcccaaatggcttaagctgcctgctagcaagaggtag

SEQ ID NO: 214167 - DNA, 1050 bp, synthetic construct
  misc_feature 1..1050: note = Description of Artificial Sequence: Synthetic coding sequence
  source 1..1050: mol_type = other DNA
atggttcctgcctctagaagtcgcgaaggcccagaaaatatggtgagaattgcgcttcagcttgacgacggaagccggctgcaggactcattctgcagcggacaaacactgtgggagctgctgagtcacttcccccagattagagagtgcttgcagcacccgggaggcgctaccccagtctgcgtgtatactcgggacgaggtaaccggggaggccgcactccgcggaactaccctgcagagcttaggtctaactggcggttccgccacaattcggttcgtgatgaagtgctatgatccggtgggaaagactcctggctcactgggtagctcagcgagcgcgggtcaggctgcagctagcgccccactgcccttagaatcaggtgagctgtcgagaggagatctgtcacgaccagaagatgctgataccagcggaccgtgttgtgagcacacacaggagaagcagagtactagagctcccgcagccgctccttttgtccctttctccgggggtggccagagattgggcggacccccagggcctacccgcccactgacatccagttcagcgaagctccctaagtctttgtcgtctcccggagggcctagcaaaccaaagaaatccaaatcagggcaggatccccagcaggaacaggagcaggagcgagaaagagatcctcaacaagagcaagagcgcgaacggccagtggacagagaaccggtggatagggagccagtggtctgccaccccgatcttgaggagcggttacaagcctggcctgctgagctgcctgatgaattcttcgagctgaccgtggacgacgttagaagaagactcgctcagctgaaaagcgaacgcaaaaggctcgaggaggccccactggtgacaaaggcctttcgcgaggcgcagatcaaggagaagctggaaagatatcccaagcggagaagcctctccctgtctccaaggctggagagtgtcgtcccttcccagttgacggcatcatcagcctcccgcgtccaagtggttttacttccgcagcctccaaaatag

SEQ ID NO: 214168 - DNA, 981 bp, synthetic construct
  misc_feature 1..981: note = Description of Artificial Sequence: Synthetic coding sequence
  source 1..981: mol_type = other DNA
atggaattcctgtccgagaaattcgcactgaaatcgccaccaagtaaaaattctgatttttatatgggggctggaggccctctcgagcacgtgatggagacactggacaatgaatccttttattcaaaggcctctgcaggtaagtgtgttcaggccttcggtccccttccgagggccgaacaccatgtgcgtctggaacgcacctccccgtgccaggatagcagtgtgaattacggtatcaccaaagtggaaggccagccccttcacaccgagctcaatagagccatggataactgcaatagcttaaggatgagtccggtcaaggggatgcaggagaaaggagaactggacgagctgggggataagtgcgacagtaatgtaagctccagtaaaaagcggcgtcaccgcaccacgtttacaagtctccagctggaagagttggagaaagtttttcagaagacccactacccggatgtgtacgtgcgcgagcagctcgccttgagaacagagttgacagaagcgagggtgcaggtttggttccagaatcggagggctaagtggcggaaacgggaacgctacggccagatccagcaggccaaaagccactttgccgctacctatgatatttcagtgcttccgaggacagactcatacccacaaatacagaacaacctgtgggctggtaacgcaagcggcggatcagtggtcacttcttgcatgttgccgagggatacttcatcctgcatgaccccttactcacatagtccaaggaccgattcatcttacactggcttttctaatcaccaaaaccagttttcgcacgtgccactgaacaacttctttaccgattcactgctgacaggagcaactaacggccacgccttcgagacaaagcctgagttcgagcggaggtcttcttcgatcgcggtgctgcgtatgaaggcgaaggagcatactgccaatatttcttgggctatgtag

SEQ ID NO: 214169 - DNA, 1032 bp, synthetic construct
  misc_feature 1..1032: note = Description of Artificial Sequence: Synthetic coding sequence
  source 1..1032: mol_type = other DNA
atggaccccgagcactgtgccccattcagggtcggccctgcccctgggccttacgttgccagcggcgatgaacctccgggacctcagggaacaccagccgcagctccgcatcttcatcctgcccctcctagggggccacggcttacaagatttcctgcctgtggtcctttggaaccctaccttccggaaccagccaagcctcccgcaaaatacttgcaggacctgggcccaggccctgccttaaatgggggtcatttttatgaggggccagcggaagcagaggagaagactagtaaggctgcatccttcccccaactgcctctggactgtcggggaggacccagggacgggccttctaatctccagggcagccccggtccctgcctggcttcactgcacctgccactgtcgccgggtctaccggacagtatggaactggcgaaaaacaagtccaaaaaaaggcgcaacaggactactttttccacattccaactggaagagcttgagaaagtgtttcagaagacgcactatcctgacgtttacgccagggaacaactcgcccttcgaacagatctgactgaggcccgtgtgcaggtgtggtttcagaatagacgggcaaagtggcgaaagcgggagcggtacggcaagatccaggaggggaggaatccatttacagcagcttacgatatcagtgttctaccccgtaccgacagtcatccacagttacagaattcactgtgggccagtcctggtagcggatcccctggcggaccttgcctcgtgtccccagaaggaatcccctcaccctgtatgtctccttactcgcatccacacggctcagttgcaggctttatgggagtcccagcccctagtgcagctcatcccggtatatactccatccacgggtttcccccaacactgggagggcacagtttcgaacctagctcagacggcgattataagtcccccagcctggtgagcttgagagtaaaacccaaggagccaccaggacttctaaactggaccacatag

SEQ ID NO: 214170 - DNA, 1236 bp, synthetic construct
  misc_feature 1..1236: note = Description of Artificial Sequence: Synthetic coding sequence
  source 1..1236: mol_type = other DNA
atgaatgctgagacttgcgtgtcctactgtgagagcccagctgccgctatggatgcctactacagcccagtgagccagagtagggagggttccagtccattcagggccttcccaggcggagataaattcggcaccaccttcctgtctgcggctgcgaaagctcagggatttggagatgccaagagccgagctcggtacggcgcagggcagcaagacctagctacacctctggagtctggcgcaggggctaggggtagcttcaataaattccagcctcagccgtcaaccccacaaccgcagcctccaccacagccacaaccacagcagcaacagcctcagccacaaccaccggcacaaccccatttgtacctgcagcgcggagcctgtaaaacgccccctgacggctcactgaagctacaggaaggatcatccgggcactccgcggcactacaggttccttgctatgctaaagagtcttccctgggcgaacctgagcttcctcccgattccgatacagtgggcatggattctagttatctctctgtaaaggaggctggtgtgaaggggccacaggacagggccagcagcgatttgcccagcccactcgagaaggccgattcggaaagcaacaaaggaaagaaacgcagaaatcgtacgactttcacgagctaccaattggaagaattggagaaagtcttccagaaaacccactatccggacgtttacgcacgagagcagctcgcgatgcggaccgatctgactgaggctagggtgcaggtgtggttccagaatagaagagcaaagtggcggaaaagggaaaggtttggccaaatgcagcaggttcggacgcactttagcacagcatatgaactccctttactgacccgggctgagaattatgcgcagattcagaacccttcttggctgggcaacaacggcgcagcctcccctgtgccagcttgcgtggtgccctgtgaccccgtgcccgcttgcatgtccccccacgcacaccctccaggatctggagcttccagtgttactgacttcttgtcagtgtcaggggctggctcacacgtagggcagacccacatgggatctctcttcggagctgctagcctgtctccaggacttaatggatacgaactgaacggcgaaccagaccgcaagacaagttcaatcgccgcactgcgcatgaaagccaaagaacacagtgcggctatctcttgggcaacgtag

SEQ ID NO: 214171 - DNA, 630 bp, synthetic construct
  misc_feature 1..630: note = Description of Artificial Sequence: Synthetic coding sequence
  source 1..630: mol_type = other DNA
atgagatccaccatcctgcttttttgcctgctgggttctactagaagcctcccacagcttaaacctgccctgggactgccccctacgaagctcgctccagatcaggggaccctgccaaaccagcagcaatctaatcaggtctttccttctctctcactaatccccttgacacaaatgctgacactgggacccgacctccatctcttgaatcctgccgcaggcatgacacccggtacccaaacccatcccctcacactgggcggactaaatgtgcagcagcagctccacccccacgtcctgccaatttttgttactcagcttggagcccaggggacaattctttctagcgaggagctgcctcagattttcacctccctgatcatacatagtctgtttccgggaggcatcctgccaactagccaggccggagcaaatccggatgttcaggacggatcgctgcccgctgggggagccggagtcaaccctgccactcaaggcacccccgcaggtcgactgcctacccctagtgggacagatgacgatttcgccgtgacaaccccagctggtattcagagatccacacatgctatcgaggaggcaactaccgaaagcgcgaatgggattcagtag

SEQ ID NO: 214172 - DNA, 627 bp, synthetic construct
  misc_feature 1..627: note = Description of Artificial Sequence: Synthetic coding sequence
  source 1..627: mol_type = other DNA
atgcgctccaccatcctgcttttctgccttctgggatcaacgcggagcctcccactcaaaccggcactcgggctgcctcccacaaagctcgcacccgaccaggggactcttccaaatcagcagcagtcaaaccaggtatttcctagtctgagtctgattcccttgactcagatgctgactttaggcccagatctgcatttgcttaacccagcagcgggaatgaccccaggcactcagacacatcccttgaccctgggtggtctgaatgtccagcagcaattgcacccccatgtgctgcccattttcgtcactcaactgggagcccaagggacaattctgagcagcgaggaactaccacaaatctttacctccctgatcatccactccctctttccgggaggcatcctgcccacaagccaggccggagctaaccccgacgttcaggacgggagcttgcctgccggaggtgctggtgtgaaccccgcaacacagggaacgccggcaggacgcctgcctacaccctctggtaccgacgatgactttgcagtgaccacacccgctgggatccagaggagcacacacgcaatagaggaagcaactaccgaatccgctaacggcatacagtag

SEQ ID NO: 214173 - DNA, 2256 bp, synthetic construct
  misc_feature 1..2256: note = Description of Artificial Sequence: Synthetic coding sequence
  source 1..2256: mol_type = other DNA
atgccagctctggggtgggctgtggcagctatcctcatgctgcaaactgccatggctgagccttctccaggaactcttcctagaaaagcgggtgttttttccgatttatcgaaccaagagctgaaagcggtgcatagcttcttatggagcaaaaaagagcttcgcctccagccctcctccacaaccactatggccaagaacaccgtattcctgatcgaaatgctgcttcccaagaagtaccacgtcttaaggtttcttgacaaaggagagcgccaccccgttcgggaggcgcgtgccgtgatttttttcggcgatcaggaacatccaaacgtcaccgagtttgctgtgggaccactgcccggaccctgttacatgcgggcattgtctcctcgaccaggctatcaatcgtcctgggctagtagaccaatctcgactgccgaatatgccctcctctaccacacgctgcaagaagcgaccaagccactgcatcaattttttctgaacacaacgggcttttcttttcaagattgtcatgatagatgtctggccttcacggatgtcgcccctagaggcgtggcaagtggtcaaagaaggtcctggctgattattcagagatatgtagaaggctatttcctgcacccgacgggcctcgagcttttggtcgatcatggcagcactgatgctggccactgggcagtggagcaggtctggtacaatgggaagttttacggcagtcccgaggagctcgcgagaaaatacgcagatggggaggtggatgtggtggtattggaagaccctttgcccggaggtaagggacacgacagtactgaggagcctcctctgtttagttcacacaagccaaggggggacttcccttccccgatccacgtctccggcccacgccttgtgcagcctcatgggcctaggttccgacttgagggcaacgcagtgctgtacggcggttggtccttcgctttcagactccgcagttcctccgggctgcaggtacttaacgtccacttcgggggagagcgtatagcctatgaggtgtctgttcaggaggccgtggccttgtacggcggtcacacccccgctgggatgcagacgaagtatcttgacgtgggctggggattgggatcagtcacccacgaattggcacccggaattgactgccctgagactgccaccttcctggacacttttcattattatgacgccgacgatccagtccattatcccagggcactttgcctgtttgaaatgcccactggagtgcctctgcgcagacacttcaactccaacttcaagggcggattcaatttctacgcaggtcttaaggggcaggtgctggtactacggactacttctaccgtgtataactacgattacatttgggactttatcttctaccctaatggcgtgatggaggccaagatgcacgccacgggttacgtgcacgcgactttctacaccccagaaggcctgcgtcatggaacgaggctccacacacacctaattgggaacatccatacacacctcgtccattacagagtggatttggacgttgctggaactaagaattcctttcagacactgcagatgaagctggaaaatatcacaaacccatggtctccaaggcacagagttgtgcagcccacactcgagcaaacacagtactcctgggaaaggcaagctgctttccggtttaagagaaagctccccaaatacttacttttcacaagtcctcaggagaatccctggggacacaagcgcacttatcggctacaaatacatagcatggcagatcaggtgctgcctcccggatggcaggaggaacaggccattacatgggcgaggtacccactggctgtgacaaagtatcgcgagtcagaactgtgttcctcctcaatttaccaccagaatgacccatggcatccccctgtagtgtttgagcaatttctgcacaataatgaaaatatcgagaatgaggatcttgtggcgtgggttaccgtgggcttccttcacattcctcactccgaagatatccctaacacagccacgcccggaaactccgtggggttcctgctgagaccgtttaatttctttcccgaagacccatccctggcaagccgggatactgtaatcgtttggccaagagacaacggtcccaattatgtgcagaggtggatccctgaagatcgcgattgttctatgcccccaccttttagctataacgggacttataggcccgtgtag

SEQ ID NO: 214174 - DNA, 2313 bp, synthetic construct
  misc_feature 1..2313: note = Description of Artificial Sequence: Synthetic coding sequence
  source 1..2313: mol_type = other DNA
atgcccgcactgggctgggccgtggctgctatattgatgctgcaaactgcaatggccgaaccttcccctggaacattaccccgaaaggccggagtgtttagcgacttgagcaaccaggagcttaaagccgtacactcattcctgtggtccaaaaaggagttgcgcttacagccctcaagcaccactaccatggcgaagaacacagtgttcctaatcgaaatgctgttaccaaagaagtatcatgtcctcaggttcttggacaagggagagcgtcatccagtgcgagaagccagagccgtgatatttttcggcgaccaggaacacccgaatgtcaccgaattcgccgtggggcctctccccggtccttgttacatgcgggctttgagtcctagaccagggtatcagagctcttgggccagcagacccatcagcactgctgaatacgcccttctctaccataccctgcaggaagcgactaagccgcttcaccaattcttcctcaatacaactggattcagctttcaggactgccatgatcgctgcctggccttcactgatgttgcgcctcgcggagtcgcgtctggacagaggcggagctggctgatcatccagcggtacgtagagggatactttttacacccaaccggactagagttgctggtagatcacggcagtactgacgctggccactgggctgtggaacaagtgtggtataatggaaaattttacggatcacccgaagaactggcgagaaagtacgccgatggggaggtcgacgtagtcgttctggaggaccccctgccgggtgggaaaggccatgacagtaccgaggagccacccctgttttcttcacataagcccagaggagattttccatctccgatacatgtgtctgggcctaggctggtacagccccatggccctagattccgcctggaaggcaacgccgtcctgtacggtggttggtcttttgccttccgactgaggtcttcctccggcctgcaagtcttaaatgtgcacttcgggggagaaagaatcgcatatgaggtgtcagtgcaggaagccgttgccttatatggaggccacacacctgcgggtatgcagactaagtatctcgatgttggatggggattgggatctgtcactcacgaattagctcctggaatcgattgccctgagacagccacgtttttggacacattccattattacgacgccgatgatccagtgcactatcctcgagccctttgtcttttcgagatgccaactggcgtccctctgcgaaggcacttcaattctaacttcaaggggggattcaacttttatgcaggtcttaaagggcaggtccttgtgttgcgaactacttccaccgtgtacaattatgattatatctgggatttcattttctatcctaacggagtgatggaggccaaaatgcacgccacaggctacgttcatgccaccttttatacgcctgaggggctgcggcacggcactaggctgcacactcatctgatcggcaatatccacacccatctagtgcattacagggtggacctcgatgttgcgggaaccaaaaactcctttcagactttgcagatgaaactcgaaaatattactaacccctggagccctaggcacagggtggtgcagcccacactggagcagacgcagtattcatgggagcgtcaggccgcatttcggtttaagcggaagctgccgaagtacctgttattcaccagcccacaggagaatccctggggtcacaaacgcacttatcgtctgcaaatccattcgatggctgatcaggttctgcccccaggatggcaagaggagcaggctatcacatgggctcggaccgaagggggacagccacgcgctctgtctcaggccgcttctcccgtgcctggcagatatccactggctgttacgaagtatagagagtccgagctgtgttcttcatccatttaccaccaaaatgacccatggcatccccctgttgtgtttgagcaatttttacataacaatgagaacattgagaatgaagacctggtggcctgggtaacagtaggtttcttgcacatccctcatagcgaagacatacccaacacagccactcccggaaactcagtggggttcttgctgcgaccctttaacttctttccagaggatccatcccttgcatccagggataccgtgattgtgtggccaagagataatgggcctaactatgtccagagatggattccagaggatcgggattgttcaatgccacctcctttcagctataacggaacgtatcgccctgtttag

SEQ ID NO: 214175 - DNA, 1884 bp, synthetic construct
  misc_feature 1..1884: note = Description of Artificial Sequence: Synthetic coding sequence
  source 1..1884: mol_type = other DNA
atgcgggctctgtcacctcggcctggctaccagagctcctgggcctcgcgaccaatttccaccgctgagtacgcgctcttatatcatacactccaggaagccacaaagccattacaccagttcttcctgaacaccactggattttccttccaggattgccacgaccgctgcctggccttcacagacgtggccccaagaggggtggcgtctggccagcggcgaagttggctcatcatccagagatatgttgaaggctacttcctccatcctactggccttgagctcctcgtggaccacggtagcaccgatgctgggcactgggctgtagagcaagtctggtataatggcaagttttatggctctcctgaggagcttgccagaaaatacgccgatggagaggtcgacgtggtcgtccttgaagaccctctgccgggtggcaaagggcatgacagtacagaagaacctcctctgttcagtagccataagccaagaggcgatttcccctcacccatccacgtttctggaccccgtttggtgcaaccgcatggcccacggtttcggctggaaggcaatgctgtactatatggcggatggtcattcgctttccggctacggtcttcgagtggcttgcaggtgctgaacgttcacttcggcggagagcgcattgcctacgaagtcagcgttcaggaggccgtggcactttatggcggacacacacccgcaggtatgcagaccaaatacctcgatgtaggctgggggttgggaagtgtgacgcacgagctcgcgccaggaatagactgcccagagacagcgacattcttagacacatttcattactatgatgctgatgatccggttcactaccctcgggcactgtgtctgttcgagatgcctacgggagtgcccttgcggagacactttaactccaacttcaaaggtggcttcaatttttacgcgggacttaaggggcaggtcttggtcctgcgaaccacctccacagtttataactatgattacatctgggatttcatcttttatcctaatggagtgatggaggcgaagatgcatgctacagggtatgttcacgccactttctacacgccagaaggtttgcggcacgggaccagactgcacactcatctaattggaaatattcacacacaccttgtccactatcgcgtcgatttggatgtcgcaggcactaagaattccttccagactcttcagatgaaactcgagaatatcaccaatccttggtctcctagacacagagtggtacaaccaacgctggagcagacacaatacagctgggaacgccaagcagcctttaggttcaaacggaagctgcccaagtacctgttgttcacaagtccacaggagaacccctggggacataagaggacctaccgcctgcagatccacagcatggctgatcaggtcctcccccctggctggcaggaagagcaggcaattacatgggcaaggtatcccctggccgtcactaagtatcgggaatccgagttatgctctagcagtatataccaccagaatgatccctggcatccacctgtggttttcgagcaatttctgcacaataacgagaatatagagaacgaagatctggtggcttgggtaacagtagggttccttcacattcctcattctgaggatattccaaacacagcaacccccggaaactccgttgggttcctcctgagaccattcaatttcttcccagaggatccttctctggcctcacgggacacagtcatcgtctggcccagagataacggacctaactacgttcagagatggatccccgaggaccgggactgctctatgccccctccctttagttacaatggaacataccggcctgtctag

SEQ ID NO: 214176 - DNA, 750 bp, synthetic construct
  misc_feature 1..750: note = Description of Artificial Sequence: Synthetic coding sequence
  source 1..750: mol_type = other DNA
atgcctgctctggggtgggccgtggcagcaattttaatgcttcaaacagcgatggccgagccttcgccagggactctgccgcgtaaagccggagtattttctgatctatctaaccaagagctgaaggctgtgcattcttttctttggtccaagaaagagcttcgcctacagccttctagcactaccacaatggcaaagaataccgtgttcctgatagaaatgctcctgcctaagaagtatcacgttcttcgattcttggacaagggcgaaagacacccagtgagggaagcacgtgccgttatatttttcggcgatcaggaacacccaaacgtgactgagtttgccgtcggacccttacccggtccttgttacatgagagctctgtctccccgacccggataccagagtagctgggccagcaggccaattagcaccgccgaatatgccctcctttatcatactttgcaggaggccaccaagccccttcatcaatttttcttgaatacaacaggtttctcgtttcaagactgtcatgatagatgtctcgctttcacagacgtagcacctagaggtgtggcaagcgggcagcgccgatcttggttgatcattcaaaggtacgttgagggttacttcctgcacccaacaggcctagagctccttgtggatcacgggtccaccgatgcgggacactgggcagtggagcaggtctggtacaacggaaagttttacggatcaccggaggaattatag

SEQ ID NO: 214177 - DNA, 2256 bp, synthetic construct
  misc_feature 1..2256: note = Description of Artificial Sequence: Synthetic coding sequence
  source 1..2256: mol_type = other DNA
atgcctgcgctcggatgggctgtggcagccatactgatgcttcagacagccatggccgagccctcacccggaacactgcccagaaaggccggagttttttctgacttatcaaaccaggaattaaaagcggtgcattccttcctctggtctaagaaagagctgcgtctgcagcctagcagcactaccacaatggctaagaatacagtgtttctcattgagatgctgctccctaagaaataccacgttctaaggttcctggataagggagaaagacatccagtcagagaggcaagggctgtgatctttttcggcgaccaggagcacccaaacgtcactgagtttgccgtgggccctttgccgggtccgtgctatatgagagcactgtccccacgccctggataccagtcatcatgggcttcgcgcccaatctccacagccgagtatgccttgctgtatcacacactacaggaggccaccaagcctctgcaccagttcttcctgaacaccacaggtttctccttccaagactgtcatgaccgttgcctggctttcacggacgtcgcaccaaggggagtggcctctggacagcgcaggtcctggctgatcattcagcggtatgtagaaggatattttttacacccaacaggtctagagctcctcgtggaccacggttcaaccgacgccggacattgggctgtggagcaagtgtggtacaacggcaagttctatggctctcccgaggagctggccaggaagtatgcagacggtgaggttgacgtggtcgtattggaggatccgcttcccggtgggaaggggcacgatagtacagaagaaccccctctgttcagctcccataagccccgaggcgactttccgtccccaatccacgtttctggacccagacttgtgcagcctcacggtcctcgctttcggcttgaaggcaacgccgtgctctacggtggctggagtttcgcatttcgattaaggtcctcttctggcctgcaagtgctgaacgtgcactttggcggtgagagaattgcgtacgaggtaagtgtgcaggaggccgttgctctttatggcggacacacccccgctggaatgcagactaaatatctggacgtaggttggggtttgggttctgtaactcacgagcttgccccaggaattgactgccccgaaactgcaacctttctggatacttttcattattatgatgcagacgaccctgtccattacccacgagccctctgccttttcgaaatgcccaccggagttcctttgaggagacacttcaacagtaattttaagggcggatttaatttttacgccggactgaagggacaggtgcttgtactcagaacaacctccaccgtgtataactacgattatatctgggatttcatcttttaccctaacggggtgatggaggcgaagatgcatgcaaccggctacgtgcatgcgactttctatacaccagagggtttgcgccatggtactagactgcacacacacctgatcggcaatatccacacccatctggtgcactatcgcgtggaccttgatgtcgccggtactaagaacagctttcagaccttgcagatgaagcttgagaacattaccaatccctggagccccagacaccgtgtcgtccagccaactctcgagcagacccaatactcttgggaacggcaggctgctttccggtttaagaggaagttacctaagtacttgctattcacgtccccacaggagaacccctggggtcataaaaggacttaccgactgcaaattcattccatggccgaccaggtgctgccacccggatggcaggaagagcaagccatcacctgggccagataccccctcgccgtgaccaaatatagagagtcagagctttgcagctcaagcatctatcaccagaacgacccctggcatcctcctgtggtctttgagcagtttctgcacaataacgaaaacatcgagaatgaagacctcgtggcatgggtgaccgtgggttttctgcacatacctcattctgaggatattcccaacaccgccacacccggtaactctgtgggattcctcctgcgcccattcaacttcttccccgaagatccttctctcgcaagcagagatactgtcatagtttggcccagagacaacggcccaaactacgtccaacggtggataccggaagacagagactgtagcatgccccctccattctcatataacggcacctataggccagtgtag

SEQ ID NO: 214178 - DNA, 1014 bp, synthetic construct
  misc_feature 1..1014: note = Description of Artificial Sequence: Synthetic coding sequence
  source 1..1014: mol_type = other DNA
atgccggcattgggttgggccgtggctgcaattctgatgctccagaccgcaatggcagagcctagcccaggcactctgccgaggaaagctggggtctttagtgacttgtctaaccaggagctgaaagcagttcactcatttttgtggtctaagaaagaacttaggcttcagccgtcctccacgacaactatggccaagaacaccgtgtttctaatcgaaatgctgctcccaaagaagtatcacgtgttgaggttccttgacaagggcgaacgacatcccgtgagggaagcccgagccgtgatattttttggcgaccaggaacaccccaatgtcactgagtttgcagttggccctctcccgggaccctgttacatgagggctctgtcccctaggcccggataccagtcctcttgggctagtcgccctatctcaaccgcggagtatgcactgctctatcacactctccaagaggctaccaaacccctgcatcagttttttctgaacacaacaggattcagcttccaggactgccacgaccgctgtctcgcttttacagacgtagccccaaggggggttgcctcaggccaacgcaggtcttggctgattattcagaggtacgtcgaggggtactttttacacccaactggcttagagctgctcgtggatcacggtagcacagatgccggtcattgggcagttgagcaagtctggtataatggcaaattctatgggtcccctgaggaactggctcgtaagtatgcagacggggaggtagacgttgtggtgctggaagatccgttgccaggcggaaaagggcacgatagtacagaagagccccctctattttcgtctcacaagccaagaggcgacttcccgagcccaattcacgtatccggaccacgcttggtgcagccacatggacctaggttcagactcgaaggaaatgcagttctgtatggtgggtggtccttcgcattccggctgagaagctcttccggcctgcaagtgctgtag

SEQ ID NO: 214179 - DNA, 582 bp, synthetic construct
  misc_feature 1..582: note = Description of Artificial Sequence: Synthetic coding sequence
  source 1..582: mol_type = other DNA
atggaggccaaaatgcacgccaccggctacgtgcacgccactttttacacccctgagggattgcgtcatgggaccaggctgcacacacatttgatcggaaacatccacactcacttggttcactatcgggtcgatctggacgttgccggaacaaaaaactcattccagaccttacagatgaagctggaaaacatcacaaacccttggagccccaggcacagagtcgttcaaccaaccctcgagcaaacccagtactcctgggagcggcaggcggctttcagattcaaaaggaagcttcccaaatatttgctcttcacctccccgcaggaaaatccttggggccacaaacgcacatatcggctgcaaatccattccatggccgaccaggtgctgcccccaggatggcaggaggagcaagctatcacgtgggcacgctatcctttggccgtgaccaagtacagggagagtgaactgtgcagcagttccatctatcaccagaacgacccctggcacccgtggtcactgagttctttcttcactaccacgcgcacgctcaaaatgaggacgtggtggcctggctag

SEQ ID NO: 214180 - DNA, 2256 bp, synthetic construct
  misc_feature 1..2256: note = Description of Artificial Sequence: Synthetic coding sequence
  source 1..2256: mol_type = other DNA
atgcccgcattgggttgggcagtagccgctattcttatgcttcagactgcaatggcagaaccatccccgggtactctgcctagaaaggctggagtttttagcgacttgagcaaccaggagctgaaagccgtccattcatttctgtggtctaagaaagaattaaggcttcagccgtcctctactacaacaatggctaaaaataccgtgtttcttatcgagatgctgctgccgaagaagtaccacgtgctgcgctttctcgataaaggcgagcgccacccagttagagaggcaagggccgttatttttttcggcgatcaagagcaccccaacgtgaccgagtttgccgttggccctttgcctgggccatgttacatgcgcgctttgagcccccgtccgggttaccagagctcgtgggcatcccgcccaattagcacggccgagtatgccctgctctaccacaccctgcaggaggctactaaaccactgcaccagttcttccttaacaccaccggtttcagtttccaggattgccacgacaggtgtttggcctttaccgatgttgctccccgtggggtggctagcggtcagcggcgatcgtggctcataatccagcgctatgtcgagggttactttctgcaccccaccggcctcgagctgttagtcgatcacggttccacggacgccggtcactgggcggtggagcaggtctggtacaacggcaaattttatggctcgccagaagagctcgcgaggaagtatgcggacggcgaggttgatgtggtagtgctggaagatccactccccggagggaaaggacacgacagcaccgaagagccccctctgttcagtagccacaagccccgaggtgactttccctctccgattcatgtaagcggcccacggctggtgcaacctcatggaccccgattcagactcgaagggaacgccgtgttgtacggcggttggagtttcgcattcaggctcagaagctcctctggtcttcaggtacttaacgtccacttcggaggggaacgtattgcctatgaagtatcagtacaggaggccgtggccctatatggtggccatacccctgcgggaatgcaaacaaaatatctcgatgtaggctggggcctgggctccgtgacgcatgagctggctccaggtatcgactgccccgagacagcaacgttcctcgacactttccattattatgatgcagatgatccagtccactatccacgcgctttatgtctgtttgaaatgccaacaggcgtgcctctgcgtaggcacttcaactctaattttaagggtgggtttaacttttacgcaggtcttaagggccaagtcctggtgttgcgcacaacttccacagtgtacaattatgattatatctgggactttatcttttatcccaatggggtgatggaggccaaaatgcacgcaaccggctatgtgcacgccacgttctataccccagaaggtctgcggcatggcactcgattgcacacccacttgatcgggaacattcatacccaccttgttcactaccgggtcgatctggacgttgcaggtactaaaaacagcttccaaacactacaaatgaagctagaaaacattaccaatccttggtcaccaaggcatcgagtggttcagccaacactggaacagacacagtactcctgggaaagacaggctgcgttccgttttaaacggaagctccctaaatatctgctcttcactagcccacaggagaatccttgggggcacaaacgtacatataggctgcagatacacagcatggcggatcaagtgttgcctcccggatggcaggaggagcaggcgatcacatgggcccgttatcctctggccgttaccaaatatcgagagagtgaactgtgtagctcaagtatttaccatcagaacgatccctggcacccccctgtggtgttcgaacagtttttgcataataatgagaatatagaaaacgaagacctggtggcgtgggtgacagtgggcttcttgcacatccctcactcagaggacatccctaataccgctaccccaggaaacagcgtgggatttctgctgcgccctttcaatttcttcccagaagacccctctctcgcgagcagggatacagtgatagtatggcctagagataatggtcccaactacgtgcagagatggatccccgaagatagggactgttcaatgcctccacctttttcctacaatgggacttataggccagtatag

SEQ ID NO: 214181 - DNA, 1191 bp, synthetic construct
  misc_feature 1..1191: note = Description of Artificial Sequence: Synthetic coding sequence
  source 1..1191: mol_type = other DNA
atgctgccaagtctgcaagaatctatggacggcgatgagaaggaattggagtccagtgaggaggggggttccgccgaagaaaggcggctggagccaccatcctcaagtcactattgcctctatagttaccgtggtagcagattagcacagcaacgaggggattccgaggacggttccccgagcggaactaatgcagagaccccctcaggtgatgacttttcactttccctggcggataccaaccttcctagtgaggttgagcctgaactgagatctttcatcgcaaagcgacttagtagaggcgcagtttttgaaggactcggaaacgtggcctcagtggaactaaagatcccaggctaccgcgttgggtgctactattgcttgtttcaaaacgagaagcttctccccgaaaccgtgaccatagatagcgagaggaacccgtccgagtatgtagtatgttttttagggggatccgaaaaaggcctggagaccttccgcctggagctcgacaagtatatccagggcctgaagaataacatgaactgtgaggctcgaggactggagagccatattaagagctatctttctagctggttcgaggatgtcgtctgccccatacagcgggtggttctcctgttccaagagaagcttactttcctgctgcacgcggcactctcatacacaccagtggaagttaaagagtctgatgagaagacaaagagggatattaaccgtttcctcagcgtggcctccctccaaggcttgatacacgagggcacaatgacctccttatgtatggcgatgacagaagaacagcacaaaagcgtggtcatcgattgcagtagctcacagcctcagttttgcaacgccggatctaatagattctgtgaggactggatgcaggcgtttctgaatggcgctaagggcggtaaccccttcctctttaggcaggttctcgagaattttaaactaaaagccattcaggacactaataacctgaaacgctttatccgtcaggccgagatgaaccactacgctctcttcaaatgctacatgttcctaaagaactgcgggagtggcgatatactgctcaaaattgtcaaagtggaacacgaagagatgcccgaggccaagaatgtaatcgccgtgcttgaagagtttatgaaggaggcattggaccagtctttctag

SEQ ID NO: 214182 - DNA, 1539 bp, synthetic construct
  misc_feature 1..1539: note = Description of Artificial Sequence: Synthetic coding sequence
  source 1..1539: mol_type = other DNA
atggatctgaaagaatccccatccgaggggtcattacagccttcatctatccagattttcgcgaatacttctaccctgcacgggattagacacatcttcgtgtatggtccactgaccattcggagagtgctgtgggctgtggctttcgtaggatctctgggtctcctactcgtggaatcttccgagagagtctcttattatttttcttaccagcatgtgacaaaggttgatgaggtggtcgctcagagcctggtctttcccgcagtcacattgtgtaatttaaacggattccgattcagccgtctgaccaccaacgatctgtatcacgctggcgaattgctcgccctattggacgtgaatctccagattccagacccccatctcgcagatccctcagttcttgaagctcttcgccagaaggccaactttaagcactacaagcctaagcagttctccatgctggagttccttcacagagtgggtcacgacttaaaagatatgatgttgtactgcaagttcaaaggccaagaatgtggacatcaggactttacaaccgttttcacaaaatatggcaagtgctacatgtttaattcaggtgaagacggaaaacctctcctgactaccgtgaaagggggtactggcaacggactcgagatcatgctcgacattcagcaagatgagtatttgccgatctggggggagactgaggagacaacttttgaggctggtgttaaagtgcagatccacagtcaatccgaacccccatttatacaagaacttggatttggtgtggcccctgggttccagacatttgtagcgactcaggaacagagactgacctacctgcctcctccctggggagaatgtcgaagctccgagatgggactggattttttccccgtttacagcattacagcctgtagaattgattgcgagactcgatatatcgtagaaaactgcaactgtcggatggtccacatgcctggagacgccccattctgtaccccagaacaacacaaagaatgtgcagagccagctcttggactgctggctgagaaagattctaactactgcttatgcagaactccatgcaacctgacacggtataataaagaactctccatggtcaaaattcctagcaagacctctgcaaagtacctagagaaaaagttcaataagtctgagaagtacattagcgagaacatactcgtccttgatattttttttgaagccctcaactacgagaccatcgaacagaaaaaagcctacgaggtggccgctctgctgggtgacatcggaggccagatggggcttttcataggcgcatccatcctaacgatactcgagctgttcgactacatctacgagctgattaaggaaaagctcctggaccttttggggaaggaggaggacgagggatcccacgacgagaacgtctcaacttgcgacacaatgccaaaccactcagagaccatctcccacacagtcaatgtgccactacagaccaccctggggactctcgaagagatcgcctgctag

SEQ ID NO: 214183 - DNA, 612 bp, synthetic construct
  misc_feature 1..612: note = Description of Artificial Sequence: Synthetic coding sequence
  source 1..612: mol_type = other DNA
atgttcaactcaggcgaagacggcaagcctctcctgaccaccgtgaagggtgggaccggcaacggactggagatcatgctggatattcagcaggacgagtacctgcctatctggggcgagacagaggagacaactttcgaggccggtgtgaaggtgcagattcatagtcagtccgagcccccatttattcaggaactggggttcggcgtggccccagggtttcagacattcgttgccacacaggaacaacggctcacctatctgccgcctccatggggcgaatgccggtcatctgaaatgggcctggatttttttccagtttactcaatcaccgcatgtcgtatcgattgcgagacgagatatatagttgaaaactgtaattgtcggatggtacacatgccaggggacgctccattctgtacccctgaacagcacaaggagtgcgctgagccagcccttggcctcctggccgaaaaagacagcaactactgcctgtgtcgtactccatgcaaccttacccgatacaacaaggagctcagcatggttaaaattccgagtaaaaccagcgctaaatacctagagaaaaagttcaataaatcggagaaatactag

SEQ ID NO: 214184 - DNA, 1287 bp, synthetic construct
  misc_feature 1..1287: note = Description of Artificial Sequence: Synthetic coding sequence
  source 1..1287: mol_type = other DNA
atggccgtgggagcctctggcctagagggagataaaatggctggcgctatgccgctgcagttattgcttctgctgatcctactgggcccaggcaacagtctccagttgtgggacacctgggccgatgaggcggagaaggccctggggcctctgttggcccgagataggcgccaggcaacagagtatgaatacctggattatgacttcctccccgagacggaacctcccgagatgctccgcaactctaccgacacaacgccactgaccgggccaggaaccccagaatccaccacagtggaaccagccgctagacgttccacaggcctggacgctgggggagcggttaccgagcttacaaccgagctggctaatatggggaacttgtctaccgactcagctgctatggaaattcagacaacacaacccgcagcaacagaagcacagaccacccagccagtgcctacagaagcccagactacacctctcgccgcaactgaggcccagactactagactgaccgcgacggaagcacagacaaccccacttgccgctaccgaggctcagacaactcctcccgcagccaccgaggcccagactactcaacccaccggacttgaagcccagacaactgccccagctgctatggaggcacaaaccacggccccagccgcaatggaagcacagaccacaccaccggctgctatggaggcgcagactacccaaactaccgctatggaggcacagacgaccgcccctgaagcaacggaggcgcagaccacacagcccactgcaacagaggcacagacaactcccctggccgctatggaggcactgtccacagagccgtcagccaccgaggccctctcgatggagcccaccacaaagcggggactttttatcccgttcagcgttagtagcgtgacacacaaaggcattcctatggcagcaagtaacctgtctgtcaactaccctgtcggcgctcctgaccacattagcgtgaagcagtgtctgctggccattctgatcctggcgctcgtggccaccatattcttcgtctgtacagtcgtgcttgctgtccgactgtctagaaaaggacatatgtatcccgtgaggaattattcccctactgaaatggtatgcatttccagcctgctccctgatggcggtgaaggaccaagtgcaaccgctaacggaggactgtcaaaggccaagtcgccaggcttaactcctgaaccacgcgaagaccgggaaggagatgatctgaccttacactcgtttttgccctag

SEQ ID NO: 214185 - DNA, 1587 bp, synthetic construct
  misc_feature 1..1587: note = Description of Artificial Sequence: Synthetic coding sequence
  source 1..1587: mol_type = other DNA
atggaactgaaggcagaagaagaggaagtcggaggggtgcagcctgtgagtattcaggcatttgcctcgtcctctactctccacggactggcccacatattctcttacgaacgactttccctcaaacgggcactttgggctctttgctttctcggttccctggcagtcttgttatgcgtttgcaccgagcgggtccagtactacttccattaccaccatgtgactaaacttgatgaagtcgctgccagccagctgacattcccagctgtgaccctctgtaacctgaacgagtttaggttctcacaggtgagcaagaatgatctgtaccacgctggcgagctgctggcactcctgaacaacaggtacgagatccctgatacccagatggctgatgagaaacagctggagatcctccaagataaagcaaattttcggtccttcaagccgaagccattcaatatgcgcgagttctatgaccgtgccggacatgacattagagacatgctgctttcctgccactttcgaggcgaggtgtgctcagccgaggatttcaaggttgtgttcacacgatacgggaagtgctatacttttaattccggcagagacggcagacctagactgaaaacaatgaaaggcggaaccggaaatggcctggagataatgttagacattcagcaagatgagtacctccctgtgtggggagagaccgacgaaacctcctttgaggcgggaataaaagtgcagattcacagccaggatgaaccaccattcattgaccaactgggtttcggagtggcccctggcttccagacgtttgttgcctgccaagaacagagactgatttatctaccacctccatgggggacatgcaaagccgttaccatggattccgaccttgatttcttcgattcctattcaatcacggcttgtaggatagactgcgaaacaagatatcttgtggaaaattgcaattgccggatggtccatatgccgggagacgcaccttattgtacccccgagcagtacaaggagtgtgctgacccagccctggatttcttggtagagaaagaccaggaatattgcgtttgcgagatgccctgcaaccttactcggtacgggaaggaattgtctatggtgaaaatcccgagcaaggcttcagctaagtacttagctaagaagttcaataaaagcgagcaatacataggtgagaacattttggtgcttgacatttttttcgaggtgctgaactatgaaacaattgaacagaagaaagcgtacgaaatcgctgggctgctgggagacatcgggggtcagatgggtctgttcattggcgcatctattttaactgttctggaactctttgattatgcctacgaggtgattaagcataagttatgcaggaggggcaagtgccaaaaggaggccaagagaagttcagccgacaaaggcgtagccctgtccctggatgacgtgaagagacacaatccttgtgagtccctaagaggacatcccgctggtatgacatacgccgcaaatatccttccacaccaccccgctcggggaacctttgaagacttcacttgctag

SEQ ID NO: 214186 - DNA, 1689 bp, synthetic construct
  misc_feature 1..1689: note = Description of Artificial Sequence: Synthetic coding sequence
  source 1..1689: mol_type = other DNA
atgccaatccaaattttctgttctatgtctttctcctccggagaggaagcgccaggccctcttggagacatctggggcccacaccaccaccaacaacaacaggacatctccgagtcagaggaagaagaggaggagaaggagaaggaagcggtaaggaaggaggccagtgagggtcatagccccatggacctagtggcctttgccaattcgtgcacacttcatggaactaaccacatctttgtggaggggggacccggtccacggcaagtgctttgggccgttgcattcgtgctggccttgggagccttcctttgccaggtgggcgacagagttgcctattacctttcttatccacatgttacattgctgaacgaagtggccactacagagcttgcatttcctgcagtgaccctgtgcaacacaaatgctgtccgcttgtcccaactttcttatcccgaccttctgtatctggccccaatgttggggctcgatgagtctgatgatcccggtgtaccactcgctcctcccggacctgaagcgttcagtggggagccctttaaccttcatcgattttacaacagatcatgtcataggctggaggacatgctcctttattgttcgtatcaaggcggaccgtgcggaccccataacttttcagttgtgttcacgaggtacggaaaatgctatactttcaatagcggaagagacggtaggcccagattgaaaacaatgaaaggcggaacaggtaatgggctagagatcatgcttgacatccagcaagatgagtacctacccgtctggggggagaccgatgaaacctcctttgaggccggaattaaagtccagatccactcccaggatgagcctccctttatagatcagctggggtttggagtcgcccctggtttccagacttttgtcgcgtgtcaggagcagcggttgatctacttaccccctccttggggaacctgcaaagccgtgacaatggatagcgaccttgactttttcgacagctatagcatcacagcctgtcgaatcgactgcgagacccggtacctagtcgaaaattgcaattgtcgcatggtccacatgcctggagacgctccttactgtactccagaacagtataaagagtgtgcagacccagccctggatttcctagtggagaaagaccaggaatactgtgtctgtgagatgccgtgcaacctaacccgatacgggaaggagcttagcatggtgaaaataccaagtaaagcatcagccaagtatctagctaaaaaatttaacaagtcggaacaatacatcggagagaatatcctcgtgctggacattttctttgaagttttaaactacgagactatagagcagaagaaagcctatgaaatcgcaggcttactgggggacatcggcggtcagatgggactgttcattggagcatccatactaaccgtccttgaattattcgattatgcctacgaggtaattaagcacaagctgtgtaggagggggaagtgtcagaaagaagccaagcgatccagcgctgataaaggagtcgcattaagcctggacgatgtaaaaagacataacccatgtgaatcactaagaggtcatcctgctggaatgacttatgcggcaaacatcctgcctcaccacccggctagagggaccttcgaggatttcacttgttag

SEQ ID NO: 214187 - DNA, 1650 bp, synthetic construct
  misc_feature 1..1650: note = Description of Artificial Sequence: Synthetic coding sequence
  source 1..1650: mol_type = other DNA
atgaagcccacatccggcccagaggaagcaaggaggcctgccagcgatatcagagttttcgctagcaactgctcgatgcatggacttggccatgtctttggtccaggctctctcagcctcaggagaggcatgtgggcagccgctgtggtgcttagcgttgctacattcctttatcaagtcgccgagagggtcaggtactacagggagttccaccatcagactgctttggacgagagagagtcacaccgtcttatcttcccagcagtgactctctgcaatattaaccccttgcggagatctcggctgacacccaatgacctccactgggctggtagcgcccttctggggctggaccccgctgagcacgctgccttcttgagggctctgggtaggccgcctgcgccaccaggatttatgccatctcccaccttcgacatggcacagttgtatgccagagcaggccattccctagatgatatgcttctcgattgccggtttcgcggtcagccctgcgggcctgagaattttaccacaattttcacccgaatgggcaaatgttataccttcaattcaggagcagatggcgctgagctcctcacaacaactagagggggaatgggaaatggactggacattatgcttgatgtgcaacaggaggagtacttacccgtctggagagacaatgaggagactccatttgaggtgggaattagagttcaaatccacagccaggaggaaccaccaattatcgaccaacttggactaggagtgagccccggataccaaaccttcgtttcctgccagcaacagcagctatccttcctgcctccaccctggggggactgctcaagcgcaagcctcaatccgaactacgagcctgaaccaagtgatccactgggttcccctagtccctctccctcccctccttataccctcatgggctgtcgactggcctgtgagactagatacgtggctaggaaatgtggatgtagaatggtgtacatgccaggtgatgtgcctgtgtgttctccccagcagtacaaaaactgtgcccaccctgcgatcgacgccatgctgcggaaggactcatgtgcctgtcctaacccgtgcgctagcaccaggtacgccaaggagctgtctatggtccgcataccgtcccgagcggcagctcgcttcctggcccgaaaacttaatcgcagcgaagcttacatcgctgagaacgtgcttgctcttgatatcttcttcgaagccttaaactatgagacggttgaacagaagaaggcttacgagatgtccgagctgctcggcgacattggcggtcagatggggctgttcatcggggctagcctgttaactatcctggaaattctggattacctttgcgaagttttcagggacaaggtactggggtacttttggaatcggcagcactctcagcgtcacagctccactaatctcttgcaggaaggactgggcagccacagaacccaggttccccatctgtcactgggaccctcaactttgctctgcagtgaagatttacctcctctcccagtgccatccccccgacttagtcctcccccaaccgcgccagctacactgagtcattccagccgccctgccgtgtgtgtgctgggagccccaccatag

SEQ ID NO: 214188 - DNA, 1596 bp, synthetic construct
  misc_feature 1..1596: note = Description of Artificial Sequence: Synthetic coding sequence
  source 1..1596: mol_type = other DNA
atgaaaccgactagtgggcctgaggaggcgaggcgaccagcctctgatatcagggtgtttgcctctaactgttccatgcacgggctgggacatgttttcggacccggtagtctatcactgagacgtggaatgtgggcagccgctgtggtactgagcgtagctacttttctgtatcaggtggccgagcgggtccgctattacagagagtttcatcaccagaccgccctcgacgagcgagagagccacaggttgatctttcctgcagtgactctctgtaacatcaatccgctccgccgttcgcgtttaactccaaatgatttgcactgggcagggtctgcgttgctgggcctggaccctgctgaacacgctgccttcctaagagcactgggtagaccgcctgccccaccaggtttcatgcccagcccgacattcgacatggcccagttgtatgcccgagccggacacagcctggacgatatgctgctggactgccggtttagaggacagccatgcggcccagaaaatttcacaactatttttacccgcatgggaaaatgttacacattcaacagcggtgcagacggagccgaattgttaaccacgactcggggtggaatgggcaacggcctggacataatgctggatgttcaacaggaagaatacctcccagtctggagagataatgaggaaaccccgttcgaggttggcataagggttcagatccactcccaggaggagccccctatcattgatcagctgggtttaggtgtttctcccggataccagactttcgtcagctgccagcagcaacagctctcgtttttgccacccccttggggggattgcagttcagcttctctcaatcctaactatgaacctgaaccctctgacccacttggctctcccagcccctcacctagtcccccttatactctgatggggtgccgcctagcttgtgaaacccgctatgtagcccgtaagtgtggttgccgcatggtgtacatgcctggcgatgtgcctgtctgttccccacagcagtacaagaactgtgcccaccctgcaatcgacgcgatgctccggaaggatagctgtgcgtgtccaaacccatgcgcaagtactaggtacgctaaggagctttccatggtgaggattccttcacgcgcagcagcacgattcctcgccaggaagctaaatagatcagaggcgtatattgccgagaatgttcttgctctggatattttttttgaagctttgaattacgagacggtcgaacaaaaaaaggcctacgagatgtcagagctgcttggggacatagggggtcaaatgggtctttttatcggggcatctctgctgacgattctggaaattctcgattatctgtgcgaagtgtttcgagacaaggtcctgggctatttctggaatcggcaacactcccagcgccacagttctaccaacctgctgcaggagggtctcggaagccatagaactcaggtaccacacctatctctgggcccaaggccaccaacgccaccatgtgctgtgaccaaaacactatcagcttcccaccgcacatgttacttagttacacagctatag

SEQ ID NO: 214189 - DNA, 1632 bp, synthetic construct
  misc_feature 1..1632: note = Description of Artificial Sequence: Synthetic coding sequence
  source 1..1632: mol_type = other DNA
atgaaaccaactagcggcccagaggaagcaagaagaccagcctctgatattcgggtgtttgcaagtaattgtagtatgcatggcttggggcatgtcttcggaccgggtagcctgtcactaagacgcggaatgtgggcggcagcggtcgtgctttcggtggctacctttctgtatcaagttgctgagagggtcagatactatcgggagtttcaccatcagacagctctggatgaaagagaaagccaccggctaattttccctgccgtcacattgtgcaacatcaaccccctgcggagaagtaggctgactcctaatgatttgcactgggcaggctctgccctgctgggcttggacccagctgagcacgccgcattcctccgagcattggggagacctcctgcaccgcctgggtttatgcctagtccaactttcgacatggctcagttgtacgccagggccggacactccctggacgacatgctcctcgactgccggtttcgcggacagccttgcgggccagagaattttaccactattttcactagaatggggaaatgttacacctttaactcaggtgccgacggggctgagctcttgacaactacacgaggcggaatgggtaatggactcgatattatgcttgatgtgcagcaggaggagtacctgcccgtttggcgagacaacgaagagacacctttcgaggttgggatccgagtgcagatccactcgcaggaggagcctccaattattgaccagctcggtctcggggtatccccgggatatcagacctttgtgagctgtcagcagcagcagctgagtttcctcccaccaccttggggagattgctcttccgcctctctcaacccgaattatgagcccgaacccagtgacccgttgggttccccatccccctccccttcccctccttacaccctcatgggctgccgcctggcttgtgagactagatacgtggccagaaagtgcggatgtaggatggtgtacatgccaggcgacgtcccagtatgcagtccacaacagtacaagaactgtgcacatcccgcaatcgatgccatgctccgcaaggactcttgcgcatgccccaatccctgtgcatccacaagatacgcaaaggagctgtctatggttcggatcccttccagagccgctgccaggtttctagcacggaaactcaaccggtcagaagcctatatagcggaaaatgttttagcgcttgatattttctttgaggccttgaactacgagacagtggagcaaaaaaaggcatacgagatgtcagagttactgggggatattggcggacaaatgggactttttattggagcaagcttactgacgattctggagatcctggattacttgtgtgaggttttccgggacaaagtcttgggctatttctggaaccggcagcactctcaacgccactcaagcacaaacttgaccagccacccctccttatgccgtcaccaagattctctgcgtctgccacctcaccttctaccatgtcataccgcgctggaccttctgtcggtttcctctgaacccaggcctgatattctagatatgccttcccttcacgtggcctttccatcttccccacaaattaagtcttag

SEQ ID NO: 214190 - DNA, 1944 bp, synthetic construct
  misc_feature 1..1944: note = Description of Artificial Sequence: Synthetic coding sequence
  source 1..1944: mol_type = other DNA
atgctgtcaggagcagccggagctgccaggcggggaggcgcagccctggcaccatcattaacgaggagcctggcgggaacccatgccggtgctgattcatgcgcaggtgctgacaaaggcagccacaaggagaccatcgaggagagggacaaacgacagcaacggcagcagagacagagacagcatcagggatgcggtgctgctggatcaggcagcgatagcccaacatctggccctcaccccgtaccagtgctgttccctctcgccctgtcattagaagaacaacctttacctccgctaccgctggggagagccccaggcctgttggcacgggagggccagggaagggaagcgttggcgtctcctagcagtcgcggtcagatgcccattgaaattgtctgtaagatcaagttcgccgaggaggatgccaagcctaaagaaaaagaggcgggtgacgagcagtcgctgctaggcgctgtggccccaggcgctgctcccagggatctggctacatttgcatccacctctactctacacggactcggtagagcttgcggcccaggtccacacggtttgagaagaaccctgtgggctctcgcactgctgacttcgctggctgcgttcctgtatcaggctgccggactcgctcggggatatctaacgcggccacatttagtggcgatggaccctgccgctcccgctcccgtggccggttttcctgccgtcaccctatgcaacattaatagatttcgccatagcgccttaagcgacgcagatattttccacttggccaacctcacaggtttgcctcccaaggaccgcgatggacacagagccgcaggcttgcgctaccctgaacccgatatggtcgatatcctgaaccggacaggtcaccagctcgctgatatgcttaagagttgcaacttttctggtcaccactgtagcgcctccaatttcagtgttgtgtacacaaggtatggcaagtgttacacatttaatgcggatccacgcagtagcttgccttctcgggcaggcggaatgggctccggattagagattatgctcgatatccaacaggaggagtacctgcccatatggcgagagactaacgagactagctttgaggccggaattagagtgcaaatccattcacaagaagaaccaccatacattcatcagctcgggttcggagtgagcccaggattccagaccttcgtgtcttgccaggagcagcggctgacttacttaccgcagccatggggaaattgcagggccgagagtgagctccgtgaacccgaactgcagggttattcagcttactctgtgtccgcttgccggcttagatgtgagaaggaagccgtgctccagcgctgccactgccggatggtgcatatgcctgactctcttgggggtgggcctgagggtccttgtttctgccccaccccatgtaacctgacaagatatgggaaagaaatttcaatggtacggattccgaacagaggttcagctcgctatctagcacgaaagtataacaggaatgaaacctacatccgcgagaatttccttgtcttagacgtctttttcgaagctttgacaagcgaggccatggaacagcgcgcagcttacggactttccgcgcttttaggtgatctcgggggtcaaatgggacttttcattggcgctagtattctcacccttctggaaattctggactacatctacgaagtcagctgggatcgcctgaaacgtgtgtggaggagaccaaagacgccactgcgcacttctaccggaggcattagcacactgggcctgcaggagctgaaagaacagtcaccctgcccaagccgagggcgtgtcgagggcggtggggtctcatccttgctgcctaaccaccaccatcctcacggacccccaggagggctttttgaggactttgcctgctag

SEQ ID NO: 214191 - DNA, 2001 bp, synthetic construct
  misc_feature 1..2001: note = Description of Artificial Sequence: Synthetic coding sequence
  source 1..2001: mol_type = other DNA
atgctgtccggcgctgcaggcgctgcccgaaggggtggagctgcccttgctccctctctgacaagatcactcgcgggaactcacgctggcgcagatagctgcgcaggcgctgacaaaggatctcacaaggaaaccattgaagagagagacaaacggcagcagcgccagcagagacagcgacagcaccagggctgcggcgctgcgggatccggcagcgatagccctacctccggtccccaccccgtgccagtcctgtttcccctggcgctgtccctggaggaacagcctctgccaccattgcccctgggcagagccccaggtctgcttgctcgggagggccagggcagagaggctttggcatccccgagcagcaggggccaaatgcccatcgagattgtatgcaagattaaatttgctgaagaggatgcaaagccgaaggagaaggaagccggagacgagcagagcctgctgggagccgtggcccctggagcagcccctcgggacctggctacattcgccagtacttcaaccttgcacgggctgggacgggcatgcggacccggtccccatgggcttaggagaactctgtgggcccttgcgctgttgacttcgttggcagcatttttatatcaggctgcaggcctagccaggggttatctcaccagaccacatctggtggctatggatccagccgcacctgctccagtcgccggttttcccgcagtaacactctgtaatatcaatcgcttcagacattccgcactatctgacgcagacattttccacctggccaatttgaccggactgccacctaaagaccgggatggccatcgagcagccggattgcgttatcccgaacctgatatggtcgacattctcaatcggacagggcatcaactcgccgatatgctcaagagttgcaatttctccgggcatcattgcagtgcgagcaacttcagcgttgtatataccagatacgggaaatgttatactttcaatgcagacccacggtccagcctgccttccagggcaggcggtatgggcagtggattggagattatgctggacatacagcaagaagaatacctccctatttggagagagacaaacgagacgtcattcgaagccggaattcgcgtacaaattcatagccaggaggagccaccatatattcatcaacttggatttggcgtcagtccaggctttcagacatttgtgtcatgtcaagagcagaggcttacatacctccctcagccctggggcaactgccgggctgaatctgagctgagggaaccagagctgcagggttactccgcatattccgtgtctgcttgtaggttgcggtgtgaaaaagaggccgtgctccagcggtgtcactgtcgcatggtacacatgcccggaaacgaaacgatctgccccccaaatatttatatcgaatgcgccgatcatacactggattctctgggcggtggacctgaggggccatgcttttgtcctacaccgtgtaacctgacacgatatggcaaggaaatatcaatggtccggatacccaaccggggttccgctcgctaccttgcccgtaaatataaccgcaatgagacctacattcgcgaaaactttctcgtgctcgatgttttcttcgaagctctaacctcagaagcgatggaacagcgggctgcgtacggcctatctgccctgttaggagacctcggcggtcagatgggactgtttattggagccagtatattgaccctgctggaaatcctcgattacatctacgaagtgagctgggaccgccttaaacgtgtttggaggcgcccaaagactcccctccgaacctccacaggagggataagcacactggggctgcaggagctgaaagagcagtccccatgtccaagtcgagggagggtggagggtggtggtgtgagctcccttctgccgaatcatcatcatcctcatggtccccctggcggactgttcgaggactttgcttgctag

SEQ ID NO: 214192 - DNA, 2271 bp, synthetic construct
  misc_feature 1..2271: note = Description of Artificial Sequence: Synthetic coding sequence
  source 1..2271: mol_type = other DNA
atgcacctcaagattgtccttgcctttctggctttgtcactgatcaccatcttcgctcttgcatacgtgttgttaacaagccctggcggatccagccagccaccccattgtccgtccgttagccatagagcccagccgtggccccaccccggacagagccagttgttcgcagatttgtctcgcgaagagttgacagctgttatgagatttctaacacagagactgggtcccggtctcgtagacgccgctcaggcgcagcctagcgataattgtatcttttcagtagagcttcagctgcccccaaaagccgctgctctggcccaccttgatcgaggctccccgcctcccgctcgcgaggcgcttgctatcgttctgtttggtgggcagccccaaccaaatgtgtcagagctggtagttggtcctttaccacatcctagttatatgcgggacgtcacagtcgaaagacatggcggaccactcccatatcataggcgacctgtgctgcgggcagaattcacccagatgtggcgccacctgaaggaagtagaacttccaaaagccccaatcttcttatcgagcacttttaattataatgggtcgacgctggcagcagtgcacgccactcccagggggcttcgaagcggggaccgggctacctggatggctctctaccataatatcagcggggtggggctgtttttacatcccgttgggctggaacttctgcttgatcacagggctctcgatcccgctcactggactgtccaacaggtgttttatttaggacattactacgccgatctgggccagctagaaagagagtttaagtcaggtcgtttagaagtggtgcgggttccactgccaccaccgaacggcgctagctccctcaggtcaagaaactccccaggcccactgccacccttgcagttctcaccccaagggtctcaatattccgttcaggggaatctcgtggtgagttccctgtggtcgtttactttcgggcacggggtcttcagcgggctgcgcatttttgacgtgagattccagggagaacgtatcgcttacgaggtgtcggtgcaggaatgcgtcagcatctacggggcagactctcccaagacaatgctcacaaggtatttagactcatcatttggcttgggcaggaacagccgtgggctggtgagaggggtggattgcccctaccaggcaacaatggtggacattcacatactggtgggaaaaggcgctgtacagttgctgcccggtgccgtgtgcgttttcgaggaggcccaagggctccctctaaggagacatcacaattacctgcagaatcacttctatgggggacttgcctcaagcgctctggtagttcgtagcgtcagtagtgttgggaattacgactacatttgggacttcgtgctctaccccaacggagccctggagggcagagtgcacgccactggttacattaacactgcttttctgaaaggaggcgaagaggggctgctcttcggaaacagggttggcgagcgggtccttggaactgtgcacacacacgcctttcactttaaacttgacctggacgttgctggtctcaaaaactgggtggtggcagaggatgtggtgttcaagccagtggctgccccatggaacccggagcactggttgcagcggccacagctgacacgacaggtccttggaaaagaggacttgacagccttcagcctgggctcccccctacccagatacctgtacctggcgagcaaccagaccaacgcctggggccaccagagaggatacaggatccagatccacagccctctggggatccacatccctcttgagtcagacatggagcgagccctatcttggggcaggtaccagctggttgtcacccagaggaaagaggaggaatctcaatccagcagtatttatcaccagaacgacatctggacaccaaccgttacattcgctgattttatcaataacgagacactgctaggagaggatctcgtggcatgggtcacagcaagtttcctgcatataccacacgctgaggacattcccaataccgtgactctcggaaacagagtcgggtttctcctccgaccatataattttttcgacgaagatccatctatctttagtcccggtagtgtttatttcgaaaaggggcaggatgctgggctgtgcagcataaaccccgtggcctgtttgcctgatctagccgcttgcgtacccgacctcccacccttctcttatcacggcttttag

SEQ ID NO: 214193 - DNA, 2190 bp, synthetic construct
  misc_feature 1..2190: note = Description of Artificial Sequence: Synthetic coding sequence
  source 1..2190: mol_type = other DNA
atgcacctcaaaatcgtgttggcgttcttggccctgagcctgataacaattttcgctctggcctatgtcctcctaaccagccctggcggatcctctcagcccccacattgccccagtgtttcacatcgcgcacagccctggccacatccaggccagagccagttattcgcggacctctcacgcgaagaacttactgcagtgatgcgatttcttacacagagactggggcctgggctggtagacgcagcccaggcacagcctagcgataactgcatcttcagcgtggagctgcagctgcccccaaaggccgcagcactggcccacctggaccgtgggagtccacctccggctcgtgaagccctggccattgtgctgtttggagggcagcctcagccaaatgtgagcgaacttgttgtggggccactgccacacccatcttacatgcgggacgtcactgtggaaagacacggcggaccactgccatatcataggagacctgtcctgcgggcagagttcacacaaatgtggaggcacctaaaggaggtggaactccctaaagctccaatctttctgtcctcaacattcaactacaacggaagcaccctcgctgcagtgcacgccacgcccagaggcttgcggtccggcgaccgggcaacctggatggccctgtatcacaacatttctggggtgggcctctttttgcaccctgtgggactggagctcctgctggaccaccgcgcactggaccctgcacactggacggtacagcaggtcttttatctcggtcactattatgcagatctcgggcagctggaaagagagtttaagtctgggcgtctagaggtggtaagggtgcctctgcctccaccgaatggcgcatcatcattgcgctctcgtaattcccccggacccctaccgcctctgcaattcagcccccagggatcccagtattccgtccaggggaacctcgtagtaagttccctctggtctttcacatttggccatggtgtcttctccggcctgcgaatattcgacgtaagattccagggggagcgcatcgcatacgaggtgtcagtgcaggaatgtgttagcatatacggagctgattcccccaagaccatgctgactaggtatttagactcgagtttcggacttgggcgaaattcaagggggttggtcaggggtgtggattgcccctatcaggctactatggtggacatacatatcctcgtgggaaagggagctgtgcagttactgccgggagccgtctgtgtgttcgaagaagctcagggattgccactgcggaggcaccacaactacttacagaaccacttttatggagggctggccagcagtgctctggtggtacgcagcgtgagttctgtcggtaactacgactacatttgggactttgttctgtatcctaatggcgcactggagggacgggtgcacgcaacgggctatatcaatactgcttttctgaaagggggagaggagggattgcttttcgggaatcgagtgggcgaacgggtgctcggaaccgtgcacacacatgctttccattttaagttagatcttgatgtcgcagggctcaaaaactgggtagtggccgaggatgtcgtcttcaaacccgtagccgcaccatggaatcccgagcactggcttcagcggccacagctcacaaggcaggtccttggcaaggaggatctcactgctttttcacttgggtctcctcttcccagatacttgtacctggcctccaaccagacaaatgcctgggggcaccagagagggtaccagttggtggtgactcaacggaaggaagaagagtcccagtcgtcgagtatctatcaccagaacgatatttggacccccacagtaactttcgccgacttcattaataacgagactctcctcggggaagacttggtggcgtgggtgactgcaagctttcttcacatcccccacgcggaagatatcccgaacacagtcacacttgggaacagggtggggttcctgctccgcccatataacttttttgacgaagatccctcaatcttctcgccagggtccgtatatttcgaaaagggtcaagatgcaggactctgtagcatcaaccccgtggcctgcctgcccgatctcgccgcttgtgtccctgacttaccccctttcagctatcacgggttctag

SEQ ID NO: 214194 - DNA, 2292 bp, synthetic construct
  misc_feature 1..2292: note = Description of Artificial Sequence: Synthetic coding sequence
  source 1..2292: mol_type = other DNA
atgaatcaaaagacgattctggtattgctgatcttggccgtgatcacaatatttgccttggtatgtgtcctgctagtagggaggggtggagacggcggagaaccttcacagttaccccattgcccgtccgtgtctccatcagcacagccatggacgcaccctggccaatcacagctctttgcagacctgagtagagaagagttgaccgccgtgatgaggttcctcactcagaggctgggtccaggactggtcgatgccgcacaggccaggccttccgacaattgtgtgttttcagttgagctgcaactcccccctaaggccgcagcgctggcccacctggatcgcggttcaccacccccagcgagagaagcacttgccatcgttttctttggaaggcaaccccagcctaacgtgagcgaactagttgttgggcctctgccccatccaagttacatgcgagatgtgacggtggaacgtcatggcggacccctgccctaccaccgtaggccagtgctctttcaagaatatttggatattgaccaaatgatatttaatcgggagctcccccaggccagcgggctgctacaccactgctgcttctataaacacagaggtaggaatcttgtgaccatgacaacagctcctcggggtttgcagagcggggatcgagcaacttggttcggcctgtactacaacatctctggcgcaggctttttcctccaccatgtcgggttagaactccttgtgaaccacaaggctctcgatccagcgcgttggacaattcaaaaggtgttctaccagggtagatactacgacagccttgcccagttggaggcccagtttgaagctgggctagtgaacgtcgttctgataccagataacgggactgggggaagctggtcactaaagtctcctgtccctcccggtcccgctccacccctccagttctaccctcaagggcctcgcttcagcgttcagggatcccgagtggcctcaagcttgtggactttttcttttggactgggagccttttcaggcccacggatctttgacgtaaggttccagggcgagaggcttgtatatgaaatctccttacaggaggccctcgccatatatggtggcaatagcccggcagcaatgacaacacggtacgtagacgggggatttggaatgggaaagtataccacccccttgaccagaggagttgattgtccataccttgcaacttatgtggattggcatttcctcctcgaaagccaggctcctaagaccataagagatgccttctgtgtattcgagcagaaccagggattgcccctccgacggcaccactcagacctgtatagtcactacttcgggggtctggctgagaccgtgctggtcgtgcggtccatgtcaactctcctgaattacgactacgtgtgggataccgtgtttcatcctagcggcgctatcgagatcaggttctacgccaccggctatattagcagcgcatttttgttcggcgcaaccggtaaatacgggaatcaagtttcagagcacaccctagggacagtgcatacccattccgcccattttaaggtggaccttgacgttgctggactggagaactgggtgtgggctgaggatatggtgttcgtgcctatggcggtcccatggagccctgagcaccagctgcagcgactgcaggtgacccgtaaactgcttgaaatggaagagcaggctgctttcctggtgggctctgcaactcctagatacctctatctcgcatcaaatcatagcaataagtgggggcacccccgtggttatagaatccagatgctgagctttgcaggagagcccctaccccagaactcatccatggcccgaggattttcctgggaacgttatcaattggcagttactcagcgtaaagaggaggagccctcctcttcaagcgtttttaatcagaatgacccttgggcgccaactgtggacttttccgatttcatcaacaatgagacaatagctggcaaagacttagtagcttgggtgactgccggttttctgcatattccacacgcagaggacattccgaacactgttacagttggtaatggtgtcggcttcttcctgaggccatataatttctttgacgaggaccccagcttctattcagctgacagcatctacttccgaggcgatcaagacgcaggcgcttgtgaggtgaatccactcgcctgcctgcctcaggcagctgcttgcgcgcctgacctgccagcttttagccacggcggatttagccacaattag

SEQ ID NO: 214195 - DNA, 939 bp, synthetic construct
  misc_feature 1..939: note = Description of Artificial Sequence: Synthetic coding sequence
  source 1..939: mol_type = other DNA
atggccaacaatgacgccgtcttgaaaaggctggagcagaaaggagcggaggccgaccagattatagaatatcttaaacaacaggtatcactcttgaaggagaaagcgatccttcaagccacccttagagaagaaaagaaattgagggtagagaatgctaagctgaagaaggaaatagaggagctgaagcaagaactcattcaggctgaaatacaaaatggcgtgaagcaaatcccattcccaagtggaactcctttgcacgccaattccatggtttctgaaaatgttatacagtctaccgcagttactacagtgagcagcggaacaaaggagcagataaagggtgggacgggggatgagaaaaaggccaaggagaaaattgaaaaaaagggggagaagaaagagaagaagcaacagtcgattgctggatctgccgattccaagccgatcgatgtcagcaggctggatctgaggatcgggtgcattattacagcaagaaagcatccagatgccgacagcctctacgtggaagaagtcgatgtcggggaaatcgctcctcgcaccgtggtctccggcctggtcaatcatgtccccttagaacagatgcaaaacaggatggtgattctgctttgcaacctcaaacccgcaaaaatgagaggggtgctgtctcaggctatggtcatgtgtgcttcttccccagagaagatcgagatcttagcgccacctaacggaagcgtgccaggggacagaataacatttgacgcattccccggtgagcccgacaaggaactaaatccgaagaaaaaaatctgggagcagatccagcccgatctccacactaatgatgaatgtgttgccacctataaaggggtcccctttgaagtcaaaggcaagggtgtttgccgggctcaaactatgagtaactccggcattaaatag

SEQ ID NO: 214196 - DNA, 1011 bp, synthetic construct
  misc_feature 1..1011: note = Description of Artificial Sequence: Synthetic coding sequence
  source 1..1011: mol_type = other DNA
atgctgccagctgtggcagtgagcgaaccagtagtccttcgcttcatgatattttgcaggctgcttgccaagatggctaataacgatgccgttttgaaaaggctagaacaaaagggagccgaagccgaccagattatcgagtacctgaaacagcaagtaagcctgctgaaagaaaaagccattcttcaggcgaccctgcgggaggagaaaaagctgagagttgagaatgctaagctgaagaaggagatcgaggaactgaagcaggagctgatccaggccgagatccaaaacggggttaagcagatccccttcccgagtggtacccccttacatgctaattcaatggtgtctgagaatgtcatccaaagcacagcagttacgacagtttcatccggcacaaaagaacaaattaaagggggaacaggtgacgagaagaaggctaaggaaaagatcgagaaaaaaggcgagaaaaaggagaaaaagcagcaaagtatcgccggttctgccgattcgaagccaatcgatgtgtccagattagatctgcggataggctgcataataactgctagaaaacacccagatgctgattccctctatgtggaggaagttgatgtcggcgagattgcgccacgcacggtcgtttctggcctcgtgaaccacgtgcccttggagcagatgcaaaatcgaatggtgatcctgctgtgtaacctcaagcccgcaaagatgcgtggcgtccttagtcaagccatggtgatgtgcgcttcatctccagagaagatcgagattctggcacccccaaatgggagtgttcctggcgatcgtataacctttgatgcttttcccggagagccagataaggaactcaatcctaagaagaagatttgggagcagatccagccagatttgcacaccaacgatgagtgtgtagctacatataaaggagtgccatttgaggttaagggcaagggagtctgtagggctcagactatgagcaattcaggtatcaaatag

SEQ ID NO: 214197 - DNA, 810 bp, synthetic construct
  misc_feature 1..810: note = Description of Artificial Sequence: Synthetic coding sequence
  source 1..810: mol_type = other DNA
atggccaacaatgacgctgtgcttaaacgacttgagcagaagggcgcagaggccgaccagatcattgaataccttaagcagcaggtgtcgctgctcaaagagaaagctatactgcaggccactctgcgggaagaaaaaaagttacgggtagagaacgctaaactaaaaaaggaaatcgaggagctgaagcaggaacttatccaggctgagattcagaatggagtcaaacagataccttttcccagcggaacacctttgcatgctaacagcatggtgtcggagaatgtgatccagagcaccgcagtgaccactgtcagctctgggaccaaggagcagatcaaaggcggaacaggtgatgagaaaaaagcaaaagaaaagatcgagaagaaaggagagaagaaagagaagaagcagcaaagcattgcgcctcggactgttgtgtctggcctcgttaatcatgtacccttggagcagatgcaaaacaggatggtgatcctgctgtgcaacttgaagccagctaaaatgcgaggagttcttagtcaggccatggtaatgtgtgcatcttcacccgagaagattgaaattcttgcaccccctaatgggagtgtgccgggagatagaatcacttttgatgcctttcctggggaacccgacaaagagctcaatccgaagaaaaaaatttgggagcagatccagcctgacctgcacaccaatgatgagtgcgttgccacatacaagggcgttcccttcgaggtaaaagggaaaggtgtttgccgcgctcagacaatgtccaacagtggaatcaaatag

SEQ ID NO: 214198 - DNA, 939 bp, synthetic construct
  misc_feature 1..939: note = Description of Artificial Sequence: Synthetic coding sequence
  source 1..939: mol_type = other DNA
atggccaacaatgatgccgtgctgaagcgtctggaacagaagggtgccgaggcagaccaaattatcgaatatttaaaacagcaggtatctcttctgaaagaaaaggcaattctacaagccactctgagagaggagaagaaacttcgggtggagaacgcaaaacttaagaaggagatagaggagctgaagcaggaattgattcaggctgagatccagaatggcgtcaagcaaattccatttccctcgggcacgccattacatgctaattcaatggtgtcagagaacgtcattcagtccacggccgtaaccaccgtgtcctctggaactaaggaacagatcaaagggggtaccggagacgagaagaaagcaaaggagaagatagagaagaaaggagagaagaaagagaaaaagcagcagagcatcgccggatcagctgactcaaagccaatagatgtgagccggctggacttgagaattgggtgtatcatcactgcaaggaagcaccccgacgctgacagtctctatgtggaggaagtagatgtcggcgaaatcgcgcctagaaccgttgttagtgggctggttaatcacgtgccattggaacagatgcaaaatagaatggtgattttgctgtgtaacctaaagccagcgaagatgcggggtgtcctatcccaagcaatggtaatgtgcgcttcctcacccgagaaaatcgagattcttgcaccacctaacggctcagtcccgggtgatagaatcacgttcgatgccttccccggtgaacctgacaaggaacttaatccaaaaaagaagatttgggaacagatccagcctgacttgcatacgaacgatgagtgtgtggccacatataaaggggtaccctttgaagtgaagggaaagggcgtgtgccgagctcaaaccatgtccaacagtggaatcaagtag

SEQ ID NO: 214199 - DNA, 453 bp, synthetic construct
  misc_feature 1..453: note = Description of Artificial Sequence: Synthetic coding sequence
  source 1..453: mol_type = other DNA
atggctaacaacgacgctgtccttaaacgcttggaacagaagggtgccgaagctgaccaaatcatagaatatttaaaacagcaagtaagcttgcttaaggaaaaagctatcctccaagctacgctgcgtgaggaaaaaaagctgagggtggagaacgctaaactgaagaaggagatcgaggagttaaagcaggagctaatccaagccgaaatacagaatggagtaaaacagattccgttcccaagcggcactcccttgcatgctaacagcatggtcagcgagaatgtgatacagtctactgctgtgaccaccgttagctccggcacaaaggagcagattaaaggcggtacgggagacgaaaaaaaggcgaaggaaaagattgaaaaaaaaggcgagaagaaggaaaaaaagcagcaaagtatcgccggatccgcggactcgaaacctatctag

SEQ ID NO: 214200 - DNA, 1227 bp, synthetic construct
  misc_feature 1..1227: note = Description of Artificial Sequence: Synthetic coding sequence
  source 1..1227: mol_type = other DNA
atgacaagcaaaggtccggaagaggaacaccctagcgtcaccttgttccgtcagtacctgcgaatacggaccgtgcagcctaaacccgactacggtgcggcagtggccttttttgaggaaaccgctcggcagttgggattggggtgccagaaagtcgaagtggcacctggttacgtagtaaccgtgctaacctggcctggaacgaatcctactctctcttcaatcctattaaacagccacaccgatgtggtgcccgtgttcaaggagcactggtctcatgaccccttcgaagcatttaaggacagtgagggttacatctacgcaaggggggctcaggacatgaagtgtgtaagcatacagtaccttgaggcggtaagacgactgaaagttgaaggccacaggttcccgaggaccattcatatgacattcgtgccagatgaggaagttggaggacatcaagggatggaactgtttgttcagaggccagagtttcatgcactgcgtgccggtttcgccctggacgagggtatagcaaaccccaccgatgccttcacagtgttctatagcgaacggtcgccctggtgggtcagagtgacatctaccgggaggcccggacacgcctcccgttttatggaggacacagccgctgaaaagctgcataaggttgtgaacagcattctggctttcagagagaaggagtggcagaggctgcaatctaacccccacttaaaggagggctcggtgacatccgtcaatcttacaaaactggagggtggagtggcatacaatgtgatcccagcaacaatgtctgcttcatttgatttccgagtcgccccagacgtcgactttaaggcgtttgaagagcagctccagagctggtgtcaggccgcaggcgaaggtgtgacactggagttcgcccagaaatggatgcatccccaggtcacccctacagatgactccaacccgtggtgggccgcattctcaagagtgtgtaaggatatgaacttgacattggaacccgaaattatgccggctgctaccgacaatcggtatataagggccgttggtgtgccggctttggggttcagtccaatgaataggacacctgtgctactgcatgaccatgatgaacggctgcatgaggctgtgttcctgcgtggggtggatatttataccagactattgccagccctggccagcgtgcctgcgctgccttcagactcatag

SEQ ID NO: 214201 - DNA, 1497 bp, synthetic construct
  misc_feature 1..1497: note = Description of Artificial Sequence: Synthetic coding sequence
  source 1..1497: mol_type = other DNA
atgtggggttgccaggccccactgtcaaggctcccagccagcggtgaaacaccaatgagtcagagttggctggtctcgccgctggctacgaggccatcctttaccgctcgatgtagtcactccacccgccataccgggtggcggtggtgctgctttatggagcggcctcttacccttactcggggttcttcatgggctcattgctcttactgtcatagaggtgcgaccggcccatggccgctcacatttcagctcactacaaggtcagcaatgacatccaagggaccggaggaagaacacccaagcgtcacgctgttcagacagtacttgagaatccgaacagttcagcctaagccagattatggcgcagccgtggcttttttcgaggaaactgcaaggcaattgggcctcgggtgtcagaaagtggaagtggctccaggttatgtggttaccgtgctgacttggcccggaacaaatcctaccttgtcatctatcctgctgaattcccacaccgatgtggtcccagtcttcaaagaacactggagtcatgacccgtttgaggctttcaaagattccgaggggtatatatatgccagaggcgctcaggatatgaagtgtgtgtcgatccagtacctggaagcagttcgcaggttgaaagtggagggccaccgtttccccaggactattcatatgacttttgtccccgacgaggaagtaggcggacaccaaggaatggagctgttcgtccagcgtcctgaattccacgctttgcgggcaggcttcgccctggatgaaggaatcgccaaccctaccgacgccttcacagtcttctatagcgaacgatccccctggtgggtacgggttacaagcaccgggcgtcccggacatgctagccggttcatggaggatactgcagccgaaaaactgcataaggtggttaattcaattctcgcgtttagggaaaaggaatggcagagactgcagtctaacccgcatctcaaggaggggagtgtgacctcagtgaacctcacgaaacttgagggcggtgtggcatataatgtcattcctgctaccatgtccgcctcatttgattttcgggtcgcaccagatgtggactttaaggcatttgaagagcagctccagtcttggtgccaagctgccggagagggcgtgaccctcgagtttgctcagaagtggatgcatccgcaggtcacaccaacagacgacagcaatccatggtgggcggctttctcaagggtgtgtaaagacatgaacctaacgctggagccagaaataatgcctgcagcaaccgataatagatacatacgcgcagttggcgttcctgccctgggatttagtcccatgaatcgaacccctgtcttgttgcacgatcacgatgagcgacttcatgaggcagtgttcctcaggggcgttgacatctacacgcgactgttgcccgctcttgccagcgtcccagctctaccctctgattcttag

SEQ ID NO: 214202 - DNA, 1122 bp, synthetic construct
  misc_feature 1..1122: note = Description of Artificial Sequence: Synthetic coding sequence
  source 1..1122: mol_type = other DNA
atgacttctaagggtcccgaggaggagcacccttctgtaacactctttaggcagtacttgcgcatccggacggtgcaaccgaagcccgattatggaaccaatcccactcttagttccattctgctgaatagccacactgacgtggttccagtgttcaaggagcactggagccacgatcccttcgaagctttcaaggacagtgaaggatatatctacgccagaggcgctcaggacatgaagtgcgtgtctattcagtaccttgaagcagtgaggaggttaaaggtggagggacaccgctttccgcgaacaatccatatgacgttcgtacccgatgaggaggtcggaggccatcagggaatggaactttttgtgcagcgaccggaattccatgccttaagggctggattcgctctggacgagggcatcgcaaaccccactgatgcttttaccgtgttctattcggaaagatccccatggtgggtgagggtgacctccaccggccgacccggtcacgcatccagatttatggaagatactgcagccgaaaaactgcacaaagttgtaaactctatcttggcttttagggaaaaagaatggcagagattgcagtccaatccgcaccttaaggaggggtcagtgacctctgtgaacctgactaagctcgagggcggtgtggcatataacgtcatcccagcgactatgtcagctagtttcgactttagagttgcacccgacgttgattttaaggcatttgaggagcagctccagagctggtgtcaggctgcaggggagggcgtgaccttggagttcgcacagaagtggatgcatcctcaagtgaccccgacagacgatagcaacccttggtgggctgcattttcaagagtctgtaaagacatgaacctcacccttgaacctgaaattatgcctgcagcgaccgataatcggtatatacgcgctgtgggggtgcccgcactcggcttctcacccatgaaccggacaccagtgcttctacacgaccacgatgaaaggctgcacgaggccgtctttctgcgaggtgtggatatttacacccggttactaccagcacttgcctcagtgcctgctctccccagtgattcctag

SEQ ID NO: 214203 - DNA, 1032 bp, synthetic construct
  misc_feature 1..1032: note = Description of Artificial Sequence: Synthetic coding sequence
  source 1..1032: mol_type = other DNA
atgactagtaaaggtcccgaggaagaacatccctctgtgaccctgtttcggcaatacctgcggatcagaactgtccaacctaagccagattacggggctgccgtagcctttttcgaggaaactgcgagacagctcggactgggctgccagaaagtagaggtggcacccggttacgttgtgaccgtactgacatggcctggcactaatcctactctgtcctccattctactcaacagccacacagatgtggtgcccgtgttcaaagaacattggtcacatgaccccttcgaggcttttaaggactccgaagggtacatatacgcacggggtgcacaggacatgaagtgcgtgagcatccagtatctcgaggctgtcaggcgactgaaggtggagggccataggttccccaggacgatccacatgacgttcgttcccgacgaagaggtgggaggacatcaaggaatggaactcttcgtgcaacgtcccgaatttcacgccctgagagctggcttcgcattggacgagggcattgcaaaccccaccgatgcctttactgtcttctatagcgagcgatctccatggtgggtgagggttactagcacgggacggcctggtcacgcatctcgttttatggaggacacagccgctgagaagctcgctttcgaggagcaactccagtcctggtgccaggccgcaggcgaaggggtgacccttgagttcgcacagaagtggatgcacccccaggtgactcctacggatgactccaatccttggtgggctgcgttcagcagggtgtgtaaagatatgaaccttaccctagaaccagagatcatgcccgctgctacagacaacagatacattcgcgctgtgggtgtgccggcattgggattctccccgatgaacagaacgcccgtcctattacacgatcatgatgaacgcttacacgaagctgtgttcctgcgaggggtcgacatctacactaggctgttgcctgcattagctagcgtgccggctcttcccagcgattcgtag

SEQ ID NO: 214204 - DNA, 1011 bp, synthetic construct
  misc_feature 1..1011: note = Description of Artificial Sequence: Synthetic coding sequence
  source 1..1011: mol_type = other DNA
atgacctccaagggaccagaggaagagcatccaagcgtcacgctcttcaggcagtatcttcgcataagaaccgtccaacccaagcctgactatggtgccgctgtggcattcttcgaggagacggctcgccaactcggtctgggatgtcaaaaagtggaagtggcacccggatatgtggtcacggtcttgacttggccaggcacaaatcccaccttgagcagcatcttactgaatagccacactgatgtcgtgcctgtgttcaaagagcactggtctcatgacccttttgaggccttcaaagacagcgaaggaatcgccaaccccactgacgccttcaccgtgttctactccgaacgatcgccgtggtgggtgagggttacctctaccggtcgtcctggacacgcctccagattcatggaggacacggctgcagagaaactgcataaggtggtcaattctatcttagccttccgggagaaggaatggcagcgactacaatcaaaccctcatctcaaggagggttctgttacaagtgtcaatcttactaagttagagggtggcgttgcctataacgtcatccccgcaaccatgtccgcctctttcgacttcagagtggctcctgatgtagatttcaaagctttcgaggagcaactgcagtcctggtgccaggcggcaggcgagggcgtgacactcgaattcgctcagaaatggatgcatcctcaggttacgccgacagacgactccaatccgtggtgggctgccttcagccgcgtgtgtaaggatatgaacctgacgctcgaacctgaaattatgcctgccgcaactgacaaccgctacattagggcagtcggcgtccccgcacttggcttctcgcctatgaataggacccccgtgctacttcacgatcacgacgagcgattacatgaggctgtatttctccggggtgttgatatctacacccgcctgctaccagccttggctagcgtaccagccttgccctctgacagttag

SEQ ID NO: 214205 - DNA, 1278 bp, synthetic construct
  misc_feature 1..1278: note = Description of Artificial Sequence: Synthetic coding sequence
  source 1..1278: mol_type = other DNA
atgaattacgcaagattcatcacagcagcaagtgccgcacggaatccatctcctataagaacaatgacagatatcctgagcagggggccaaaaagcatgatctccctggcaggaggactgcccaatccgaacatgtttccctttaagacagcagtcataacggttgagaatgggaaaacaattcagtttggcgaggagatgatgaagcgggctctgcagtatagcccttccgccggaatcccggagctgctgtcctggttaaaacagctgcagatcaaactccacaaccccccaaccatccactaccctccctcccaggggcagatggatctgtgcgtgactagtgggtcacagcaaggtctgtgtaaggtcttcgagatgatcatcaatcccggtgataacgtgctcctggacgaacccgcatattccggcacattgcagtcgctgcatcccctgggctgcaacatcatcaatgtggcctccgacgagtccggaatcgtgcctgactctctccgcgacatcctttcacggtggaaacctgaggatgcaaagaatccccagaagaatacgcccaagtttttgtataccgtgcccaatggtaataaccccactgggaattcgctgactagtgaacgcaaaaaagagatttacgaactggccaggaagtacgattttcttataatcgaggacgacccttactactttctgcagtttaacaaattccgggtgcctacatttctctcaatggacgtcgacggccgtgtgatccgggcagacagcttttccaaaataataagctcgggactgcgtataggtttcttaacaggacccaagcccctgattgaaagggtgatattacacatccaggtaagtactctgcacccttctacttttaaccagttgatgatttcccaactgttgcacgaatggggcgaggagggctttatggcccacgttgatagagtgatagacttctactctaaccagaaggacgctatcttggccgcagcagataagtggctgactggcctggctgaatggcacgtgcccgcagcgggtatgtttctgtggatcaaggtgaaaggtatcaatgacgtgaaagaattgattgaagaaaaggctgttaaaatgggcgtgctgatgctccctggcaatgctttctacgttgattcatccgcgccttccccatatctccgcgcatctttcagctccgctagcccagaacaaatggacgttgctttccaggtccttgcccagctgataaaggaatccttgtag

SEQ ID NO: 214206 - DNA, 1278 bp, synthetic construct
  misc_feature 1..1278: note = Description of Artificial Sequence: Synthetic coding sequence
  source 1..1278: mol_type = other DNA
atgaattatgccagatttatcactgcagcgtcagccgctaggaacccctcccctattaggactatgacagatatcctcagccgcggacctaaatctatgattagtctggctggcggtctgcccaaccctaatatgttccccttcaagaccgctgtaattacagttgaaaacggcaagacaattcagtttggcgaagagatgatgaagcgggcattgcagtactccccaagtgcgggaattcccgagctcctgtcttggcttaaacagctgcaaatcaagcttcacaatcccccaaccatacattatccacccagtcagggacagatggatttgtgcgttaccagcgggagtcagcagggactgtgcaaagttttcgaaatgatcattaaccctggggacaacgtgctcctggacgaaccagcttacagcggcactctgcagagccttcaccctctaggctgtaacattattaacgttgcttcagacgaatcaggcattgtgcccgatagtctgagggatatcctatcaaggtggaagccagaggacgctaagaaccctcagaagaatacccccaagttcctctataccgtgcctaatggtaataacccaactgggaattctctgacttctgagaggaagaaggagatttacgaactggccaggaaatacgactttctgattatcgaagatgacccttattacttcctacaattcaataagtttcgggttcctactttcttgagcatggatgtggatggacgcgtcatccgcgcagatagttttagtaagatcatcagctcaggactccgcatcgggtttcttactggcccaaagccccttatcgagcgcgtgattctgcatatacaggtaagcaccctccacccttcaacattcaaccagttgatgatttcccaactattgcacgagtggggggaggagggctttatggcacacgtggacagagtgatcgatttttatagtaaccagaaagatgcaatactggccgctgctgataaatggctgaccggacttgcggagtggcacgtgccagcggcaggtatgtttctgtggattaaagtgaagggcatcaatgacgtaaaggaactcatcgaggagaaagccgtcaaaatgggcgtgttgatgttgcccggaaacgccttttacgttgactcttctgcaccaagcccctatctccgggcttctttttcgtctgcctctcccgaacagatggatgtagcatttcaggtattggctcagctgatcaaggaaagcctatag

SEQ ID NO: 214207 - DNA, 543 bp, synthetic construct
  misc_feature 1..543: note = Description of Artificial Sequence: Synthetic coding sequence
  source 1..543: mol_type = other DNA
atgaattatgctaggtttatcacagcagccagcgctgctcggaacccgagtcctattcgcacgatgacagacattttgagtagaggtccaaagtctatgatttcccttgccggaggccttccgaatccaaacatgttccctttcaagaccgcagtgattaccgtggagaacgggaaaactatacagttcggtgaagaaatgatgaagcgagcgctgcagtacagtcctagtgcagggatcccagaactgctttcttggctgaagcagcttcagattaaattgcacaatcctcccacgatacactaccctcccagccagggccagatggatctctgtgtgacttccggctcacagcaagggctctgcaaagttttcgaaatgattatcaacccaggggataacgtactactggacgaacctgcctactcgggcaccttacaatccctccaccccctgggctgcaacataattaatgttgcaagcgacgaaagcggaatagtgcctgactccctcagagacatcttaagtcgctggaaaccctag

SEQ ID NO: 214208 - DNA, 630 bp, synthetic construct
  misc_feature 1..630: note = Description of Artificial Sequence: Synthetic coding sequence
  source 1..630: mol_type = other DNA
atgaattatgcacggttcattacagctgcaagcgcggctcgcaatccatcccctatcagaacaatgacagacatactgtcacgaggaccgaagtcaatgatatctctggcaggtggactgccaaacccaaacatgttccccttcaaaacagccgtaatcaccgtggaaaacggcaagaccattcagttcggtgaagagatgatgaaaagggcgttacagtactcaccaagcgccggaattccagagctgcttagctggctcaagcaactgcaaatcaaattgcacaatcctcccacgattcactatcccccttcccaaggccagatggatctgtgtgttacttccggctcacagcagggcctctgtaaggtatttgagatgatcataaatcccggagacaacgttttgctggacgagcccgcatattccggaacactacaatccctgcaccccttggggtgtaacatcatcaacgtcgcctcggacgaatctgggatcgtgcctgacagtctcagggacatcctaagtcgctggaagccagaggatgccaagaatccccagaaaaacactcctaagttcttgtacaccgtgcccaacgggaataacccaacgggcaattcactcacatag

SEQ ID NO: 214209 - DNA, 1290 bp, synthetic construct
  misc_feature 1..1290: note = Description of Artificial Sequence: Synthetic coding sequence
  source 1..1290: mol_type = other DNA
atgaactatgccagatttatcacagctgcctctgccgcaaggaatccttccccgatcagaactatgtctgagaagcgcgcagatattctgtctagagggcctaagtcaatgatcagcctagccggtggacttcctaatccaaatatgtttccgttcaagactgctgtgatcactgttgagaacggaaagactattcagtttggggaggaaatgatgaagcgagctctccaatacagcccctcagcaggcatccctgaactgctctcgtggctaaaacaactacagataaagctacacaacccaccaaccattcattacccaccttcccagggacagatggacctgtgcgtcacctccggcagtcaacaggggctctgcaaagtttttgaaatgatcatcaatcccggagataacgtcttactcgacgagcccgcatattctggtactctgcagagcttgcacccattaggatgtaacattatcaacgtggcaagcgatgaaagtggtatcgtgccagactcactaagagatatactctcaaggtggaagcccgaagatgctaagaatcctcaaaaaaatacccctaaattcctctataccgtcccaaacggaaacaatcctaccggcaatagcttaacatcggagagaaaaaaggagatctacgagctggctagaaagtatgactttttgattatcgaggatgatccctattactttttgcagtttaataaattcagagttcctacatttctgtcgatggatgtggacggtcgcgtaatacgggcagacagtttctcgaagatcatcagttcagggttaagaattggtttcctcactggacccaagcccctgattgagcgcgtgatccttcatatacaggtgagcaccttgcaccctagcacctttaatcagctgatgataagccagctcctccacgaatggggcgaggaggggtttatggcccatgttgatagagttattgatttttacagcaaccaaaaggacgccatcctcgctgccgctgacaagtggttgactgggctcgccgagtggcacgtgcccgctgctggcatgttcttgtggatcaaagttaaagggatcaatgacgtgaaggaactgatcgaagagaaggccgttaaaatgggggtgctcatgctccctggaaatgcattctacgtggatagttcggccccttctccttatctcagggcatctttttcaagtgccagtcctgagcagatggacgtcgcatttcaagtgctcgctcagctaataaaggagtctttgtag

SEQ ID NO: 214210 - DNA, 1278 bp, synthetic construct
  misc_feature 1..1278: note = Description of Artificial Sequence: Synthetic coding sequence
  source 1..1278: mol_type = other DNA
atgaactacgccaggttcattactgctgcgtcggccgctcggaacccttcacctatacggacaatgacagatatcctgtcaaggggtccaaaatcgatgatttctctggccggaggattaccaaatccaaacatgtttccctttaagacagccgtcatcactgtggagaacggcaaaacaatacagttcggggaggagatgatgaagcgcgcactccagtacagccctagtgccggaatccctgagctcttgagctggctcaagcagttacaaatcaaattacacaaccctccaaccatccattatccgccttcccagggtcaaatggacctgtgcgtcacgtccggctctcagcaaggcctgtgcaaggtgtttgagatgatcatcaacccaggtgacaatgtccttctagatgaacctgcttattccggaaccctgcaatccctgcaccccctggggtgtaacattatcaacgtggcctctgacgagtcggggattgtgccagatagcctccgagacattctcagtaggtggaagcctgaggatgccaaaaatcctcagaagaatacccccaagttcctatatacagtgcccaatggtaataatcctacgggcaatagtctgacttctgagaggaaaaaagagatctacgaactcgctcgcaaatacgatttcttaatcatcgaggatgacccatattatttcttgcagtttaacaaattcagggtgccgacatttttatcgatggatgtggatggacgcgtcatcagagcagactcattctctaaaatcatctcatccgggctgaggattgggtttttaaccggcccaaaacccctgattgaacgggtgatactgcatatccaagtatccactctgcatcccagtacatttaaccaactaatgattagccagctgctgcacgagtggggcgaggaaggttttatggcacacgttgaccgtgtgattgacttttacagcaatcagaaggatgccattctggcagcagccgacaaatggctcaccggcttagccgagtggcacgtaccagcagctggaatgtttctctggattaaggtcaaggggattaatgatgttaaggaactgatcgaggaaaaggccgttaaaatgggtgttctaatgctccccggaaatgcattctacgtggatagctctgcccctagtccttatcttcgagccagcttcagttccgcctccccagagcagatggacgttgccttccaagtactcgcgcagcttataaaagagtctctttag

SEQ ID NO: 214211 - DNA, 621 bp, synthetic construct
  misc_feature 1..621: note = Description of Artificial Sequence: Synthetic coding sequence
  source 1..621: mol_type = other DNA
atggccccttcccacctttccgtcagggagatgagggaagatgaaaaacccctcgtgttggagatgctaaaggccggagtcaaagacacagagaatagagtcgccctgcatgcactaacccggccacctgccctgctgctgctggccgcagcgtcctcagggctgaggttcgtgctcgccagtttcgccctcgctctgctcctccccgtattcctcgcggtggccgctgtgaaactgggtctgcgcgcacggtgggggagtttaccccctcccggtggcctgggtggcccttgggtagccgttcgtggctctggggatgtttgtggagttctagcactggccccagggacaaatgctggggacggcgcacgggtaacaaggctgagcgtgagcaggtggcacaggcgtcggggagtgggcagaaggctcctggcctttgccgaggcacgggcacgagcatgggcagggggaatgggagagcccagggccaggctggtagtgccagtcgccgtagcagcctggggtgtgggcggaatgctggaaggatgtggatatcaggcggagggcggatgggggtgtctcggatacaccctggtgcgcgagttctctaaggatctatag

SEQ ID NO: 214212 - DNA, 1842 bp, synthetic construct
  misc_feature 1..1842: note = Description of Artificial Sequence: Synthetic coding sequence
  source 1..1842: mol_type = other DNA
atggtcagtaaggatgcaagcgtcaaggagtatatttttaaagaacttcagaaatacttgcccagtcacgcggtcccagacgagctggtcctaatcgattccctgccttttactagtcacggaaagatcgacgtgtcagagctaaacaaaatatacttaaactatatcaaccttaagagcgaaaacaagctttctggcaaagaagacctctgggaaaagctacaatacctttggaaatctactcttaacctgccggaagacctactgagagtccctgacgagtcactgtttctgaattccggtggagactctttgaagtctattagactgctttccgagattgagaaactcgtgggaacaagcgttccagggctcctcgaaataatactgtcttccagtatcctggaaatttacaaccacatccttcagacggtagtgccggacgaggatgttaccttcagaaagagctgcgcaactaagagaaagctgtcagacatcaaccaggaggaagcttctggcacttccctgcatcaaaaagccatcatgacctttacctgccataatgaaatcaatgccttcgtagtcctctctagagggagccagatcctgtcgctcaattctaccagattcctgaccaaactgggccactgctcatctgcatgcccctccgacagtgttagccaaactaacatccagaatctgaagggccttaatagccctgttctcattggaaagagtaaggatccctcttgtgtggcaaaggtgtctgaggagggcaagcccgctatcgggacacaaaagatggagctacacgtaaggtggaggtctgataccggaaagtgtgtggatgcatcaccattagtagttatcccaacattcgataaatcaagcaccacagtgtatattggaagtcactcccaccggatgaaggcagtcgatttttattcagggaaagttaaatgggaacagattttgggggaccggatcgagtcctccgcctgcgtctcgaaatgtggaaatttcattgttgtcgggtgttataatggtctggtgtatgtcctcaagtccaactccggggaaaagtactggatgttcacaacggaggacgctgtgaagagttccgcaactatggaccccacgaccggactcatttacattggaagccacgaccagcacgcttacgccttggacatctacagaaaaaaatgtgtctggaagtccaaatgcggcggaacagtgttttcatctccctgcctgaacctcataccccaccacctctatttcgctacgctaggcggattgctcctggcagtgaatccagctaccggcaatgtaatctggaaacatagctgcggaaagccgttgtttagttccccacagtgttgcagccagtacatttgcattgggtgcgtggatgggaatctgctctgtttcacccatttcggagagcaggtgtggcagttttcaacatctgggccaatattttcttctccttgtacttccccttcagagcagaagatctttttcggctctcacgactgctttatatattgctgtaatatgaagggacacttacagtggaagttcgaaaccacaagcagagtgtatgccactccgttcgccttccacaattataacggctcaaatgaaatgctcttggctgcagcatctacagacgggaaggtgtggatactcgagtctcagtccgggcaactgcagagtgtatatgagctgccaggagaggttttttcttctcctgtcgtgctggagtccatgttgattataggctgccgggataactatgtgtactgcctggatctgttggggggaaatcaaaaatag

SEQ ID NO: 214213 - DNA, 2574 bp, synthetic construct
  misc_feature 1..2574: note = Description of Artificial Sequence: Synthetic coding sequence
  source 1..2574: mol_type = other DNA
atgacgctgcaagaactggtccacaaggcagctagctgctatatggatcgcgtagcagtctgcttcgatgagtgcaacaatcagctacctgtgtactacacctacaagacagtcgtgaacgctgccagcgaactcagtaactttctcctattacactgtgatttccaaggaattagagaaattggactgtattgtcagccgggaattgacctgccttcttggatcctcggcattctgcaggtcccagcggcatatgttccaatcgaacccgactcacctccttccctctcaacacatttcatgaagaagtgcaatctaaagtacatcctggtcgaaaaaaaacagattaataaatttaagagcttccacgagactctcctgaactacgacactttcacggtagaacataacgatcttgtgctatttaggctacactggaagaacaccgaagtaaacctgatgcttaacgatggcaaggagaagtatgagaaggagaagataaagtctatcagtagtgagcacgtcaacgaggagaaggcggaggaacatatggacttgagattgaaacattgcctagcttatgtgcttcatacatcgggaacaactggtattccaaagatcgtccgcgtacctcataagtgcattgtacctaacatacagcatttcagggtcctgttcgatatcactcaggaagatgtattgttccttgcgtctcctctcacgttcgatccttcggtcgttgagatcttccttgctctttcttccggcgctagcttgctgattgttccaaccagcgtcaaacttctccctagcaaactggcctcggtgctgtttagccaccatcgcgtcacagtgctccaggccacacccaccctgttaagacggttcggcagccagctgattaagagtaccgtgctctccgctacgactagtctaagggtgttggccctgggtggtgaagcgtttccatccctaacagtgttgcggtcctggaggggggagggaaacaagacacagatttttaatgtgtacgggataaccgaagtgagctcatgggcaactatttataggattccggagaagaccctaaatagtaccttgaaatgtgagctgcctgtgcagctgggattcccactgcttggtaccgttgtggaggttcgggacaccaacgggttcaccattcaggagggtagcgggcaggtttttttgggaggaagaaatcgagtctgtttcttagacgacgaggtcacagttccactggggaccatgagggcaacgggtgactttgtcactgttaaggatggggagatctttttcctgggtaggaaagactcccaaatcaagcgacacggcaaacgactgaacatcgagttagtccaacaggtagcagaggagctccagcaggtcgagtcatgtgcagtcacgtggtacaatcaggagaagctgatcttgttcatggtatcgaaggatgcatctgttaaagagtacatcttcaaagagctccagaagtacttgccttctcatgccgtccctgacgagctagtgctgattgactccctgcccttcacgtctcacgggaagattgacgttagcgagttgaacaaaatttatctcaactacattaatctgaagtccgagaacaagctttctggtaaggaggacttatgggagaagctacagtatctgtggaaaagtaccctgaatctccctgaggacttacttcgggtgccagacgagtccctttttctgaactctgggggagacagtctcaagtccattcgactgctaagcgaaatagaaaagcttgttggtacttccgtcccgggtcttctggagatcatcttaagcagttccattcttgaaatttacaaccatatattgcaaactgtggtaccagacgaggatgtgactttccgaaagtcgtgtgccactaagcgcaagttatctgatattaatcaagaggaggcatctggtacatcccttcatcagaaggccatcatgaccttcacgtgtcacaacgagatcaacgcgtttgttgtgctgtcccggggaagccagattctaagtctgaatagcactcgatttctgaccaaattagggcattgctcaagtgcgtgtccatccgactctgtaagtcagactaacattcagaaccttaagggcctgaactcacccgtgctcattggtaaatcaaaggaccccagctgtgttgccaaagtgtctgaagaaggcaagcccgcaatcggaacacagaagatggaattgcacgtaagatggcggagtgacaccggcaaatgtgtggatgccagtcctctggttgttattcctacttttgataagtcttccacaactgtgtatataggcagtcatagccaccgaatgaaagcggtggacttttatagcggaaaagtgaagtgggagcagattcttggtgatcgcattgagtctagtgcttgcgtgagtaaatgcgggaacttcatcgtggtgggcctggccgtcttataccagtggaccaacctgtttattccagtgtatctgactattagagccaaaaacattttttggttcccttag

SEQ ID NO: 214214 - DNA, 2526 bp, synthetic construct
  misc_feature 1..2526: note = Description of Artificial Sequence: Synthetic coding sequence
  source 1..2526: mol_type = other DNA
atgactctgcaggaactagtccataaagccgcttcttgttacatggaccgagtcgccgtgtgcttcgacgagtgcaacaaccaactccccgtgtactacacatacaagaccgtggtaaacgctgcctccgagctgagtaatttcctgctgctacactgcgacttccaagggattagggaaatcggattgtattgccagcccggaattgacctgccatcttggatccttggtattctccaggtgcccgctgcttacgtacctattgagccagatagccctccatcactttccacccattttatgaaaaaatgtaaccttaagtatattcttgtcgagaaaaagcagatcaataaattcaagtcctttcatgaaacgttactcaattacgacacctttacagtggaacataatgatctggtgttgtttagactgcactggaagaataccgaagtgaacctgatgctgaacgatggcaaggagaaatatgagaaggagaaaatcaagtcaatctcaagcgagcatgtcaacgaagaaaaggcagaagagcatatggacctgagattaaagcattgtctcgcttacgtgctgcatactagcgggacaacgggcattcccaagattgtgcgcgtcccgcataaatgcatcgtacccaacattcagcatttcagagttctattcgacatcacacaggaggatgttctgtttttggcatctcctttaacatttgacccctccgtcgtggaaattttcctcgccctttcatctggggcttcattgctgattgtgccgacgagcgtgaaacttctcccaagcaagctcgcctcagttctgttttctcaccatagggtgactgtcctacaagccaccccaactctgctaagacgttttggcagtcaactcattaaaagtactgttctctccgccacaacctcactgcgggttctggccctggggggagaggcttttccctctctcaccgtcctccggtcttggagaggagagggcaataagacgcaaatatttaacgtttacggaatcacagaggtctcttcctgggctactatctaccgcataccagagaagaccctcaatagcacccttaaatgtgaacttcctgtgcaactgggctttcccttgctgggtacggttgttgaggtgagagataccaatggtttcaccattcaggagggctctggacaagtgtttctgggtgggagaaatcgggtgtgcttccttgacgatgaagtgacagtgccactaggtaccatgcgtgctaccggggattttgttacagtgaaagatggcgagatcttttttttggggagaaaggattcacagataaaaaggcacggaaagcgattgaatatcgaattggttcaacaggtggctgaggaactgcagcaggtagagtcgtgtgctgtgacctggtataatcaggagaaattaatcctgtttatggtgagcaaggacgcctccgtgaaggagtacatctttaaggagctgcagaaatatcttccaagtcacgccgtgccagacgagcttgttttgattgacagccttccttttacttcccatggcaaaatcgatgtttcagagcttaataaaatttaccttaattacattaacttgaagagcgaaaacaagcttagcgggaaggaagatctgtgggagaaattacagtatttgtggaaatctactcttaatctccccgaggatctcctgcgcgttcctgatgagagtctgtttcttaactccggaggcgatagtctgaagagtattcggctcctctcagagatcgagaagttggtcggtacatctgtgcccggacttctagaaatcatcttgtcgagctccattctagaaatttataaccatatcttgcaaactgtggttccagacgaagacgtgacttttaggaaatcctgcgcaactaagaggaagctgtccgatatcaatcaggaggaagccagcgggacatcactccatcagaaggctattatgacatttacctgccacaatgagataaatgcctttgtggttcttagcagagggtcacagattctcagtctgaacagcactcgatttctcacaaaactaggccactgcagcagcgcatgtccttccgattccgtgagccagacaaacatacagaacctcaaaggactgaactcccccgtcctcataggcaagtcaaaagatccaagttgcgtagcaaaagtttccgaagagggaaaacccgcaatcggcacccagaaaatggagttacacgtgcggtggagatcagatacagggaagtgcgtggatgcaagcccactggtagtgatccctactttcgataaatccagcactaccgtgtacattgggtctcattctcatcgtatgaaggccgtggatttctattctggcaaggtaaagtgggagcagatccttggcgatcggattgaaagctcagcatgtgtgagcaagtgcggcaatttcatcgtcgtcggcaaattcctgaacctgcggtttgtggaattaaactag

SEQ ID NO: 214215 - DNA, 2997 bp, synthetic construct
  misc_feature 1..2997: note = Description of Artificial Sequence: Synthetic coding sequence
  source 1..2997: mol_type = other DNA
atgaagaagtgcaatctgaaatatattttagtcgaaaaaaaacagatcaacaaatttaaatcttttcatgagaccctgctgaactacgacacattcacagttgaacacaatgatctggtccttttcaggctgcactggaaaaataccgaggtaaacctgatgcttaatgatggtaaagaaaagtacgagaaagagaagattaagagtatctcatctgagcacgtaaatgaggaaaaggcggaagaacatatggacctccgcctgaagcactgcctggcttatgttcttcacaccagtgggacgaccggcatccctaagattgtgcgggtacctcacaaatgtatcgtgccaaacattcagcactttagagttttatttgatattactcaggaggacgtcttgtttcttgcttcccctctgaccttcgatccaagtgtggtggagatcttcctggcgctgtcttcgggcgcatcattgttaattgtacctacctccgtgaagctgcttccctccaagctcgcctctgtcctttttagtcaccaccgggtgaccgttcttcaggcgacccctaccctcctaaggcgatttggcagtcagctcatcaaaagcaccgtgctgagtgccacgaccagtttgcgcgtgctcgcgctcgggggagaggccttcccgtctctcacggtgttaaggagctggaggggagagggcaataaaactcaaatcttcaacgtatacgggatcactgaggtctcatcgtgggccacgatttatcgcatccctgagaaaactttaaactcgaccctgaaatgcgagttacctgttcaacttggtttccctctgctcggtacagtagttgaagtcagggataccaatggctttacaatccaggaagggagcggacaggttttcttgggcggacgcaatcgcgtgtgcttcttggacgacgaggtcactgtaccattggggacaatgagagctaccggtgatttcgtgacagttaaagatggtgaaatcttcttcctagggagaaaagactcccagataaagagacatggaaaacgtctaaacattgagctggtccagcaagtggccgaagagctgcagcaggtggaatcctgcgccgttacctggtacaatcaggaaaaactcattctgttcatggttagtaaggacgcgtcagtgaaagaatacattttcaaggagctgcaaaaatatctcccatctcacgctgttccagacgagctcgtccttatcgatagcctgccttttacgagtcacggtaaaattgatgtgagcgagttgaataaaatatacctcaattacattaacctgaaaagcgaaaataagcttagtgggaaagaggatctgtgggagaagctgcagtacttgtggaagagcactctcaacctccccgaggaccttctgagagttcctgatgaaagtctgttcttgaatagcggtggtgactcactgaagagtatacggctgttgagcgagattgagaaattggtcggcacttcggttccgggactgttggagattatccttagttcaagcattctggagatatacaatcatatacttcagacggtcgtccctgacgaggacgtaaccttcagaaaaagctgtgccaccaagcgtaaattatccgatatcaaccaggaggaagctagcggtacatctttgcatcagaaggctatcatgacattcacctgccataacgaaatcaatgcattcgtggtcctgagccggggatcccaaattctgagcctgaactcgacaagatttctgactaagttggggcattgcagctccgcctgtccctccgatagtgtcagtcagacaaatattcagaatcttaaggggctgaattcacctgtgcttatcggaaagagcaaggacccctcttgcgtggccaaagtgagtgaagaaggcaagccagcgatcggcacccagaaaatggagttacatgtccgctggaggagcgatactggcaagtgtgtcgacgccagtccactcgttgtgattcccacatttgacaagtcaagcaccacagtctacatcggatctcattcccatcgaatgaaggcggtggacttctacagtggcaaggtgaaatgggagcagatcctgggggaccgcatcgagtccagcgcctgcgtctcaaagtgcgggaatttcatagttgtgggctgttataatggactggtttacgtgctgaaatctaactcaggcgagaagtattggatgttcaccactgaagatgccgtcaaatcaagcgcaacgatggatcccacaactggtctcatctacattggaagtcatgatcaacacgcctacgccctcgacatctacagaaagaagtgcgtgtggaaatccaagtgcggtggaaccgtgttcagttcaccttgcctcaacttgatcccgcaccacctttactttgcgactctggggggactgctgctcgctgtcaacccagccactggaaatgtaatttggaaacattcttgcggcaaacccctattcagttcacctcagtgctgtagccaatacatttgtattggctgtgtggacggaaatctcttgtgcttcacacactttggcgagcaagtctggcaattctcaacttcgggacccatcttctcctctccctgcacctctcccagcgaacagaagattttttttggttcacatgattgctttatctactgctgcaacatgaagggacatctccagtggaaattcgagacgacaagccgcgtatacgcgacccctttcgcctttcataattataacggcagtaatgaaatgctgctggccgcagctagtaccgacggcaaggtgtggattctcgagtcacagtccggccagctgcagagcgtttatgagcttccaggagaagtattttcatctcccgtggtccttgagagtatgttgatcattgggtgccgcgataactatgtgtactgcctggatctgctcgggggtaatcaaaaatag

SEQ ID NO: 214216 - DNA, 2781 bp, synthetic construct
  misc_feature 1..2781: note = Description of Artificial Sequence: Synthetic coding sequence
  source 1..2781: mol_type = other DNA
atgctgcaggtgcacaggacggggcttggtcggctcggagttagcctatccaaaggtctgcaccacaaagccgttctggcagtgagacgagaagacgtcaatgcctgggagcggagagctcctctggctcccaaacatatcaagggaatcactaacctgggctacaaagtgcttattcagccttctaatcgaagggcaatccatgataaggattatgtaaaggccggaggcatattacaggaggacatctctgaggcttgcctcatcttgggagtgaagagaccgcctgaggagaaattaatgagccgtaagacctacgccttcttctcacacacaataaaagcgcaagaggccaacatgggcttgctcgatgaaatcttaaagcaggagatcaggcttatcgattacgaaaagatggtggaccaccgaggggtacgggtggtggcctttggtcaatgggcgggagtcgcgggtatgattaatatcttgcacggtatgggtctgcgtctgctcgcgttgggacatcatacgccattcatgcacataggaatggctcacaactatagaaattctagtcaggccgttcaggcagtccgtgatgccggttacgagatatctctggggttaatgccaaagtccattgggcctctgactttcgtgttcaccggaacaggaaatgtatctaagggagcccaggccatatttaacgagcttccttgcgaatacgttgagcctcacgaattgaaagaagtctctcaaacaggtgatttgcgtaaggtttacggtactgtattgtcacgacaccaccacctcgttcggaaaaccgacgcggtgtacgaccctgctgagtacgataagcaccctgagcgctacatatcacgtttcaataccgatattgctccatatacgacatgcctgattaatggcatctactgggagcagaacaccccacgactactgactcggcaagatgcccagtccctgctggctccgggaaagttctcaccggctggggtggagggctgccctgccctgccacacaagctagtcgccatttgcgatatctctgcagacaccggcggttcaatcgagttcatgacagagtgtacaactatagagcacccattttgcatgtacgatgccgatcagcacataatccatgatagcgtggagggaagcgggatactaatgtgcagcatcgataacctccccgcacaactgccaattgaggccacagaatgttttggggatatgctgtacccttacgttgaagaaatgatactgtccgacgcgacacagcctctggagagccaaaatttcagccctgtcgttcgagacgcagttattacctccaacgggacacttccagacaagtataaatacatacagactctcagagagtcccgcgaaagggcccaatctctgagtatgggtacccgacgcaaagtactggttttaggctctggatacatttcagagcccgtgctagagtacctttcgcgtgatggtaacattgaaatcaccgtagggtcggatatgaagaatcaaatcgagcagcttggcaaaaaatacaatatcaacccagtgtctatggacatctgcaagcaggaggaaaaactagggtttcttgtggctaagcaggacctggtaatctccctgttgccatacgtcttgcacccactggtggccaaagcatgcattaccaacaaagtcaatatggtcacagctagttatatcactcctgccttaaaggaactcgaaaaatctgtggaagacgccggaatcaccataatcggcgaactcggactggatcctgggctggaccacatgttggcaatggaaaccattgataaggcgaaagaagtcggcgcaaccatagagtcatacatttcttattgcggtgggttacccgctccagagcattccaacaacccattgcggtataagttctcgtggagcccagtgggagtgttaatgaatgttatgcagagcgccacctacctacttgatggcaaggttgttaacgtcgccggaggcatctcttttttggatgccgtgaccagcatggacttcttccctggattgaaccttgaaggctatcctaatagagactccaccaaatacgccgaaatctatggaattagctccgcccatactctgctcagaggaaccttaaggtacaaaggctacatgaaagctctcaatgggttcgtcaaactgggacttattaatcgagaggctctgcccgctttcaggccggaggccaatcccctgacttggaagcagctcctgtgcgacctcgtgggtatcagtcccagtagcgaacatgacgtgctgaaggaggcggtgctgaaaaaactgggaggcgacaatacgcagctcgaggcggctgagtggctcgggctgctgggggacgagcaggtacctcaggccgaaagcattttagatgcgctgagcaagcacctcgtcatgaaattgagttacggcccagaagaaaaggacatgatcgtgatgcgtgacagctttgggatccgacacccaagcggccacttggaacacaagactatcgatcttgttgcctacggagacattaacggatttagtgctatggcgaaaacagttgggctccccactgccatggccgctaaaatgttactcgacggggaaattggagcaaagggcctgatgggaccattttcaaaagaaatctacggtcctatcttggagaggatcaaggccgaagggataatttataccactcagtctaccattaagccctag

SEQ ID NO: 214217 - DNA, 2781 bp, synthetic construct
  misc_feature 1..2781: note = Description of Artificial Sequence: Synthetic coding sequence
  source 1..2781: mol_type = other DNA
atgctgcaggtgcacagaaccgggctcggcagactcggggtgagcttgtccaaaggccttcaccataaagccgtcctagctgtaaggagggaagacgtaaatgcttgggaaagacgagcccctcttgcacctaagcatatcaaaggaatcacaaatctaggatacaaagtgctgattcagccatccaatcgccgagctattcacgataaggattatgtcaaggcaggtggtatcctgcaggaagacataagtgaagcttgtctcatcctcggtgtgaagcggcctcccgaagagaaactgatgtctcgtaaaacatacgcatttttttcccacacgattaaagcgcaggaggccaatatgggattgctggatgagatcctgaaacaagaaatcagactgatcgactatgaaaaaatggtggaccaccgaggcgttcgcgtggtggccttcggccaatgggcaggcgtcgccggaatgatcaatattcttcacggtatggggctccgactccttgctctcgggcatcatacaccgtttatgcatataggcatggcccataattataggaactcaagccaggctgtacaggcggtcagggatgccggatatgaaatttccttgggcttgatgccaaagtccatcggacctctgaccttcgtgtttaccggtacggggaacgtaagcaagggagcccaagcaatattcaacgaactgccttgcgagtatgtcgaaccccatgaactcaaagaggtgtctcagaccggagatctgcgtaaggtgtatggcacggttttgagccgccatcaccatcttgtgcggaaaaccgacgccgtctatgatcctgccgaatacgataaacacccggaaaggtacattagccggttcaacacagatattgctccatatactacctgcttgattaacggcatatattgggagcaaaacactccaaggctactgacccggcaggatgcacagtcgctgttagcccctggtaagttctcgcccgcaggcgttgaaggttgccctgcactgcctcacaagctcgtggccatctgtgatatatctgccgacactggaggctctattgaattcatgactgaatgtacgacgatcgaacatccattttgtatgtacgatgcagatcagcatattattcacgattccgtggagggaagtgggatcctgatgtgcagcattgataaccttccagcgcaactccctatagaggctactgaatgttttggggatatgctctacccctatgtcgaagagatgattctaagcgatgccacacagccgttggagtctcagaacttttcacccgtcgtccgggatgccgtaatcacctctaacggcaccctgccagataaatacaagtatatccaaacacttagagagtcacgtgaaagggcccagagtcttagtatgggcacaaggcgaaaagtcctagtgttgggcagtggctatatctccgagcctgtgctggagtatctcagccgagacgggaacatagaaattaccgtaggctcagacatgaaaaatcaaatcgaacagctaggaaagaagtataatatcaatccggtgagcatggatatctgcaaacaggaagagaaactaggattcttggtggccaaacaggacctcgtgatctctcttcttccttatgtgttgcaccccctggttgccaaggcatgtatcactaataaagtgaatatggtgaccgccagctacattacccccgctctgaaggagctggagaagtccgtagaggacgcagggattacaatcatcggggagcttggtttagatccgggtctcgaccatatgctagccatggagacgatcgacaaggccaaggaagtgggcgctacaatcgagagctatattagctattgcgggggacttcccgcacccgagcattccaacaatcccttacgctataagttcagttggagccctgttggcgtgctgatgaatgtgatgcagagcgcaacatacttactggacggcaaggtagtgaatgtggcaggaggcattagcttccttgacgctgttacctccatggacttctttcccggactcaatctggagggctacccgaatcgcgactccacaaagtatgccgaaatctacggaatttcctccgcccatacactgttaagggggactttacgatataagggctatatgaaggccctaaacggattcgtaaagctgggtctgataaatagagaagcgttgcccgcttttcgacctgaggcgaacccactcacgtggaaacagctgctctgcgacttggtggggatctctccctcttcagaacacgatgtactgaaggaggcagtgctgaagaagctgggtggcgacaatacccaactggaggccgctgagtggttggggctgctgggggatgagcaggttccacaggcagagtccatcctggatgcactgagcaagcacctggtaatgaagttgtcatacggcccagaggagaaggatatgatcgtaatgagggatagcttcggcatcaggcacccctcaggccatctggagcacaagactattgatctggtggcatacggagacataaatggattctccgctatggcgaaaactgtcggtctgcctacggcaatggctgctaagatgctgctggatggggagataggagcaaaaggcttaatgggacccttttcaaaagaaatttatggccctatcctcgagcggataaaagccgaaggaatcatctatacaacacagagcacaattaagccatag

SEQ ID NO: 214218 - DNA, 942 bp, synthetic construct
  misc_feature 1..942: note = Description of Artificial Sequence: Synthetic coding sequence
  source 1..942: mol_type = other DNA
atgcaaccccagtcagttctgcactctggctatttccacccactgttaagggcgtggcagacagccaccactactttaaacgcctccaatctcatttacccgatttttgtgacttacggcgtgaagaggcttgaggaaatgctccgtccccttgttgaagaaggtttaaggtgcgtcttgatctttggtgttccctcacgcgtgcccaaggatgagcgcggttcagctgcggactccgaagaatccccagccatcgaagctattcacctgctgaggaagaccttcccgaatctgcttgtagcttgtgacgtgtgtttgtgcccctatacctcgcacggccactgcggtttgttaagcgagaacggggctttccgggcagaggagtcacgacagcgcttggctgaggttgccttagcttacgcaaaagctggatgtcaggtggtggctccctcagatatgatggatggcagggtagaggctataaaggaggccctgatggcccacggtctgggaaaccgcgtttcggtaatgtcttacagtgctaaattcgcaagttgtttctatggtccattcagggacgccgctaaaagttccccggctttcggggatagaaggtgttaccagcttccgcctggagcaagaggattggcccttagggctgtcgatagagatgtgcgagagggagctgatatgctgatggtgaagccaggcatgccctacctagatatcgttagggaagtgaaggacaaacatcctgatttgccattggcagtctaccatgtcagtggtgagtttgccatgctgtggcatggcgcacaagcaggggcttttgatctcaaggccgctgtgcttgaggcaatgacggcatttagacgcgctggagccgacattatcatcacctattatactccccagttgctgcagtggctcaaggaggagtag

SEQ ID NO: 214219 - DNA, 993 bp, synthetic construct
  misc_feature 1..993: note = Description of Artificial Sequence: Synthetic coding sequence
  source 1..993: mol_type = other DNA
atgcaaccacaaagtgtcctgcattcgggctacttccacccactgctgcgcgcatggcagacagctacaactacgctcaatgcttccaatctgatctaccctatcttcgttactgacgtgccggatgacatccaacccatcaccagcctccccggagttgccagatatggtgttaaacgcctcgaggaaatgctgaggcctctggtggaggaaggcttgagatgtgtcttgatcttcggggttccatcaagagtgccaaaagacgagaggggatccgccgctgactctgaagagagtccagccatcgaagccattcacctacttagaaagacattccctaaccttttggtggcatgtgacgtttgtctgtgtccctacacatcacacggtcactgtggcctcttgtccgagaacggcgctttccgtgccgaagaaagccggcagaggttggcagaggtggctctggcctacgctaaggcaggatgccaggtggtggcgccaagcgatatgatggacggacgggtggaagctataaaggaggctcttatggctcatgggttaggaaacagagtgtcagtaatgtcctatagcgccaagtttgccagttgcttctacggcccttttcgggacgccgcaaaatcatctcctgcattcggtgatcgcaggtgttatcagctgcctcccggtgccagagggctagctctgagagccgtggatcgtgatgtgcgggagggagccgacatgcttatggtgaaacctggaatgccctacctcgatatcgtgcgagaagtaaaagataaacatccagatttgccactggctgtataccatgtatcgggcgaatttgcaatgctgtggcacggtgcccaagctggcgcttttgatttgaaggccgcagtattggaggccatgaccgcattccggcgtgcaggcgctgacatcattatcacctactatactccacaactgctccagtggttaaaggaagaatag

SEQ ID NO: 214220 - DNA, 45 bp, synthetic construct
  misc_feature 1..45: note = Description of Artificial Sequence: Synthetic coding sequence
  source 1..45: mol_type = other DNA
atgccactgtgtccgttggcccacgccatgcagccacagtcctag

SEQ ID NO: 214221 - DNA, 363 bp, synthetic construct
  misc_feature 1..363: note = Description of Artificial Sequence: Synthetic coding sequence
  source 1..363: mol_type = other DNA
atgcccctctgtcctctggcacatgctatgcaaccccaatcagtgcttcatagtggttacttccatcccctgctgagggcctggcaaacagctacaaccactctaaatgccagcaatctcatctaccccattttcgttactgatgtaccagatgatatacaacccattacaagcctgcctggagttgccagatacggggttaagcgccttgaggagatgctgcgccctttagtcgaagagggcctgagatgcgtcttaatcttcggagttccaagcagagttcccaaagatgaaagggggagtgccgcagacagcgaggagagccctgccatcgaagcaatacacctcttgcgaaaaacctag

SEQ ID NO: 214222 - DNA, 180 bp, synthetic construct
  misc_feature 1..180: note = Description of Artificial Sequence: Synthetic coding sequence
  source 1..180: mol_type = other DNA
atgccactatgccctctcgcgcacgctatgcaacctcagtcggtcctccactccggctattttcaccccctgctgagagcgtggcaaactgccactaccaccctgaatgcatccaatctaatttatcctatcttcgtgacagatgtacccgacgacatacagcctataacttccctgtag

SEQ ID NO: 214223 - DNA, 1923 bp, synthetic construct
  misc_feature 1..1923: note = Description of Artificial Sequence: Synthetic coding sequence
  source 1..1923: mol_type = other DNA
atggagagcgtggtcaggagatgtccatttctgagcagggttccgcaggcctttttacagaaggcaggtaaatcactgctgttctacgcccaaaactgccccaagatgatggaggtgggggcaaagccagctcccagggcacttagcacagccgctgtccactaccagcaaattaaagaaacgcctccagcgagcgagaaagataagacagccaaagccaaagtgcaacagacacctgatggctcccaacagtctccagacggcacccagctgcctagtggacaccctctcccggcaacatcacagggcacagcctccaaatgcccctttctggcagctcagatgaatcagcgcggaagctccgtgttttgtaaagcatccctggagcttcaggaggacgttcaagagatgaacgccgtacgcaaagaggtcgctgaaacatctgctggaccttctgtggtgtccgttaagactgacggcggtgacccttccgggctactgaagaactttcaggatatcatgcagaaacagaggcctgaaagagtcagccatcttctccaggataacctcccaaagtcagtgagtaccttccagtatgaccggttcttcgagaagaagatcgatgagaagaagaatgatcatacttatagagtattcaagactgttaacaggcgcgcacacatatttccaatggccgatgactacagtgattcactgatcaccaagaaacaggtctccgtctggtgtagcaacgattaccttggaatgtcacggcacccgagagtgtgtggggctgtgatggacaccctaaagcagcacggggcaggggctggagggacgcgaaacattagcggaaccagcaagttccacgtagacctcgaaagggagctggccgacttacatggaaaagatgcggcactcttgttcagcagctgcttcgtggctaacgactctacactgtttactctagccaagatgatgcccggatgtgaaatttacagtgactccgggaaccacgcaagtatgatccagggaatcagaaattctagagtgcccaaatacatttttcgccacaacgacgtgtcccacttgcgagaactgctccagaggtccgatccgtcggtgcccaagatcgttgcttttgaaacggtccattccatggacggagctgtgtgccctctggaggaactgtgcgacgtcgcccacgaatttggtgctattacattcgtagatgaagttcacgccgtgggtctgtacggggcaagggggggtgggataggagatcgggatggagtaatgccaaagatggatattattagtggcaccctgggaaaggcctttggttgtgtggggggttatattgccagtacaagttcccttatcgacacagtgagatcgtacgccgcaggcttcattttcactactagcctaccccctatgttgctcgcaggggctctcgagagcgtccgaatcctgaagtcagctgagggcagagttctgcggaggcagcatcaaaggaatgtgaagctgatgcgacaaatgctcatggatgctggccttccagtggtgcattgcccttcgcacatcatccccgtaagggtggccgacgcagccaagaatacagaggtgtgcgacgagctaatgtcccggcacaatatttacgtgcaggctatcaactatcctaccgtccccaggggcgaggagctcctgcgcatagctccaacacctcatcacacaccgcagatgatgaattattttctggaaaacctccttgttacctggaaacaagtcggccttgaattaaagcctcattcatcagctgagtgtaacttttgcaggcgtccattgcattttgaagtgatgagtgagcgtgagaaatcctatttcagcggcctgtctaaactagtcagtgctcaggcctag

SEQ ID NO: 214224 - DNA, 1923 bp, synthetic construct
  misc_feature 1..1923: note = Description of Artificial Sequence: Synthetic coding sequence
  source 1..1923: mol_type = other DNA
atggagtcagtggttaggagatgcccattcctctcccgagttcctcaggccttccttcagaaagctggaaaatctctgcttttctacgcccagaactgtcccaaaatgatggaagttggcgcaaagcctgctccaagggccctcagcacagcggcagttcattatcagcaaataaaagagaccccaccagcctccgaaaaggataagacagccaaggcgaaggtccagcagacaccagacgggtcacagcagtcccctgacggcacgcagttaccctctggccatccgttaccagccacgtctcaaggtaccgcttcgaaatgcccatttctcgcagcccaaatgaaccagagaggtagcagcgtattctgcaaggcctcactggaattacaagaagatgtgcaggagatgaacgctgtcagaaaggaagttgcagagactagcgcgggaccctctgtcgtgtccgtgaagactgatggtggcgacccctctggcctgttgaagaacttccaggacataatgcagaaacagcggccagagagggtgtctcatctactgcaggataacctccccaagtccgtatccacattccaatacgaccggttctttgaaaaaaagatcgacgagaagaaaaatgatcatacctacagggtgtttaagacggtgaatcggagagctcacatatttcccatggcagacgactactccgacagcctaattaccaagaagcaggttagtgtgtggtgctctaatgattacctcggcatgtctcgtcacccccgtgtttgcggggctgtcatggatacgctgaagcagcatggcgcaggggctggaggcacacgcaacatctccggaaccagcaagttccatgtggatctcgagagggagcttgctgacctacatgggaaggatgccgctcttctgttttcaagctgctttgtggccaacgactccactctattcacactagccaagatgatgccgggatgcgagatttatagcgactcaggaaaccatgcaagcatgatccagggcatcagaaatagcagggtgccgaaatacattttccgccacaatgatgtgtcccacctccgtgaactgttgcagcggtctgatccaagtgtacccaagattgttgcgtttgagaccgtccactcaatggacggagcagtttgcccactggaggagttatgcgatgtcgcccatgaattcggcgcaataactttcgtagatgaggtccacgcagtgggcctttacggagctcgaggcggtggcatcggcgaccgtgatggggtaatgcctaagatggatatcattagtggaacactggggaaggctttcggctgcgtggggggatatatcgcttcaacctcctccctgatcgacacagtacgcagctacgcggcaggcttcattttcactactagtctcccccctatgctccttgccggagcgctggaatccgttaggatcttgaagagcgccgagggacgcgtgctgcgcagacaacaccagagaaatgtaaaacttatgaggcagatgctgatggatgcaggactacccgttgtccactgtccctcccatataattcccgtgcgagtcgcagatgctgccaagaacactgaagtatgcgacgaactgatgagccgacataatatttacgtgcaagctatcaactacccaacagtgcctaggggtgaggagcttttgagaatagccccaacaccccaccataccccacagatgatgaactactttctggagaatctcctggttacatggaaacaggtaggtcttgagttgaaaccacactctagcgctgaatgtaatttctgtagacgacccctccatttcgaagtgatgagcgaaagagagaaaagctatttttctgggctgtcaaaactcgtgagtgctcaagcctag

SEQ ID NO: 214225 - DNA, 345 bp, synthetic construct
  misc_feature 1..345: note = Description of Artificial Sequence: Synthetic coding sequence
  source 1..345: mol_type = other DNA
atggagtccgttgttcggcgatgtcccttcctttcccgtgtacctcaagcctttctgcaaaaagcaggaaagagcctgctgttttacgcccagaactgcccgaagatgatggaggtgggggctaagcctgcacccagagcgctgtcgaccgccgctgttcactaccaacagataaaagagactccgcctgcaagcgaaaaggacaagacagcgaaggctaaagtgcagcaaacccctgatgggagccaacaaagtcctgacggaacgcagttcaggctcgataccccatgtttgcctcaagccagggcgctgcaagctaatgccctttcatggcagcaccggtag

SEQ ID NO: 214226 - DNA, 1923 bp, synthetic construct
  misc_feature 1..1923: note = Description of Artificial Sequence: Synthetic coding sequence
  source 1..1923: mol_type = other DNA
atggaatcagtcgttcgacgttgtccctttctcagccgggttccccaggctttcctccaaaaggctggtaaatcacttctgttctacgctcagaattgtcctaaaatgatggaggttggcgctaagccagctccaagggcgttatctaccgctgctgtccactaccagcaaataaaggagacacctcctgcatcggagaaagataagacggccaaagccaaggtgcagcagacacctgatggttcccagcaatcaccagacgggacccagctgccttctggacatcccctcccagccacgagccagggcaccgcaagtaaatgtccctttcttgctgcacaaatgaatcagcgaggaagttccgtcttctgtaaggccagcttggagctacaagaggacgtgcaagagatgaacgcagtgaggaaggaggttgctgaaacctcagcgggaccttctgttgtgtcagttaagaccgacggcggtgatcccagcggcctgttgaaaaattttcaggacatcatgcaaaagcaaagacccgaacgcgtatcacatctgctgcaagataatctgccaaaaagcgtttcgacatttcagtatgaccgtttctttgagaagaaaatcgacgagaagaagaacgaccacacgtaccgtgtcttcaagacagtgaatagaagagcacacatattccccatggcagacgactactctgactccctgatcactaagaagcaagtttcagtctggtgttctaacgactacctcggcatgtccaggcatcctagagtgtgtggcgcagttatggacactctaaagcaacacggggctggtgctggcggtaccagaaacattagtggtacgagtaagtttcacgtggacctggagagagaactggccgacctgcacggcaaggatgccgctctcctgttctccagctgttttgtggcgaatgattcaacactgttcactctggctaaaatgatgccagggtgcgagatctactccgacagtggcaaccatgcttcgatgatccagggcatcaggaactcgagggtaccaaaatacatctttcgacacaatgatgttagtcacctgcgggaacttcttcagcggagtgatccttctgtgccaaaaatagtggcattcgagaccgtgcactcaatggatggtgctgtctgcccactggaggagctttgtgacgtagctcatgaatttggagctattacttttgtcgatgaggttcatgctgtagggttgtacggggctcgcggtggaggaattggagaccgtgatggtgtcatgcctaaaatggatatcatcagcggcacattggggaaagcctttgggtgcgtaggtggttatattgcttctacctcttccttaatagacactgtgagaagctatgccgctggcttcatcttcactacgagcctgcccccaatgttgctcgccggtgcgctggagtcagtgcgtattctgaaaagcgcagagggcagggttctgcgaagacagcatcagcggaatgtgaagctgatgaggcagatgctgatggatgccggtctgcctgtagtccattgccctagccatatcattccagtgcgggttgccgacgcagcaaagaatacagaggtgtgcgacgaactgatgtcacgccacaacatatacgtgcaggccataaactacccaacagtgccacggggagaggaattgctaaggatcgctcccacccctcatcacaccccacaaatgatgaattatttcctggaaaatctccttgtgacctggaaacaagtagggctggagctcaagccacactccagcgctgagtgcaacttctgtaggagacccctacacttcgaggtgatgagtgaacgggagaaaagctatttcagtggactgtccaagctggttagtgcccaggcttag

SEQ ID NO: 214227 - DNA, 1923 bp, synthetic construct
  misc_feature 1..1923: note = Description of Artificial Sequence: Synthetic coding sequence
  source 1..1923: mol_type = other DNA
atggaatccgtggttcgtcgctgtccctttctgtctcgggttccacaagccttcctgcagaaagccggaaaatccctactgttctacgctcagaattgtccgaagatgatggaggtgggtgccaagccagctccaagggcgctgagcacagcggcagtccactatcaacagattaaagaaacccctcccgcatccgagaaggataagactgcaaaggcaaaggtccaacagacgcccgatggatcacaacaatctccggacggcacccagttgcctagtggccaccctctcccggctactagtcagggcactgccagtaaatgtcccttcctagctgctcagatgaatcagcgaggaagcagtgtgttttgcaaggcctccctggagttgcaagaggatgttcaggagatgaacgcagtgagaaaggaagtggctgaaacttctgcgggaccatctgtggtgtccgttaaaaccgacgggggtgacccgtcggggctcctgaaaaatttccaggatataatgcagaagcagcggcctgaaagggtgagccaccttttgcaggacaacctgccgaagtcggtcagtacttttcagtatgatagattttttgagaaaaaaattgatgagaaaaagaacgatcatacatacagagtatttaagactgtgaacagacgagctcacatttttcccatggcagatgactacagtgattctcttatcacaaagaagcaagtctcagtctggtgctctaatgattatctgggtatgtcaaggcaccctcgggtctgcggagcagtcatggacaccttgaaacaacacggcgcaggggctgggggtacgcgaaacatcagtgggacgtctaagttccacgtggatttggagcgcgaactcgctgacctccacggaaaagacgcggctctcctcttctccagttgctttgtcgccaacgatagcacactctttacacttgctaaaatgatgcccggatgtgaaatttatagtgatagcggaaaccatgcctcaatgattcaaggaatccggaactctcgggtccccaaatatattttccggcacaatgacgtgtcccaccttcgtgaacttcttcaaaggtccgacccctccgtgccaaagatagttgcgttcgaaaccgttcattcaatggatggggctgtgtgccccctggaagagttgtgcgatgtggcacatgaattcggcgctatcacattcgtcgacgaggtgcacgctgtgggcctgtatggggctcgtggaggcggaatcggcgaccgagatggcgtgatgcccaagatggatatcatctctgggactttgggtaaggcattcggctgcgtcggcggatacatagcgtcaacatcctcacttatcgacactgtgcgcagctatgccgctggctttatcttcacgacaagcctgccccctatgctcttggctggagccctggagagcgtccgcatcctgaaatctgctgaggggagggtcctgcgacgacagcaccagcgaaacgtgaaactaatgaggcaaatgctgatggacgccggactgcctgtggtgcattgtccgagccacatcatccccgtacgggttgcagacgccgctaagaacaccgaagtctgcgacgagctcatgagccgccataatatctatgttcaagctatcaattatcctacggttcctaggggagaggagcttctgaggatcgcacctacaccccaccacaccccccagatgatgaattacttcctggaaaatcttttagtgacatggaaacaggtcgggctggaactgaaacctcatagctcggctgagtgtaatttctgtcgccgacccctgcacttcgaagtgatgagcgagcgcgagaagtcatacttctccggactttctaagctagtctcagcgcaggcatag

SEQ ID NO: 214228 - DNA, 1764 bp, synthetic construct
  misc_feature 1..1764: note = Description of Artificial Sequence: Synthetic coding sequence
  source 1..1764: mol_type = other DNA
atggttactgccgctatgctgctgcagtgctgccccgtgctggcacggggtccaacaagtttactgggcaaggtggtgaaaacccaccagtttctttttgggatcggccgttgtcctattctcgctacccagggccctaactgctcccagatccaccttaaagccactaaagcagggggagactcacctagctgggccaagggccattgtccctttatgctgagtgagttgcaagacgggaaaagtaagatcgtccagaaggctgcaccggaggtgcaggaagatgtgaaagcctttaagactgacctgccttcatctttggtgtctgtctcattacggaaaccattttctggacctcaagagcaagaacagatttctggaaaggtcacacatcttattcagaataacatgccagggaattatgtgttctcttacgaccagttttttagagataagattatggagaaaaaacaagatcacacttatcgagtttttaaaaccgtaaataggtgggcagatgcctaccccttcgcccagcatttttccgaggcctccgtggcgtccaaagacgtgagcgtatggtgtagcaatgattacctcggaatgtctcgacaccctcaggtgctgcaagctacacaagaaacgctgcaacggcacggcgctggtgctggcggaacccgcaacatctccggcaccagtaagttccatgtagagctggagcaggagctggctgagctgcaccagaaggattcggctctgctctttagttcatgcttcgtggctaatgattctacgcttttcacactcgctaagatcttgcctggctgcgagatctacagcgatgcagggaaccatgcctccatgatccagggcatccgaaacagcggagcggcaaaattcgtttttaggcacaacgaccctgatcatttgaaaaagttgcttgaaaagtctaaccctaaaatcccgaaaatcgtagcattcgaaaccgtgcacagcatggatggcgctatttgccctctcgaggaactatgtgacgtttcgcaccagtatggagcccttacattcgttgacgaggtccacgccgtcgggctgtacggatcacgcggagccggaataggggagagggatgggatcatgcacaagatcgatatcattagcggcacgctgggcaaagccttcggttgtgtaggcggttacattgcgtctacgagggatctcgtggacatggtccgtagttatgctgcaggctttatctttaccactagtctacctcccatggtgctgagcggggcactggagtcggtgcggttgcttaaaggagaggaaggccaagcgctcaggagagcccaccaacgtaatgtcaaacacatgagacagctgttgatggatcgagggctgcccgttattccatgtcctagccatatcatacctattcgcgtgggtaacgctgctcttaactccaagctgtgcgatcttcttctgtccaagcatggtatctacgttcaggccataaactaccctacagtcccacgtggggaagagttgcttcggctggccccaagcccccatcactctcctcaaatgatggaagactttgtggaaaaactacttctcgcttggaccgcggtcggactccccttgcaggacgtgtcagtggccgcatgtaatttctgccggagacctgttcattttgagctgatgtcagagtgggagcgatcctactttggcaacatggggccacaatacgtgacgacctatgcttag

SEQ ID NO: 214229 - DNA, 1653 bp, synthetic construct
  misc_feature 1..1653: note = Description of Artificial Sequence: Synthetic coding sequence
  source 1..1653: mol_type = other DNA
atggtgacagctgctatgctgttgcagtgttgtcctgtactggccaggggacctacctcattgctaggaaaagttgttaaaacgcaccagttcttgttcggaatcggcagatgtccaatcttggccacgcaagggccaaattgttcgcaaatccatctgaaggcaacgaaggcgggaggcgattctccaagttgggcaaagggacactgccctttcatgcttagtgaactgcaggacggtaaaagcaagatcgtccagaaagctgccccagaggtgcaggaggatgtcaaagcttttaagactggcaactacgtgtttagctatgaccagtttttccgagacaaaattatggaaaagaaacaggaccatacgtacagggtattcaaaaccgtgaacaggtgggctgatgcgtacccattcgcccagcacttcagcgaggcttctgtggcttccaaggacgtctccgtgtggtgcagtaatgattaccttggtatgtcacggcatccacaggttctacaggcaactcaggaaactcttcagagacacggcgcaggggcaggaggcactagaaatatttctggcaccagtaagtttcatgttgagttggaacaggagcttgcagagctccaccagaaggattcagccttactgttttcaagctgtttcgtggcaaacgattccacactctttacactcgccaaaattctcccgggttgtgagatttactctgacgccggaaatcatgcatccatgatccaaggtatcagaaactcaggggcagcaaagtttgtgttccggcacaacgacccggaccaccttaagaagctcctggaaaagagcaatccaaagatccctaaaattgtggcctttgaaaccgtgcacagtatggatggcgcaatctgccccttggaagagctctgcgatgtgagccaccagtatggtgccttaacattcgtagacgaagtgcacgccgtgggcttgtacggcagcagaggcgcaggaatcggcgagcgagatggaatcatgcacaaaatcgacataatttcgggcactttggggaaggcttttggctgcgtgggtgggtatattgcttccacgcgggatctggtcgacatggtcaggtcttatgctgcaggcttcatatttacaaccagtttgcctcccatggtcctatctggggctctggagtcagttagactgctgaagggcgaagagggccaggccctccgaagagcccatcaaagaaacgttaagcatatgaggcagcttctcatggacaggggcttacctgtgatcccttgcccatcccacatcattcctatccgcgtgggcaatgccgctctgaatagtaagctttgtgatctgttactgagcaaacacggcatctatgtccaagctattaattaccccaccgttcctcggggagaggaactcctaaggctggctcctagcccccaccacagccctcagatgatggaagactttgtcgaaaaattgcttctggcctggacagccgtcggccttcctctccaggacgtttctgtggcagcttgcaacttctgtcgtaggcctgttcactttgagctgatgagcgaatgggaacggtcctatttcggcaatatggggcctcagtacgtaaccacctatgcctag

SEQ ID NO: 214230 - DNA, 1725 bp, synthetic construct
  misc_feature 1..1725: note = Description of Artificial Sequence: Synthetic coding sequence
  source 1..1725: mol_type = other DNA
atgcgcggaggcgaggtagccctgggttggaataagaaaaagcgcttattttgtgaggatttccgctttaagatggttacggcggctatgcttttacaatgctgccccgtgcttgctaggggccctacttcactcctagggaaagtggttaaaacgcaccagtttctctttggaatcggacggtgccctatactggctactcaggggccaaactgtagccagattcatcttaaggctacgaaagcaggcggagactcaccctcatgggcgaagggccactgtccctttatgctgtctgaactacaggacggcaagtcgaagattgtgcagaaggccgcacctgaagtgcaggaggatgtgaaagccttcaagactgggaactatgtcttctcttatgatcagttttttcgagataaaataatggagaaaaagcaagatcacacctatcgcgtgttcaagaccgtcaacaggtgggctgacgcctatcccttcgcacagcactttagtgaagcttcagtggcctcaaaggatgtctccgtctggtgtagcaacgactacctaggtatgagcagacacccccaggtactgcaggcaacacaggagactcttcaacgacacggtgccggagccggaggaaccaggaacatttccggaacctccaagttccatgtggaattagagcaagaactggctgaactgcaccagaaagactctgctctgctgttttcatcttgttttgtcgccaacgacagcacgctcttcactctcgccaagatccttcctggatgcgagatatatagcgatgcgggtaaccacgctagcatgatccaaggaattcgaaacagcggcgctgccaagttcgtattccgccacaacgacccggatcacctcaagaagctcctcgagaagagtaatcccaaaattccgaaaatcgtcgctttcgaaacagtgcattctatggatggagccatttgtccactggaagaactttgcgacgtgagccatcagtatggcgcacttaccttcgtcgacgaggtgcacgccgtggggctatacggctctagaggcgcaggaattggtgaacgcgatggaatcatgcataaaattgacatcatctcaggcaccctgggaaaggcctttgggtgcgtcggcggatatatcgcgtctacccgggacttggtagatatggtgcgctcctacgctgcaggcttcatcttcactacttctttgcctcctatggtattgtctggagctttggagtccgtgcgactgctgaagggggaggagggtcaagcccttcggagggcgcatcagagaaacgtgaaacacatgagacagcttctcatggaccggggactaccagttattccatgtcctagtcacatcatacccattagggtgggaaacgcagcgctcaacagtaagctgtgcgacctgctgctttctaaacatggcatctatgtccaagcaatcaactaccccacagttcccagaggggaggagctgctgcgtttggctccaagccctcaccatagtccacaaatgatggaagattttgtagagaaattgctgctcgcttggaccgcagttggtctaccactgcaggacgtatcagttgccgcatgcaatttttgtcgccgacctgtgcactttgagctaatgtctgaatgggagcgcagttattttgggaatatgggtcctcagtacgttactacatacgcctag

SEQ ID NO: 214231 - DNA, 669 bp, synthetic construct
  misc_feature 1..669: note = Description of Artificial Sequence: Synthetic coding sequence
  source 1..669: mol_type = other DNA
tgactgtcctttgtccgtccacagtgcagggccactgatagcccgtcctgggccaagggtcactgccccttcatgctgagcgagttgcaggacggtaagtcaaaaatcgtgcaaaaggccgctcctgaagttcaggaagatgtgaaggccttcaagaccgacttgccttcgtctcttgtaagtgtgagcctgagaaaacctttttcaggaccccaggagcaggaacagatctccggtaaggtgacacaccttatacagaataacatgcccggtaattacgtgttcagttacgatcaatttttccgagacaagataatggaaaaaaaacaagatcatacctatcgagtgttcaaaacagtgaacaggtgggccgatgcttatcccttcgcccagcattttagtgaggctagtgtagcaagtaaagacgtcagcgtgtggtgctccaatgactatcttggaatgagccggcaccctcaggtgctgcaagctacccaagaaactctgcagcgccacggtgcgggagcaggcggaactaggaacatcagtggaacctcgaaattccacgtcgaattagaacaagaattggccgaactccatcaaaaggactctgcacttctcttctcctcctgcttcgtagccaacgactcaacgctatttactcttgcctag

SEQ ID NO: 214232 - DNA, 1212 bp, synthetic construct
  misc_feature 1..1212: note = Description of Artificial Sequence: Synthetic coding sequence
  source 1..1212: mol_type = other DNA
atgcagcgggcagtgtctgtggtggctcgcctggggttccggctgcaggccttcccccctgcgctttgcagaccactatcgtgtgcccaagaagttcttagaaggacacccctatatgacttccatctggcccacggcggaaagatggtggcatttgcaggatggagcctccccgtgcagtatcgggactcacacactgactcccacctccacactcgccagcattgctctttattcgatgtgagccacatgctccagaccaagatacttggtagtgacagggtgaagcttatggagtcccttgtagtgggagatattgcagagctgcggccaaatcaggggacgctctctttattcactaacgaagccggagggatcctggatgatctcattgtgacaaacacatctgagggtcatttatacgttgtttcgaacgctgggtgttgggagaaagacctagcgcttatgcaggacaaggttcgggaacttcagaaccaggggagggacgtaggcctggaggtgttggataacgctttgcttgccttgcaggggcctacggctgctcaagtactacaggcgggtgtggccgatgatctccgtaaacttcccttcatgaccagcgcagttatggaagtgtttggcgtctctggatgccgggttacccgctgcggctatactggtgaggacggcgtggaaatctcagttcccgtagctggggcagtgcacctggctaccgcaattctaaagaatcctgaagtcaaactggctggattggccgcacgggattccttacgattggaggcgggtttgtgtttatatggaaacgacatcgatgagcataccacccccgtggaagggtccttgtcatggaccttggggaaaaggaggagagccgctatggattttccaggggctaaggttattgttccacagctgaagggacgggttcaacgtaggcgggtgggccttatgtgtgagggtgcgccaatgagggcgcatagccccatcctcaatatggaagggaccaagatcgggaccgtcacgagcggctgcccctcccccagccttaagaagaacgttgccatggggtacgttccttgcgagtactcccgtcctggaactatgcttctggtcgaggtcagacgtaagcagcagatggccgttgtgtcaaagatgcccttcgttcctactaattactacactcttaagtag

SEQ ID NO: 214233 - DNA, 1161 bp, synthetic construct
  misc_feature 1..1161: note = Description of Artificial Sequence: Synthetic coding sequence
  source 1..1161: mol_type = other DNA
atgcagagggccgtttcagtggtggcccgactcggctttagactgcaagctttcccacccgctctgtgccgccctctgtcgtgcgctcaggaggtgctgcgacgcacacccctctacgacttccacttggctcatgggggaaagatggtggcctttgccggatggtccttgcctgtgcagtatagggattcccacactgactcccaccttcacacccgccaacactgctctttattcgatgttagccacatgctgcagaccaagattcttgggtcagatagggtgaaactgatggagtcactggtggtcggcgatattgccgaattacggcctaatcaggggaccctctcactcttcacaaatgaagcaggaggcattctggacgatcttatcgtgaccaataccagcgaaggccatctttatgttgtcagcaacgccggttgctgggaaaaggacttggcacttatgcaagacaaagtaagagaactgcagaatcaaggtcgggacgtggggcttgaagtgttggacaacgccttgctggccctccaaggacctactgccgcacaggtgttacaggctggcgttgctgacgaccttaggaagctgcctttcatgactagcgccgtgatggaagttttcggagtgtcaggatgcagagtcacgcggtgcggttacaccggcgaggacggagtcgagatcagtgtgcctgtggctggcgcagtgcacttagccacggccatccttaagaatccggaagttaagctagcgggtctcgcggcaagggacagtttgcgactcgaagctggtctgtgcttgtatggaaatgatattgacgagcacaccacgccggtggagggatcgctgtcctggactctgggtaagagacgtcgagctgccatggatttccctggagccaaggtgattgtgccccagcttaaggggagggtgcaaagaaggagggttggcttgatgtgtgaaggagcaccaatgagagctcattcgcctatcctcaatatggaaggtaccaagattggaactgtcaccagcgggtgcccttcgccttctttgaaaaagaatgtggctatgggatatgtcccctgtgaatactcaagacctggcactatgctgctggttgagttgccaagtggtccctgtttctag

SEQ ID NO: 214234 - DNA, 1155 bp, synthetic construct
  misc_feature 1..1155: note = Description of Artificial Sequence: Synthetic coding sequence
  source 1..1155: mol_type = other DNA
taggccgtgtctgtagtggccagactgggcttccgtctccaggccttccctcccgctctttgtaggcctctgagttgcgcccaggaggttctccggaggactcctttatacgactttcatttggcccacggtggtaagatggtggcctttgctggctggtctctccctgtgcagtacagggattctcatacagacagtcacctacacacacgtcaacactgctccctttttgatgtttctcatatgttgcagaccaagatattgggttccgaccgtgttaagctaatggagtccctcgtggtgggggacatcgccgaactacgcccaaaccaggggacccttagcttgttcacaaacgaagccggaggtattctagacgatctcatcgtgacaaatacttctgagggccatctatacgttgtgtctaacgcgggttgctgggagaaagaccttgccctaatgcaggacaaagtcagggagttgcaaaatcaggggagagatgtgggcctggaggtgctggataacgctctcctggctcttcaaggccctacagctgctcaggtgctgcaggccggagtggcagacgacctgagaaaactgcctttcatgacatcagctgtgatggaagtgttcggtgtgagcgggtgccgggttactaggtgcggctatacaggtgaggacggagtggagatttccgtgcctgtggccggtgccgtgcacctcgcaacagccatcttgaagaatccagaagtaaagctggctgggcttgccgctcgcgacagcttgcggcttgaagctggactgtgtctgtacggaaatgatatcgatgagcatactaccccagtggaaggaagtctttcctggaccttgggcaagcggagacgcgcagccatggacttccctggcgcaaaagtgatagtcccacagctcaagggcagagtacagaggaggagggtgggtctgatgtgcgagggagccccaatgcgagcccactcccctattctgaacatggaaggcaccaagattggcaccgttacgtccggatgccctagcccctcattaaagaagaacgtagccatggggtacgtgccctgcgagtatagtcggccaggcacgatgctccttgtcgagttgccgagtggaccatgtttctag

SEQ ID NO: 214235 - DNA, 1080 bp, synthetic construct
  misc_feature 1..1080: note = Description of Artificial Sequence: Synthetic coding sequence
  source 1..1080: mol_type = other DNA
atgcagagagctgtgtcagtagtcgcccgtctgggctttagattgcaggctttccccccagccctgtgccgaccactgagttgtgctcaggaggtgttgagaaggactcccctctacgatttccaccttgctcacgggggaaagatggtagccttcgctggttggtcgctgcctgtgcaatacagggattcacataccgattctcaccttcatacacggcaacattgtagcctctttgacgtttcccacatgctccaaaccaaaattcttggctccgatcgcgtgaaactgatggaaagcttagtggtgggtgatattgccgagctcaggccaaaccaggataaggtcagggaactgcagaaccagggcagagacgtcggtctagaagttctggacaatgctttgctcgcgctgcaaggccctactgccgcacaggtgttgcaggcgggagtcgccgatgatctacgcaagcttccctttatgacctcagctgtgatggaagtctttggcgtcagcggctgtagggttacaagatgcgggtacacaggagaggacggcgtggagatttccgtccctgttgcaggcgcagtacacctcgccacggccattctgaaaaacccagaggtcaaactggcaggtctggcagcgagggacagcctgcgcttggaagctggactctgcctctacggcaacgatattgatgagcatacaactccggtggaggggtcactctcctggacactcggaaagagacgccgtgctgcgatggacttccccggagccaaagtcattgtgcctcaactcaaaggcagggtgcagcgcaggcgtgtgggcctgatgtgcgagggagccccaatgcgcgctcattcccctattctgaatatggagggaactaagataggcaccgtgacatcagggtgtccatcccctagcttaaagaagaacgttgccatggggtatgtgccctgcgaatatagcagacctgggaccatgttactggtcgaggtgcgcagaaaacagcaaatggcggtggttagcaagatgccctttgttcccaccaattactacactttgaaatag

SEQ ID NO: 214236 - DNA, 1044 bp, synthetic construct
  misc_feature 1..1044: note = Description of Artificial Sequence: Synthetic coding sequence
  source 1..1044: mol_type = other DNA
atgcagcgagcagtttcagtcgttgccagattgggattcagactgcaggccttcccgccagctctatgcagaccactctcttgcgcccaaacaaagatactaggctctgacagggtaaaacttatggaatcgttagtggtgggcgacatcgccgagctgcggcctaaccagggcacattgtcgttatttaccaatgaagcaggaggcatcctcgacgatctgatcgttaccaatacaagtgagggtcacctgtacgtcgtgtcgaacgccggatgttgggagaaagatcttgccctgatgcaagataaggtgagggagctccagaatcaaggtcgagacgtgggccttgaagtgcttgataatgctttgctggcccttcaggggcctactgccgctcaggtgctgcaggccggagtggccgacgatctgcgcaaactcccctttatgactagcgcagtgatggaggtgttcggcgtgtctgggtgcagagtgactagatgcggatacactggggaagatggagtggaaatatccgttcccgtagccggtgcagtgcatctggccacggctatcctgaagaaccccgaagtgaagctggccggattggccgcaagagactccctccgcctcgaagctggcctgtgtctttacggcaatgatatcgacgagcacactactcctgtggagggatcgctgagctggaccctcggaaagcgcaggcgagccgctatggactttccaggcgctaaggttatagtacctcaactgaagggccgagtccagcggaggagggttggcctaatgtgcgaaggcgctccgatgagagcccacagcccaatcctgaacatggagggtactaagataggcactgttaccagcggctgtccctcaccctccctcaaaaagaacgtcgcaatggggtatgttccctgcgaatattccagaccagggaccatgcttttagtggaggtaaggcggaaacagcaaatggcggtcgttagtaagatgcccttcgttccaacaaactattataccctgaaatag

SEQ ID NO: 214237 - DNA, 921 bp, synthetic construct
  misc_feature 1..921: note = Description of Artificial Sequence: Synthetic coding sequence
  source 1..921: mol_type = other DNA
atggaaagcctagtggtcggcgatatcgccgagctgagacccaaccagggaactctgtcattgttcactaatgaggctggaggaatcctcgacgatttgatcgtgacaaatacgtccgaggggcatctgtacgttgtcagcaatgctgggtgctgggaaaaggatctggctctcatgcaagacaaagtgcgggaacttcagaaccaggggagagacgtgggattggaagtgctggataacgctctcctagcattgcaggggcctaccgctgcccaagtccttcaggccggagtagctgacgatttgcggaagctccccttcatgacaagcgccgtcatggaggtgttcggtgtgagcggctgcagagtcacgaggtgcggttatacgggcgaagacggagtggagatctccgtgccagtggcgggagcagtccacctggctaccgcaatactgaaaaatcccgaagtcaagctcgcgggtctcgccgctagggactccttgcgcctggaggcaggactgtgtttgtacggtaatgatattgacgaacatactacccccgtagagggcagtttgtcctggactctgggaaagcggaggagggccgctatggactttccgggagccaaggtgatagtccctcagttgaagggccgagttcagagacgccgagttggactcatgtgtgagggcgctcctatgagggcccacagtccaattctaaatatggagggaacaaagatcgggactgtgaccagcggctgtcctagtccttcgctcaaaaaaaatgttgctatggggtacgtaccatgtgagtactccaggcccggaacaatgttgctggttgaggtgcgaagaaaacagcagatggccgttgtcagtaagatgccctttgtcccaaccaattattatacgttaaagtag

SEQ ID NO: 214238 - DNA, 2760 bp, synthetic construct
  misc_feature 1..2760: note = Description of Artificial Sequence: Synthetic coding sequence
  source 1..2760: mol_type = other DNA
atgtggttagcagctgccgcacccagcttggccaggcgcctcctgttcttaggaccaccacccccacccctcctgctcctcgtattttccagatctagtcgcaggagactgcactctttggggttggctgccatgcccgaaaaacgcccatttgagcgtcttcccgcagatgtatctcccatcaattactccttgtgcttaaagcccgaccttctggatttcacatttgaaggaaagctggaggccgctgcccaagtgagacaagccactaaccagatcgtgatgaactgtgcagatattgatattattaccgccagctacgccccagagggagatgaagaaattcatgctactggtttcaattaccagaacgaggatgagaaggttactttaagctttccttctacactacagaccgggactggaaccctgaaaatcgactttgttggtgagctcaacgacaagatgaaggggttttacagaagtaaatacaccactccatcaggagaagtgcgatacgctgccgttacccagttcgaagctaccgatgcgagacgagctttcccctgttgggatgagccagcaattaaagcaactttcgacatctcattagtggtccctaaagatcgcgtggcactcagcaacatgaatgttattgaccggaagccatacccagatgacgagaacctcgttgaggtcaaatttgctaggaccccagttatgtccacctacttagtagcgttcgtagtcggtgagtatgatttcgtggagacccggagcaaagacggcgtctgtgttagagtgtataccccagtgggtaaagccgaacagggcaagttcgcgctggaggtagccgctaaaaccctcccattttacaaagattatttcaacgtgccctaccccctgcctaagatcgacctgatcgctatcgccgatttcgccgcaggagccatggaaaactggggtctggtcacctaccgggagactgccctgctgattgatcccaaaaacagttgcagtagttctcggcaatgggtagcactcgtggtgggtcacgagctagcccaccagtggtttggaaaccttgtaacgatggagtggtggacccacctgtggctgaacgagggatttgcaagctggatagaatatctgtgtgtggatcactgcttccccgaatacgatatctggacacagttcgtgtccgccgattataccagggctcaagagctggacgcacttgacaacagtcatccaatcgaggtatctgtgggtcacccaagcgaggttgatgaaatcttcgatgccatttcctactctaagggcgcttcagtcatacggatgctacatgattacatcggggacaaagattttaaaaaaggcatgaacatgtacctcacgaaattccagcagaaaaatgcagctactgaagacctttgggagagcctggaaaatgcaagcggcaagcccatcgctgccgtcatgaatacatggacgaagcagatggggttccctcttatttatgtggaggctgagcaagttgaggatgatagattgctaagactgtctcagaagaagttttgcgctggcggatcttacgttggggaagactgcccccagtggatggtccccattacaatcagcacatcagaggaccccaatcaagcaaagctgaagattctgatggacaagcccgaaatgaatgtcgtactcaagaatgtgaagcctgaccagtgggtaaagctcaatctcggcaccgttggattttacaggacacaatattctagcgccatgctggaaagtcttctgcctgggattcgggacctttccctcccacccgttgaccggttaggattacagaatgacctcttcagcctggcccgagctgggatcattagcaccgtcgaagttcttaaagtgatggaggccttcgtgaatgaacccaattacacagtctggagcgatctctcttgcaatctcggcatactgagcaccttgctgtcacacactgacttctatgaggaaatccaggagtttgtgaaagacgtgtttagccctataggtgagcgcctcggatgggatcccaaacctggcgaggggcatctggatgcactgctgcgcggacttgtgctcgggaagctagggaaagccggacataaggctacactcgaagaggcgcgtaggcgcttcaaagatcatgtggaaggaaaacaaatactgtcagccgatttaagaagtccggtgtatctcacagtcctgaagcatggggacggcacgacactggatattatgctgaaattgcacaagcaggctgatatgcaggaggagaagaacagaattgaacgtgtcctaggcgcaacgctgctccccgatttgatccagaaggtgctgacatttgccctgagcgaggaagtgagacctcaagacaccgtctccgtcatcggcggagtcgcaggtgggtccaaacacggccgaaaagctgcatggaaatttatcaaggacaactgggaagagctctacaatcggtatcagggaggatttctcatttcccgtttaattaagctttccgtggagggctttgccgttgataaaatggccggtgaggtaaaggcgttcttcgagtcacaccccgcacctagtgcagagaggacaattcagcaatgttgtgaaaacatcctgctgaacgccgcttggctgaagagggatgcagagtccattcatcagtatctactccaaaggaaagctagcccgcctacagtgtag

SEQ ID NO: 214239 - DNA, 1884 bp, synthetic construct
  misc_feature 1..1884: note = Description of Artificial Sequence: Synthetic coding sequence
  source 1..1884: mol_type = other DNA
atgtggctggccgctgccgctcctagccttgctcgtcgactactgttcctggggcctcctcctcccccactgctccttttggtgttctccaggtcatcaaggagaagactgcactccctgggtctcgccgatgtgagcccaatcaattatagtctatgtttgaaacctgacttgctggacttcaccttcgagggcaaactggaggctgccgcacaagttcggcaggccacaaatcagattgtcatgaactgcgcggatatcgacattatcacggcttcatacgcccctgagggcgatgaggaaattcacgctaccggcttcaattaccagaatgaagatgagaaagtgactttgtcctttcctagcacactccagacaggcactggcactcttaaaatagatttcgtaggggagctcaatgataaaatgaagggattttacaggagcaaatataccactccgagtggcgaggtcagatacgccgctgtgacacagttcgaggcaaccgatgcaagaagggcatttccctgttgggatgagccagccataaaggccacgttcgacattagtttggttgtgcccaaagacagagtggcactcagtaatatgaacgtgatagaccgtaagccctaccctgatgacgagaatctggttgaggttaagtttgccaggacccccgtgatgagtacttatctggtggcctttgtggtcggtgaatacgatttcgtcgagacccggagcaaagacggggtgtgcgtcagggtttatacaccagtcggaaaggcggaacagggaaaatttgcgctggaggtggccgcaaagactctgccattctacaaggattactttaatgtgccctacccactgccgaagatcgaccttatcgctatcgccgactttgcggctggggcaatggaaaattggggactggttacctatcgagagaccgccctgttaatagatccaaaaaactcctgcagttcgtcaaggcagtgggtcgcattggtcgtcgggcacgagctggcgcaccagtggtttggcaaccttgtcacaatggagtggtggacacatctgtggctcaatgaaggattcgcctcatggatagagtatttgtgcgtcgatcactgtttcccggaatacgatatttggacacaatttgttagtgctgattatactagggcacaggaacttgacgctttagacaacagccacccgattgaagtgagcgtcggccacccctctgaagtagacgagatcttcgacgcaatctcatactcaaaaggtgccagcgttattcgcatgctgcacgactacatcggagataaggacttcaagaaggggatgaatatgtacttaaccaagttccagcaaaaaaacgccgcaacagaggacctctgggagagcctagaaaacgcctcaggaaagcccatcgctgctgtgatgaatacgtggaccaagcagatgggatttcccctgatttacgtggaagccgagcaggtcgaggatgacaggttacttaggcttagccaaaaaaagttttgcgcaggaggtagctatgtgggcgaagattgtccacagtggatggttccaatcactatttcgacctccgaggaccctaaccaggcaaagttaaaaattctaatggacaaaccagagatgaatgtcgtgttgaaaaatgttaaaccagatcaatgggtgaaactaaatctgggcactgtggggttttatcgcacacagtattcttctgctatgttagagtccttactgccagggatcagggacctgtccttgcccccagtagatcggctcggtctccagaatgacctgttttccctgttcatcctgtgcgttcgcgaggtgtccggaaattgctgtagagcctag

SEQ ID NO: 214240 - DNA, 2520 bp, synthetic construct
  misc_feature 1..2520: note = Description of Artificial Sequence: Synthetic coding sequence
  source 1..2520: mol_type = other DNA
atgcccgagaaacgcccattcgagcgactccctgccgatgtaagccctattaactattccctttgcttaaagccagatctgctggatttcaccttcgagggcaaattagaggctgcggcacaagtgcgacaagccacgaatcagatcgtgatgaattgtgcagatattgatatcattacggccagttacgcccctgagggggacgaggaaatccatgcgacgggtttcaattaccagaatgaagacgagaaagtcaccctgagctttccatcaacccttcagacgggaaccgggacacttaagattgattttgtgggcgagctcaatgataaaatgaagggattctaccggagtaagtataccactccatccggtgaggtccggtacgccgcagtgacacaatttgagaacgtgatcgatagaaaaccctacccagatgacgaaaacctggtagaagtgaaattcgccagaacaccagtgatgagcacgtacctcgtggcttttgttgtgggagagtacgactttgtggagactcgttccaaggatggcgtatgtgtccgcgtctacaccccggtggggaaggccgaacagggcaaatttgccctagaggtggccgctaaaactcttcccttctacaaggattactttaacgttccttacccgttgcctaaaattgaccttattgccatagctgacttcgccgctggggcaatggaaaattggggcctcgtgacatacagagagacagcactgcttattgatcctaaaaactcatgctcctcatcccgccagtgggtagcactggtggttggccatgagttggctcatcagtggtttggaaatctggtaacgatggagtggtggactcacttgtggctgaacgaaggcttcgcatcctggatcgagtacctgtgtgtggaccattgtttcccagagtacgatatctggacacagttcgtaagcgctgactacacccgggcacaggagctagatgccctcgataactcacaccctatcgaggtgtctgtgggtcacccttctgaggtggatgagatcttcgatgcaatatcatatagtaagggcgcatccgtcataagaatgcttcacgactatatcggcgataaagattttaaaaagggaatgaatatgtacctgaccaagttccagcaaaaaaacgctgctaccgaggatctttgggaaagtctggagaatgccagcggcaagccgatcgctgctgtcatgaatacttggactaaacaaatgggattccccctcatttatgttgaggccgaacaagtggaggatgacagactgttgagactgagccaaaaaaaattttgcgccggagggtcctatgtcggcgaagattgcccccagtggatggtacccattactatcagcacaagcgaggatcccaatcaagcaaaactcaagatactgatggacaagcctgaaatgaatgtggtgctgaaaaatgtgaaacctgatcaatgggtgaagttaaacttaggaaccgtggggttttataggacacagtatagttcagctatgctagagagcctgctgcctggtattagagatttgagcctgccccctgtggacaggctggggttgcaaaatgatctctttagtctggctagggccggtattatctctaccgttgaagtgctcaaggtaatggaggccttcgttaatgagccgaattatacagtgtggagcgacttgtcctgcaacctggggatcttgtctacgttgctgagtcacacggatttttacgaggagatccaagagttcgtaaaggacgtgttttcacctataggcgagaggctaggatgggatccgaagcctggagaggggcacttagatgcattgttgcgcggactcgtgcttgggaaactgggtaaggccggacacaaagctaccttggaagaggctcgcagaaggttcaaggatcatgtcgaaggaaaacagattctgagcgctgatttgcgctctccagtctatctaacagtgctgaagcacggagatgggacgaccttggatatcatgctgaaacttcataagcaggctgatatgcaggaagaaaaaaacagaattgagcgagttctgggcgctactctcttgcctgacctaatccagaaggtgctgacattcgcactttcggaagaggttagacctcaggatactgtgtccgtgattgggggagtggccggaggcagcaaacatggccgaaaggcggcttggaaatttattaaggacaactgggaggagctgtacaaccgataccaggggggtttccttatatctcgccttatcaagcttagtgtggagggcttcgccgttgacaagatggcgggagaagtgaaggcttttttcgagagccatccagcaccttcggcggagaggaccatacaacagtgttgcgagaatattctgttgaacgcggcttggctcaaacgggatgccgaaagtatacatcagtatctcctgcagcgcaaagcgagcccacccacagtgtag

SEQ ID NO: 214241 - DNA, 1125 bp, synthetic construct
  misc_feature 1..1125: note = Description of Artificial Sequence: Synthetic coding sequence
  source 1..1125: mol_type = other DNA
atgcgatccccggcagtgcctaccccggcacgtggacaactgggtgtcgcatttgtgctgttgcctccccattcagaaggggcacgggtattcggggctttaggacccatcggcccttcaagcccaggcttgacactaggcggactcgcagtttccgagcatagattatccaacaaattgctggcctggtcaggtgtgcttgagtggcaggagaaaagacggccatactctgacagcaccgccaaattgaaacgaacacttccatgtcaggcctatgtgaaccagggcgagaacctggagactgaccaatggcctcagaagctgattatgcagttaatcccgcaacagttactcacaacgctgggtcccctctttaggaatagccagctcgctcagttccacttcaccaacagggactgcgacagtttgaaagggctgtgcaggataatggggaatggcttcgcgggatgtatgcttttcccccacatctctccttgtgaggttcgcgtgctcatgttactttactcttctaaaaaaaagatctttatggggctcatcccctatgatcagtccggtttcgtctccgccattaggcaggtcattacgaccaggaagcaggccgtagggccaggtggcgtgaattctggaccggtccaaatcgtcaacaacaaatttctcgcctggtcaggtgtgatggagtggcaggaacctaggcccgaacccaattcccgatctaagcgctggctaccttcccatgtttacgtcaaccagggcgaaattcttaggactgagcaatggcccagaaagctgtacatgcagctaattccccagcagctgctcacgacactggtaccccttttccgcaactcacgactggtccaattccactttactaaggatctcgagaccttaaaaagtctgtgccggattatggacaatggattcagaaggaaatcctcgcttgcctcatcacccatgaccagagccacactaagtactgcctccggcgtcagcctccccacttcttcgagatcatgcagcggtacgtggagccgctctaactctaatgagggctggggagggagcggctatcccggactggggccatcccgttcccacagatag

SEQ ID NO: 214242 - DNA, 594 bp, synthetic construct
  misc_feature 1..594: note = Description of Artificial Sequence: Synthetic coding sequence
  source 1..594: mol_type = other DNA
atgatgttccctcagagcagacactcagggagctcccatctgccacagcaactgaaattcacaacatccgactcctgcgatcgcattaaggacgagttccagttgctgcaagcccagtaccatagtttgaaattagaatgtgacaaactggcctctgaaaagagcgaaatgcaacgacattacgtcatgtactacgaaatgagttatgggttgaatattgagatgcacaagcaggcagagatcgtcaaaagactaaatggaatctgcgcgcaggtgctgccatatctgagccaagagcaccagcagcaggttcttggggcaatcgagcgcgctaagcaagtgactgcgcctgaactcaactctataatcagacagcagctgcaggcacatcagctgagtcagctacaggctctggcgcttcctctcacaccactccccgtgggtctgcagcccccttctttgccagcggtgtccgccggtaccggcctgttgtccctgtctgctctgggctcccaggcgcaccttagcaaggaggacaaaaacgggcatgacggcgacacccatcaagaagacgacggagagaaaagcgactag

SEQ ID NO: 214243 - DNA, 1362 bp, synthetic construct
  misc_feature 1..1362: note = Description of Artificial Sequence: Synthetic coding sequence
  source 1..1362: mol_type = other DNA
atgggggtcctgggcagggtgcttctgtggttgcaactgtgcgcactgacacaggctgtttcaaaactgtgggtgccaaacacagattttgatgtggctgcgaattggagccagaataggacaccttgtgccggaggcgcagtggaatttccagcagacaagatggtgagcgtgctcgttcaggaggggcatgccgtcagcgatatgcttttaccgcttgacggcgaattggttctagcatccggcgctggttttggggtgagcgatgttggctcacacctcgattgtggagcgggagaacccgcagtgttcagggactcagaccgtttttcttggcatgatccacacctgtggagaagcggcgacgaggccccagggctttttttcgtggacgctgaacgggttccgtgcaggcacgacgacgtgttcttccctccttctgcttcatttcgcgtagggctgggacctggcgcatcgcctgtgcgagtgagatctatttccgccctcggcaggacttttactcgggatgaggatctggccgtttttctggcctccagagccggaagactcagatttcatggcccaggcgctctatctgtggggccagaggactgtgctgatccatccgggtgtgtctgcggaaatgctgaagctcaaccatggatctgcgcagccctcctccaacctctgggagggaggtgtcctcaggcggcatgtcatagcgccctcaggcctcagggccaatgctgtgacctgtgtggggcagtagtgttactgacgcacggcccagcattcgaccttgagagataccgtgccaggatcctcgataccttcctggggctgcctcagtaccatggcctgcaagtcgcagtgtccaaagttccacgatccagcaggctcagggaggccgatacagagattcaggtcgtgcttgtagagaatggtcccgagaccggcggtgctggacgcctcgccagggctcttcttgcggatgtggctgaaaacggggaggccttgggtgtactggaggccacaatgagggaatccggagctcatgtgtggggaagcagcgctgccggacttgctggcggagtggcagctgccgtactccttgccctcctagtgctgttagtcgccccacctttgcttcgcagggcaggacgcctgaggtggcgcagacatgaagcggctgcacccgcaggcgcacctctgggtttccgcaatccggtgttcgacgtgactgcctccgaagagctgcctcttcccagaagactaagtctggtgcccaaggcagcagccgatagcacttctcattcatactttgttaacccactgttcgcaggagccgaggctgaggcttag

SEQ ID NO: 214244 - DNA, 1962 bp, synthetic construct
  misc_feature 1..1962: note = Description of Artificial Sequence: Synthetic coding sequence
  source 1..1962: mol_type = other DNA
atggcagatattaaaactgggatcttcgcgaaaaacgtacagaaacgactgaatagagctcaggaaaaggtgctccaaaagctcggtaaggccgacgagaccaaggatgaacagtttgaggagtacgtgcaaaactttaagcggcaggaagcagaaggtacccgactgcaaagagagctacgcggataccttgcagcaattaaaggaatgcaggaagcaagtatgaagttaactgaatcactgcacgaggtctacgaacccgattggtacggaagagaagacgtgaagatggtcggcgagaaatgcgatgtcctatgggaggactttcaccagaagcttgtggatggttcactcctaacactggatacttatctggggcaattcccagacattaaaaaccgcattgctaaaagaagtagaaaactggtggattatgacagcgcccgacatcacctcgaagccttgcagagcagtaaacgtaaggacgagtcaaggatcagtaaggccgaggaggaatttcagaaggctcagaaggtatttgaggaattcaacgtggacctccaggaggagttacccagtctttggagccggagagtaggattttatgtaaatacgttcaagaatgtatccagtctcgaggcaaaattccacaaggagatagccgtgttgtgtcataaactctatgaagtcatgacgaaactcggcgatcaacacgccgacaaggcgtttacaattcagggggctccttctgacagtgggcctctgcgcattgcaaagacaccaagcccgcctgaagagccatcacctctacccagccccacagctagtccaaaccatactctggccccagcttcgcccgctcccgcacgaccaagatcaccaagccaaacgagaaaaggtcctccggtgccacctttacccaaagtaactcccactaaagagctccagcaggagaacatcataagcttctttgaagataactttgttcctgaaatctccgtcactacgccctcacagaacgaggttcctgaggtaaagaaggaggagactttactcgacctagacttcgacccttttaagcctgaggtcacccctgcaggcagcgccggagtcacgcactctcctatgtctcagaccctgccttgggatctctggaccacttcaaccgatctggtacagccagcatctggagggagtttcaacgggttcacacagccccaggacactagcctgttcacaatgcagacagatcaatcaatgatctgcaacctaatcataccaggcgctgacgccgatgctgctgttgggacactcgtgtctgccgcagaaggagctcctggagaggaagccgaggcagagaaagctacagtacccgctggagagggggtgtctctcgaggaggctaagattgggaccgagaccacagagggagccgagagtgctcaaccagaagcagaggagctggaagcaactgttccacaggaaaaagtaatccccagtgtcgtcatcgagcctgcttcaaaccacgaagaagaaggagagaacgaaattacaattggagccgagccaaaagaaaccaccgaagacgcagctccacctggtccgaccagtgagacacctgagctggctacagaacaaaagcccatccaggatccccagcctaccccttctgcacctgcaatgggtgcagccgatcaactcgcaagtgcaagagaggcgtcacaagaacttccacctggtttcctttacaaagtggaaacactgcacgactttgaggctgccaatagcgacgaactgacgctgcagcgaggggacgtggttctcgttgtgcccagcgatagtgaggccgatcaagatgcaggatggctcgtcggcgtgaaagagtcagactggctccagtatagagacctggcaacatataagggattgttccctgagaattttacacggcgactggattag

SEQ ID NO: 214245 - DNA, 1794 bp, synthetic construct
  misc_feature 1..1794: note = Description of Artificial Sequence: Synthetic coding sequence
  source 1..1794: mol_type = other DNA
atgaccaaactgggcgaccagcacgctgacaaagcatttacgatccaaggcgctcctagcgactccggaccactgagaatcgccaagaccccttcaccccctgaagaaccgagtcccttgccttccccaactgcatctccaaaccacactttagcaccagctagccccgcacctgctcgccctcggagccctagtcagacccgcaaaggacccccagtgccacccctgcccaaggtcacgccgacgaaagagctccagcaggagaacatcatttcctttttcgaagataacttcgtgcccgagatatctgtcactaccccctcccagaatgaagtcccagaagtcaagaaggaggagaccctgctggacctggatttcgacccctttaaacccgaggtgacccccgctggaagtgcaggagttacgcatagccccatgtcccagaccctgccgtgggacctttggacaactcacactttcaacgacgatattactgacagcagcgaatcactctctttgtgtaacttgatcatggaggagactcccgacagcggtctggctgaagagatccaacggtcccaaaacgacatcggtgcctttacatggggacctgatgccagcaccgatagagtgagccaggaggttacctccggcggtttcggcgaagactctgcatgcccgtctgagactgagcaggatatcaggctgagtacttcccttctgagcagtgcagattggcccaccgtcgccgaagaatcagagcatgccccaggccctgctttccccggtgggaacgagcaactcccacctaagccagccccagaggcgggagttgcgattgccgcatgcgtggaaatggagcagctgtatgatcctctcgacagcgatatgccggctatggatactgcgggactttttaaggaatcacatgaggatatgaagaagtccgacgaagaggaggaaaagcagaagatggaggacagcctatgggcgggagtggaagcctgccaaaaggctagtggtggctctttcaacggctttacacagccacaggacacttcactgtttactatgcagactgaccagtcaatgatctgcaatctaattatcccaggggcagacgcagatgctgcagtcggaacacttgtaagcgctgccgagggtgcccctggtgaagaagccgaggctgaaaaggctactgtcccagctggcgagggggtctccttggaggaagcaaaaattggaacagagaccactgagggggctgagtcagcacagcccgaggctgaggagttggaggcaacagtgccacaggagaaggttatacccagtgtcgtcattgagccggcaagtaaccacgaagaggagggcgagaacgagataaccataggtgcggagccaaaggaaactactgaagacgccgctccccctggcccaaccagcgagacaccggagcttgccacagagcaaaagccaatccaggatccacagccaacaccctcggcaccggcaatgggcgcagccgatcagctggcatcggcgagagaggcctcccaagaactgccaccagggttcctgtataaagtcgagactctacacgactttgaggcagcaaatagcgatgagctgaccctacagcggggtgacgtagtgctggttgtgccttccgattccgaagccgaccaggatgctggttggctggtgggcgtcaaggagtccgattggctccagtaccgggacctggccacctacaaggggctgttccccgaaaacttcacccgaaggttagactag

SEQ ID NO: 214246 - DNA, 2088 bp, synthetic construct
  misc_feature 1..2088: note = Description of Artificial Sequence: Synthetic coding sequence
  source 1..2088: mol_type = other DNA
atggctgacattaaaacaggtatctttgcaaaaaatgtacagaagcggctgaatagagcacaggaaaaggttcttcagaagctaggaaaggccgacgaaactaaggacgagcaattcgaggagtatgtgcaaaacttcaagcggcaggaggccgagggaacccgactgcagagggagctgcgaggttacctggccgctattaaggggatgcaggaggctagtatgaagctgaccgaaagcctccacgaggtgtatgaacctgactggtacggacgggaagacgtcaaaatggtgggtgaaaaatgcgacgttttgtgggaggactttcatcagaaactggtagatggaagtttgctcacactagatacttacctgggccagttccccgacatcaaaaatcgcatcgcaaagaggtcgcgcaaactggttgactatgattcagccaggcaccacttggaggcccttcagagcagcaagcgcaaagatgagtcccgcatcagtaaagctgaagaggagtttcagaaggctcaaaaagtgtttgaagaattcaatgttgacctccaagaggaattgccgtctttatggagccgacgggttgggttttacgtcaacacttttaaaaacgtgagctctttggaagctaagtttcataaggagattgctgtgttgtgccataagctgtacgaagtgatgaccaagttgggagaccagcatgcggacaaggcctttaccatccaaggtgcaccaagcgactctggcccacttcgcatcgccaaaacgccttctccacccgaggagccaagtcccctgcctagccctactgcgtcccccaatcatactttggctcctgctagcccggctcctgcaaggccgagatccccgtcacaaacacgaaagggccctcctgttcctcctctccccaaagtgacacccacaaaggaactccaacaggaaaacatcatctccttctttgaagacaattttgtgccagagatttccgtgaccaccccatcccagaacgaggtgcccgaggtaaagaaggaggaaaccctgcttgacttggactttgatccctttaagcctgaagtaacccctgctggcagcgccggagttacgcattcaccaatgtctcagacacttccctgggatttgtggaccacatctacagaccttgtgcagccagccagcggcggatccttcaatggatttacacagcctcaggacacaagcctctttaccatgcagaccgatcagtcaatgatttgcaaccttgccgaaagtgaacaagcccctcctactgaaccaaaagctgaggaacctctggccgctgtgactcccgctgtggggctcgatctaggcatggacacacgtgccgaggagccagtcgaggaggccgtcatcattcccggagccgatgccgacgcggctgtgggaacactggtaagtgctgctgagggggcaccaggggaggaagcggaagcggagaaagctacagtgcccgctggagaaggtgtgtccttagaggaggccaagatcggcacagagacaacggagggtgctgaaagcgctcaacccgaggcagaggaattggaagctaccgtccctcaggagaaggtaattccgtcagtggttatagaacccgcaagtaaccacgaagaagagggtgagaatgagatcacaattggagctgagccaaaggagaccacagaggacgcagccccaccgggacctaccagcgagactccagaactcgctaccgagcaaaaacctattcaggatcctcaaccaaccccaagcgcccctgccatgggagctgctgaccagttggcctcggcaagagaagcttctcaagaacttcctcccggatttctgtacaaggtggagactctgcacgactttgaggccgctaattccgacgagctcactctccagaggggagatgtcgtgctggttgtaccgagtgactcagaggcagaccaggatgcagggtggcttgtgggcgtgaaagagagtgattggctacagtacagagatctcgcaacctataagggcctctttcccgagaatttcacccgcaggttggattag

SEQ ID NO: 214247 - DNA, 591 bp, synthetic construct
  misc_feature 1..591: note = Description of Artificial Sequence: Synthetic coding sequence
  source 1..591: mol_type = other DNA
atggaggagaccccagactctggattggcagaggaaatccagcggtcccagaacgatatcggagcctttacttggggtcctgacgcttccacagatcgcgtgtcccaggaggtcacaagcggtgggtttggtgaggacagtgcatgcccctctgaaaccgagcaggatatacgccttagtacatcacttctgagcagcgcagattggcccactgtcgctgaggagagtgagcacgctcctgggcctgccttccccggaggaaatgagcaattgccccctaaaccagcccctgaagcaggggttgcgattgctgcctgtgtggaaatggagcaactctacgatcccctcgatagcgatatgccggctatggacacagccggattatttaaggagagtcacgaagacatgaagaagagcgacgaggaggaggagaaacagaaaatggaagactctttgtgggccggtgtagaagcttgtcaaaaggccagtggcggtagctttaacggctttacacagcctcaggatacctccctctttactatgcagacagatcagtctatgatctgcaatctggaaattacagtcaactag

SEQ ID NO: 214248 - DNA, 1962 bp, synthetic construct
  misc_feature 1..1962: note = Description of Artificial Sequence: Synthetic coding sequence
  source 1..1962: mol_type = other DNA
atggccgacattaaaaccggcatctttgccaagaacgtgcaaaagaggttaaatcgggctcaagaaaaggtcctccagaagcttggaaaggcggacgaaaccaaagatgagcagtttgaggagtacgtgcagaacttcaaacgtcaggaggcagagggtacccgactccagagagagcttcggggttacctggccgctatcaagggtatgcaggaagcatccatgaagctgactgagagcttgcacgaagtctacgagcccgactggtacggcagagaagatgtgaaaatggtgggagaaaagtgcgatgtgttgtgggaggattttcaccagaagcttgtcgatggttcactgctgaccctagacacatacctcggacagttcccagatatcaagaataggattgccaagagatctagaaaactcgtagactatgattctgcgcgacatcacctcgaggcattacagtcgtcaaaacggaaagatgagtctaggatttccaaggcagaagaagagtttcagaaagcccaaaaggtgttcgaagagtttaacgtggatttgcaagaggaactgccgagcctctggagccggagagttggcttctacgtgaataccttcaagaatgtgtcctccttagaagccaagtttcataaggagatcgccgtgctctgccacaagctatatgaggttatgactaagcttggtgatcagcacgccgataaagctttcaccatacagggtgctcctagcgacagcggtccccttcgcattgctaaaactccatctccgccagaggaaccctccccgctccctagcccaaccgctagccctaaccacaccttggctccagcaagtcccgctccagctcgcccaagaagcccttcccagaccaggaaaggcccaccagtgcccccactcccaaaggtgacgccgaccaaagagctccaacaggagaacatcatctccttcttcgaagacaactttgtgccagagatcagtgtgaccacgccatcgcagaatgaagttcctgaagtgaaaaaagaagaaacgcttttggatctcgacttcgacccctttaagcctgaggtcacacccgctggatcagcaggtgtgacccatagtcctatgagccagaccttaccctgggatttgtggacagccggagtggaggcatgtcagaaagcttcagggggttcattcaatggattcacccaacctcaggatactagcctgttcacaatgcagactgatcagagtatgatatgcaacctaatcattcctggggcagacgcagacgctgcagtggggactttggtgtccgctgctgagggcgcaccaggcgaagaagccgaggccgagaaggcgacagtgccggcaggtgagggcgtgtctttggaggaggccaaaatcgggacagaaaccacagagggagcagaatcagcacagcccgaagcagaggaacttgaagccaccgtcccacaggaaaaagttatcccgtccgtggtgattgagccagccagcaaccacgaggaagagggtgagaatgagatcactatcggagccgaacctaaagagacaaccgaggacgcagctcctccagggcctacctccgaaacccctgagctggccacagaacagaaacccatccaggatccgcagcccaccccatctgcccctgcgatgggcgctgcagaccagttagcctcagccagagaagcttctcaagagctacccccagggttcctgtataaagtcgagacactgcatgattttgaggccgctaattccgacgaacttacactgcagaggggagatgtggtgctcgtggtaccgtctgactctgaagccgaccaggacgctggatggctggtgggcgtaaaggagagcgactggctgcaatatcgagatctggcaacgtacaagggtcttttccccgaaaattttacccgacgtttggattag

SEQ ID NO: 214249 - DNA, 1158 bp, synthetic construct
  misc_feature 1..1158: note = Description of Artificial Sequence: Synthetic coding sequence
  source 1..1158: mol_type = other DNA
atggctgacataaagactgggattttcgccaaaaatgtccagaagagactgaaccgcgcacaggaaaaagtcctgcagaagctgggtaaggctgatgagactaaggatgagcagtttgaagagtatgtgcaaaacttcaagagacaggaggctgagggcactcggctgcaaagggagcttagagggtatttggctgcgattaagggaatgcaggaagcatctatgaaacttaccgaatctcttcacgaggtgtacgaaccagactggtatgggagggaggacgtcaagatggttggcgaaaagtgtgatgtactgtgggaggattttcatcagaagctagtcgatggcagtctgctcacactcgatacctacttaggccagtttccagacatcaaaaataggatagctaagcggtctcggaaactcgtcgactatgacagtgcacgccaccatctcgaggctttgcagagctccaaacggaaagacgaaagccgaatttcaaaagctgaagaagagttccagaaggctcagaaagtgtttgaggagttcaacgtggatcttcaggaagagctccctagtctgtggtcgaggcgcgtgggattttacgtgaatacattcaaaaatgtttcttccctcgaggctaagtttcataaagagatcgctgtcctgtgccataaactgtacgaggtgatgactaaactcggtgatcagcatgcagacaaggcatttacaatacagggcgctcctagacagtacttagatagtggacctctgagaatcgccaagacaccctctccccctgaagagccctcgcctctgcctagccccaccgcttcccccaaccacaccttagcgccagcatcccccgctccagcaaggccacgttccccttcccagacaaggaaaggaccacctgtgcccccactgcctaaagtgacacctaccaaggagctgcagcaagagaatattatctcgtttttcgaggataactttgtgcctgagattagcgtcacaacccctagtcagaatgaagttcccgaagtcaaaaaggaagaaactttgctggacctggacttcgatccttttaagccagaggtgactcccgctggctcagccggagtgacccattccccgatgtcccagacggtcggatggtag

SEQ ID NO: 214250 - DNA, 759 bp, synthetic construct
  misc_feature 1..759: note = Description of Artificial Sequence: Synthetic coding sequence
  source 1..759: mol_type = other DNA
atgcgggcaccgctgctgcctcctgcccctgtagttttgtcgctgctgattctgggaagtgggcactacgctgccggtctggacctgaacgatacctactcagggaagagagaacccttctctggagatcatagcgctgacggattcgaagtcaccagccgcagtgagatgtccagcgggtctgagatttctcctgtctcagagatgccctcaagttcagagccgtcctccggagctgactatgattactccgaggaatacgataacgagccacagattccaggctatatcgtcgatgatagtgttcgggtggagcaggtggtcaagccccctcagaataagactgaaagcgagaatacctcggataaacccaaacgcaagaaaaagggcggaaagaacggcaaaaatagacggaatagaaagaaaaagaatccttgcaacgccgagttccagaacttttgtatccacggcgagtgcaaatatattgagcacctggaagcggtcacctgtaaatgccaacaggagtatttcggagaaagatgcggcgagaaatccatgaagacccatagcatgatcgacagctccctgtccaaaatcgctttagcagcaatcgccgcattcatgagcgctgtcatcctgacggctgtggctgtgatcaccgtgcagctgaggagacagtacgttcgcaagtacgagggggaggcagaagaaagaaagaaacttagacaggagaatggaaatgtccacgcaatcgcttag

SEQ ID NO: 214251 - DNA, 759 bp, synthetic construct
  misc_feature 1..759: note = Description of Artificial Sequence: Synthetic coding sequence
  source 1..759: mol_type = other DNA
atgcgcgcaccccttctcccccctgccccagtggtattgagtctcctgattctgggatctggccactacgccgctggccttgatttgaacgacacatactccggaaagagagagcctttcagcggggatcacagcgccgacggatttgaggttacctcccggtccgagatgtcttccgggagcgagatctctccggtatcagagatgcccagctcctccgagccatcttctggtgctgactatgattactccgaagaatatgacaatgagccacagatcccaggatacatcgtagacgattcggtcagagtagagcaggtagtcaaacctccacaaaataagactgagtctgaaaatacctctgataaaccgaaacgtaagaaaaaaggcggaaagaacggaaaaaatcgccgtaatcgcaaaaaaaaaaacccatgcaatgccgagtttcagaatttttgcattcatggggaatgcaaatacatcgagcatttggaggcagtgacgtgcaagtgtcagcaggaatacttcggtgagagatgcggagagaagtctatgaaaactcacagcatgatcgacagcagtcttagcaagatcgcattggcagccatagcagcatttatgagcgccgtcatcctaaccgccgtcgccgtgataaccgtgcaactgcggcgacagtatgtgaggaagtacgaaggggaggccgaagagcgcaagaagctgcggcaagagaacggaaacgtgcacgctattgcatag

SEQ ID NO: 214252 - DNA, 1536 bp, synthetic construct
  misc_feature 1..1536: note = Description of Artificial Sequence: Synthetic coding sequence
  source 1..1536: mol_type = other DNA
atgaagcttttttggctgcttttcactattgggttttgctgggcccagtattcttcaaatacacaacaagggagaacctctatcgtgcatctctttgagtggcgctgggtagatatcgccctggagtgtgaacgctaccttgcaccgaaaggcttcggaggcgtgcaggtgtcccccccaaacgagaacgtggctatccacaatccgtttaggccttggtgggaacgctaccagccagtgtcatataagttgtgcacccgatccgggaacgaggacgagttcagaaatatggtgacccggtgcaacaacgtgggagtcagaatctatgtcgacgctgtgattaaccacatgtgtggaaatgccgtgagcgctggcacttcttcaacatgcggctcttactttaaccctggtagcagagattttccagccgtcccctatagcggatgggacttcaacgacgggaagtgcaaaactgggtcaggcgatatcgaaaactataatgatgccactcaggtgagggattgccgactgtcaggcctgctcgacctggcactgggcaaggactacgtgaggagcaaaattgcagaatatatgaaccatctcatcgacatcggagtcgcgggattccggatcgatgcctccaagcatatgtggcccggagacatcaaggccattctggataaactgcacaacctgaacagtaactggtttcctgaaggcagtaagcctttcatttaccaagaagtcatcgacctgggaggagaacctataaaatcatccgattactttggcaacggcagggtaaccgagttcaagtatggtgcaaaactgggtaccgtgatcagaaagtggaacggagagaaaatgagttacctgaagaactggggcgaaggatggggcttcatgccaagcgatcgggctctcgtgttcgttgacaaccatgacaatcaaagagggcacggtgcaggtggtgcctccattctgacattttgggatgccagactctataaaatggccgtcgggttcatgcttgcgcacccatatggtttcacgagagtaatgtcttcctataggtggccaaggtatttcgagaacggaaaagacgtgaacgactgggtggggccacccaatgacaacggcgttacaaaggaggtcaccatcaaccccgataccacatgcggcaatgactgggtttgcgagcatcgctggaggcagattagaaatatggtgaacttcaggaacgtagtcgacggacaaccgttcacaaactggtacgacaacggtagtaaccaagtggccttcggacgcggaaaccgtggattcatcgtcttcaacaatgacgattggacgtttagccttactttgcagacaggccttcctgccggaacctactgcgatgtgatctcaggcgacaagattaacggaaattgcactggtattaaaatatacgttagtgacgacggaaaggcccacttttccataagcaacagtgcggaggaccccttcatcgccatccatgccgaatctaagctctag

SEQ ID NO: 214253 - DNA, 318 bp, synthetic construct
  misc_feature 1..318: note = Description of Artificial Sequence: Synthetic coding sequence
  source 1..318: mol_type = other DNA
atgaaactcttttggctattattcaccatcgggttttgttgggctcaatattcaagcaatacacagcagggacgaaccagcatcgttcacctttttgaatggcggtgggtggacatcgctctggaatgcgaaaggtatttagctcctaagggtttcggaggcgtgcaggtgtcccccccaaatgagaatgtcgctattcataatccttttcgaccttggtgggagcggtaccagcctgtgagttataagttgtgtaccaggtctggaaacgaggacgaatttcggaacatggtgacccgctgcaacaatgttggctag

SEQ ID NO: 214254 - DNA, 681 bp, synthetic construct
  misc_feature 1..681: note = Description of Artificial Sequence: Synthetic coding sequence
  source 1..681: mol_type = other DNA
atgaagctgttctggctcctgtttacgatcggcttttgttgggcccagtattcaagtaacacccagcagggacggaccagtattgtacatttgtttgaatggcgctgggttgacatcgcacttgagtgcgaaagatatctcgcccctaaaggctttggcggagtccaggtgagtccgcctaacgagaatgttgccattcataatccattcaggccctggtgggagcgctaccaaccagtttcgtacaagctttgtactcgatccggcaatgaggatgaattccggaatatggttaccagatgcaacaatgtgggtgtgcggatctacgtcgacgccgtcattaatcatatgtgcggcaacgcagtgtccgctggaactagttccacttgtggatcatacttcaatcccggttctagggatttccctgctgtaccatactccgggtgggattttaatgacgggaagtgtaaaactgggagcggagacattgaaaattataacgacgccacccaggtgcgcgattgtcgactttctggcctcttagatttagctctgggaaaggactacgtgcgaagcaagattgctgagtacatgaatcacctgattgacattggggtcgcaggattccgcatcgatgcctctaagcatatgtggcccggagacatcaaagcgattctttag

SEQ ID NO: 214255 - DNA, 1536 bp, synthetic construct
  misc_feature 1..1536: note = Description of Artificial Sequence: Synthetic coding sequence
  source 1..1536: mol_type = other DNA
atgaagctgttttggttgctgtttaccattgggttttgttgggcgcaatattcatccaatacccagcaggggaggaccagcattgtacatctgttcgaatggcgttgggtagacattgctctggaatgtgagaggtatttggccccaaagggattcggcggagttcaagtatctcccccaaatgagaacgtggcaatccacaacccatttcgaccttggtgggaaaggtaccagcccgtgtcctataagctgtgcacccgcagtggaaatgaggatgaattccgcaatatggttactcgctgcaacaatgtgggggtaagaatttatgtggacgcagttattaaccacatgtgtggaaacgccgtgtctgcaggaaccagctccacctgtggcagctattttaatccagggagtcgagatttcccggctgtgccctactctggctgggacttcaacgacggtaaatgtaaaacagggagtggtgacatcgagaactacaacgatgctacgcaggtacgggattgccgtctctcgggcctgttggacctcgccttgggaaaagactatgtccggtcaaaaattgctgaatacatgaaccacctcatagatatcggggtcgcaggatttaggatcgatgccagtaagcacatgtggcccggagacattaaggcaatccttgacaagctgcacaacctcaatagtaactggttccctgagggctcaaaacccttcatctatcaagaggtcattgatctcggtggagagcccataaaatctagtgattactttggtaacgggagggttaccgagttcaaatatggtgccaagctgggtaccgtaatccgtaaatggaacggtgaaaagatgtcatacttgaagaactggggcgaggggtgggggttcatgccatcagatcgggctcttgtgttcgtagacaaccacgataatcagcggggtcacggtgcgggtggggcttccattttgactttctgggacgcgagactgtataaaatggccgttggattcatgctggcccacccatacggctttacccgggttatgtcctcgtacaggtggccacgatactttgaaaatggcaaggatgtaaacgattgggtagggccacccaatgataatggagtgacgaaggaggttactataaaccctgacactacttgtggtaacgattgggtgtgtgaacatcggtggaggcagatacgcaatatggttaattttcgaaatgtagttgacggccaacccttcacaaactggtatgataacggctccaaccaggtagcttttggtagagggaatagaggattcatcgtgtttaacaacgacgattggaccttctctttgactctccagacggggctcccagcaggtacctactgtgacgtgatctctggcgacaagattaatggtaattgtacaggaattaagatctacgtctccgatgacgggaaagctcacttcagcatatccaattctgctgaagacccgtttatcgccatccacgccgagagcaagctctag

SEQ ID NO: 214256 - DNA, 1536 bp, synthetic construct
  misc_feature 1..1536: note = Description of Artificial Sequence: Synthetic coding sequence
  source 1..1536: mol_type = other DNA
atgaagctcttttggctcctttttacgatcggcttttgttgggcacagtacagcagtaacacccagcaggggagaacttctatagtgcacctgtttgagtggcgatgggtcgatattgccctggagtgcgagcgatatctagcccctaaaggctttggaggcgtgcaggtcagtccacccaacgagaatgtcgcaatccacaatccgtttaggccatggtgggaaagatatcagcccgtatcgtacaagctgtgtacccgctccggcaatgaggatgaatttcgtaacatggtaaccagatgcaacaacgttggagtgaggatatatgtcgacgcggttatcaatcatatgtgcgggaatgcggtgtctgcgggaacgtcttccacgtgcggctcttacttcaaccccggaagcagggactttcctgctgttccctactccgggtgggacttcaacgacggaaaatgcaagactggatctggcgacattgaaaactacaacgatgccactcaagttcgagactgcaggttaagtggcttgctggatctggccctcggtaaagactacgtccggtccaagatcgctgagtacatgaatcacctgattgacattggcgtggctggattccggattgatgcctcaaagcacatgtggcccggtgatataaaagcgatcctggataaactgcataatttaaactccaattggttcccagaagggtctaagcctttcatctaccaggaggtcattgatctgggcggtgagcccatcaaatcctccgattactttggtaatggacgggttaccgaatttaagtacggcgcaaagttgggcacagtgattaggaaatggaacggggaaaaaatgagttacctgaaaaattggggcgagggatggggcttcatgccttcagaccgtgcgctcgtgtttgttgataaccacgacaatcagagagggcacggcgcaggaggggcatctatccttacgttctgggacgctcgcctatataaaatggccgtgggcttcatgctcgcacacccttacggcttcacacgtgtcatgagttcgtaccggtggcctcggtactttgagaacgggaaggacgtgaacgactgggttggacccccaaatgataatggcgttactaaggaggtaacaatcaatccagatacaacttgcggcaacgattgggtgtgcgagcaccggtggagacaaattcgtaatatggtcaactttagaaatgtagtggacggacagccattcaccaactggtacgataatggttccaatcaagttgccttcggcaggggcaacagagggttcattgtgtttaataatgatgactggaccttttccctgacgctacagacaggacttcccgcaggtacatactgtgacgtgatcagcggggacaaaattaacgggaattgcactggaattaagatctatgtatctgatgacggcaaggctcacttctccatatccaactcagctgaagacccattcatagccattcacgcggaatctaaactttag

SEQ ID NO: 214257 - DNA, 318 bp, synthetic construct
  misc_feature 1..318: note = Description of Artificial Sequence: Synthetic coding sequence
  source 1..318: mol_type = other DNA
atgaagctcttttggctgctgttcacaatcgggttctgttgggcgcaatattcaagcaacacacagcagggacgaaccagtatcgtgcacctttttgaatggcggtgggttgatatcgctctcgagtgcgaaaggtatctggctccaaaaggtttcggaggagttcaggtctcacccccaaacgagaatgtggctatccataacccgtttcggccatggtgggagcgctatcagcccgttagctacaagctgtgcactcgcagcgggaatgaggacgagttcaggaacatggttactcgctgcaataatgtcgggtag

SEQ ID NO: 214258 - DNA, 681 bp, synthetic construct
  misc_feature 1..681: note = Description of Artificial Sequence: Synthetic coding sequence
  source 1..681: mol_type = other DNA
atgaaactgttctggttactatttaccataggattctgctgggcacagtacagcagtaacacccaacagggccgtacttcaattgtccatctgttcgagtggagatgggtggatattgccctcgagtgcgaaagatacctggcccctaagggttttggcggagtacaggtgtccccccctaatgagaatgtcgccattcacaacccttttagaccatggtgggagaggtatcaacctgttagttataagctgtgcacgaggagcggcaacgaggatgaattccggaacatggtgacgcggtgtaataacgtgggcgtgcggatttatgtggacgctgtgataaatcacatgtgcggcaatgcggtcagcgccggtacctccagtacctgtggctcctatttcaacccaggttccagggattttcccgctgtgccatatagtggatgggactttaacgacggcaagtgcaagactggcagtggtgatatagaaaactataatgatgctacccaggtgagagactgtaggctgtccggactgctggacctggctttagggaaagactacgtgcggtctaagatagcagagtatatgaaccacctgatcgacatcggcgttgcgggatttagaatcgatgcgagtaagcacatgtggccaggggacataaaagccatcttatag

SEQ ID NO: 214259 - DNA, 1536 bp, synthetic construct
  misc_feature 1..1536: note = Description of Artificial Sequence: Synthetic coding sequence
  source 1..1536: mol_type = other DNA
atgaagctgttttggctcttgtttacaatcgggttctgctgggctcagtactcaagcaacacccagcagggtaggacctcaatcgtgcatctgttcgaatggcggtgggtagacattgccctcgagtgcgaaagatacctggccccaaagggctttggcggagtccaagtgtccccacccaacgaaaatgtagccatccataatccctttcggccatggtgggagaggtaccagcccgtgtcatacaaactgtgtacacgcagtgggaatgaagatgagttcaggaatatggtaacccggtgcaataacgtaggcgtgcgcatctacgttgacgcagtgatcaaccatatgtgcggaaacgctgtgtctgcaggcacaagctccacttgcgggtcctattttaatccgggatcccgagacttcccggctgtcccatacagcggttgggacttcaatgatggcaaatgcaagaccggatccggcgacatcgaaaactataacgacgctacacaggtacgcgactgccgcctcagcgggctgctggaccttgccttaggaaaagattatgtgcgaagcaagattgcagagtatatgaatcacctgatcgatattggggtcgccggatttcgaatcgacgctagcaagcatatgtggccaggcgatatcaaagccatcctggacaagcttcacaacctcaacagtaactggtttcccgagggatctaaaccttttatctaccaggaggtgatcgatcttggcggtgaaccgatcaagtcctctgactattttggcaacgggagagtcactgaattcaaatatggcgctaagcttggaactgtcataaggaagtggaatggtgaaaaaatgtcttacctgaaaaattggggtgaaggatggggattcatgccaagcgatagagctctggtatttgtggataatcacgacaaccagagaggccacggagccggaggggctagtatcctgacattttgggacgccagactgtacaagatggctgttgggtttatgcttgcccacccatatggctttacacgcgttatgagcagctatcggtggcctcggtacttcgagaacggaaaggacgttaacgattgggtgggccctcccaacgacaatggggtgacaaaggaagtgactattaatcccgatactacttgcggaaacgattgggtttgcgaacaccgctggcgacagattcgaaatatggtgaactttcggaacgttgtggacggccaaccttttacgaactggtatgacaacgggagcaatcaggtggctttcgggcgtgggaatcgcggtttcattgtcttcaataatgatgactggaccttctctttgacattgcagaccggcctgcccgcaggtacatactgcgacgtgatatccggggataaaatcaatgggaactgtactgggatcaaaatatacgtaagcgatgacggaaaagcccacttcagcatctctaattcagcagaggatccatttatagccatccacgcagaatctaagctctag

SEQ ID NO: 214260 - DNA, 1536 bp, synthetic construct
  misc_feature 1..1536: note = Description of Artificial Sequence: Synthetic coding sequence
  source 1..1536: mol_type = other DNA
atgaagttttttcttttactctttaccatcggcttctgttgggctcagtattcacctaatacccaacaaggacggacatctatagtgcatctgttcgagtggcgctgggtggatatcgccctagaatgtgaaaggtacctggccccaaaaggattcgggggagtgcaagtgtcccctcccaacgagaacgtggctatctataatccattccgtccctggtgggagaggtaccagcccgtcagctacaagctttgtactaggtccggtaatgaggatgagttccgaaatatggtcacccgctgcaataacgtgggagtgcgcatctatgtggatgccgtaatcaatcacatgtgtggcaatgctgtatcagctggtaccagttcaacttgcgggagttacttcaatcccggttcccgcgacttccctgccgttccttattctggatgggattttaacgatggcaagtgcaaaactggtagcggcgatatcgaaaactacaacgatgcaacgcaggtgcgcgattgtaggcttaccgggctgctagaccttgccctggaaaaagactacgtccggagcaagatagccgagtatatgaatcacctgatcgatatcggcgtggccggattcagattagacgcctcaaagcacatgtggcccggtgacataaaggctatcctcgacaaactacacaacctaaacagcaactggttccctgctggcagcaaacccttcatctatcaagaagtaattgaccttggtggggagccaatcaaaagctccgattattttggcaacggcagggtgactgagttcaagtacggagctaaactgggcaccgtaataaggaaatggaatggtgagaagatgagttatttgaagaactggggtgaaggatgggggttcgtgccttctgatcgtgccctggtgttcgtggataatcacgacaatcagagaggccacggcgcaggaggtgcgtcaatcctgacattttgggacgcccgactctacaaaatggccgttggattcatgctcgcgcacccctacggcttcacccgagttatgtctagctataggtggcccagacagttccagaacggaaatgatgtgaatgattgggttggtccccctaataataacggtgtgatcaaggaggtcaccatcaacccagacacgacctgtggcaatgactgggtgtgtgaacacaggtggcgacagatccggaacatggtcatcttcagaaacgtcgtcgacggacagccctttaccaattggtatgacaacggcagcaatcaggtggcatttggccgtgggaatcgaggattcatcgtcttcaacaacgacgactggtcattctcgcttacattacagactggtctccctgccggtacctattgcgatgtaatcagtggcgataagatcaacggtaattgcactgggattaagatctacgtgtcagacgacgggaaagcgcacttctccatcagtaatagcgctgaggacccatttatcgccattcacgcagaatcgaagctttag

SEQ ID NO: 214261 - DNA, 1536 bp, synthetic construct
  misc_feature 1..1536: note = Description of Artificial Sequence: Synthetic coding sequence
  source 1..1536: mol_type = other DNA
atgaaattttttttgctactgtttacaatcgggttttgctgggcccagtatagcccgaatacacaacaggggagaacatccattgtccacctcttcgaatggcgttgggttgacatcgccctggaatgtgagcgttacctcgcaccaaaggggtttggaggcgtccaggtctctccccctaacgagaatgtggctattcacaaccccttcagaccttggtgggagcggtatcagcctgttagttacaaactttgcactagatccgggaacgaagatgaattcaggaacatggtgaccagatgcaataacgtcggtgtacgcatatatgtggatgctgtgatcaaccacatgagcggcaacgccgtttcagctggaacttcttctacttgtgggagctattttaacccaggttcccgcgactttccagccgtgccttatagtggatgggacttcaacgacggaaagtgcaaaacaggttccggggacatcgaaaattataatgacgcaactcaggtgcgtgattgtagactggtgggactgcttgatctggcccttgaaaaggattacgtgcgctcaaagattgcagaatatatgaaccatctgatcgatattggcgtcgccggattccggctcgacgcctcaaaacatatgtggcctggcgatatcaaggctattcttgacaagcttcataatttgaactcaaattggtttcccgctgggtcaaaacccttcatttatcaggaggtgatagatttaggcggagaacctataaagagcagtgactactttggaaacggtcgtgtcactgagtttaagtacggagctaagctgggcaccgtcatccgaaaatggaacggggagaaaatgagttacctaaagaactggggggagggttggggcttcatgccgagtgaccgcgctttggtattcgttgacaatcatgataatcaacgtggacacggagcaggaggcgcaagcattctgacgttttgggatgcacgcttgtataagatggctgtgggctttatgctggctcacccctacgggtttacccgggtgatgtctagctaccggtggcccaggcaattccagaatggcaatgacgtaaatgactgggtgggaccccctaacaataacggagttataaaggaggtaacgatcaaccctgacactacgtgtggaaacgactgggtttgcgagcaccgttggcgacagatcaggaatatggtcaactttcgaaatgtggttgatggtcaacccttcactaactggtatgataatggcagcaaccaggttgcctttggccgagggaacagaggcttcatagtattcaataacgatgattggacattctccctgacactgcagaccgggctccctgcgggaacttactgcgacgtgataagcggcgataaaattaacggtaactgcaccgggatcaagatttatgttagcgacgacggaaaggcgcactttagcatttcaaatagtgccgaagatcccttcatcgcaatacacgccgaatccaagctttag

SEQ ID NO: 214262 - DNA, 291 bp, synthetic construct
  misc_feature 1..291: note = Description of Artificial Sequence: Synthetic coding sequence
  source 1..291: mol_type = other DNA
atgaagttctttctacttctgttcaccatagggttttgctgggcacagtattcgcccaatactcagcagggcagaaccagcattgttcacctgttcgaatggagatgggtggatatagctcttgaatgtgagcgatatttagcacctaaaggtttcggcggtgttcaagtgagcccacccaatgagaacgtcgcgatacataatccattcagaccttggtgggagcgataccagcccgtcagttacaagctctgcacccgctccggaaacgaggacgagtttagaaactag

SEQ ID NO: 214263 - DNA, 261 bp, synthetic construct
  misc_feature 1..261: note = Description of Artificial Sequence: Synthetic coding sequence
  source 1..261: mol_type = other DNA
atgaagttctttctccttctttttactatcgggttctgctgggcacaatatagccccaacactcagcagggtagaactagcattgttcacctgttcgaatggaggtgggtggatattgctctggaatgtgaaaggtatcttgcaccgaagggctttggaggcgtacaggtctcacctccaaatgaaaacgtggcaattcacaatcctttccgtccttggtgggagaggtatcaaccagtgagctacaaactttgcacctag

SEQ ID NO: 214264 - DNA, 2313 bp, synthetic construct
  misc_feature 1..2313: note = Description of Artificial Sequence: Synthetic coding sequence
  source 1..2313: mol_type = other DNA
atgctacccggtctagcccttctgcttctggccgcttggactgcacgtgccctcgaggttccaacagacggtaatgctggactgttggccgagcctcagattgctatgttctgcgggcgtctgaacatgcatatgaatgtacaaaacggaaagtgggacagcgatcctagcggcaccaaaacttgtattgataccaaggagggtattctccagtactgccaggaagtctaccccgagctccagatcacaaatgtcgtagaagcaaaccagcccgtaaccatacagaactggtgtaagcgaggcagaaaacagtgcaagactcacccacattttgtgatcccctaccggtgcctcgtgggagagttcgtgtccgatgccctgttggtgcccgacaagtgtaagtttttgcatcaggagcgcatggacgtctgtgaaacccacctgcattggcatactgtggccaaggagacttgtagtgagaaatcaacaaacttacacgactatggtatgctgcttccctgtggcatcgataaatttcgaggggttgagttcgtctgttgcccgctcgctgaggagtctgacaacgtggactcagcagacgctgaagaagatgactctgacgtgtggtggggtggcgctgataccgactatgcggatggatccgaggacaaggtggttgaggtcgccgaagaggaggaagtagccgaagtggaggaggaggaggccgatgatgatgaagatgatgaggatggagacgaggtggaggaagaggccgaagaaccttatgaggaagctactgaacggacgacatcgattgctactaccacaacaactaccaccgagtctgtcgaagaggtggtgagggaggtgtgctccgagcaagcagagactggtccatgcagagccatgatctcacgatggtacttcgacgttacagagggtaagtgcgccccattcttttacggagggtgcggagggaataggaacaacttcgacacagaggaatattgtatggctgtgtgcggaagcgcaatgagccagagcttgctcaaaactacccaggagccactcgcacgcgacccggtgaagctgcctaccacagcagcctcaacacccgatgcagttgacaaatatctcgaaacccccggtgacgagaatgagcacgctcatttccagaaggcaaaggagcgcttggaggcaaagcacagagaacgcatgagccaggtgatgcgggagtgggaggaggccgagagacaagcaaagaacttgcctaaggccgacaaaaaagccgtgatccagcactttcaggaaaaagtggagtcccttgagcaggaggccgctaatgagcgccagcagctggtggagacacacatggcccgtgtggaggcaatgctgaacgatcgcagacgtctcgccctggaaaattatattaccgccctccaggcagtgcctcctcggccaaggcatgttttcaatatgctgaagaaatatgtgagggcagagcagaaggatcggcagcacaccctgaagcacttcgaacacgtgcgcatggttgaccctaaaaaggccgctcaaattaggtcccaggtgatgacacacttacgcgtgatttatgagcgaatgaatcagagcctatccctcttatacaatgtccctgccgtagctgaagagatccaagatgaggtagacgagctcctgcaaaaagagcagaattattccgacgatgttctggctaacatgataagtgaaccaagaatttcctatgggaacgacgccttgatgccctccctgacagaaacgaaaacaacggtagaattgctgccggtgaatggagagttttctctggatgacctgcaaccttggcatagcttcggagctgattcagttcccgcaaacaccgagaacgaggtcgagcccgtagacgcccgtccagctgccgacagagggctaaccacaaggcccggatccggtctgaccaatatcaaaaccgaggagatctccgaggtcaagatggatgctgaattcaggcatgactctggatacgaagtccaccaccaaaaactggtgttcttcgccgaagacgtgggttcaaataagggcgcaatcatcggcctaatggtcggaggggtcgtaattgccacagtgatcgtaatcacattagtaatgctcaaaaaaaagcagtacacctcaatccatcatggggtggtggaagtggacgccgcagtgacccctgaggaacgccacctctccaaaatgcaacagaacgggtacgagaacccgacttataaattttttgaacagatgcagaattag

SEQ ID NO: 214265 - DNA, 2088 bp, synthetic construct
  misc_feature 1..2088: note = Description of Artificial Sequence: Synthetic coding sequence
  source 1..2088: mol_type = other DNA
atgttaccaggactggctctgctacttctcgctgcttggaccgctcgggcactggaggtcccaacggacggcaacgccggtctactggcagagccccaaattgccatgttctgtggaagactcaatatgcacatgaatgttcaaaatggcaagtgggactctgatccttctggcactaagacttgtatcgatactaaagaaggcatactgcaatactgtcaagaagtctacccggagctgcagatcactaacgtggtggaggctaatcagccagttactattcagaactggtgcaagcgcggacgaaagcagtgcaagacccatccccactttgtgatcccatacagatgcctcgtcggtgaatttgtgtccgacgctctgttagtgcccgacaaatgcaagtttcttcaccaggaaagaatggacgtatgcgagacacacctgcactggcacacagtggcaaaggagacgtgcagtgagaagtctaccaacctccacgactatggaatgttgctgccttgtggcattgataagttccggggtgttgaattcgtatgctgtcctctggccgaggagagcgataatgtggacagtgcagacgcggaggaagacgattcagacgtctggtggggtggcgctgacacagactacgcggatgggtccgaagacaaggtggtggaagtcgcggaagaagaggaggtggcagaagtcgaggaggaggaggccgacgacgacgaggatgacgaggacggtgacgaagtcgaagaagaagccgaagaaccttatgaagaggctaccgagagaacaacaagtatcgccaccacaactactactactaccgagtccgtggaggaagttgtgagggtgcctacgacagccgcatcaactccggacgccgtggacaagtatctggaaacacccggtgatgagaacgagcacgcacatttccagaaggccaaagaacgattagaggcaaaacatcgcgagcgcatgagccaagtgatgagggaatgggaagaagctgagcggcaggctaaaaacctgcccaaggcagacaaaaaagctgtcatacagcactttcaggagaaggtggagtctctcgagcaggaggctgccaacgagcgccagcaactcgtggaaactcatatggctcgggtcgaggcaatgcttaatgaccggcgacggttggctctggagaattacatcactgctttacaggcagtgcctcctaggccaaggcacgtgtttaatatgctgaaaaagtacgtccgcgctgagcagaaagatagacagcacacgcttaagcatttcgaacatgttcgaatggtcgacccaaagaaggccgcacaaattaggtcacaggttatgacacacttgcgggtcatctatgaaaggatgaaccagtcattgtctctactctacaatgtgcctgcagtcgccgaagaaatccaggatgaggtggatgagctgttacagaaggagcaaaattacagcgacgatgttttggcgaacatgattagcgaacccagaatcagctacgggaacgacgcgctcatgcccagtcttaccgagacaaaaactacggtggaactattgcccgtaaatggagagttttccctcgacgaccttcagccttggcattcattcggggcagattctgtcccagccaacacagagaatgaagtggaaccagtcgatgcgcgacctgcagcagaccgaggtctgaccacaaggccgggtagtggactgaccaacatcaagaccgaggagatttcggaagttaagatggatgccgagttccgccacgattcgggatacgaggtgcatcatcaaaaactggtttttttcgccgaggacgttgggagtaacaaaggcgcaatcattgggttgatggtggggggagtggttatagcaacagtgatagttattacccttgtcatgcttaagaagaaacaatatacaagcatccaccacggggtcgtggaagtggatgccgctgtgacacctgaagaacggcacctgtccaaaatgcaacaaaacggttacgagaacccaacttacaagttcttcgagcagatgcagaattag

SEQ ID NO: 214266 - DNA, 1920 bp, synthetic construct
  misc_feature 1..1920: note = Description of Artificial Sequence: Synthetic coding sequence
  source 1..1920: mol_type = other DNA
atgctgccagggctcgccttactgttgctcgccgcatggaccgcacgggcactggaggtgtatcccgaactgcaaattactaatgttgtagaagcaaatcagcctgtgaccatccaaaattggtgtaagcggggacggaaacagtgtaagacacacccgcatttcgtgatcccatacagatgtctggttggcgagtttgtgtctgacgctttgctggtccctgacaagtgtaagttcttgcaccaagagagaatggatgtctgcgagacccacctccattggcacacagtggcaaaggagacctgcagtgaaaagtctacgaatttgcatgattatggaatgctacttccttgtgggattgacaaatttcgcggtgttgagtttgtttgttgtcctctggcagaggaatctgacaacgtagacagcgccgatgcagaggaggacgacagtgatgtttggtgggggggagcagataccgattatgccgacggctccgaagataaggtggtggaagtcgccgaggaggaagaggtcgccgaggtcgaagaagaagaggctgatgacgacgaggacgatgaagatggggacgaagtcgaggaagaggccgaagaaccatacgaggaagccactgaaagaaccacttctatcgccacaacaactaccacgacaactgagtctgtggaggaagtggtgagggtcccaaccacagctgccagtactccggatgcagttgacaagtacctggagacaccaggcgacgagaatgagcacgcccactttcagaaggcaaaggagcgtttagaggctaagcatagggagcgtatgtctcaagtgatgcgcgagtgggaagaggcagagcggcaggctaaaaacctgcccaaggccgataagaaggctgtgattcagcactttcaagaaaaggtggagtcacttgagcaagaggctgcaaacgagcgccagcagcttgtcgaaactcacatggcgagggtggaagctatgctgaacgacaggcggagactcgctctcgagaattacataacagcacttcaggctgtcccaccccgacccaggcatgtgttcaatatgctcaaaaaatatgtcagagctgagcaaaaggatcggcagcacacacttaagcactttgagcacgtgcgcatggtggaccccaagaaggccgctcaaattaggtcacaggtgatgacccacctcagggtaatatatgagaggatgaaccagagcctgtccctgctctacaacgtgcccgcagtggcagaggaaattcaggatgaagtcgatgaactgttacagaaggaacagaactacagcgacgatgtactcgcgaacatgatctcggagcctcggatttcctatgggaatgacgcccttatgccctctctgacagagactaagaccacagtcgagttgcttcccgtgaatggagagttctctctggacgatctgcagccctggcacagcttcggggcagactccgtgcctgctaacacagaaaacgaagtggagccagttgacgccagacctgctgccgaccgtggcctgaccacaagacctggatcaggtctgacaaatattaaaaccgaagagatttcagaggtgaagatggacgccgagttcagacacgacagcgggtacgaggtgcaccatcagaaactagtgttctttgcagaagacgtcggcagtaacaagggagcgattatcggattaatggttggaggagtggttatcgcaaccgtgattgtgattacacttgtgatgctgaagaagaaacagtatacttctatacaccatggggttgttgaagtcgacgctgctgtcacacctgaagagagacatttaagcaaaatgcagcagaacggttacgagaatcccacctataaatttttcgaacagatgcagaattag

SEQ ID NO: 214267 - DNA, 2256 bp, synthetic construct
  misc_feature 1..2256: note = Description of Artificial Sequence: Synthetic coding sequence
  source 1..2256: mol_type = other DNA
atgctccctggtctcgccttgctattgctggcagcctggacggcgagggccctggaggtgcccaccgacgggaatgcaggcttactggccgaaccccaaatagcgatgttctgtggccgattgaatatgcacatgaacgtgcagaacggaaaatgggactccgaccctagcgggactaagacctgcatcgacactaaggagggcatattgcagtattgccaggaggtctaccctgagctacagatcactaatgtggtggaggccaaccagcctgttacaatccagaactggtgcaagcgcggacgcaagcagtgcaagacacatccacattttgtgatcccttataggtgtctggttggcgagttcgtctcagatgcgctccttgtgcccgataaatgcaagttcctgcatcaggaacgcatggacgtctgcgagacccatcttcattggcacaccgttgccaaggaaacctgttcagagaagagcaccaatcttcacgattatggcatgctgttgccatgtgggatcgataagtttcgaggagtggaatttgtgtgttgcccgctggcagaggagagcgacaatgtggactcggctgatgccgaggaagacgatagcgacgtctggtggggcggagcggatactgattatgcagacgggtcagaagataaggtcgtggaggtggccgaggaggaggaagtagccgaagtcgaggaagaggaggcagatgatgacgaggacgatgaggatggggacgaagtcgaagaagaagcagaggagccctatgaagaggccactgagcgtactaccagtatcgcaaccaccacaactacaacaaccgaatccgtagaggaggtcgtgcgtgaggtgtgctccgaacaggccgaaacagggccatgccgagcaatgatttcaagatggtactttgatgtgaccgagggaaagtgcgcgccatttttctatggcggttgcggcggaaacaggaacaactttgacaccgaggaatactgtatggctgtgtgcgggtctgctatccctaccactgcagcctccacaccagacgctgtcgataagtacctggagacacccggagatgagaacgaacatgcccacttccagaaagcgaaggagagactggaagcaaaacaccgggaaagaatgtcacaggtgatgcgggagtgggaggaggctgaaagacaagccaagaatctgcctaaggcagacaagaaagcagtcatccagcacttccaggaaaaagtggagtctttagaacaggaggccgcaaatgaacggcagcagctcgtagaaacacatatggcacgggtggaagccatgctgaatgaccgccgaaggctggcgctcgagaattacattactgcccttcaggctgtccctccacgcccaagacacgtgtttaatatgttgaagaaatatgtccgcgcagagcaaaaggatagacagcatacattgaagcacttcgagcatgttagaatggtggaccctaaaaaggcggctcagataaggtcccaggtgatgacacatctgagagttatctatgagcggatgaaccaatctctttccctgctgtacaatgtaccagccgttgcggaggaaattcaagacgaggtcgacgagctattacagaaagaacaaaactattccgacgacgtccttgcaaacatgatcagtgaacccagaatctcttacggtaacgacgctctcatgccgtcgctgactgagaccaagactacagtagaactcctgcctgtcaacggtgagttttctctggatgacttgcagccctggcacagcttcggggcagacagcgttcccgctaataccgagaacgaagtggagcccgtggacgctcgcccagccgctgaccggggactaaccacaagaccgggttccggccttaccaatatcaaaaccgaagaaatttcagaggtcaagatggacgctgaatttcggcatgattcgggctacgaggttcaccatcagaagcttgttttttttgctgaggacgtcggtagcaataaaggggctattattggtctgatggttgggggagtcgtaattgcaacagtcatcgtcatcaccctagtgatgctcaagaaaaagcagtatacctccatccaccacggagttgtcgaggtggacgccgctgtaactccagaggagagacacttatccaaaatgcagcaaaatggctatgaaaatcctacttataaattttttgaacagatgcagaattag

SEQ ID NO: 214268 - DNA, 2259 bp, synthetic construct
  misc_feature 1..2259: note = Description of Artificial Sequence: Synthetic coding sequence
  source 1..2259: mol_type = other DNA
atgctacctggcttggcgcttctgttattggccgcttggactgctagagctctagaggtgcccaccgatggaaacgcaggcctcttggccgaacctcagattgccatgttctgcggccgactgaacatgcacatgaatgtgcaaaatggtaagtgggattcagacccatcgggaactaagacatgtattgataccaaagaggggattctgcaatattgtcaggaagtgtacccggagctgcagatcacgaatgtggtcgaggccaaccagccagtcaccattcagaattggtgcaagcggggacggaaacagtgtaagacacacccccattttgtcattccataccgctgcctcgtgggcgaattcgtctcagatgccctcctggtcccagataaatgcaaattcctgcaccaggaacgtatggacgtttgtgaaacccacttgcactggcacaccgttgcaaaggaaacctgctctgaaaagtctacaaacttgcacgactatggcatgttgctgccatgcgggattgacaagttccgtggggtcgaattcgtctgctgtcccctcgccgaagagtccgacaacgtggatagtgctgatgcagaggaagacgacagcgacgtctggtggggcggagctgatacggactatgccgatgggagtgaggataaagtagtggaagtcgccgaggaggaggaggtggcggaggtggaggaggaggaggctgacgacgacgaagatgacgaagacggggatgaggttgaggaagaagcagaagagccctacgaggaggccaccgaaagaactactagcattgccactaccaccacgactacaacagaaagcgttgaggaggtggtccgcgaggtctgctcggagcaggcggaaaccggtccttgcagagctatgatctcccggtggtacttcgatgtgactgaaggcaagtgtgctccatttttttatgggggttgtggtggaaacagaaacaattttgatacagaggagtactgcatggctgtctgcggcagcgctatgagtcaaagcctgctcaaaacgacccaggaaccactcgccagagatccagtaaagctccctactacagcagcttcgaccccggacgcggtggataaatacctagagacacctggagacgagaacgaacacgcacatttccaaaaggcaaaggaaaggctcgaagccaagcaccgtgaacggatgtcacaggtgatgcgcgaatgggaagaggctgagagacaggctaaaaacctgcccaaagcggacaagaaagcggttatccagcactttcaggagaaggtcgaatcgctcgagcaagaagctgccaacgaacggcaacagctcgtcgaaacccatatggctagagtcgaggctatgctgaatgaccggaggcggttggctctcgagaattacatcactgctttgcaagccgtgccccctcggcctaggcacgtttttaatatgctcaagaagtatgtgagggcagaacaaaaggacaggcagcatacccttaaacactttgaacacgtccggatggtcgatccaaagaaggcagcacagattaggtcacaggtgatgactcatctgagagtgatctatgaaaggatgaaccaatctttgagcctactatacaacgtcccggcagtagcggaggagattcaggatgaggtggacgaactcctccaaaaagaacaaaactattcagatgacgtgctggccaatatgatctcagaacccaggatatcatacggcaacgacgcccttatgccaagcctgactgaaactaaaactacagtcgagctactgcccgtcaatggcgaatttagtctggacgacctgcagccttggcatagcttcggtgcggattccgtccctgccaacaccgaaaatgagggctcaggtctaaccaatatcaagaccgaagagatcagtgaagttaaaatggacgcagagttccgccacgatagcggttatgaagttcatcatcagaaactagtttttttcgccgaagatgtcggctccaacaagggagcgatcatcggcctcatggtggggggtgtcgttatcgctacagtcattgtcattaccctcgtcatgttgaaaaaaaaacagtacacgagcattcaccacggggtggtggaggttgatgccgcagtgaccccggaggagcgccacttgagtaaaatgcagcagaatgggtacgaaaaccccacttataagttctttgaacagatgcaaaattag

SEQ ID NO: 214269 - DNA, 2145 bp, synthetic construct
  misc_feature 1..2145: note = Description of Artificial Sequence: Synthetic coding sequence
  source 1..2145: mol_type = other DNA
atgctcccaggattggctcttctgctcttggctgcgtggactgcgagagcactggaagtgccaaccgacggaaatgcagggttactagccgaaccccagatagctatgttctgcggtcggttgaatatgcatatgaacgtccagaacggaaagtgggattccgatccatctggaactaaaacgtgtatcgataccaaggagggtatactgcagtactgccaggaggtgtaccccgaattacagattacaaatgttgtagaggctaatcagccggtgacgatccagaactggtgtaaaaggggacggaaacaatgcaagacgcatccccactttgttattccttatagatgtcttgtcggggagttcgtgtcagatgcattgctcgtgcccgataagtgcaagttccttcaccaggagcgcatggacgtgtgtgagactcacctacattggcatactgttgccaaagaaacctgcagcgaaaagagcactaatctacacgattacggcatgctgctaccgtgtgggattgataaatttagaggagtggagttcgtttgttgccctctggccgaagagtccgacaacgtggactctgccgatgccgaggaagacgattcagacgtttggtggggaggggcagacaccgattacgccgacggatcagaggataaagtggtggaggtagcagaggaggaggaagtggccgaagtcgaggaggaggaagcagatgatgacgaagatgacgaggacggcgacgaggtggaggaagaagccgaggagccatacgaggaggctacagaaaggaccaccagcatagcaaccactaccactacaacaaccgaaagcgtggaagaagtcgtccgggtgtcccaatctttgttgaagaccactcaggaaccactggcacgcgacccggtgaaattacccactactgctgcttctactcctgacgccgtcgacaaatacctcgagactcccggagacgaaaatgagcatgctcacttccagaaggccaaagaaaggctcgaagccaaacatagggagagaatgtcccaggtgatgagagagtgggaggaagccgagaggcaagctaagaatttacccaaggccgataagaaggcagtcattcaacacttccaagagaaggtggaaagcctggagcaggaagccgcaaacgagcgtcagcagctggtcgagactcatatggccagggtggaagccatgctgaatgatcgccgtcgcctggcattagagaattacattacagccctgcaagcagtgccacccagacctcgacatgtgtttaacatgttaaaaaaatatgtgcgggctgagcagaaggatcgtcagcacacactgaagcacttcgaacacgtccgcatggtggatcctaagaaagccgcacaaattagatcccaggtcatgacgcacttgcgggtgatttacgagaggatgaatcaaagtctcagtcttctgtacaatgtcccagccgtcgctgaagagatccaggatgaggtggacgagcttttacagaaggaacagaattactccgatgatgttcttgccaacatgattagcgagccgcgaatttcatatggaaatgatgccctgatgccatctctgaccgaaacaaaaactaccgtcgagctcctgcctgtcaatggagagttttccctggatgacttacaaccttggcacagtttcggcgcagactctgtccccgctaatactgaaaacgaagtggaacctgtggacgccagacctgccgctgaccgcggattgacgacaaggccaggttccggactgactaacatcaagacagaggagatctcggaagttaaaatggatgccgagtttaggcacgactctggctatgaagtacatcaccagaagctggtctttttcgcagaagacgtgggatcaaacaaaggggctattattggcctcatggttgggggagtggtaatagccaccgtcattgtcatcaccctcgtcatgttgaagaaaaaacagtatacctctatccaccatggcgtggtggaggttgacgccgctgtcactcctgaggaaaggcacctgtcaaaaatgcagcaaaatgggtatgaaaaccccacatacaagtttttcgagcagatgcagaattag

SEQ ID NO: 214270 - DNA, 2145 bp, synthetic construct
  misc_feature 1..2145: note = Description of Artificial Sequence: Synthetic coding sequence
  source 1..2145: mol_type = other DNA
atgctgccagggctggccttactcttgttggcagcttggacagccagggctttggaggtgtatcccgagctgcagattactaacgtggtcgaagcgaatcaacccgtcacaatccagaattggtgtaaacgaggcaggaagcagtgtaaaacccatccccatttcgtcataccatatagatgtctggtcggcgagtttgtctccgatgcgctgttggtgcccgataagtgtaagtttcttcatcaggaaagaatggacgtgtgcgagacccacctgcactggcacacagttgctaaggagacctgttctgaaaaaagcacaaacttgcacgactatggtatgctcttgccctgcggcatcgataaatttagaggggtggaatttgtgtgttgcccactagcggaggaatccgacaatgtcgatagcgccgatgccgaagaagatgatagcgacgtctggtgggggggagccgacactgattatgcggacggaagcgaggataaagtcgtggaggtggctgaagaggaggaggttgcggaggtcgaggaggaagaggccgacgatgacgaggacgatgaggatggtgacgaggtggaagaagaggccgaggagccttacgaagaggcgacagaacgcaccaccagcatcgctaccacaacaaccaccacaacagagtcagtcgaagaagtcgtgcgggaggtgtgcagcgagcaggccgagaccgggccatgtcgggcaatgataagtcggtggtatttcgatgtcaccgaaggcaaatgcgcaccatttttctatggaggctgtggcggaaacaggaataatttcgacaccgaggagtattgcatggcggtgtgcggctccgccatgagccagtctctccttaaaaccactcaggagccacttgccagagatccagtgaaactgccgactaccgcggcatcaacgccagatgccgtggataagtatctggaaacgcccggtgacgaaaatgagcacgcccacttccaaaaggccaaagaacgactggaggcaaaacatagggagaggatgagccaagtgatgagagagtgggaagaggcagaaagacaagcaaagaatctgcccaaagccgacaaaaaggccgtgatccagcattttcaagaaaaggtggagtccctggagcaggaagcagctaacgagaggcagcaactcgttgagacccacatggcccgtgtggaggccatgttaaatgacaggcgcagactggccttggaaaactatattaccgcattgcaagcagtgccgccaaggccgcgacatgtctttaacatgctgaaaaagtacgtccgcgctgaacaaaaggataggcagcacacactaaagcatttcgaacacgtccgcatggtggatccaaagaaggctgcccagattaggagccaggtcatgacccacctcagagtgatctacgagcgcatgaatcagagtttatccctactgtacaatgttccggctgtggctgaggagatccaggacgaggttgatgaactgctgcagaaagagcagaattactccgatgatgtgttggccaatatgatatcagagccgagaataagctatgggaacgacgctctaatgccctccctgacagaaaccaaaaccacagtggaactgcttcctgtgaacggggaattttcacttgatgatcttcaaccttggcatagcttcggtgcagatagcgttcccgcaaacactgagaacgaggtagaaccagtggacgcccgacctgccgcagatcgcggactcactacacgcccaggatccggactcaccaatatcaagaccgaggaaatcagcgaggtgaagatggacgctgaatttcggcatgactccggatatgaggttcaccaccagaagcttgtattcttcgcagaggacgtggggtcaaataagggagctattataggcctcatggtgggtggagtggtgattgcaacggtaattgtgatcactctcgtgatgctcaagaaaaagcaatacacctccatccaccatggcgttgtcgaagtcgatgccgcagtaacaccagaagagcggcacctctccaagatgcaacagaacggctatgagaatccaacatacaaattttttgagcaaatgcagaactag

SEQ ID NO: 214271 - DNA, 2241 bp, synthetic construct
  misc_feature 1..2241: note = Description of Artificial Sequence: Synthetic coding sequence
  source 1..2241: mol_type = other DNA
atggaccaactggaggacctgctagtgctttttatcaactatgtacctactgacggcaacgctggacttctggcagaaccacagattgctatgttttgtggcaggttgaacatgcatatgaacgtgcagaacggaaagtgggacagtgaccctagtgggactaaaacttgtattgataccaaggagggcattctgcaatactgtcaggaggtgtacccggagctgcagatcacaaatgtggttgaagcaaaccagccagtgacaattcagaattggtgtaaacgcggaagaaagcagtgtaagacacacccccatttcgttattccttacagatgcctggttggcgagttcgtctctgacgccctgctggtccccgacaaatgtaagtttttacaccaggaaagaatggacgtctgtgagacccatctccactggcacactgtggcaaaagagacctgttccgaaaagtcaaccaacttgcacgactacggcatgttgctcccatgcggcatcgacaagttccgtggtgttgaatttgtctgctgccctctcgccgaggaaagcgataatgtcgatagcgcagacgccgaagaggatgatagtgacgtttggtggggaggcgctgatactgactacgctgacgggagcgaagacaaggttgtggaagtggcggaggaggaggaggtcgccgaggttgaggaggaagaggcggatgatgatgaggatgacgaagatggagatgaggtggaagaagaagctgaggagccttatgaagaagcaacggaacgaaccacgtctattgcaacaaccacgactaccactaccgaatccgtcgaagaagttgtccgagaagtctgttcagaacaggccgagactggcccttgtcgtgcgatgatcagtcggtggtacttcgacgtaacagagggcaagtgtgctccattcttctatggcggatgtgggggaaacagaaataacttcgacactgaggaatattgtatggcagtgtgtggctcagccattccaaccacagctgcgagtacacctgatgcagtggataaatatctcgagacccccggagacgagaatgaacacgcacactttcagaaagccaaagagagactcgaagccaaacatagggagcggatgtcccaggtcatgcgtgagtgggaggaggctgagaggcaagccaaaaatttacccaaagctgacaagaaagccgtaatccagcacttccaagaaaaggtggagtcgttggaacaggaagccgcaaacgagaggcagcaacttgtggaaacccatatggctcgtgttgaggccatgctgaatgacaggaggagactagccctggagaactacatcactgctttgcaggcagtgcctccgagacccagacacgtgttcaacatgctcaaaaagtatgtgagagccgaacagaaggatcgacagcacacgctcaagcactttgagcacgttagaatggtggatcccaaaaaggctgcccagattagaagccaagtgatgacacacctgagagtgatatacgagcgtatgaaccaatctttgtcacttctgtacaacgtcccggctgtagcagaggagattcaggacgaggtagatgagctgctccagaaagagcagaattatagcgatgatgtactcgcgaacatgatctctgagccacgaatatcatacgggaatgacgcccttatgcctagtttgaccgagactaagacaaccgtggagctgctgcccgtgaatggggaatttagtctggacgacttgcaaccgtggcactccttcggagcagactccgtaccagccaatacagaaaacgaggtcgagcctgtggatgcgaggccagcggcagacaggggactgacaacccggcctggttcaggtcttaccaatataaagaccgaggaaatcagcgaggttaagatggatgccgaatttcgtcacgactctggctatgaagtgcaccaccaaaagctggtgttctttgcagaggacgttggttctaataaaggcgctatcattgggctcatggtgggcggagtggtgatagccactgttattgtgatcaccctggtcatgctaaagaagaaacagtacacctctatccaccacggcgtggtcgaagtcgatgctgcggtgacccctgaggagaggcacttgtcaaagatgcagcagaacggctatgagaaccctacctacaagttcttcgagcagatgcagaattag

SEQ ID NO: 214272 - DNA, 1983 bp, synthetic construct
  misc_feature 1..1983: note = Description of Artificial Sequence: Synthetic coding sequence
  source 1..1983: mol_type = other DNA
atgttttgtggacgtttgaacatgcacatgaatgtccaaaacgggaagtgggatagtgacccatccggcaccaaaacctgtatcgatacaaaggagggcattctgcagtactgccaggaagtatatccagagttgcaaattaccaacgtcgttgaggcaaatcagccagtgactattcagaactggtgtaagcggggacgtaaacaatgtaagacgcacccacacttcgtaataccataccgctgccttgtgggtgaatttgtgtccgatgccctcctcgtgccagacaaatgtaagttcctgcaccaagaaagaatggatgtttgtgagacacatctgcattggcacaccgttgcgaaggagacatgctccgaaaagagcaccaatctgcacgattacggaatgctgctaccctgcggaattgataaatttaggggcgtggaatttgtgtgctgccctctcgcagaggagtcagacaacgttgactctgctgacgccgaggaggatgactccgacgtctggtggggaggcgctgataccgattatgccgatggatccgaggacaaagtggtagaggttgccgaagaagaggaggtggcagaagtcgaagaggaggaagctgacgacgatgaggacgacgaggacggagatgaggttgaagaggaggcagaggagccatacgaggaagccactgagaggaccacaagcattgcaacgaccaccacaaccactacggagtctgtagaggaagtcgtgcgagtgccaacaaccgctgcaagtacacccgatgctgtggataagtaccttgagacccccggagatgaaaacgaacatgctcacttccagaaagctaaagaaaggttagaagccaaacatcgagaacggatgagccaagttatgagggagtgggaagaggctgaaaggcaggccaaaaaccttccaaaggccgataaaaaagcagtaatccagcattttcaggaaaaggtcgagagcctggagcaagaagccgctaacgagagacagcaattggtggaaactcatatggccagagtcgaggccatgctgaacgatcgtcggaggctggccctcgaaaattacataactgctctgcaagccgtcccgccacggccacgccacgtcttcaatatgcttaagaaatacgtcagggccgagcagaaggatcggcagcacacattgaagcatttcgaacacgtgcggatggtcgatcctaaaaaagccgcacaaatccgctcacaagtaatgactcacttgagagtcatttacgagcggatgaatcagagcctgtcccttttatacaacgtgccagcagtggccgaggaaatccaggacgaggtggatgagttgctgcaaaaggaacagaactactctgatgacgtgctagccaatatgatctctgagcctaggatctcttacggaaacgatgctctgatgccctccttgactgaaacaaagacaacggttgagctccttccagtaaacggcgagttctctttggacgaccttcagccgtggcactcttttggcgcagattctgttccagccaacacagaaaacgaagtcgagccggtagatgctagaccagcagccgacagagggctgaccacacgccctgggtccggcctgacaaatataaaaaccgaggagatcagcgaagtgaaaatggacgccgagttccgccacgacagtgggtacgaggtgcaccaccagaagcttgtcttttttgctgaggatgtcggatcgaataagggagccattatcggcctaatggttggcggagtggttatcgctaccgtgatagtgattaccctggttatgctcaaaaaaaaacagtatactagcatccaccacggggtcgtggaagtggatgccgcagtgaccccagaagaacgtcacctgtccaagatgcagcagaacgggtacgaaaacccgacttataagtttttcgaacaaatgcagaattag

SEQ ID NO: 214273 - DNA, 789 bp, synthetic construct
  misc_feature 1..789: note = Description of Artificial Sequence: Synthetic coding sequence
  source 1..789: mol_type = other DNA
atgagggtgcaggacacatcaggaacatattattggcacattccaaccgggaccacccagtgggaacctccagggcgtgccagcccttcccagggctccagcccccaggaggagtcccagctgacttggacaggattcgcccacggagagggtttcgaggacggggagttctggaaagatgagccctccgatgaagctcccatggaactgggcctcaaggagcctgaggagggcactctaacctttccggctcagagtctgagtcccgagccacttccgcaggaggaggagaaactgccgccacgaaacaccaatccagggattaagtgtttcgcagtccgttcgctgggttgggtcgagatgacagaagaggagctggccccaggacgatctagtgtggccgtgaataattgtatccggcaactttcatatcacaagaataatctgcatgaccctatgagcggagggtggggagagggtaaagatcttctgctccagctcgaggatgagacactgaagctggtggagccccagagccaggctctcctgcacgcccagcctatcatctccatccgcgtctggggcgtgggccgtgattccggtcgggatttcgcatacgtggcccgagataaactgacacagatgctgaagtgtcacgtgttccgctgtgaagcgccagccaaaaacatcgccactagcctgcacgagatctgtagcaaagcaaggccacctccacttcctgggctcgtcgccactttcgctcttcagggctgtggatgggggcattag

SEQ ID NO: 214274 - DNA, 1482 bp, synthetic construct
  misc_feature 1..1482: note = Description of Artificial Sequence: Synthetic coding sequence
  source 1..1482: mol_type = other DNA
atgctgggcaaagattatatgttagccattatcctggtgaattgtgatgacgatctgtggggcgatcattccctcgaggtggaggctgggctgcctcctggatggcgcaagatccacgatgctgcaggaacctattattggcatgtcccctcggggagcacccagtggcagcgccctacttgggagctgggggacgcagaggacccagggacaggaactgagggcatctggggcctacggcctcccaaaggccgttctttctcctctttagagagctccttagatcggtccaacagcttgtcatggtatggcggagagtcctacatccagtccatggaacctggagcaaagtgctttgcagtacggagcttgggctgggtagaagtccccgaggaagatctggccccaggcaaatcaagcatcgccgtcaataattgcatccagcaattggcccagacccggagtcgcagccagccaccagacggggcatggggagagggccagaatatgctcatgattcttaagaaggatgccatgagtctagtcaaccctctcgatcactcactgatccactgccagccccttgtgcacatcagggtgtggggtgtcggttctagtaagggacgggactcacccattagtgctcctgccagagattttgcttttgtggcctccgacaaggactcttgcatgttaaaatgtcacgtgttttgttgcgacgtccctgccaaggctatcgcgtccgcccttcacgggctgtgcgctcaaatcctgtcagaaagagtcgaagtcagtggagatgccagctgctgctctccagatccaattagccccgaagacttacctcggcaagttgaattgcttgatgccgtgtctcaggctgcccagaaatatgaagccctgtacatgggaacactccccgtcacgaaggcgatggggatggatgtattgaacgaggctattggcactctgaccgcccgaggagaccgtaatgcttgggtgcccaccatgctctccgtgagtgatagcctaatgacagcccaccccatccaggcagaggcatccacggaggaagagccactgtggcaatgtccggttcgtttggtgacgttcattggggttggcagagacccccacaccttcggcctgatcgctgatctaggccgacagtcattccagtgtgccgctttctggtgtcagcctcacgcgggagggctgtctgaagccgtgcaggctgcctgcatggtgcagtatcagaaatgcctcgtggctagcgcagctcgaggcaaagcttggggcgcacaggctagggcaagactccgcctgaagaggactagctcgatggactcgcctggcggacccctccctcttcctttgctcaaaggcggagtcggcggtgctggcgctacaccacgtaagcgtggtgtgttctcttttctggacgcttttcgcctgaagccttccctcctgcatatgccgtag

SEQ ID NO: 214275 - DNA, 1377 bp, synthetic construct
  misc_feature 1..1377: note = Description of Artificial Sequence: Synthetic coding sequence
  source 1..1377: mol_type = other DNA
atgattactaagacccacaaagttgatttaggcttgccagagaaaaaaaagaagaaaaaagttgttaaggagccagagactagatacagtgtccttaacaacgacgactactttgccgacgtgtctccactccgcgcaacaagtcctagtaaaagcgttgctcacggccaggccccagaaatgcctctggtgaagaaaaagaagaagaaaaagaaaggggtctcaacattgtgtgaggagcatgtggagccagagacgaccctacctgccagaagaactgagaaatctcccagccttcgaaagcaagtttttggccacctggagtttttgtcaggcgagaaaaagaataagaagtctcctctcgccatgtcccacgctagtggcgtgaagaccagtcccgatccacgtcagggggaggaagaaactcgagtggggaagaaattgaagaagcacaaaaaggaaaagaagggagcccaggaccctactgctttttccgttcaagatccatggttctgcgaagcccgtgaggctcgcgatgttggcgacacatgctcagttggaaagaaggacgaagagcaggccgctctgggccagaagaggaagcgtaagtcaccaagggagcataacggcaaagtcaaaaaaaagaaaaaaatccatcaggaaggagacgcactgcctggtcactctaagcctagccgttctatggagagctcccccaggaaggggagcaaaaaaaaacctgtcaaagtggaggcccctgagtacattcccatttccgatgacccaaaggcgtctgccaaaaagaaaatgaagtccaaaaagaaggtcgaacagccagtcatagaggaaccagcactgaagagaaagaagaaaaagaagcgcaaagagagtggtgttgccggtgatccatggaaagaagagacagataccgaccttgaggtggtgctcgaaaagaaggggaacatggacgaagcccatatagatcaggtccgcagaaaagcattgcaggaagagatagatcgggagagtggcaagaccgaggcaagcgaaacaagaaaatggactggaacccagttcggtcagtgggacactgccggtttcgagaacgaggaccaaaagttgaagtttctaagactaatggggggttttaagaatctgagtcccagcttcagcaggcccgcatcgaccatcgcacggccaaatatggccctgggaaagaaggccgcagattccctgcagcagaacttgcagcgcgattacgaccgcgcaatgtcttggaagtattcaagaggtgccggattgggcttcagcacggctccaaataagatcttttatatagatcgaaatgcctccaaatccgttaaactggaggattag

SEQ ID NO: 214276 - DNA, 2214 bp, synthetic construct
  misc_feature 1..2214: note = Description of Artificial Sequence: Synthetic coding sequence
  source 1..2214: mol_type = other DNA
atggcccacagaaagctggagagcgtgggatcagggatgctggaccatagggtgagacccggtcccgtgccccactcccaggaacctgagagtgaggatatggaactgccattggaagggtacgtgcccgaaggcctggagttggcagcactgcgccctgagagtccagcacctgaagaacaggaatgccacaatcattctcccgatggcgactcctccagcgactatgtcaacaacactagcgaggaagaagattacgatgaaggactccccgaagaagaagaagggatcacttactacattaggtattgtcccgaagacgatagttatttggagggaatggattgcaatggggaagaatatcttgctcacagtgcacatcccgtcgacacagacgaatgccaggaggccgttgaagaatggactgatagtgccggtcctcatccgcacggccacgaagccgaagggagccaggattatcccgatggtcagcttccaatccccgaagacgaaccttccgtcctggaggcccatgaccaggaggaggatggacactactgcgcctcaaaggagggctaccaggactattatcctgaagaggcaaacggtaacacaggagcctcaccctaccgactgagaaggggagatggagacctagaggatcaggaggaagacatcgaccaaattgttgccgagataaaaatgtccttatccatgacatctattacctccgccagcgaagcctccccggaacacggacccgaaccaggcccagaggactctgtcgaagcctgccccccaattaaagcaagttgttctccgagccggcatgaagcacggccaaagtctctcaacctgctgccagaagccaaacatcctggcgacccccagagaggattcaagccaaagacaagaacacccgaagaaagattgaagtggccccacgagcaggtgtgcaatggactggaacagccccgtaagcagcagcggtccgaccttaatggaccagtagacaacaacaacatccctgaaaccaaaaaggtagcgtcttttccaagctttgttgccgtgcccggtccatgcgagccagaggatctgattgacggtatcatcttcgcagccaactacctgggttctacacagctactatccgaaaggaatcctagtaagaacatccgaatgatgcaggcccaggaagctgtgagtcgagtaaaaaattcggagggagatgctcagacgcttactgaggtggatctctttatctccacccagcgtattaaggttctaaatgctgacacacaggagaccatgatggaccacgcgctgcggacaatttcctatatagccgatatcgggaatattgttgttctgatggccaggaggcgcatgccaaggtctgctagccaggattgcatcgaaaccaccccaggtgctcaagaaggaaagaaacagtacaaaatgatctgccatgtgttcgaatcggaggacgcgcaactgatagctcagtcaattggacaagccttctcagtggcctatcaggaattcctgcgggcaaatggcatcaaccctgaagacctgagccagaaggagtacagcgacattatcaacactcaagagatgtataatgatgatctgatccacttctccaatagcgagaactgtaaggagctacaattggagaagcataagggggagatcctcggagttgtcgtagtggagagcggatggggatccatactcccaaccgtaatactggccaatatgatgaacgggggacctgcggcacgttcgggcaaattgtccataggcgatcagattatgtcaattaacggcacctccctggtcggtttgcctttggctacctgccaaggcatcataaaggggttgaaaaaccagacacaggttaaactgaatatagtttcatgtcctccagtgaccacagtgctgattaagagacccgatttgaaatatcaactaggattctctgttcagaatggtatcatctgctcactgatgcgcggaggcatagcggaaaggggcggagtccgtgtggggcatcggataatcgaaatcaatggtcagagtgtagttgctacggcccacgagaaaatcgtgcaggcattgagtaactctgtgggcgagatccatatgaaaaccatgcccgctgcaatgttccgcctgctcaccggacaagagaccccattgtacatctag

SEQ ID NO: 214277 - DNA, 84 bp, synthetic construct
  misc_feature 1..84: note = Description of Artificial Sequence: Synthetic coding sequence
  source 1..84: mol_type = other DNA
atggcacatcgtaaactggagagtgttggaagtggaatgctcgatcaccgagttcgacctggccctgttccacacagccaatag

SEQ ID NO: 214278 - DNA, 2250 bp, synthetic construct
  misc_feature 1..2250: note = Description of Artificial Sequence: Synthetic coding sequence
  source 1..2250: mol_type = other DNA
atggcgcacagaaaactcgagagtgtaggctctggaatgcttgatcatcgggtgcgcccaggaccagttccgcattctcaggaaccggagagcgaagacatggagctcccgttagaggggtacgttcccgagggcttggagcttgccgcactgagacccgaatccccagctccagaggaacaggaatgccataatcattccccagatggagactcatccagcgattatgtgaacaacacatccgaggaggaagactatgatgaggggttaccagaggaagaagagggtattacgtattatataagatactgcccggaagacgactcctacctcgaggggatggactgtaacggggaagagtacctggctcacagcgcacacccagtcgacaccgacgagtgccaggaggcagtcgaggaatggacggactccgccggtccacatccccatggccatgaggcagaaggatcacaagattatcctgacggtcagctgccaatccctgaggatgagccatccgtattagaagcgcatgaccaggaggaggatgggcactattgcgccagcaaggagggctatcaggattattaccccgaggaggcaaacgggaacactggagcatctccctatcgactcagaaggggggacggggacctggaagatcaagaagaggacatagatcagatcgttgccgagataaagatgtcgctgagcatgacttcaatcacctcggcctcggaggcgagtccagagcacggcccagagcctggcccagaagacagtgtcgaagcatgtcctcccattaaggccagttgttctccttcccgtcatgaagcgagacccaaatcccttaacctgcttcccgaagccaaacacccaggagaccctcagcgaggctttaagcccaaaacacgtaccccggaagaacgcctgaagtggccccatgaacaagtgtgtaacggtttagagcagccaagaaaacaacagagaagcgacctgaacggacccgtggacaataacaacatacccgagactaagaaagtcgcctcatttcccagtttcgtcgcagttcctgggccttgcgagcccgaggacctgattgatggaattatattcgccgctaattacttggggagcacacagctgctctccgaaaggaacccctctaaaaacatccggatgatgcaggcccaggaagcagtgagtagggtgaagcgcatgcagaaggccgcaaaaatcaagaagaaggccaattccgagggggacgcccagaccctgacagaggtggatttgttcatttctactcagagaatcaaggtgttgaacgccgatactcaagaaactatgatggaccatgcactgagaaccattagctacatcgccgatatcggcaatatcgtggtcttaatggccagacgcagaatgccccgttcagcaagccaggactgtatcgagactacgcccggagctcaggaaggtaaaaagcagtacaaaatgatctgccacgtgttcgaatcggaagatgcccagctgatcgctcagtccatagggcaggcattcagcgtggcttaccaggagtttctacgcgctaatggtattaaccccgaggacttgtctcagaaggaatactctgacattatcaatacccaggagatgtacaacgatgatttgattcacttcagtaactccgagaattgcaaagagttgcagctggaaaaacacaaaggtgaaatactgggagttgtggtagtggaatccggatggggaagcatcctacccaccgttatccttgcgaatatgatgaatgggggacctgccgctcgttctggcaaattgtctatcggcgaccagattatgtctatcaacggcactagccttgtcggactacctctcgcgacatgtcagggcattattaaggggctcaaaaatcagacgcaagtcaaactgaatattgtctcctgccctcccgtaacaaccgtcctcatcaagcgaccggatctgaaataccagctcggttttagtgttcagaacggcattatctgttctctaatgcggggtggcatagctgagcgtgggggagttagagtggggcataggataatcgagattaatggccagagcgtggtggcaactgcccatgagaagattgtgcaggcgctgtctaactcagttggcgagatacatatgaaaacaatgcccgctgcaatgtttcgactgctcaccgggcaggaaacaccactttatatttag

SEQ ID NO: 214279 - DNA, 2214 bp, synthetic construct
  misc_feature 1..2214: note = Description of Artificial Sequence: Synthetic coding sequence
  source 1..2214: mol_type = other DNA
atggcccaccgcaagctggagtctgtgggctcgggaatgcttgaccaccgtgttagaccaggacctgtgccgcactctcaggaaccagagtctgaagacatggaattgcctcttgaggggtatgtgcccgaaggattggagctggctgctctgcgacctgagtcccccgcacctgaggaacaggaatgtcacaatcattcacctgacggggattcatcttctgattacgtgaataatacctcagaagaggaagattacgacgaggggcttcctgaagaagaggaaggtatcacctactatatcagatattgtccagaggatgatagttatctggagggcatggattgtaatggggaggagtacctggcccactctgcgcatcccgtcgacactgatgagtgtcaggaagccgttgaggaatggactgactccgccggacctcacccccacggtcacgaggcagaaggcagtcaggattacccagacggccaactgcccatccccgaagacgagcctagcgtcttagaagcacacgaccaggaggaggacggccattactgcgctagcaaagagggatatcaagattattatccagaggaggcaaacggcaacactggagcttccccctaccgtctcagacgcggagatggcgatctggaagaccaggaagaggacatcgaccagatcgtagcagaaattaagatgagcctgagcatgaccagtataactagtgccagtgaagcctcccccgaacatggacccgagccagggccagaagactcagtggaggcctgtccccctatcaaagcctcttgcagccctagcagacacgaggcgaggccaaaatcccttaacttgctccctgaagcaaaacacccaggcgatccacagcgtggattcaagccaaaaaccagaacccctgaggagagactcaagtggccccatgaacaggtatgtaacggcctggaacagccccgaaaacagcagcgcagtgacctcaacgggcctgttgataacaacaacattcccgaaacaaaaaaggttgcaagcttccccagcttcgtcgcggtacccggtccatgcgaacctgaggatctgatcgatggcattatctttgcggctaactatctgggctccactcagctgctttcagaacgcaacccgagtaaaaatatcaggatgatgcaggctcaagaggccgtttctagggttaagaattcagaaggtgacgcacagacactgactgaggtggacctcttcatatccacacaacgcatcaaggtgctcaacgctgacactcaggagacaatgatggaccacgccctgagaaccatatcgtacatagctgatattggaaatattgtggtattgatggcccgacgcaggatgcctcgaagcgcatctcaagactgcattgaaaccactcccggagctcaagagggcaagaagcagtacaagatgatctgccacgtgttcgaaagcgaagatgcccagctaatcgcacagtctattggtcaggctttcagtgtcgcttatcaggaatttctgcgagcaaatggtatcaatcctgaggatttgagccaaaaggagtattcagacattatcaatactcaggagatgtataacgatgaccttatccacttctctaacagcgagaattgcaaagagctccagctggagaagcacaaaggcgaaatccttggcgtcgtggtcgtagaatctggctgggggtccatactgcctaccgttatcctggctaacatgatgaatggaggtcccgctgccaggagcgggaaactgtccattggggaccagatcatgtccatcaacggtacttccctcgtgggactgcccctcgcaacttgccaagggataattaagggcctgaaaaatcagacgcaggtgaaactgaacatcgtgagctgtccccctgtgaccacggtgctaattaaacggcctgatctgaagtatcagctgggcttcagtgtgcagaacggtatcatatgtagcctcatgagagggggtattgcagagcggggaggagtaagagtgggtcacaggatcatcgagatcaatggacagtcagtcgtggccactgcgcacgagaagattgtgcaggccttgtccaattctgttggtgagatccacatgaagacgatgccggcagctatgttccgactgttaactggacaagaaacccccctttatatctag

SEQ ID NO: 214280 - DNA, 795 bp, synthetic construct
  misc_feature 1..795: note = Description of Artificial Sequence: Synthetic coding sequence
  source 1..795: mol_type = other DNA
atggcgcatcgtaagctcgagtccgtcggtagcggcatgctcgatcatagggtgcgtccgggacctgtgccacattcccaggagcctgagtcagaagacatggaattgccgctggaggggtacgtacctgaaggattagaattggcggcactcaggccagaatcccccgctcccgaggagcaggagtgccataatcactccccagacggagacagctcttccgattacgtgaataacacatccgaggaggaagattatgacgaaggattgccagaggaggaagaagggatcacgtattatattaggtattgtccggaagacgactcttacctggagggaatggactgtaatggcgaggaatacctcgctcactctgcacatccggtcgataccgatgaatgtcaggaagctgtagaagagtggacagactcagccggacctcatcctcacgggcacgaggctgagggatctcaagactatccagacggccagctgccaattccagaagacgagccgtccgtgttggaggcgcacgaccaagaggaggatggccattactgcgctagtaaagagggctatcaggattactaccctgaagaggcgaacggcaacaccggtgcttccccttacaggttgcgcaggggagacggggatttagaggaccaggaggaggatattgatcagattgttgctgagatcaaaatgtctctctcaatgacctcaattactagcgcgtctgaggccagccccgagcacgggccagaacctgggccagaggattccgtcgaggcctag

SEQ ID NO: 214281 - DNA, 2250 bp, synthetic construct
  misc_feature 1..2250: note = Description of Artificial Sequence: Synthetic coding sequence
  source 1..2250: mol_type = other DNA
atggcccacagaaaattagagtcagttggctctggtatgctggatcacagggtaagacctgggcctgtgccccattcccaagaaccagagagtgaagatatggagctgccacttgaagggtacgtgccggagggcttagagctggccgcattaagaccagagtcccctgccccagaagagcaggagtgccacaatcacagccccgacggcgatagctcctccgactacgtgaacaataccagtgaagaggaggactatgatgagggactacccgaggaagaagagggtatcacctactacattagatactgtccagaggatgacagttacttggagggcatggactgcaacggagaggaatatctggcccacagcgctcaccctgttgatacagacgagtgccaggaggccgtcgaggagtggaccgattctgcaggaccacatccacacggccatgaggccgagggaagccaggattatccagatggtcagctgcctatcccagaggacgagccaagcgtgttggaggcacacgaccaagaagaggatgggcattactgtgcctctaaggagggatatcaagattactatccagaagaggctaatggcaataccggggcaagcccctatcggttgcgcagaggtgacggcgacctagaagaccaggaggaagacattgaccagatcgtagcagagatcaaaatgagtctctcaatgacgtccattacctccgcttcagaagcctctcccgagcatggccctgagccgggacccgaagacagtgtcgaggcatgcccacctatcaaagcttcttgttccccctcgcgacacgaagcccgtcccaagagcctgaatctccttcccgaggcaaagcatccaggcgacccacagaggggcttcaagcctaaaacgcggacgcctgaagaaaggctcaagtggccccatgagcaggtctgcaacggactggagcaacctagaaagcaacagcggtcggacctcaatgggcctgttgacaataataacattcccgaaaccaagaaggtggcatctttcccgtctttcgtggccgtccctggcccttgcgagcccgaagaccttatagacgggatcatcttcgccgcaaattacctagggtctacccaactactcagcgagcggaacccctccaagaatattaggatgatgcaggcccaagaggccgtctctcgggtaaagagaatgcagaaagccgcaaaaattaaaaaaaaagcaaactccgagggcgatgcacagaccctcactgaagtggacctgtttatctccacccagcgaatcaaagtactgaacgctgatacacaggaaacaatgatggatcacgccctgcggaccatttcctatattgctgacattggaaatatcgtggtgctgatggctagacggagaatgccaagatccgccagtcaggactgtatcgaaactactccaggtgctcaggaggggaaaaagcaatacaagatgatatgtcatgtgttcgagagtgaagacgcccagctgatcgctcagtctatcggacaggccttcagcgtcgcttaccaggaattcttgcgggcaaacggcattaatcctgaagatttgagccaaaaggagtactcagatatcatcaatactcaagaaatgtacaatgatgatcttatacacttttccaactccgagaactgtaaagagctacagcttgaaaagcacaaaggggagatattaggggtggtcgtggtagagagtggctggggttccatcctgccaactgtgatactggcaaacatgatgaatggaggacccgctgcaagaagcggaaagctctctatcggagatcagataatgtccatcaacggaaccagcctcgtaggcctgcctctggctacctgtcagggaattattaaagggctgaaaaaccaaactcaagtgaagctcaatatcgtgagctgtccacctgtcacaactgtacttataaaaaggcctgatctgaaataccaactcggattctctgtacagaacggaatcatctgcagtctgatgaggggaggcatcgccgagagggggggagtgcgcgtgggccacagaatcatagagatcaatggccagtctgtcgttgccaccgcccatgaaaagattgtgcaggccctgagcaattctgtgggagagattcacatgaaaacgatgcctgccgcaatgttcagactcctgacgggccaagagacacccctctatatctag

SEQ ID NO: 214282 - DNA, 213 bp, synthetic construct
  misc_feature 1..213: note = Description of Artificial Sequence: Synthetic coding sequence
  source 1..213: mol_type = other DNA
atggcccatcgtaagttggagagcgtgggcagcggaatgctggatcatcgggtccggcctgggccagtgccgcactcccaggagcccgagagcgaggacatggagctgcctcttgaagggtatgtgccggagggtttagagctggcagcacttaggcccgagagccccgcacccgaagagcaggaatgccataatcatagcccagacgggtag

SEQ ID NO: 214283 - DNA, 15 bp, synthetic construct
  misc_feature 1..15: note = Description of Artificial Sequence: Synthetic coding sequence
  source 1..15: mol_type = other DNA
atggctcacagatag

SEQ ID NO: 214284 - DNA, 339 bp, synthetic construct
  misc_feature 1..339: note = Description of Artificial Sequence: Synthetic coding sequence
  source 1..339: mol_type = other DNA
atggcccaccggaagctggagtccgtgggcagcggaatgctggatcatcgggttcggcctggcccagtgccccacagccaagagccggaaagtgaagacatggaattgcccctagagggctacgttcctgaagggttagagctagcagctctgaggcccgagtcgcctgccccagaagagcaggagtgtcataaccattcccctgacggagatagctcatcagactatgttaataataccagtgaggaggaggactacgacgagggcctacccgaggaagaagaaggtattacctactatattcggtactgccccgaggatgattcatatttggaatag

SEQ ID NO: 214285 - DNA, 2250 bp, synthetic construct
  misc_feature 1..2250: note = Description of Artificial Sequence: Synthetic coding sequence
  source 1..2250: mol_type = other DNA
atggcccaccggaagttggaaagcgtgggcagcggcatgctcgatcacagagtccgcccaggacccgtgccccatagccaggagccagaatctgaggacatggagctccctctcgaggggtatgtacccgagggcctggagctcgccgctctgaggcccgaaagccccgctcccgaagaacaggagtgtcacaatcacagccctgatggggattcgtcaagcgattatgtgaacaatacttcagaggaagaggactacgatgagggcctgcctgaggaggaagagggaatcacctattacatccgttattgtcccgaggacgacagctatctcgaggggatggactgtaacggagaggagtacctagcacacagcgcgcaccccgtggataccgacgaatgtcaggaggctgtagaggagtggacagattccgcaggaccgcaccctcacggccacgaggctgaggggtctcaggattacccagacggtcaactgcccatacctgaggacgagccatcagtgcttgaggctcacgatcaggaggaggatggtcattactgtgcctctaaagagggataccaagattactatcctgaagaagccaacggcaacaccggagcctccccctaccgccttaggcggggtgatggagacttggaggatcaggaagaggacattgaccagattgtagcagagatcaaaatgtccctcagtatgacctcaatcactagtgcatctgaggccagcccagaacatggtcccgaacccggaccagaagactctgtcgaggcatgcccaccaataaaggcctcctgttcacctagcaggcacgaagcccgtccgaagagcctcaatctgcttcccgaggccaagcaccccggagacccacaacgcggattcaaacccaagacaaggacccctgaagaaaggctgaagtggccgcatgaacaggtatgtaacgggctcgaacaacctagaaagcagcaaagaagcgatttaaacggccctgttgacaataacaatattcccgagaccaaaaaggttgcatctttcccatcttttgttgccgtgcccggtccctgtgagcctgaggacctgatcgatggtatcatcttcgcagcaaattacctgggctccacccagttgctcagcgaacggaatccgtcaaaaaatattcgtatgatgcaggcacaagaagctgtgtcaagagttaaaagaatgcagaaagcggctaaaattaagaagaaagcaaatagcgaaggtgatgctcagactctgaccgaagttgacctgttcatctccactcaacgcatcaaggtgctaaacgcagatacccaagagactatgatggaccatgcgctgaggacaatcagttacatagcagacatcggcaatatagtagttctcatggctcgcagacggatgcccaggtcagcctcacaggactgtatcgaaaccacccctggtgcccaggaggggaagaaacagtacaagatgatctgccatgtatttgaatctgaagacgcccaactgattgcccagtcaatcggacaggctttcagtgtggcataccaggagtttctgcgagccaatggaatcaaccctgaggacctctctcagaaagaatactcggatatcattaacacacaagagatgtacaacgacgatctgatccatttcagcaacagcgagaactgcaaagagctacaattagaaaagcataagggagagattttgggtgttgtggtagtcgaatctgggtgggggtctatccttcctacagtcatccttgctaacatgatgaatggcggtccagccgcaagaagtgggaaactctcaattggcgaccagattatgtcaatcaacgggacgtcgctggtggggcttcctcttgcaacttgtcagggcataatcaaaggcctgaagaatcagactcaagtgaaactgaatatcgtatcctgcccacccgtaactactgtgttaattaagaggccagacctgaagtatcagttgggcttcagcgtccagaatgggataatatgttccctgatgagggggggaatcgctgagagaggtggcgtcagagtcggccaccggatcatcgaaatcaatgggcagagtgttgtggcgactgcccatgagaaaatagtgcaggccttgagcaacagcgtgggggaaattcatatgaaaactatgcctgccgctatgtttaggctgctgaccggtcaggagacacccctctatatttag

SEQ ID NO: 214286 - DNA, 2127 bp, synthetic construct
  misc_feature 1..2127: note = Description of Artificial Sequence: Synthetic coding sequence
  source 1..2127: mol_type = other DNA
atgtccgttccaagctcgctctctcagagcgccatcaacgctaattcacatggtgggccagccctgtcactgccactgccactgcatgctgcacataaccagctgttgaacgctaagttacaagccacagctgttgggccaaaagacctacgcagtgccatgggtgagggcggaggcccagagccaggacccgctaatgcgaagtggttgaaggagggacaaaaccagctgcggagagcagctaccgcacacagagatcaaaatcgcaatgtcacgttgacactggcggaggaggcatcccaggagcccgagatggctcccttgggcccaaaaggcctcatccacctgtactctgagctggaactgtctgcccacaacgctgctaatcgaggcctccgcggaccaggcctcataatcagcacccaagagcaagggcctgatgagggggaagaaaaggccgcaggtgaagccgaggaagaggaggaagacgacgatgacgaggaggaggaagaagacttatcctctcctcccggattacccgaacccctcgagtccgtagaagcccctccacgccctcaggccctcacagatgggccacgagaacactccaagtccgcctccctgctgttcggcatgcggaattctgcggcttccgacgaggacagcagctgggctacactatctcaggggagtcccagttacggaagccccgaggacacggattccttctggaatccaaacgcatttgagactgactctgacctaccggctgggtggatgcgtgtgcaagacaccagcggcacctattactggcacattccaaccggtacgactcaatgggaaccccctggccgagcctctccatcccaggggagttccccccaggaagaatcccagcttacctggaccggctttgcccatggggaagggtttgaggatggagaattctggaaggatgaacccagcgacgaggcccctatggagctggggttgaaggagcccgaagaaggaacgctgacctttccagcccagagcctgtcccccgagccactgccccaggaagaagaaaagctgcctccaaggaacaccaaccctggtattaagtgcttcgccgtcaggtcccttgggtgggtggagatgaccgaggaagaactggcgcctgggaggagttccgtggctgtgaataactgcatccgtcagctctcctatcataagaataatttgcacgaccctatgtcaggtgggtggggagagggaaaggatctactgctccagcttgaggacgagactcttaagttggtcgagccacagtctcaggcccttctgcatgcacagcctattatctcgatccgcgtatggggtgttggtcgcgattccggacgcgattttgcatacgtggccagggacaaacttacacaaatgcttaagtgccatgtgttcaggtgcgaggcgccagcaaagaacatcgcaacttcactacacgagatatgcagtaaaatcatggcagaacgcaggaacgccaggtgcctcgtgaacggtcttagtctagatcactctaagctggtcgacgtgccctttcaggtagagttccctgccccaaaaaacgaattagtgcagaagtttcaagtgtactatctgggcaatgtgccagtcgccaaacctgtcggcgttgacgtgattaacggcgcactcgaatcagtgttgtcctctagttctagggagcagtggactccatctcacgtgtcagtggcacccgctaccttaacgatcctccaccagcaaacagaagccgttctgggcgagtgccgggtacgcttcctgagcttcctggccgtcggcagagacgttcatacctttgcgtttataatggctgcgggtccagcaagcttttgttgtcatatgttttggtgtgagccaaacgccgctagcctgagcgaggccgtccaggccgcttgcatgcttagataccagaaatgtcttgacgccagatcacaggctagcacatcatgtttaccggctcctccggctgagagcgtcgcacggcgagttggctggaccgtccggagaggggtgcagagcctgtgggggtctttgaaacctaaaaggcttggggcacacactccgtag

SEQ ID NO: 214287 - DNA, 2127 bp, synthetic construct
  misc_feature 1..2127: note = Description of Artificial Sequence: Synthetic coding sequence
  source 1..2127: mol_type = other DNA
atgtctgtgcctagcagcctttcccagtctgccatcaatgccaattcacatggcggtcccgctcttagcttgcccctaccactccacgctgcacataaccagctcttaaatgccaagctccaagccaccgcggtaggcccaaaggacttacgatctgccatgggggagggaggcggacctgagcctgggccagctaacgccaagtggctgaaggaaggacagaatcaactgagacgagccgctacggctcacagggaccagaatcggaacgtgactcttactcttgccgaagaggcctcacaggagccggagatggccccactcgggcctaagggcttgatacacctttatagcgaactggaactgagtgcccacaacgcagctaatagggggctgaggggtccaggcctgatcattagcacccaggagcaggggccagacgagggcgaggagaaagcggcaggtgaggctgaagaagaagaggaggacgacgatgacgaggaggaagaagaggacctttctagcccgcctgggctgcctgagcctctcgaatcggtggaagcccctcccagacctcaggcactgaccgatggaccgagagaacattctaagagtgcaagcctgctgttcggtatgagaaactccgctgcaagtgacgaggattcatcctgggccacactaagtcaaggcagcccaagctacgggagccctgaagatacagactcattctggaacccaaatgcctttgaaacagactctgatctcccggctggttggatgcgcgtgcaggacaccagtgggacatactactggcacatacctaccggcacaacacaatgggagccgccagggcgagcctccccctcccaaggtagctcacctcaagaggaaagccagctgacatggactggctttgcccacggagagggttttgaggatggggagttttggaaggacgagccctctgacgaggcccctatggagctcggccttaaagagcctgaggagggtacgctcacttttcctgcccagtctctttcaccagagcctctcccacaagaagaagagaaactgccccctcgcaacaccaaccctggcatcaaatgttttgctgttagatcccttggttgggtggagatgacagaggaggaactcgccccagggagaagcagcgtggccgtgaacaactgcattcgccagctatcctaccataaaaataacctgcacgatccaatgagcgggggttggggtgaagggaaggatctactgcttcagctcgaggatgagacactgaagcttgtggagcctcagtcacaagcactgctccacgcacaaccaatcatcagtattcgcgtgtggggtgtcggcagggactccggcagagacttcgcttacgtagccagggacaagctgactcagatgctgaagtgccacgtcttccgctgcgaagcaccggcaaagaatatcgccacttccttacacgagatttgctccaaaatcatggcagagaggcgtaatgcaagatgcctggtgaatggcctatcactggatcactcgaagctggtggatgtgccgttccaagtggaattccccgctcctaaaaatgagttggtgcaaaaattccaggtgtattatctggggaacgttcctgtggccaaacctgtgggcgtagatgtgattaatggcgctttggagtctgtcctgagctctagctcacgcgaacaatggaccccttcacacgtgagcgtggcacccgctaccctgacaattttgcaccagcagacagaggctgttcttggggaatgtagggttagatttctctccttcctggctgtggggcgtgacgtccacaccttcgcattcattatggctgccggaccagcctcattttgctgtcacatgttttggtgcgagccaaacgcggcatcactgtccgaggcagttcaggctgcgtgcatgcttagataccaaaagtgcctggacgccaggagtcaggcttcaacgtcttgcctcccggctcccccagccgagtcagtcgccagaagggtaggctggactgtccggaggggagtccagagtctgtgggggtcgcttaaacctaagagactgggagcacacacaccctag

SEQ ID NO: 214288 - DNA, 2133 bp, synthetic construct
  misc_feature 1..2133: note = Description of Artificial Sequence: Synthetic coding sequence
  source 1..2133: mol_type = other DNA
atgagcgtaccctcttctctgtcacaaagcgccattaacgcaaactctcatggcggacctgccctgtctcttcccctgccgttacacgccgctcacaaccaacttctaaatgctaagctccaggctacagcagtgggtccaaaggacctccgcagtgcaatgggagagggaggtgggcctgaacccggacccgctaacgctaaatggctgaaggaagggcagaatcaactcagaagagccgctacagcccatcgggaccagaatcgcaatgttaccctgacgcttgcagaggaggcttcacaggaacccgagatggccccactagggccaaagggcttgatacacctgtactctgagttggagctgtctgcccacaacgccgctaaccgcggtctccggggacctgggctgattattagtactcaggagcagggacccgacgagggggaggagaaggccgcaggcgaggctgaggaggaggaggaggatgatgatgatgaagaagaggaggaggatctgtcatcaccgccaggcctgcctgaaccccttgagtccgtcgaagcgccaccaagaccacaggctctgacagacggaccgagagagcatagcaaatctgcctccttactcttcggcatgcgcaactccgcggcttctgacgaggactcctcttgggctacccttagccagggttcaccgtcatatgggtcccccgaggacactgacagtttctggaaccccaatgcattcgagacagactccgacctgccggcagggtggatgcgggtgcaagacactagtggtacctattactggcatattcccacgggaaccacccagtgggaaccacctgggagagctagtccatcacagggctcttcacctcaggaagaatcgcagctcacctggaccggtttcgcgcatggagaaggctttgaggacggagaattctggaaggatgaaccatcagatgaggcgccaatggaactggggctcaaagaaccagaggagggcacccttacgttccctgcgcagagcctgtctccagaaccactgcctcaagaagaggagaagcttcctcccagaaacaccaacccaggaatcaaatgcttcgccgtcagatccctgggatgggtagaaatgaccgaggaggagctcgcacctggaagaagttcagtggcagtaaacaactgcatccgccagctgtcctaccataaaaataacctgcatgatcctatgtccggaggctggggcgagggcaaggatttgctgctacaactagaggatgaaactcttaaattggttgagccacagtcacaggccctcctgcatgcacagccaatcatctcaatacgggtctggggcgtgggcagggactcagggtccaaccgtgattttgcttacgttgcacgggataaactcacccagatgctgaaatgtcatgtgttccgctgtgaagcaccagcaaaaaatattgccacttccctgcacgaaatttgcagcaaaatcatggccgagaggcggaatgctcggtgcctagtaaacggtctgagtcttgaccacagcaaactggtagacgtgccctttcaggtggagtttccagccccaaaaaatgagctagtgcagaaattccaggtatactatcttggaaacgtgcctgtcgctaaacctgttggtgtcgacgtgatcaacggtgcattggaaagtgtgttgtctagcagcagtcgcgagcagtggacaccctcacatgtctccgtcgcaccggctacgttgaccatactgcatcaacagacagaggctgtcctaggcgaatgtcgcgtgcgatttttgtcctttctcgctgtgggccgagacgtgcatacctttgccttcataatggcagcaggacctgccagtttctgctgccacatgttttggtgcgaacccaatgcagcatctctgtctgaggccgtacaagccgcatgcatgcttcgctaccagaagtgcctggatgccaggagtcaagcctctacgtcctgcctccccgctcccccagcagagtccgtagctagacgggtgggatggacagtgagaaggggggtccagagcttgtgggggagtctcaaaccaaagaggttaggagctcataccccatag

SEQ ID NO: 214289 - DNA, 1356 bp, synthetic construct
  misc_feature 1..1356: note = Description of Artificial Sequence: Synthetic coding sequence
  source 1..1356: mol_type = other DNA
atgcgggtacaggacaccagcggtacgtattattggcacatccccactggaaccacccagtgggaaccaccgggacgagcaagtccaagccagggctcttctccgcaggaagaaagccaattaacatggactggattcgcccacggagaagggtttgaagatggtgagttttggaaggatgaacccagcgatgaggcccctatggagctcggccttaaggagccagaggaaggtacattaacctttcccgcacaatctcttagccccgagcccctaccccaagaggaggaaaagttgcccccaagaaacacaaacccaggaattaaatgttttgctgttcgaagcctcggatgggtagagatgaccgaggaagaattagcaccaggacgctcatccgtggccgtcaacaactgtatcaggcagctgagttaccacaagaataatttacacgaccctatgtctggtggttggggcgagggcaaagacctgttgctgcagctcgaagacgagaccctcaagctggtggagccccaaagccaggctctgttacatgcacaaccgatcatatcgattcgcgtctggggtgtcggtagagactccggatcgaaccgggacttcgcttacgtggccagagataagctgacgcagatgctcaaatgtcatgtgttccgttgtgaggctccggctaagaacatagccacatcgctccacgaaatctgttctaagatcatggccgagcggaggaatgcaagatgcctggtgaatgggctgtcactggatcattccaaactggtggacgttccttttcaggtggagtttcccgcacctaagaacgaactggttcagaaatttcaggtgtattatctgggaaacgttccagttgcaaagcctgtcggagtggacgtcattaatggcgcactggaaagcgtgctttcaagcagcagtcgggagcaatggacccctagtcacgtgtcagtggcccctgccacgctgaccatactccaccaacagactgaggccgtactgggagaatgtcgcgtgcgattcctgagcttcctggcagtagggagggatgtgcacactttcgcattcatcatggccgcaggtccagcttccttctgctgccatatgttctggtgcgaacccaacgcagcctccctgtcagaggccgttcaagcggcttgcatgctccggtatcagaaatgtttagatgctcggagccaggcctcaaccagctgtctgcccgctccgcctgcggagtcagtcgctagaagggtaggctggactgtaaggagaggcgtgcagtctctctgggggagtctgaaacccaaaaggttgggagctcataccccatag

SEQ ID NO: 214290 - DNA, 1680 bp, synthetic construct
  misc_feature 1..1680: note = Description of Artificial Sequence: Synthetic coding sequence
  source 1..1680: mol_type = other DNA
atgtcagtgcctagctcattatcccagtctgccatcaatgccaatagccatggaggtcctgctctctcactgcccttaccattacatgccgcacacaaccagctgctgaacgcaaagctgcaggccacagctgtagggccaaaggatcttcattccaagtcagcttccctgctgtttggaatgcgcaacagcgctgcatccgatgaagactcttcctgggccaccctttctcaaggcagcccaagctatggatccccggaagacactgattcattttggaatcccaatgctttcgagaccgatagcgatcttccggctggctggatgcgggtccaggacaccagcggaacatattactggcacatccccacgggaaccacccagtgggaaccccctgggcgtgcttccccatcccaaggcagctctcctcaagaagagtcacagctgacatggactggtttcgcccatggggaaggtttcgaggacggcgagttctggaaggacgaaccatcagatgaagcacccatggagctggggctgaaagagcctgaggagggcacgctaacattcccagctcaaagcctctcccctgagccactccctcaggaggaggaaaagctccctccccgtaatacgaaccctggaataaagtgttttgcagttcgtagtctcgggtgggtggagatgaccgaggaggagctcgcacccggtcgttcttccgttgccgttaacaactgtatcagacagcttagctatcacaagaacaatctgcatgatcctatgagcgggggttggggcgaaggcaaagacctcctgttacaacttgaggacgagactttaaaattagtcgagccacagtcacaggctcttttacacgctcagcctataattagcatccgggtgtggggtgtgggtagagattcgggcagcaaccgggactttgcctacgtggcccgagacaaactgacccagatgttaaaatgtcatgtatttcggtgcgaagcgcctgccaagaacatcgctacatctctgcacgagatttgctcaaagattatggctgagcgtaggaacgccaggtgcctggtcaacggcttgtccctcgatcactccaagctggtcgatgtacccttccaagtcgaattccccgctcctaaaaatgagctggtccaaaagttccaagtctattacctcggtaatgtgcctgttgctaagcccgtgggggtggacgtcatcaatggagctctggagtctgttttgagcagctcatctcgcgaacaatggacgccatcccacgtctcagtggccccagccacgttgacgatcctgcatcagcaaacagaagcagttcttggcgagtgtcgtgttagattcctgtcattcttggcggttgggcgagatgtccatactttcgctttcataatggccgctggcccagccagcttttgctgccacatgttctggtgcgagccaaatgcagctagcctgagcgaggcagtgcaggcagcgtgcatgctgcggtaccagaagtgcttggatgccagaagccaggcctcaacgtcttgtttacccgcaccacccgctgaatctgttgccaggcgagtcgggtggaccgtgcggcgaggcgtgcaatccctgtgggggagtttaaagcctaaaaggttgggagcccacacaccgtag

SEQ ID NO: 214291 - DNA, 1428 bp, synthetic construct
  misc_feature 1..1428: note = Description of Artificial Sequence: Synthetic coding sequence
  source 1..1428: mol_type = other DNA
atgacacagatgagagactccttttggaatccgaacgcttttgagacagacagcgacctcccagccggttggatgcgtgtacaagatacttccgggacctattactggcatattcccactggcaccactcagtgggaaccacctggaagagcgagcccgagccagggatctagtccccaggaagagtcccagctaacgtggaccggattcgcccacggtgaaggattcgaagacggcgagttctggaaagatgaaccgtccgatgaggcgccaatggagctaggcctcaaggagcccgaagagggaactctgacctttcctgcccaaagtctgtcacctgagccgctcccacaggaagaggaaaaattaccaccacgcaacacgaatccagggatcaaatgtttcgccgtaaggtccctgggatgggtggaaatgacagaagaagagctggcgcctggtcgctcctctgtcgccgttaataactgtatccgccagctgagctaccacaagaataatctgcatgaccccatgtcgggcggttggggggagggaaaagacctactgctgcagcttgaagacgaaacgctaaagctggtggagccccagtcacaggccctgctgcatgcccagccaattatatctatacgagtgtggggtgtagggcgagattctggatccaaccgcgatttcgcttatgtggccagagataagctcacccagatgttaaaatgtcacgtcttcaggtgcgaagcccctgctaaaaatattgctaccagtcttcatgagatatgctccaagattatggcagaaaggcgcaatgcgcgttgcctggtgaatggactcagccttgaccactccaaactggtggacgtccccttccaagtggaattcccggcacccaagaatgaactggttcagaaatttcaagtgtattatttaggcaacgtgcccgttgccaagcccgtgggggtggacgtgattaacggggcactggagtctgttctcagcagctccagccgggagcagtggaccccgtcccatgtatcggtggcacccgctaccctgaccattttacaccagcaaactgaagcagtgctgggcgaatgcagagtacgattccttagtttcttggcagtgggtcgcgacgttcacacattcgcttttattatggcagcgggtccagcaagtttctgctgtcacatgttttggtgtgagccaaatgcggcaagtttatcagaggccgtgcaggccgcatgcatgctgagatatcagaaatgccttgatgccaggagccaggccagtacctcatgcttgcctgctcctccagccgagtccgtggcaaggagggtggggtggaccgtcagaagaggtgtccaaagcttatgggggtccctaaaaccgaaaaggcttggggctcataccccctag

SEQ ID NO: 214292 - DNA, 2277 bp, synthetic construct
  misc_feature 1..2277: note = Description of Artificial Sequence: Synthetic coding sequence
  source 1..2277: mol_type = other DNA
atgagcgaggtgcttcccgcagactctggtgtggatactctggctgtatttatggccagttcgggaactactgacgttacgaatcggaactcacccgcaaccccccctaacactcttaaccttcgctcaagtcataacgaattgctgaatgccgagatcaagcacaccgaaaccaagaactctactcctcctaaatgccgtaagaagtatgcgctcaccaatatccaggctgcgatgggccttagtgaccctgccgctcagcctctgttgggaaatggcagtgccaacatcaagctggttaaaaacggagagaaccagttgaggaaagctgccgaacagggccaacaggacccaaacaaaaatcttagccctaccgccgttatcaacattacctctgagaaattggagggaaaggaacctcaccctcaggatagctcctcctgcgagatcctgcctagccagccccgtagaacgaagagcttccttaattattacgctgacctggagacttccgccagagagctggagcaaaaccgagggaaccaccacggtaccgctgaggaaaaatcacaacccgtacagggccaggcgtctaccatcataggtaatggcgacttgctgctgcagaagcccaaccgtccgcagtcttctcccgaggacggacaggtggccacagtcagtagctctccggaaacgaaaaaggaccaccctaagacaggggcaaagactgactgcgctctgcaccgcatacagaacttggccccaagtgatgaggagagctcctggaccacattatcacaggattccgccagcccatcttccccggatgagacggacatttggtctgatcactcctttcaaaccgaccccgaccttccacctggttggaagagggtctccgatatcgccggtacctattactggcacattcctaccggaactacacaatgggaacgccctgtaagcattccagcggacctccagggctcccggaagggctctcttagctccgttacccccagcccaactcctgagaacgagaagcagccgtggtccgattttgccgttctaaatggcggaaaaataaacagcgatatctggaaagatctgcacgccgctaccgtcaacccagacccaagtctgaaggagtttgagggcgcaaccctgcggtatgcatccctcaagctgagaaacgctccccaccctgacgacgacgactcctgcagcataaactccgaccccgaagccaaatgctttgcagtgaggtcactgggatgggttgagatggcagaagaggaccttgcgccagggaagtcatctgtggctgtgaataactgcatccgtcagctctcatactgcaagaacgacattagagacaccgtcgggatctggggcgagggtaaggatatgtatctgatcctggaaaacgacatgctgtcactagtggatccaatggatagatcagtcttacactcccagcctatcgttagcattcgagtctggggagtgggtagggacaatggcagagatttcgcttatgttgccagggacaaagacacaagaatcctaaaatgccatgttttccgctgtgacacgcccgctaaggccatcgctactagcctccacgagatctgttcaaagattatggccgagcgcaaaaatgcgaaagccctggcctgttctagcctccaagagcgggctaacgtgaatctggacgtgccactgcaggtcgactttccgacccccaagactgaattggttcagaaatttcatgtccagtatttaggaatgttgcccgtggacaaacccgttggaatggacattcttaacagcgcgattgaaaatttgatgaccagttcgaataaggaggactggctgtccgtgaatatgaatgtggcggacgcaaccgtcacagtgatctcagagaaaaacgaagaggaggtgctggtggagtgtcgcgttagattcttgagcttcatgggtgtggggaaggatgtgcacacttttgccttcatcatggatactggaaaccagagatttgagtgtcacgtgttctggtgtgaacccaatgcgggtaacgtgagtgaggccgtgcaagcggcatgtatgctcagataccagaaatgccttgtcgcaaggcctccatcccagaaagtgcggccaccaccacccccagcggactccgttacacgcagagtgacaactaatgtgaagagaggcgtgctctcacttattgacactctgaagcaaaagcgacccgtgaccgagatgccgtag

SEQ ID NO: 214293 - DNA, 2274 bp, synthetic construct
  misc_feature 1..2274: note = Description of Artificial Sequence: Synthetic coding sequence
  source 1..2274: mol_type = other DNA
tcgcattgtataccagccgacagtggtgtcgacactcttgccgtctttatggcctcctctggaacaactgatgtgaccaacaggaatagtcctgctacacctccaaatacactaaacctgcgctcatctcataacgagctgctgaatgcggaaatcaagcatactgaaaccaaaaactctacccctccgaaatgtcggaagaagtatgccctgactaatatacaggctgctatgggcctgagcgatccagctgctcaaccgcttttggggaacggaagcgccaatattaagctcgtgaagaacggcgagaaccaactacggaaggccgctgagcagggtcagcaggaccctaacaagaacttaagccctaccgccgtgatcaatatcactagtgaaaagctggagggtaaagagccccatccacaggactcttcttcatgcgaaattctgccaagccagccacgcagaacaaagagctttctgaactactacgcagatttagaaacttcagcgcgagagctcgagcagaacagaggaaaccatcacgggaccgcagaagaaaagagccagccggtccagggacaagcttctaccatcattgggaatggggatttgctgctccagaagcccaaccgtcctcagtcatcccccgaggatggtcaagttgcaactgtgtctagcagtcctgagacaaaaaaggaccatccgaaaacgggggcaaaaacggattgtgccctgcaccgcatccagaacctcgctccatcagacgaggaatcctcctggacaaccctgagccaggatagcgctagcccgtcatcacccgacgagacggacatttggtccgaccattcatttcaaacggatcccgaccttccccctggatggaagagggtatccgatatcgcgggtacttactactggcatatcccgaccgggacaacacaatgggagcgcccagtctcaattccggcagatttgcagggttccaggaagggatcgttgtcgtcagtcacaccaagccccacccccgaaaatgaaaaacaaccttggtccgatttcgcggtactgaacggcggaaaaataaattccgacatctggaaggacctgcatgctgcgactgtaaaccctgaccctagcctgaaagaattcgaaggcgcaacccttcgctacgccagccttaaactgcggaacgcccctcatcccgatgacgatgattcatgctccatcaattcagatcctgaagcaaaatgcttcgcagtgcgtagcctcgggtgggtggagatggccgaagaggacttagcacctgggaaaagctcggtcgccgtgaataactgtattcgacaactctcgtattgtaagaacgatatccgtgacacggttggtatctggggggagggcaaggacatgtacctgatcctggagaatgatatgctttcgctggttgatcccatggaccgatccgtgctgcacagccagcccattgtgtctatccgggtttggggggtggggagggataatggtcgtgactttgcttatgtcgccagagataaggatactcggattcttaaatgccatgtcttccggtgtgacactcccgctaaagcgatcgccacatctctacacgagatttgctctaagatcatggccgagagaaagaacgccaaggccctcgcctgctcatcactgcaggaacgagcaaacgttaatctcgatgtccccctccaggtggacttcccgacgcctaagacggaactagtccagaagttccacgtacagtatctcggcatgctcccagtggataagcctgtcggcatggacatcctaaactcagctatcgagaatcttatgacgagctcgaataaggaggattggctgtcagtgaatatgaacgtggccgatgctacagtcacagtgatttcagaaaaaaacgaggaggaggtgttagtggagtgccgggtgcgtttcctgtcgttcatgggcgtgggcaaagacgtacatactttcgctttcatcatggatacgggcaaccagcgattcgaatgccacgtgttttggtgtgagccaaacgccggaaatgtctcagaagcagtgcaggccgcttgtatgttgagatatcagaagtgccttgtggctagacccccatctcaaaaggtgagaccacctccacctccagcagactccgtgacccggagagtcacgaccaacgtgaagcgcggtgtgttaagcctgattgataccttaaagcagaaaaggccagtgaccgagatgccctag

SEQ ID NO: 214294 - DNA, 633 bp, synthetic construct
  misc_feature 1..633: note = Description of Artificial Sequence: Synthetic coding sequence
  source 1..633: mol_type = other DNA
atggcagaaagaaaaaatgcaaaagctctcgcgtgttcctcactgcaggagcgcgctaatgtcaacttggacgtgcctctgcaggtagactttccaactcctaagaccgagctagttcagaagttccacgtacagtatctgggcatgctccctgtggacaagccagtggggatggatattcttaactctgcaatcgaaaacttgatgacttccagtaataaagaggactggctctccgttaacatgaatgtggccgatgcaaccgtgaccgttatcagcgagaaaaacgaggaagaggtgcttgtagagtgtagagtacgctttttatctttcatgggcgtgggtaaagacgtgcatactttcgcatttatcatggacacgggcaatcagagattcgagtgccacgtgttctggtgcgaacctaatgcgggaaatgtcagcgaagccgtgcaggccgcttgtatgctcaggtaccagaagtgcttagtcgcacgaccaccaagccagaaggttcggccacctccaccaccagccgattcagtgacccgtcgggtgacaaccaacgtcaagagaggagtgctatccctgattgataccctcaagcaaaagagacctgtgaccgagatgccatag

SEQ ID NO: 214295 - DNA, 33 bp, synthetic construct
  misc_feature 1..33: note = Description of Artificial Sequence: Synthetic coding sequence
  source 1..33: mol_type = other DNA
atgagtgaagtgctgccagccgattccggatag

SEQ ID NO: 214296 - DNA, 633 bp, synthetic construct
  misc_feature 1..633: note = Description of Artificial Sequence: Synthetic coding sequence
  source 1..633: mol_type = other DNA
atggcagagagaaagaatgccaaggcattagcatgttcttccctccaggagcgggcaaacgtgaacttggacgtgccgcttcaggtggattttccaaccccaaagaccgagctcgtgcagaaattccatgtgcagtatctggggatgctgccggttgataaacctgtgggtatggatattctcaattcggccatcgagaatcttatgacgtccagcaataaggaggactggctgagtgtgaacatgaatgtagccgatgccaccgttactgtgatcagcgaaaagaatgaagaggaagttctggttgagtgcagggtgcgttttctgtcattcatgggagtggggaaggatgtgcacacctttgcttttataatggataccggaaaccagcgctttgaatgtcatgttttttggtgtgagccgaatgcaggaaacgtatccgaggccgtacaggccgcatgcatgttgcgttatcagaagtgtctggtggctagacctccctcacagaaagttcggccaccaccccctcctgcagactccgtaactcgtcgagtgactacaaacgtcaaacgtggcgtgctttcactgattgacacactgaaacagaagcggccagtcactgagatgccctag

SEQ ID NO: 214297 - DNA, 2214 bp, synthetic construct
  misc_feature 1..2214: note = Description of Artificial Sequence: Synthetic coding sequence
  source 1..2214: mol_type = other DNA
atgtccgaagtcttgccagccgactctggagtggataccctcgctgtgttcatggcttccagtgggacgactgatgtgacaaatcgcaattcccctgctacccccccaaataccctgaacctgaggtcctctcacaacgagctgctcaacgccgagataaaacacacggagaccaagaactctaccccccctaagtgcaggaaaaagtacgccctgacgaatattcaggcagccatggggctttctgatcctgcagcccagccgcttttaggtaacgggtccgccaatattaagcttgtgaaaaatggcgaaaatcagctgagaaaagctgctgaacaggggcaacaggatcccaataagaacctctcacccaccgctgttatcaatatcacatcggagaaactggaggggaaagagcctcaccctcaagattcttcatcctgtgagatcctccctagccagccacgcaggacaaaaagctttctgaattactacgctgacctggagacatccgcccgagaactggaacaaaacagggggaaccatcatggtacggctgaagaaaagtcccagcccgttcaggggcaggcttcaactattatcgggaacggcgacctgctgctccagaagcccaacaggccccaatcctcccccgaggatggacaagtggcaaccgtttcatccagtcccgaaacaaagaaggaccatccaaaaaccggagccaaaaccgactgcgctctgcatcgaatccagaatctggcccctagtgacgaagagagctcttggacaactttatcccaggattcagcatcgccatccagccccgacgaaaccgatatttggtcagaccacagttttcagacggaccccgacttacctccgggttggaagagggtgtcagacatcgctggcacctactactggcacatcccaaccggcaccacccaatgggaacgacctgtgtcaattcccgcagacctgcagggtagtcgtaaaggctctctaagctcagtcacaccctcgcctaccccggagaacgaagacctgcacgccgctaccgtgaacccggacccttcgcttaaagagttcgagggcgctaccctaaggtatgccagcctgaagcttcgcaatgcccctcaccctgacgatgacgactcctgcagtatcaattctgatccggaggccaagtgttttgctgtgcgcagtctgggctgggtggaaatggccgaggaggatctggccccaggtaagtcaagcgttgctgtcaataattgcattaggcaactgtcttattgtaagaacgacattcgcgacacagttggaatctggggggaaggcaaagatatgtacttaatactcgagaatgatatgctctcccttgtcgatcctatggacaggtcagttttgcattctcagcctattgtgtccattagggtttggggcgttggcagggacaacggccgtgactttgcctatgtggcccgagacaaagatactcggattctgaagtgccatgtctttagatgcgatactcctgcaaaagccatagctactagcttacatgagatctgctccaaaataatggccgagagaaagaacgcaaaggcactggcctgcagctctctccaggaacgtgcaaatgttaatctcgatgtgccccttcaggtcgattttccaactcctaagaccgagctggtgcagaagtttcacgtgcaatacctggggatgctgcccgtggataagcccgtgggcatggatattttgaattctgcgattgagaatctgatgacaagcagcaataaagaggactggctcagtgtgaacatgaacgtcgcggatgctacagtgacggtgattagtgaaaagaatgaggaggaagttttggtggagtgcagggtaagatttttgagcttcatgggcgtcggcaaagacgtgcacaccttcgcgtttatcatggacactggcaatcaaaggttcgagtgccacgtcttttggtgtgaacctaacgctggcaacgtttccgaggcggtgcaggctgcatgtatgttaaggtaccaaaagtgtttggtggccagacctccttcacagaaggtgagacctccgcctccgccagcggacagcgtcaccaggcgtgttactacgaatgttaaaagaggtgtgctatctctcatcgacacactgaaacagaagcgacccgtgacagagatgccctag

SEQ ID NO: 214298 - DNA, 2280 bp, synthetic construct
  misc_feature 1..2280: note = Description of Artificial Sequence: Synthetic coding sequence
  source 1..2280: mol_type = other DNA
atgtccgaggtgctgcccgctgactccggtgtcgacactctagctgtgttcatggcgagtagcggaactaccgatgtcacaaaccgaaacagccccgctacccctccaaacacactcaacctgcggtcttctcacaacgagctgttgaatgctgagattaagcatacggagactaagaattcgacccccccaaagtgccgcaagaaatacgccctgacaaatattcaggcggcaatgggtttatccgacccggcagcgcagccactcctggggaacggaagtgccaatataaaactggtcaaaaacggtgagaatcagttgcgtaaggccgctgaacagggccagcaggacccaaacaagaatctatccccgactgcggttattaacattactagcgagaagctggagggtaaggagccgcaccctcaagactcatcatcatgtgaaattcttccttcccaaccaaggcgaacaaagtcttttctcaactattacgctgacttagaaacctcagcccgagaattagagcagaacaggggaaaccatcacggaacagccgaggagaagtcacagccagtccagggacaggcctcaacaattatcgggaatggcgatctgcttctgcagaagccaaatcggccacagtcttctccagaggacggacaggttgccactgttagttctagcccagagacgaaaaaagatcaccccaagacgggggctaaaactgactgtgctctacatcggatacagaacctggccccatccgacgaagagtcctcctggaccaccctctctcaggattccgcctcgccctcttcaccagatgagacagcggacatctggtctgatcattcctttcagacagatccggatctgccgcctgggtggaagcgcgtctctgacatcgctggaacctattattggcacattcccaccggcactacccagtgggaaagacccgtgtctatccctgccgacctgcagggatctcgaaaaggctcactgtcaagcgtgaccccatctcctactcctgagaatgaaaagcaaccttggtctgacttcgccgtgctcaatggtggaaaaataaacagcgatatctggaaagatctccatgccgcaaccgttaacccggatccaagcttgaaggaattcgagggcgctacactcaggtatgcttctctgaaattgagaaatgctccgcatccagacgacgacgattcctgtagtatcaacagcgacccagaagctaagtgcttcgcggtgcggagccttggctgggtcgagatggctgaagaggatttggccccagggaagtccagtgtggccgtgaataattgcattaggcagttaagttattgtaagaatgatatccgggatactgtgggcatctggggtgaaggtaaggacatgtatctgatcctagagaacgacatgctcagcctcgtggatccgatggatcgcagtgttctgcatagtcagcccatcgtcagtatcagggtgtggggggtgggcagagacaacggtcgggactttgcctacgtggccagagacaaagatacacgaattctcaagtgccatgtttttcggtgtgacaccccagcaaaggccatcgcaacaagtcttcatgaaatctgctcgaaaattatggccgagcggaaaaacgcaaaagcgctggcatgctcctccttgcaggaaagggctaatgtgaacctggacgtacctcttcaggtagattttccaacgcctaagactgagttggtgcaaaagtttcatgtgcagtaccttggaatgctgcccgtcgacaagcctgtaggtatggacatactgaacagcgcaatcgagaacctcatgacatcatctaataaggaagattggttgtcagtcaacatgaacgtcgctgatgctacagtgaccgtcatatctgaaaagaatgaggaagaggtcctggtggaatgtcgcgtccgtttcctgagtttcatgggtgtgggcaaagatgtgcacacattcgcgtttatcatggacaccggaaatcaacgattcgaatgccatgtgttttggtgtgagccaaatgctgggaatgtttcagaggctgtgcaggccgcttgtatgctgaggtaccagaagtgcctcgttgccaggccaccctcgcagaaggtgcggccaccgccacctccggctgacagtgtgactcgcagagtgaccacgaatgtgaagaggggcgtgttatcgttgatcgacacactgaaacagaaaaggccagtcacagagatgccatag

SEQ ID NO: 214299 - DNA, 84 bp, synthetic construct
  misc_feature 1..84: note = Description of Artificial Sequence: Synthetic coding sequence
  source 1..84: mol_type = other DNA
atgagcgaagtgctacccgctgattctggagttgacactttggccgtgttcatggctagctccggcacaactgacgttacgtag

SEQ ID NO: 214300 - DNA, 207 bp, synthetic construct
  misc_feature 1..207: note = Description of Artificial Sequence: Synthetic coding sequence
  source 1..207: mol_type = other DNA
atgagtgaggtcttacctgcggacagcggggtagacacccttgcagtctttatggcgtccagtgggactacggacgtgacaaacagaaactcccccgctactcctcccaataccctcaatctccgatccagccataatgaactgttaaacgccgaaatcaagcacaccgaaacgaagaattctacaccgccaaagtgtaggaaatag

SEQ ID NO: 214301 - DNA, 2211 bp, synthetic construct
  misc_feature 1..2211: note = Description of Artificial Sequence: Synthetic coding sequence
  source 1..2211: mol_type = other DNA
atgtcagaagtattaccggctgactctggagtggataccctggccgtcttcatggcctcgtcagggacaacagatgtcaccaatagaaattctcctgcgaccccacctaacaccctcaatctcaggagttcccataatgagctgttaaatgccgagatcaagcataccgagaccaagaatagtactccaccaaaatgccgcaaaaagtacgctttaaccaacattcaggcagcaatgggcctctccgaccctgcagctcagccactactgggcaacggctccgcaaatatcaaattggtaaagaatggcgaaaaccagctgcgaaaggccgctgagcaaggacaacaggacccaaacaaaaacctgtcgcccacagccgttatcaacatcacgagtgagaaactcgagggaaaggaacctcacccacaagattcttcgtcttgtgagatcctacccagtcagcctaggcggactaaatcattcctcaactattatgccgatctcgaaacgtccgccagagagctggagcagaatcggggaaaccaccatggtacagctgaagagaaaagccagcccgttcagggccaggcaagcaccattatagggaacggagatctcttgttgcagaaacctaaccgtccccagagttcaccagaggacgggcaggtggctactgtatcatcaagccccgagacaaagaaagaccacccaaaaaccggagccaagacagactgtgcgcttcataggattcagaatctggctccttccgacgaagagtcttcttggaccacactgtcccaggattctgcctcaccatccagccctgatgagactgacatttggtccgatcactccttccagacagatccagacctgcccccaggatggaagcgcgtcagcgacattgccggtacctattattggcacatccccactggtactacccagtgggaacggccagttagtattccagcagaccttcagggctctcgcaaaggtagcttgagctcagtcacgccctcccctacccctgaaaacgaagaccttcacgcggcaactgttaacccagatccgagtctaaaagaattcgaaggggcaacattgcgttatgcctcactcaagctgcggaacgctccgcacccggacgacgacgattcctgctccatcaactccgatcccgaagctaagtgtttcgccgtgagaagcctggggtgggtggaaatggctgaggaggatctcgcccctggtaagtcgagcgtggcagtgaacaactgcattagacagttgtcttattgtaaaaacgatatacgcgatacagtgggaatttggggagagggcaaagacatgtacttaattctcgagaacgacatgttgtccttggtcgacccaatggacagaagcgtcctacactcccaacctattgttagcattcgcgtatggggggtgggacgtgacaatggacgggatttcgcctacgtcgctagggacaaagatacgagaatcctgaagtgccatgtgtttcgctgcgacacaccagccaaggcaatagcgacgtccctgcacgagatatgctcaaaaattatggccgagagaaagaacgcaaaagccctcgcgtgttcctccctccaggagcgtgccaacgtcaacttggatgttcccctgcaagattttccgacaccaaaaacagagctggttcagaaattccacgtgcagtacctcgggatgctgccggtggacaaacccgtcggtatggacattctgaattctgcaattgaaaacctgatgactagcagcaacaaggaagactggctcagcgttaatatgaacgtggccgacgcaacagtgacggtcatttctgaaaagaacgaggaagaagttctcgtggagtgcagagtgcgctttttgtccttcatgggcgtaggcaaggacgttcacaccttcgctttcattatggacacgggaaatcagcgttttgagtgtcacgtgttctggtgtgagcccaacgccggtaatgtttctgaagctgtgcaggcagcctgtatgctgcgctatcaaaagtgcctcgtggccagaccacccagccagaaggtaaggccgcctccacctcccgctgacagcgttacccgacgcgtaaccacaaacgtcaaaaggggcgtgttatcgctcatcgatacccttaaacaaaagcggccagtgactgagatgccctag

SEQ ID NO: 214302 - DNA, 2187 bp, synthetic construct
  misc_feature 1..2187: note = Description of Artificial Sequence: Synthetic coding sequence
  source 1..2187: mol_type = other DNA
taagatacattagccgtgttcatggcgtcatccggtactactgacgtcacaaatagaaattctccggctacaccccctaacacgctcaacctgagaagttcacacaacgagttactcaatgcagagatcaagcataccgagactaagaactctacacctcccaagtgtcggaaaaagtacgcgttgacgaacattcaggcagcaatgggactgtccgaccccgcagctcagccccttctgggaaatggttctgcgaatatcaagttagtcaagaatggcgagaaccagcttcgcaaggcggcagaacagggtcaacaagacccgaacaagaacctgagccctaccgcggtgataaatatcacatctgagaaacttgaagggaaagagccccacccacaagactcaagttcttgtgagatcctaccctctcagcctcggagaactaagagttttctcaactactacgcagacctcgagacctctgcgcgagaactggaacagaatagagggaaccatcacgggactgctgaagagaaaagccagcctgtacaggggcaagctagtacgatcataggaaacggggacctcctactgcagaagcctaaccggcctcaatcatcacctgaagatggacaagtggctacagtttcctcctcaccggagacgaaaaaagaccatccaaaaacaggtgcgaagactgattgtgctctgcaccgtattcagaacctggctcccagcgatgaagagtcatcttggaccaccctatcccaggactccgcaagcccgagcagccccgatgagacagccgatatttggtcagaccattcattccagacagaccctgacctgccacccggatggaagcgagtatcagacattgccggaacttactattggcatatacccacaggcacgacacagtgggaacgccctgtgagtatcccagctgacctgcagggatctaggaaggggtctctgtcctcagtcacaccttctcctacccccgagaacgaggacctgcacgctgctactgtcaatcccgatccttccttgaaggagtttgagggagccaccctgcggtatgcatcacttaaactgcgaaacgccccacacccagatgatgatgactcttgcagtatcaacagtgatcccgaagccaagtgcttcgctgttagatccttgggttgggtggagatggcagaggaggacctcgccccaggcaaaagttccgtcgccgtcaacaattgtatccgccagttaagctattgtaagaacgacatccgcgacactgtgggcatctggggagagggaaaggacatgtatctgatactggaaaacgatatgctgtcactggtggaccccatggatagaagcgtactgcattcccagccaatcgtatcaataagggtctggggggtcggtagagacaatggcagggacttcgcgtacgtagcacgagacaaggatactcgtatcctaaagtgtcacgtgtttagatgtgacacaccggcaaaggcaatagccacatccctgcatgaaatctgttctaaaattatggccgagaggaagaacgctaaagccttggcttgtagttctctgcaagagcgtgccaatgtgaacctggacgtgccattgcaggtggacttccctacccccaagaccgagctggtacagaagttccacgtgcaatatctggggatgctgccagtggataagcccgtgggcatggatatcctcaactcagccatcgagaacctcatgacttcttccaacaaggaggactggctgtccgtgaacatgaacgtggccgacgcaaccgtcactgtgatttccgaaaaaaacgaagaggaagtcttagtagaatgcagagttcgatttttatcttttatgggggtaggtaaggacgtgcatacgtttgcattcatcatggataccggaaatcagcggttcgagtgtcatgtgttttggtgcgagcccaacgccggaaacgtctcagaagccgtgcaggctgcatgtatgctgcggtaccagaagtgtttggtcgctaggccacccagccagaaagtgagaccccctccacccccagccgatagtgtcactcgacgggtcacaacaaatgtcaagaggggggttctgtcgctcattgacacgctaaagcagaaacggcctgtgacagaaatgccctag

SEQ ID NO: 214303 - DNA, 633 bp, synthetic construct
  misc_feature 1..633: note = Description of Artificial Sequence: Synthetic coding sequence
  source 1..633: mol_type = other DNA
atggcagaacggaaaaacgccaaggctctggcctgcagctctctgcaggagcgggcaaatgtgaatcttgacgtgccactccaagtcgacttcccaacaccaaaaaccgagctggttcagaagtttcacgtgcagtacctcggcatgctgcctgtagataagcccgtagggatggatattctcaacagtgcaatagaaaatctgatgacgtcctcaaacaaggaagattggctcagtgttaacatgaacgtggccgatgccacagtgaccgttatctcagaaaaaaatgaggaggaggtgctcgtggagtgccgcgtcaggtttttgtcattcatgggagtcggcaaggatgtgcacacctttgcttttattatggacaccggcaaccagcggttcgaatgccatgtgttctggtgtgagcccaacgctggtaacgtgtcagaggctgtgcaagcagcctgcatgctgaggtatcagaagtgtctggtagccaggccaccatcgcaaaaggtgagaccacctcctcctccagcggacagtgtaactaggcgagtcactaccaatgtcaagcgaggtgtactgtcacttatagatacactgaagcagaagcggcctgtcacggagatgccctag

SEQ ID NO: 214304 - DNA, 1476 bp, synthetic construct
  misc_feature 1..1476: note = Description of Artificial Sequence: Synthetic coding sequence
  source 1..1476: mol_type = other DNA
atgctggggaaggactacatgctggctatcatactcgtgaactgcgacgacgacctctggggagaccattctctggaagtcgaggccggactgccacccggatggcgcaaaatccacgacgccgcaggcacatactactggcacgtgccctccgggagtacccagtggcagcgccctacttgggagctgggcgatgcagaagaccccggtacaggaacagagggcatttgggggttgcgaccccctaaaggtcgatcgttttcaagtcttgagagcagcctcgaccggtccaattctctttcgtggtacggcggagagtcatatatacagtccatggagccaggcgctaagtgttttgccgtgcgtagtcttgggtgggttgaagtgccagaggaagatctagcgcctggaaagagctcaatcgccgtaaacaactgtatacagcaactggctcaaacaagaagccgttcacaaccccctgacggcgcatggggcgaagggcaaaacatgctgatgattttgaagaaggacgccatgagcctggtgaatcctctggaccattctctgatccactgccaacccctggtccatattagggtgtggggtgtgggatcaagtaagggaaggcccatatcggcgccagcaagagactttgccttcgttgcctcagataaagattcttgcatgctgaagtgccatgtgttctgttgtgatgtgcccgcaaaagccattgcctctgctcttcacgggctttgcgctcaaattttatccgagcgcgtggaggtttcaggagatgctagctgttgttctcctgaccccatctcccccgaggacctacctcgtcaggtggagctgctggacgctgtgtcccaagctgcacagaaatacgaggctttgtatatgggaaccctgccagttacaaaggctatgggcatggatgtcctgaatgaggcgatcggtacacttacagctagaggggatagaaacgcttgggtccccacgatgctctctgtcagcgattctctcatgaccgcgcaccctattcaagccgaggctagtaccgaagaagaacccctgtggcagtgccccgtcagactggtaactttcattggagtggggagggatcctcacacatttgggctgattgctgaccttggcagacagtcgtttcagtgtgcggcattttggtgtcaaccgcacgctgggggtttaagtgaagccgtacaagccgcatgtatggtacaataccagaaatgcctggttgccagcgcagctagaggcaaagcatggggggcacaggcgagggctcggctgcggctcaagcggacatcatctatggattctccaggcggaccacttccattacctctcctgaaagggggagtgggtggcgcaggggctacccctagaaagagaggcgtcttctccttcctggatgcattccgcctgaaaccttccctgcttcacatgccatag

SEQ ID NO: 214305 - DNA, 1461 bp, synthetic construct
  misc_feature 1..1461: note = Description of Artificial Sequence: Synthetic coding sequence
  source 1..1461: mol_type = other DNA
atgctgggtaaggattacatgttggcgatcatcctcgtgaattgcgatgatgatctgtggggggatcattcattggaggttgaagccggtctacctccagggtggagaaaaatccacgacgccgctgggacatattactggcatgtgccatctggaagcacccagtggcagagacccacatgggagctgggggacgctgaagatcccggaaccgggaccgaggggatctggggactccggcctccgaaaggacggagtttttcctccctggaatcgtcccttgacaggtctaattctctttcttggtatggcggagagagctacatccagtcgatggagcccggagccaaatgtttcgccgttaggtctctcgggtgggtcgaagtgcctgaggaagacctcgctccaggcaaatcttccatagccgtcaacaattgtatacaacagctcgcacagactaggagtaggagccaaccaccggacggtgcctggggagaagggcaaaacatgctaatgattctcaaaaaagacgctatgtccctagtgaatccactggatcatagcctcattcactgtcagcccttggtgcacatccgggtttggggcgttgggagcagcaagggcagagaccgcgatttcgctttcgtggcttcagacaaggactcatgcatgctcaaatgtcacgtcttttgctgcgatgtgcctgcgaaagcaatcgcctccgctctccacggcctgtgtgcgcagatcctaagcgaacgagttgaggtatcgggagacgctagttgctgttctccagaccccatctcccccgaggacctgccacggcaggttgagctgctggatgctgtgtcacaggcagcccagaagtacgaggccctgtacatggggaccctgccagtgactaaagccatgggaatggatgttctcaacgaggcaatagggactcttacagcccgaggcgacaggaatgcctgggtgcccaccatgctgtccgtttcggacagcctcatgacggcacatcctatccaggcggaggccagcacagaggaagaacctttgtggcagtgtccggtgaggttggtaactttcattggggtgggcagagaccctcacaccttcggcctcatcgcagatcttggaagacaatccttccagtgtgcagccttctggtgtcaacctcatgctggcggattgtccgaggccgtacaggcggcatgcatggtccagtatcagaagtgtctggttgcctccgccgcaagagggaaagcctggggggctcaggccagggcaagactgcgcttgaaacgcacatcttccatggactcacccggagggccactacctctgccactcctgaaaggcggagtaggcggagcaggggcaacaccacgcaagaggggcgttttttctttcttggatgccttccgcctgaaacctagccttctgcatatgccatag

SEQ ID NO: 214306 - DNA, 1020 bp, synthetic construct
  misc_feature 1..1020: note = Description of Artificial Sequence: Synthetic coding sequence
  source 1..1020: mol_type = other DNA
atgctgggcaaagactatatgctggccattatcctggtgaattgcgatgatgacttgtggggagaccatagcttggaggtagaggccggactcccacctggatggcggaagatccacgacgccgcaggaacttattattggcatgtcccgtctgggtcaacacagtggcaaagacccacttgggagctgggcgacgccgaagacccagggacgggcaccgaaggcatatgggggctgcgccctcccaaaggcagatcgttcagttcactcgaaagcagcttggatcggtcaaatagcctgtcttggtacggaggagagtcttacattcagagcatggagcccggagccaagtgcttcgccgtccgtagcctcggatgggttgaggtgccagaagaagacctggcacctggcaagagctccatcgcagtcaataattgcatccagcagctcgctcagacaaggagtcggtctcagccgccagatggcgcatggggcgaaggtcaaaacatgctaatgatcctcaagaaggacgctatgagcttggttaatcccctggaccacagcttgattcactgccaaccactggtgcacataagggtgtggggcgtggggtcatctaagggtcgtgatagggatttcgcgttcgtcgcctcagacaaggacagctgcatgttgaagtgtcacgtgttctgttgcgatgtacccgctaaagctatcgcttcggccctccacgggctctgtgcccagattctgagtgagagggttgaagtatccggagacgctagttgttgtagtcctgaccccatctctccagaggacctgccacgacaagtggaattgctcgatgcggtcagccaggcggctcagaaatatgaagcactgtatatgggcacactgcctgtgaccaaagccatggggaggggccagtaccggggtggcgctatcgttgccgtaccctgcgcaccttgtgatatttactggtgttggcccaggcccacacacctttggcctcatcgatag

SEQ ID NO: 214307 - DNA, 1455 bp, synthetic construct
  misc_feature 1..1455: note = Description of Artificial Sequence: Synthetic coding sequence
  source 1..1455: mol_type = other DNA
atgctggggaaggattacatgctcgccataatactggtgaactgcgatgatgatttatggggggaccacagcttggaggtcgaagctggcctgccacccggatggcgcaaaatccacgatgctgctggcacatactactggcacgtgccgagcggttctacgcagtggcagcggcctacctgggaactgggcgatgccgaggatcctggtaccggaacggagggcatatgggggttgcgcccaccaaaaggccgatcctttagctccctggagtccagcctggatcggtctaattcactgagttggtacgggggagaaagctatatccaaagtatggagcccggagcaaaatgtttcgcagtcagaagcttaggttgggtggaggtcccggaagaggatctggcgcctggcaagtcaagcattgctgtgaacaattgcattcagcagctggcacagacacgatctagatctcaacccccagacggggcatggggggaaggtcagaacatgctcatgatcctgaagaaggacgcaatgtccctggtgaacccccttgatcactcactgatccattgccaaccattagttcatatcagggtgtggggagtggggtcctctaaagggagggattttgctttcgtggccagcgataaagactcctgcatgcttaagtgccacgtgttctgttgtgacgtgccggcaaaggctattgcaagcgctctgcacggcctgtgtgcacagatcctgtctgaacgggtggaggtgtctggcgacgcatcctgttgttctcccgatccaatctcgcctgaagacctcccgagacaggtggagctgctggatgctgtctctcaggccgcacaaaagtatgaagccctctacatgggcacactccccgtaaccaaggcaatgggcatggacgtattaaacgaagctattggaacgctcactgctagaggcgatcggaacgcctgggtcccaaccatgctttctgtgtccgattcgttgatgaccgcccaccctattcaagcagaggccagcacggaagaggaaccactatggcagtgccccgtccggctcgtgacatttatcggtgtgggaagagacccacatacattcggactgattgccgacctgggaaggcagagcttccaatgtgccgcattttggtgtcagccccatgcgggtgggctcagcgaagcagtgcaggccgcttgtatggtgcaataccaaaagtgtttggtagccagtgcggctcgaggcaaggcatggggtgcacaggccagagccaggcttcgtctgaagcgcacatcaagtatggatagcccgggtggacccctgccgctgcctctgctgaaaggcggagtgggcggagcgggtgctactcctcgcaagaggggagttttttcttttctcgacgcgtttcgtcttaagcccagccttctgcatatgccttag

SEQ ID NO: 214308 - DNA, 738 bp, synthetic construct
  misc_feature 1..738: note = Description of Artificial Sequence: Synthetic coding sequence
  source 1..738: mol_type = other DNA
atgctcggcaaggattacatgctggcgatcatcctggtaaactgtgacgatgatctgtggggagatcacagcttagaggtagaggccggtctgccgcctggctggcgaaaaattcacgatgccgctggcacatactattggcacgtgccatcgggctccacccagtggcagagaccgacatgggagctaggcgatgccgaagaccccggtactggaactgaagggatctggggacttcgcccacccaaagggagatccttctcatcacttgagagctcactggatcgttcaaactctctctcttggtacggtggagagtcatacatccaatcgatggaacctggagccaagtgttttgcagtcagaagcctgggttgggtcgaggtgccagaagaagacctagctccaggaaaatctagtattgcggtgaataactgcattcagcaactcgcccaaaccaggagccggtcacagcccccagacggggcatggggagagggccaaaacatgctgatgatcttaaagaaggacgccatgtccctggtcaatcctttggaccattcccttatccattgccagccactggtgcatatacgagtgtggggggtcggtagttcgaaaggtaggagctctgatgtggaccctggactgctgccattgcccggtccagcgctcgtgggcgaggggggaccctcgtcagcaggtacggtgtggggggagagcgaacgtctcggctag

SEQ ID NO: 214309 - DNA, 792 bp, synthetic construct
  misc_feature 1..792: note = Description of Artificial Sequence: Synthetic coding sequence
  source 1..792: mol_type = other DNA
atgctcaagtgccacgtgttttgctgtgatgtgcctgccaaagcgattgccagtgcgctgcatggactttgcgctcagattctcagcgagcgcgtcgaggttagcggtgatgcatcttgctgcagccctgatccaatttccccagaggatctcccgaggcaggttgaacttctcgacgcagtcagccaggccgctcagaagtacgaggccctgtacatgggcacgctccctgttacaaaggctatggggatggacgtgcttaatgaagccataggaaccctcacggctaggggagatcgcaatgcctgggttcccacgatgctctccgtctccgattcactgatgactgcacacccgattcaggcggaggcgtcaacagaagaagaaccgctctggcagtgcccagtccggctggtgacattcataggtgttggacgagaccctcacacattcggattgatcgccgaccttggccgacagagcttccagtgcgcagccttctggtgccagccccatgcaggaggtctgtctgaggcagtacaggctgcctgtatggtccagtaccagaaatgcctcgtggccagcgccgctcggggaaaagcgtggggggcacaggcgagggccagactccgtctgaaacggacctcctcaatggatagtcccggagggcctttacccctgcccctcctaaagggcggtgtaggcggagctggcgctacgccccgtaagagaggagttttttcctttcttgatgcgttccgcctgaaaccctctctcttgcacatgccgtag

SEQ ID NO: 214310 - DNA, 645 bp, synthetic construct
  misc_feature 1..645: note = Description of Artificial Sequence: Synthetic coding sequence
  source 1..645: mol_type = other DNA
atgctgggaaaggactacatgctggctattatccttgtgaactgtgacgacgatctttggggcgaccacagtctcgaagttgaagccggacttccacctggatggagaaaaattcatgacgctgctggcacttactactggcacgtgcctagcggcagcacgcagtggcaacggcctacctgggagctcggggacgctgaggatcccggtactggaacagaaggcatttggggtctgcggccaccgaaagggcgatcattttcatcgttggaaagtagcctggacaggagtaattcattgtcatggtacggaggagaatcttacatacagtctatggagcccggtgctaagtgttttgctgtcagatctctcgggtgggttgaagttcctgaggaggatctggcaccaggaaaatcttccattgccgtaaacaattgcattcaacagctagcacagacacgctccaggtcccagccaccagacggagcatggggcgagggacagaacatgcttatgatcctgaaaaaagatgcaatgtccctggtgaacccgctcgatcactcattgatccattgccagcccctcgctgttatccctacggacgctgatcctcagtatttgaacccctggactcaaatcctttag

SEQ ID NO: 214311 - DNA, 378 bp, synthetic construct
  misc_feature 1..378: note = Description of Artificial Sequence: Synthetic coding sequence
  source 1..378: mol_type = other DNA
atggagcccgacggcacatacgagccaggatttgtgggcattaggttttgccaggaatgtaataacatgctgtatccaaaagaagacaaagagaaccggatcctgctgtacgcctgtagaaactgcgattatcagcaggaggccgataacagctgcatctacgtgaataagattactcatgaggttgatgaactgactcagattatagccgatgtttctcaagacccaaccctgcccaggaccgaggatcacccgtgtcagaaatgcggacacaaggaagctgttttctttcagagtcattctgccagggctgaagacgctatgcgactgtattacgtctgcaccgcgccacactgcggtcataggtggacagagtag

SEQ ID NO: 214312 - DNA, 1836 bp, synthetic construct
  misc_feature 1..1836: note = Description of Artificial Sequence: Synthetic coding sequence
  source 1..1836: mol_type = other DNA
atgctcgcttctcttgagaaggataaaaccgctccgggaagtgcccaggtagcaggcctgtgcggcagactcaccttgcatcgtgatctgcgcaccggcaggtgggaacctgacccacagcggtcacgaagatgtctccgggacccacaaagagtgttagaatactgtcgccagatgtaccccgagctacagatcgcacgggtggaacaggctacgcaggccatccctatggagcgctggtgtggtggctcacgctccggtagctgcgcgcatcctcaccatcaagtggtaccttttcggtgcctgcccggagaattcgtgtccgaagcgctgctggtccctgaaggttgtcggtttctgcatcaggagcgcatggatcagtgcgagagttccacgagacggcatcaagaagcccaggaagcctgttcttcccagggactgatactgcacgggagcgggatgctgctcccctgcgggagcgatcggtttcgtggagtcgaatacgtttgctgccctccacctgggacccccgatccctcaggaacagccgtcggggacccaagcacccggagctggccaccaggttctagggtagagggagccgaggacgaagaagaagaggagtcatttccgcagccggtggacgattactttgttgagcctcctcaagcggaagaggaggaggaaaccgtgccgcctccttcttcccacaccctcgccgttgtcggtaaagttacacctacaccccgtcctactgacggcgtcgacatctattttggaatgcccggagaaatcagtgagcatgagggttttctgcgggctaaaatggacttggaggagagacgaatgcgccaaataaatgaagtgatgagggagtgggctatggctgacaatcagagcaaaaatctgcctaaagctgaccggcaggccctgaatgagcatttccagtccatacttcagactctggaagagcaggtgtccggcgagaggcagagactcgtggagactcacgcgactcgagtaatcgcactgataaacgaccaaaggcgtgctgcactggaaggatttctggctgcccttcaagcagacccaccccaggccgaacgcgttctgctggccttgcgtagatatctgagagcggagcaaaaggagcagcgacacacccttcgccattatcagcacgtggccgcagtcgaccccgaaaaagcccagcagatgcgctttcaggtgcacacccatttgcaagttatagaagagagagtcaatcagtctctggggttgctggatcagaatccccacctggcacaggaactgcgcccacagattcaggagctccttcattcggagcacctcggaccaagcgagctcgaggcacccgctcccggagggagtagcgaggataaaggcggtctgcagcccccagatagcaaagacgacactccaatgacgttgcctaaaggatctaccgaacaggacgccgctagtcccgaaaaggaaaagatgaaccccctcgagcagtacgagcgcaaggtcaatgcttccgtgcccagggggtttccatttcattcctcagagatccagagagatgagctggctccggctggcaccggagtcagcagagaggccgtctctgggctgctgataatgggcgctggcggaggctccctaatcgtgctgagcatgctgctgcttcgaagaaaaaagccatatggcgctatctcccacggggtggtagaagtggatcccatgctgacactggaggagcaacaactaagggagctgcaacgccacggttatgaaaaccctacgtaccgctttctcgaggagcgcccttag

SEQ ID NO: 214313 - DNA, 2292 bp, synthetic construct
  misc_feature 1..2292: note = Description of Artificial Sequence: Synthetic coding sequence
  source 1..2292: mol_type = other DNA
atggccgctaccggaactgccgctgccgcagccactggaagattactgctgctacttttagtcggtttgacggcacctgcactcgctctggccggatacattgaagctctggccgctaatgcaggaaccggatttgctgtcgcagagccccagattgcgatgttctgtggtaaacttaacatgcacgttaacatacagactggtaagtgggagcccgatccaaccggcacaaaatcctgcttcgagaccaaagaggaagtcctgcagtactgtcaggaaatgtatcccgagcttcagataacaaacgtgatggaggcaaatcagcgcgtcagcattgacaattggtgccgcagggataagaaacagtgtaagagccggttcgtgacaccatttaagtgtctggtcggcgaatttgtgtctgatgtgctgctcgtgcccgagaaatgccagttttttcataaggaaagaatggaggtttgtgagaaccatcagcactggcacaccgtcgtgaaggaggcatgcctgacccagggcatgacactttactcctacgggatgctgctcccctgcggagtggatcagttccacgggacagagtacgtttgttgtccccagacaaaaatcatcggatccgtatcaaaagaggaagaggaagaggatgaggaggaagaggaggaggaggacgaagaggaggactatgacgtttacaagagtgagttccccaccgaagccgacctggaggattttacagaagcggctgtcgacgaagatgacgaagatgaggaggagggagaggaagtggtggaggatagagattactactacgacacttttaagggtgatgactacaacgaggagaaccctacagaacccggatcggacggaaccatgtcagataaggagataacacatgatgtgaaggcagtgtgttcgcaggaagccatgaccggaccctgtagagcagtcatgccgagatggtactttgatttgagtaaagggaaatgcgtgagattcatctacgggggttgcgggggtaaccggaataactttgagtctgaggattattgcatggccgtctgtaaagccatgatccctcccactcctcttcccactaatgacgtcgacgtctacttcgagacttccgccgatgacaatgagcatgcgagatttcagaaggccaaggaacaactggagatccggcaccggaaccggatggacagagtaaagaaagagtgggaggaagccgagctgcaggctaaaaatcttcccaaagccgagaggcagactctaatccaacacttccaggccatggtcaaggccctggaaaaggaggctgccagcgagaagcaacaattagtagagacccatctggcacgcgttgaggccatgctcaatgaccgtcggaggatggctctcgaaaactatcttgctgctcttcagagtgacccccctcggccacatagaattctccaagctctccggagatatgtgcgcgctgagaataaggaccgcttacatacaattcgccactaccaacacgtcctagcagtggacccggaaaaggccgcacagatgaagtcccaggtcatgactcacctgcacgtgatcgaagaaaggaggaaccaaagcctgagtttgttgtacaaagtgccctatgtggcacaggaaatccaggaagaaatcgacgagctactccaggaacagagagccgatatggaccagtttaccgccagcatctccgaaacccctgtggacgtgcgagtaagcagtgaggagtccgaggaaattccaccctttcatccatttcacccttttcccgctcttcccgagaacgaagatactcagcccgaactgtatcaccctatgaaaaaaggctcaggggtgggggagcaggacggcggattaattggggctgaggagaaagtgatcaacagcaagaataaagtcgatgaaaatatggtgattgatgagacattggatgtcaaggaaatgatttttaatgccgagagagtgggaggattggaggaagagagagagagcgtgggccctcttcgcgaggatttctcattatcctcctccgctttgatcggcctcctggtgatcgcggtggctattgcaacggtaattgtgatctctctggtgatgctgcggaagcgacagtatggaaccatttctcacggtattgtagaggtggaccctatgctcaccccagaagagcggcacctgaacaagatgcaaaatcacggctacgaaaatcctacgtataagtatcttgagcaaatgcaaatatag

SEQ ID NO: 214314 - DNA, 2286 bp, synthetic construct
  misc_feature 1..2286: note = Description of Artificial Sequence: Synthetic coding sequence
  source 1..2286: mol_type = other DNA
atgctgcgggctcctggcgaactccccaggcaggctgcaaggtgtagcctctgccgcctggggcctggcagaggcagagccttctttaaatggcgctgcctgccggcaagtgtggacagaggcaaccccctgtgggccctagccgctaacgctggcacaggattcgccgtagccgaaccccagatcgccatgttttgcggaaaactgaacatgcacgtgaatatccagacgggcaaatgggagcctgacccgaccggcaccaagagctgttttgagacaaaagaggaggtgctacagtattgccaggaaatgtatcccgagcttcaaattaccaacgtcatggaggctaaccagagggtttcaattgataactggtgtaggcgggacaagaaacagtgcaagagcaggtttgtcacacctttcaaatgcctggtgggcgaattcgtgtcagacgtgctattagtgcccgaaaaatgtcagttttttcacaaggaaagaatggaggtctgcgagaatcatcagcattggcacactgtggtcaaggaggcatgcctgacccagggcatgaccctctacagttatggaatgctcctgccttgtggtgtggatcagttccatggcaccgagtacgtgtgctgccctcagaccaagataatcggctccgtttcgaaggaggaagaggaagaggatgaagaggaggaggaggaggaagatgaggaggaggattacgacgtctataagtccgagttcccaactgaggctgatctggaagacttcaccgaagctgccgtggacgaggatgatgaagacgaagaagaaggcgaagaagttgttgaagaccgcgactattattatgacacgtttaagggagacgactataacgaggaaaaccctaccgagcctggctcagacgggactatgtcagataaggagattacgcatgatgtgaaagcagtgtgttcacaggaggccatgacaggtccttgtagagcagttatgcctcggtggtattttgacttgagtaaaggaaagtgtgtgcgctttatatatgggggatgcgggggtaaccgcaacaactttgaaagtgaggactactgcatggcggtgtgtaaggcaatgataccgccaaccccactaccaaccaatgacgtcgacgtctactttgagacgtccgctgacgacaatgagcacgcacggttccagaaggctaaggaacaactggaaatcagacatagaaatcgtatggacagggttaaaaaggagtgggaagaggccgagttacaggccaagaacttgcctaaagccgaaagacagactctgattcagcacttccaggccatggtcaaggccctggaaaaggaagccgcatccgagaagcagcaactggtggaaacccatctagcccgagtagaggcaatgctgaacgacagaagacggatggcgcttgagaattatctcgctgccttgcagagcgatcctcccagaccacacagaattctgcaggccctccggagatacgtccgggcagaaaataaagaccggttgcataccattaggcattaccagcacgtgctcgctgttgatccggaaaaagcagcccagatgaagagccaggttatgacacatctgcatgtgatagaggaacggagaaatcagtcgctgagcctgctttataaggtgccatacgtggcacaggagatccaggaggagatcgatgagctcttacaggagcaacgcgcagatatggatcagttcacagcttccatttcagaaactcccgtggacgtgcgtgtcagcagcgaagagagcgaggagatacccccttttcatccgtttcacccttttccagcactacccgaaaatgaagggtcgggggttggggagcaggatgggggtctgataggcgcagaggagaaagtgataaattctaagaacaaagtggacgagaacatggtcatcgatgaaacactggacgtcaaagagatgatctttaatgccgagagggtgggtggcctggaagaggaacgagaaagtgtgggacccttgcgggaagactttagcctgtcttcttcggccctgatcggtttgttagtgatcgccgtcgctatagcaaccgtgatcgtgatatcgttggtgatgttgaggaaaaggcagtatggtactatttcccacggaatcgtagaggttgatcccatgttgacgccagaggagagacatttgaataagatgcagaaccacggctacgagaaccctacctataaataccttgaacagatgcaaatttag

SEQ ID NO: 214315 - DNA, 2256 bp, synthetic construct
  misc_feature 1..2256: note = Description of Artificial Sequence: Synthetic coding sequence
  source 1..2256: mol_type = other DNA
atggctgctacaggtactgctgctgctgctgcaaccggaaggttgttactccttctactggtgggtctgactgcgcctgcccttgctttggccggatacatcgaagccctggcagcaaacgctggaactggatttgctgtagcggagcctcagattgccatgttttgcgggaaactcaacatgcatgtgaatatccagaccggtaaatgggagcccgatcctacaggtaccaagtcttgtttcgaaacaaaggaagaagtgctgcaatactgtcaggagatgtaccccgagttgcagatcactaacgtgatggaagccaatcagcgggtctctatagacaattggtgtcggagagacaagaaacagtgtaagtcaagattcgtgacaccgtttaagtgcctggtaggtgagttcgtgagcgacgtgctcttggtccccgaaaagtgccagttcttccacaaagaacggatggaggtctgcgagaaccaccagcactggcatacagttgtgaaggaggcctgcctgacacagggcatgactctgtacagctacggcatgctcctgccctgtggtgtggatcagtttcatggtacggagtatgtctgttgtcctcagacaaagatcattggctcagtctctaaagaagaggaggaagaggacgaggaagaggaggaggaggaagatgaagaagaagactacgatgtgtataagagcgaattccctaccgaggcagacttagaagacttcacagaggccgcagtggatgaggacgacgaggacgaagaggagggcgaggaggttgtggaggacagggattactactacgacactttcaaaggagacgactacaacgaagaaaacccaacagaacctgggagtgatggcactatgtccgacaaagagatcacgcacgatgtcaaggccgtctgctcacaggaggctatgacggggccttgtagagccgtcatgccaagatggtatttcgatctgtccaagggcaagtgcgttcgattcatatacggcggttgcggaggcaatagaaataattttgagagtgaggactattgcatggcggtgtgcaaagctatgatccccccaacccctctccctacaaacgacgtggacgtctacttcgaaaccagcgccgatgacaatgagcacgcacgctttcagaaagccaaagaacagttggagatcaggcataggaatcggatggaccgtgtgaaaaaggagtgggaagaggccgagctacaagctaaaaacctgccaaaggcggagcggcaaacgcttatccagcacttccaggctatggtcaaggctctcgagaaagaagctgcaagtgagaagcagcaactggtggagacacacctcgctagagtggaagctatgctaaacgatagaaggcggatggcccttgagaactaccttgccgctcttcagagtgatccccctagaccacacagaattcttcaggccctccgccgttacgtgcgtgctgaaaataaagatcgcctgcatacgattcggcactatcagcacgtcttggcagtcgaccctgaaaaggcagctcagatgaagagccaggtaatgacccacctacacgttatcgaagagcggaggaatcagtccttgagcttactgtacaaggtcccatatgttgcacaggaaatacaggaagagatcgacgaattactgcaggagcagcgggctgacatggaccaatttactgctagtataagcgagacacctgtggacgtcagggtctcctcagaggaaagcgaggaaattccaccatttcatccctttcatcccttcccagccctaccggaaaatgaaggatccggtgtgggggagcaagacgggggacttatcggtgccgaggaaaaagtgatcaactctaagaataaagtggacgagaacatggttattgatgagactctcgatgtcaaggagatgatttttaacgctgaaagagtcggcggacttgaagaagagagggaaagtgttggacctctcagagaagatttctccctatcctcgtccgctctcatcgggctcttagtgatagccgtggcaattgcaaccgtcatagtcatctcactggtgatgctgagaaaaagacagtatggaacaatttctcacggcattgtcgaagttgaccctatgctaacccctgaggagcggcatcttaacaaaatgcagaatcatgggtatgaaaatcctacttacaaatacctggagcagatgcagatctag

SEQ ID NO: 214316 - DNA, 1569 bp, synthetic construct
  misc_feature 1..1569: note = Description of Artificial Sequence: Synthetic coding sequence
  source 1..1569: mol_type = other DNA
atggctgccacaggtactgctgctgccgcagccacgggtcgcttgttgttgctactactggtggggctgactgcaccagcccttgcactggccggatacatcgaggccctcgcggcaaatgccggaacgggtttcgccgtagccgagccacaaatagccatgttctgcgggaagctaaacatgcacgtgaatatccaaaccggaaaatgggagcccgatcctaccggaacgaagagttgctttgaaactaaagaggaagtcctccaatactgccaggagatgtaccctgagctgcagattaccaatgtgatggaggctaatcagagggtctcaatcgataactggtgcaggagagacaagaagcagtgcaagagtagattcgtcaccccttttaagtgtctggtacctccaacgccattgccaaccaacgatgtagatgtctactttgaaacaagcgccgacgataatgagcatgctcgctttcagaaggccaaggagcaactggagatccgccataggaataggatggatagagtaaagaaggaatgggaggaagcagaactccaggcaaagaatcttccaaaagccgaacgccagactctcattcaacactttcaagctatggtaaaggcgctagaaaaggaggcagctagcgaaaagcagcagcttgtagagacacacctggcccgtgtggaagccatgcttaacgataggcgtcgcatggccctggagaattatctggccgctctccagagcgaccctcctcgaccacacaggatcttgcaggcacttagacgttacgtgcgcgctgaaaacaaagacagactgcacacaattagacactatcagcacgttctcgctgtggatccagaaaaggccgcacaaatgaagagccaagtgatgactcacttacatgtcatcgaggagagaaggaaccagtcattgagcctgctgtacaaggtgccctatgttgcgcaggaaatccaagaggagattgacgagctgttacaggagcagcgggctgatatggatcagtttactgcatctatttctgaaaccccagtcgacgtgagagtcagttctgaggagtcagaggagatccctcctttccatccgttccacccattccctgcccttccggagaacgaaggaagcggcgtaggcgagcaggacgggggtttgattggcgctgaggagaaagtcatcaacagcaagaacaaagtggatgagaacatggtgattgacgaaacactggatgtgaaagaaatgattttcaatgcagagcgggtcggtggtctcgaagaagaacgcgagtcagtaggacccctgcgggaggactttagtttatcatcaagtgcccttattggcctgttggtgatagcagttgccatcgcgactgtgatcgtgatctccctcgtgatgcttcggaaacgccagtatgggacgatcagccacgggattgtggaggtcgatccaatgctaacacctgaagagcgacatctcaacaaaatgcaaaaccacgggtacgagaatccgacttataagtatcttgaacagatgcagatatag

SEQ ID NO: 214317 - DNA, 2088 bp, synthetic construct
  misc_feature 1..2088: note = Description of Artificial Sequence: Synthetic coding sequence
  source 1..2088: mol_type = other DNA
atggctgccaccggaacagccgctgctgctgccactggacgtcttctcctgctgctgctggtgggactgaccgctcccgctcttgccctggccggatacatcgaagctctagccgctaatgccggtactggatttgccgtggctgaaccgcagatcgctatgttctgcggcaagctgaacatgcatgtgaatattcagacagggaagtgggaaccggatccaactgggaccaaatcctgttttgaaacaaaagaggaggtattgcagtactgtcaggaaatgtatcctgagctccagatcacgaacgtaatggaggctaaccagcgggtttctatcgacaattggtgtagacgggataaaaaacagtgcaagagtcgctttgtgaccccattcaagtgtttggtgggagagttcgtgtcagacgtattgttagtgcctgaaaaatgtcagttcttccacaaagaacggatggaggtgtgcgagaatcatcagcactggcatacagtggtcaaggaagcatgtttaacacaaggcatgactctatacagttatggtatgctactgccctgtggagtggaccaattccatgggaccgagtatgtgtgctgcccacaaactaaaatcatcgggtctgttagcaaggaggaggaggaggaggatgaggaagaggaggaagaagaggatgaggaggaggactatgatgtgtacaagtcagagttcccgacagaagccgatcttgaggatttcacagaagctgcggttgacgaagatgatgaggacgaggaggagggtgaagaagtggtggaggatagggactattactacgacaccttcaaaggagacgactacaacgaggagaatccgacagaaccagggagcgatggaactatgagcgacaaggagatcacccacgatgtgaaagtgccccctacacctcttcctacaaatgacgtggacgtctacttcgaaacaagcgccgatgacaatgagcatgccaggttccagaaagctaaggaacagttagaaatacggcatagaaacagaatggatagagtaaaaaaggaatgggaagaggctgagttacaggctaaaaatctgcccaaagcagaaagacaaactctgatccagcacttccaggccatggtcaaggcactggaaaaggaagccgcttcagagaaacaacagctggtggaaacacatctcgcccgagtcgaggcaatgctgaatgacaggaggaggatggcactggaaaactatctggcagcactccaatcagaccccccaagaccacacaggatcctgcaagcccttaggcggtacgtgagggccgagaacaaggatagattgcacaccatccgccactaccagcatgtgctggctgtggaccctgagaaggccgcacagatgaagagccaagttatgactcacctgcatgtgatcgaggagcgcagaaaccagtctctgagcttgctctacaaagtgccctatgttgcgcaggaaatccaggaagaaatcgacgagctcctgcaggaacagagggcggacatggaccagtttacggcaagtattagtgagacaccagtggacgtacgggtgtcgagcgaggagtccgaagaaatcccgcctttccatcctttccatcctttcccagccctgcccgaaaatgagggatctggcgtgggcgagcaggatggagggctgataggcgctgaggagaaggtgatcaactctaagaataaggtcgatgagaacatggtgatcgacgagacgctggacgttaaggaaatgattttcaacgctgaaagggtcggtggcttggaggaagaacgtgagagcgtagggcctttgagagaggatttttctctatccagttctgccctgatcgggctgctggtcatcgcggtggcaatcgccaccgttattgtgatctctttggtgatgcttaggaagcgccagtacggtactataagccacggaatagtcgaggttgaccctatgctgaccccggaggaacggcatctgaacaagatgcagaaccacggatatgagaatccaacctataagtatctggagcagatgcagatctag

SEQ ID NO: 214318 - DNA, 480 bp, synthetic construct
  misc_feature 1..480: note = Description of Artificial Sequence: Synthetic coding sequence
  source 1..480: mol_type = other DNA
atggccgcaaccggcactgccgcagccgcagccactggtagactcctgctgctgctcctcgttggccttaccgcgccagcccttgcccttgccggttatatcgaatcctctcagatttgctgtagccctcgcagtttcctgatttctaccctcaagtgccttatagtggatgagattaacgcgctggccgctaatgccggaaccgggttcgctgtggccgaacctcaaattgccatgttctgcggcaaactgaacatgcatgtcaacatccagaccggcaagtgggagcccgatcccacaggcactaaaagctgcttcgagactaaagaggaggtgctgcagtattgtcaggagatgtacccagaattgcagatcacaaacgtgatggaagcaaaccaaagagtgagcattgataattggtgccgtagagacaagaagcaatgtaaatccagattcgtgacgccctttaagtgcttgtag

SEQ ID NO: 214319 - DNA, 351 bp, synthetic construct
  misc_feature 1..351: note = Description of Artificial Sequence: Synthetic coding sequence
  source 1..351: mol_type = other DNA
atggctgccaccggtaccgccgcagcggctgccacgggccgactgctgctgctgttgttggttggcctcactgctccggctcttgcattggccggatatatcgaggcattggccgcaaacgccggtactgggtttgccgtcgcggagccacagatagcaatgttctgtggcaaactcaatatgcatgttaatattcagactgggaaatgggagcccgatccaacagggactaagtcatgttttgagacaaaggaggaggtgctgcaatattgccaggagatgtatcctgaactgcagatcaccaactccgggtggcgttgcgtgcgcataacctctacaggtacaagatag

SEQ ID NO: 214320 - DNA, 1656 bp, synthetic construct
  misc_feature 1..1656: note = Description of Artificial Sequence: Synthetic coding sequence
  source 1..1656: mol_type = other DNA
atggaggtgtgcgagaaccatcagcattggcacactgtcgtgaaggaagcctgtctgacacaggggatgacactgtacagctacggcatgcttttgccatgtggggtggatcaattccacggaaccgaatatgtgtgctgtccacagacaaaaattatcggtagtgtttcgaaggaggaggaggaggaggacgaagaggaagaggaggaggaagacgaggaagaggattatgatgtctataaatcagagttccctactgaggcggacttagaggatttcaccgaagcggcagtagacgaagatgacgaagacgaagaagaaggagaagaagtagtagaagacagagactattactacgatacgttcaaaggtgacgattataatgaagaaaaccccaccgagcccggaagtgatggtactatgagcgacaaagagataactcacgatgtaaaggtaccgccaactccccttccgactaacgatgtcgatgtgtacttcgagacaagcgccgatgacaatgagcacgcccgtttccagaaggccaaggagcagcttgagatacgtcatcggaaccggatggacagagttaagaaggaatgggaagaagcggaattacaggccaagaacctgccaaaggccgagaggcagaccctgatccagcattttcaagccatggttaaagccctggagaaggaggccgcatccgagaagcagcagttggtcgaaacccatctcgcccgagttgaggcaatgttgaacgatcgtcgtagaatggccctcgagaattacctggccgcactccaatccgatcctccacgcccacacagaattctccaggcccttcgtcggtatgtcagagcggaaaacaaggatcggctgcatacaatccggcattaccagcatgtgctggcagtggatcccgaaaaagctgcgcaaatgaagagccaggtgatgacacacctacacgtgatcgaagagcgcagaaatcagtcactctcactgctttacaaggttccatatgtggcgcaggagatccaggaggaaatagatgagctgctgcaggagcagagagcagacatggatcaatttacagcctcaataagtgagacaccggtggacgtacgcgtatcctccgaagagagcgaggagattccccctttccacccattccaccccttcccagcactgcctgaaaacgaggacactcagccagagctttaccacccaatgaagaagggctcaggtgtgggagagcaggacgggggactgattggagccgaagaaaaagtgattaacagcaagaataaagtggacgaaaatatggtaattgacgagactttggatgtgaaagaaatgatctttaacgcagaacgagttggtggcctcgaggaagaacgggaatctgtggggccactcagagaggatttttccctttcgtcttccgcccttataggactgttagtgattgccgttgccatagccaccgtgatcgttatcagtttggtcatgctccgcaaacgccagtacggaaccatctcacacggaatagtggaagtcgacccaatgcttacacctgaagagcgccacctgaataagatgcaaaatcatgggtacgagaatcctacttacaagtacctggagcaaatgcaaatatag

SEQ ID NO: 214321 - DNA, 1977 bp, synthetic construct
  misc_feature 1..1977: note = Description of Artificial Sequence: Synthetic coding sequence
  source 1..1977: mol_type = other DNA
atgtatccggagctgcagatcaccaatgtcatggaagctaatcaaagggtaagcatcgataactggtgccggcgagataagaagcagtgtaagtccaggttcgtcacaccatttaaatgtctcgttggagagtttgtgtccgatgtactcctggtcccagagaagtgtcagttctttcataaggagcgcatggaagtttgtgaaaaccatcaacactggcatacagtcgtgaaggaggcctgcctgacccaggggatgactctatactcctatggcatgctgttgccatgcggcgtagatcagtttcatgggaccgagtatgtgtgttgtcctcagacaaagatcatcggctccgtaagtaaagaagaggaagaggaagacgaggaggaggaggaggaggaggacgaggaagaggattacgatgtctacaaatctgaattccccacagaagctgacctggaggatttcaccgaggctgccgtggatgaggacgacgaggatgaggaggaaggtgaggaagtagtggaagatcgcgactattattacgacacattcaaaggggacgattataatgaagagaaccctactgaacctgggtcggacggaaccatgagcgataaggagatcactcacgacgtaaaggccgtttgttctcaggaagctatgacaggaccctgcagagccgtcatgcccaggtggtacttcgatctctccaaaggcaaatgtgtccgcttcatatatggtggctgtgggggtaatcggaacaatttcgaatcagaggattactgcatggcagtgtgcaaggctatgattccacccacccctttacccactaacgatgtagacgtgtactttgagacttcggccgatgataatgagcacgctcgcttccaaaaggccaaagagcagctcgagattagacaccgtaaccgcatggatcgcgtgaagaaagaatgggaggaggctgaactgcaggctaagaacttgccgaaagccgagcggcagactcttatccagcactttcaagccatggtcaaagccctggagaaggaggcggcatccgagaaacagcagctggtagagacacacctcgcaagggtggaggctatgctgaatgatcgtagaagaatggccctggaaaactacctcgctgccctgcagtcagacccaccgcgtccacaccggattctacaggctctgaggcggtatgtcagggccgagaacaaagatagactccataccattaggcattatcagcacgttctagcagtcgatcctgagaaagcagcccagatgaagagccaggtgatgacgcatctgcacgttattgaagagcgccgaaaccagtctcttagtctcctgtacaaggtcccttacgtcgcccaggagattcaggaagaaattgacgaactgctgcaggagcagagagcagacatggaccagttcacagcctccattagcgaaaccccggtagatgtgcgcgtgtcttccgaggaatccgaagagatcccacccttccacccgttccacccgtttccggcactgccagaaaacgaaggctctggtgtgggcgagcaggacgggggacttatcggggctgaggaaaaagtaattaactcaaagaataaggtggatgagaacatggtgatcgatgagacactggatgtcaaggagatgatttttaatgccgagagagtgggaggcctagaagaggagcgagagtccgtgggacccctgcgtgaggatttttcattgtccagtagcgccctgatcggccttctggtgattgccgtggccatagccaccgtgattgtgatctcacttgtcatgcttaggaaaagacaatatggtacaatatctcacggaattgtggaagtcgacccgatgctgacacctgaagagagacatctcaataagatgcagaaccatggttatgagaaccccacctacaagtacctggaacagatgcaaatttag

SEQ ID NO: 214322 - DNA, 1758 bp, synthetic construct
  misc_feature 1..1758: note = Description of Artificial Sequence: Synthetic coding sequence
  source 1..1758: mol_type = other DNA
atggcagccgtggagctcgaatggattcccgagaccctgtacaacacagccataagcgcagtagtggacaactatattcgttcaagacgcgacatccggagccttcccgagaacatacagttcgacgtgtattataagttataccagcagggaagactgtgccaattaggatcagagttttgtgagctggaggtattcgccaaggtactcagggcactggataaacgccacttattgcatcattgttttcaggccctcatggaccacggagtcaaagtcgcgtcagtgctagcttatagcttttcccgccgatgctcatatatcgctgagagcgacgcagccgtcaaagaaaaggccatccaagttgggtttgtgctgggtgggttcctgagcgacgccggatggtactcagacgcagagaaggtttttctgtcttgcttacaactttgtacacttcacgacgagatgctgcactggttccgggcagttgagtgttgcgtgaggcttcttcatgtacgaaacggaaattgcaaatatcatctcggggaggagacctttaagctagctcagacatatatggacaaacttagtaagcacggtcagcaagccaataaggctgctttgtatggggagctctgcgccctcttgtttgccaaatcacactacgatgaggcgtataagtggtgtattgaagctatgaaggaaataaccgctggactgcctgttaaggttgtcgtagacgtgttaaggcaagcctccaaagcctgcgtggtcaagcgcgagttcaagaaggccgaacaactcattaagcacgctgtgtacctcgcacgggaccactttgggtccaaacaccctaagtacagtgacacgttgctcgactacggattctacttgctaaacgtggacaacatctgtcagagtgtggcgatataccaggctgctttggatattagacagtctgtctttggcggtaaaaacattcacgtggcaaccgctcatgaagacctggcatactctagctacgtgcaccagtattccagtgggaagttcgataacgctttgtttcacgcggagcgagccattggaatcatcacacacatccttcccgaagatcatctgctcttggcaagttcaaaaagagtcaaggccctgatactcgaagagatcgccatcgattgccacaacaaagagacagaacaacggctcctgcaagaagctcacgacctgcatcttagcagtttacagctcgccaaaaaagcattcggagagttcaatgtccagactgctaaacattatggtaatctgggcaggctataccagtctatgcgcaaatttaaggaggcagaggagatgcatataaaggctatacaaatcaaagagcaactgctcggccaggaagactatgaggttgctctctccgtggggcatctagccagcttatacaattatgacatgaaccaatacgagaatgctgaaaagctctatctgcgatccatcgctatcggaaaaaaactatttggagagggctatagtggtcttgaatacgactatcgtgggctcataaaactatacaactccattgggaattacgagaaggtcttcgaatatcataacgtcctttctaattggaaccgcctccgtgatagacagtacagcgtgactgacgccttggaggatgtgtccactagccctcagtcaaccgaagaagttgtccagtctttccttatctcccagaacgtggaaggtccctcatgttag

SEQ ID NO: 214323 - DNA, 4974 bp, synthetic construct
  misc_feature 1..4974: note = Description of Artificial Sequence: Synthetic coding sequence
  source 1..4974: mol_type = other DNA
atggacagtaaaaaaagaagctccaccgaggcagaggggagcaaagagcggggtttggtgcatatctggcaggccggatccttccccatcacacctgaaagactgcctggctggggcggtaaaactgtgctgcaggcggcactgggcgttaagcatggcgtcctgctcactgaggatggggaggtgtatagttttgggacacttccatggcgctcaggtcctgttgagatctgtccctcctcccctattctcgagaacgccctggtgggtcagtatgtcataactgttgcgaccggcagcttccacagtggtgccgtcacagataatggagtggcctatatgtggggagagaacagcgctggccagtgcgctgtggcaaaccaacagtatgtgcctgagcctaaccctgtgtccattgctgatagcgaggcttctcctcttttagcagttcgaattctgcaacttgcttgtggggaggaacatacattagcgctcagtataagcagagagatttgggcttggggaactggatgtcaactggggctgatcaccactgcatttccagtgacaaagccacagaaagtggagcatctggctggcagggtggttcttcaggtcgcctgcggtgcattccactctctcgcgctagtccagtgtctaccctctcaggatcttaagccggtccctgagcgatgcaaccagtgcagccaactccttatcaccatgaccgataaagaggaccacgtgattattagcgattcccactgctgcccactcggcgtcaccctcactgagagccaggcagagaatcatgctagtacggccctgtccccttctactgagactttagatcgacaagaagaagtgttcgaaaacaccctggtcgccaatgatcagagtgttgccacagaattgaatgccgtgagcgctcagatcactagttcagacgccatgtctagccagcaaaatgtgatgggtacaactgagatctcgagcgccagaaacattccatcatatcccgatactcaggctgttaacgagtatttgcgaaagttaagtgaccactccgtaagagaggattcagaacacggagaaaaacccgttccgagccagcccctgctcgaagaagcaatcccaaaccttcactctccccctacaacctccactagcgccttgaacagcctagtcgtgagctgcgcctcagccgtcggggtcagggtggccgctacatatgaagctggtgccttgtccctcaaaaaggtaatgaatttctacagcaccacaccttgcgaaaccggggcacaggcaggtagctccgcaataggaccagagggcttaaaggactcaagagaagaacaagttaaacaagagtccatgcagggcaaaaagagttcgagcctggttgacatcagggaggaagaaaccgaggggggttccaggcgcctttcgctacccggattgcttagtcaggtgtcccctcggctcctgcgcaaggcagcccgagttaaaacgcgaaccgtcgtcttaacccccacttattcaggagaggctgacgctctactcccatctctcagaaccgaagtgtggacttggggaaaagggaaggagggacagcttgggcatggcgacgtgctgccacgccttcagccattatgcgtcaaatgcctagacggtaaggaggtcattcatctagaggcaggcggataccatagcctggcgctcacagccaagtcccaggtgtactcatggggctccaacaccttcggacagctgggacatagtgactttccaactacagtgccccgtctggccaaaatcagcagcgagaatggtgtgtggtctatagctgctggacgagattatagtttgttcctcgtggataccgaagacttccagcccggactctactacagcgggagacaggaccccacggagggtgacaatctgccagagaaccactccggatctaagacccccgtactgttgagttgctcaaaacttggttatatcagcagagtgactgcgggaaaggattcttatctcgccttagttgacaagaatatcatgggatacatcgcatcccttcacgagctagccaccaccgagaggaggttttactctaaattgtcagatattaagtcccagatcctgcgcccactcctgagtctggagaatctgggcactacaaccaccgttcagttacttcaggaagttgctagtcgtttctcaaagctgtgctatctgatcggccagcatggcgctagtttgtcaagttttctgcatggggtgaaggaggcacgcagcctcgttatactgaaacattcaagcctgtttcttgatagttatactgagtactgtacctccatcacgaacttccttgtgatgggtggttttcagctgctggcgaagcccgctatagatttcctgaacaagaatcaagagctgctacaggacttgagtgaggtaaatgatgagaatacccaacttatggaaatactgaacaccctttttttcttgccaattaggcgactccacaactacgccaaggtattattgaagctggcaacctgtttcgaagtggcgtccccggagtaccagaagctgcaagacagctccagctgctacgaatgccttgccctgcatctgggcagaaagcggaaggaagcggaatacacactgggattctggaagacatttccaggtaaaatgactgatagcttgagaaagcccgagaggagacttctgtgtgagtcatcaaatcgagcgctatccctccaacacgccggacggttctccgttaattggttcatactgtttaatgatgccttggtacacgcacaattttccactcatcacgtctttcccttggcgacgctctgggctgagccactaagcgaggaagccggaggggttaatggtctgaaaattacaaccccagaagagcagtttaccctgattagttcaactccacaggagaaaacaaaatggttacgggctatctctcaggccgtggatcaagccttgaggggcatgtcagatcttccaccctatggttctggtagtagcgttcagcgccaagagccccctatttcccgctccgctaaatataccttctacaaagacccgaggttgaaggatgctacttacgatggaaggtggctaagtggtaaacctcatgggcgtggggttctcaaatggcctgacggaaaaatgtactcgggcatgtttcgcaacggactggaggacgggtacggtgagtaccgaatcccaaacaaagccatgaacaaggaagaccactatgtaggacactggaaggagggtaagatgtgtggacagggtgtctattcctatgcaagtggcgaggtgtttgaaggctgcttccaggacaatatgagacacggacacggactgctgcgatctggaaaactgacatcgagcagccctagtatgttcattgggcagtgggtcatggacaaaaaggccggttacggagtttttgacgatatcacgaggggtgagaagtacatggggatgtggcaggatgacgtgtgccaagggaacggggtggtggtaacacaatttgggctgtactatgagggcaatttccacctgaataagatgatgggtaacggcgtgctactcagtgaggacgacacaatatacgagggtgaattctccgatgactggaccctcagcggtaagggcaccctgaccatgccgaacggggattacatcgaaggttacttcagtggcgaatgggggtccgggatcaagattaccggaacttattttaagccctccttgtatgaaagtgacaaggatcgtccaaaagtcttccggaaactcgggaatctcgctgtccccgctgacgagaagtggaaggccgtgtttgatgagtgctggaggcaattggggtgcgagggccctggccagggcgaagtctggaaagcctgggataacatagccgtagcgctgacaacctcccgacgtcagcaccgagattcaccagaaatcctgtcgagaagtcaaacccagactctggagagcttggaattcattccccaacatgtcggcgctttcagtgtggagaagtacgacgacatcagaaagtatctgattaaggcatgtgacacacctctccatcctctgggtcggcttgtagaaacactcgttgcagtgtaccgaatgacgtatgtaggtgtaggcgctaacaggcgcctgctgcaggaagcagtgaaagagatcaagtcctacctgaagcgaatatttcagctcgtgcgatttttatttccggagctgcccgaggagggctccactatcccgctcagcgcaccgcttcctaccgagcggaaaagcttttgtactggcaagtctgattcaaggtccgagtcaccagagcctgggtatgtggttacctcttcaggactgttgctgccagtgctgcttcccaggctgtatccgccactgttcatgctgtacgccttggataatgaccgcgaagaagatatttattgggagtgtgtgctgagacttaataagcaacctgacatcgccctgcttggattcctgggcgttcagaggaaattctggcccgcaactctgtccatattgggcgagagcaagaaagtgctcccgacaaccaaagacgcatgtttcgcttctgctgtggaatgcctacaacagatcagcactacattcactccatccgataagctgaaggtgattcagcagacttttgaagagatcagtcaaagcgtcctcgctagtctgcatgaggacttcttatggagtatggacgacctgttccctgttttcctttatgttgtgttaagagccaggatccgcaacctgggttctgaggtgcacctgatcgaggacttgatggacccatatctgcagcatggcgagcaggggattatgtttaccaccctcaaagcctgttattatcagatccaaagggaaaagttgaattat

SEQ ID NO: 214324 - DNA, 420 bp, synthetic construct
  misc_feature 1..420: note = Description of Artificial Sequence: Synthetic coding sequence
  source 1..420: mol_type = other DNA
atggacagtaagaagagaagttctaccgaggcagagggatctaaggaacgtggcctggtgcacatatggcaagcagggagcttcccaatcacccccgaacgtcttcctggatggggcggaaaaaccgttctgcaggccgcattaggtgtaaagcatggggtgctgctgaccgaagatggcgaggtatatagcttcggtaccctgccctggcgaagcggccctgttgagatttgccctagttcaccaatcctcgaaaacgctctggtgggccaatacgtaatcacagtggccacaggctcttttcactcaggcgctgtcaccgacaatggcgttgcctacatgtggggcgagaactcagctggccaatgcgctgtggcaaaccaacagtatgtgcctgaacccaatcccgttagcatctag

SEQ ID NO: 214325 - DNA, 321 bp, synthetic construct
  misc_feature 1..321: note = Description of Artificial Sequence: Synthetic coding sequence
  source 1..321: mol_type = other DNA
atggacagcaaaaagcggtcctccactgaagcagaaggatccaaggagcgcggtctggtccacatctggcaggccggtagtttccccatcacacctgagaggctgcccggttggggagggaagaccgtcctgcaggctgctttaggagtgaagcatggggtccttctcactgaggacggcgaagtttacagcttcgggactttgccctggcggagcggccctgtagaaatatgcccgtcatcccctatcctggagaacgcactggttgggcaatacgtgattacggttgccacgggctctttccatagtggggctgtgtag

SEQ ID NO: 214326 - DNA, 1758 bp, synthetic construct
  misc_feature 1..1758: note = Description of Artificial Sequence: Synthetic coding sequence
  source 1..1758: mol_type = other DNA
tagctagccctggtggacaaaaatatcatgggatatatcgcaagcctgcacgaacttgccaccaccgagaggagattctactcaaagttgagcgacataaagagtcagattctgcgcccactgctgtcattggagaatcttgggacaacaactaccgtacagcttctgcaggaggtggcgtcaagattttcaaagctgtgctaccttatcgggcagcacggcgcttcactttcaagttttctgcacggcgttaaggaggctaggtctttggtaatactaaaacacagcagcttgttccttgacagctataccgaatattgtacatcaatcaccaactttctcgtcatgggcggatttcaactgctcgctaagccagccatcgactttctaaataaaaaccaggaacttctacaggacctgagtgaggtgaatgatgaaaatacacagctcatggaaatattgaacaccctgttcttcttgccaatccggagactgcacaactacgctaaagtgttgttgaagctggccacgtgctttgaagttgcttctcccgagtaccagaaattgcaagactcttcatcctgttatgagtgtcttgctttacacctggggcgaaagcgcaaagaggccgagtacacattgggcttttggaaaacgttcccaggaaaaatgaccgactccttgagaaagcctgagagaaggctactgtgcgaatcctccaaccgtgccctgtccctgcagcacgcaggcaggttcagtgtgaactggttcatcctcttcaacgatgccttagtacatgcccagttctctacccaccacgtatttcccttagctaccctgtgggcagaaccactctctgaggaggccggtggtgtcaatgggctgaagattactacacctgaggagcagtttacactcatatccagtactccacaggagaagaccaaatggctgcgggcaatcagccaggcagtcgatcaggcactgcgtggaatgagcgacctgccgccttatggatccggctccagcgtgcagcgccaggagcccccaatctccaggagcgctaagtataccttttataaagacccacggctgaaggacgccacatatgatggcaggtggttgagcggcaaaccacatgggagaggcgttttgaaatggccagacggcaaaatgtatagtggcatgtttcgcaatgggctggaagacggatatggcgagtatagaattcctaacaaagctatgaataaagaagaccattacgtggggcactggaaggagggcaagatgtgcggccagggagtctacagctacgcttctggcgaggtatttgaggggtgcttccaggacaatatgaggcatggccatgggctgctgcgctctggaaagctaaccagcagttctccttctatgttcatcggacaatgggtgatggataaaaaggccggatacggtgtattcgatgacatcactcgcggagaaaagtatatggggatgtggcaggacgacgtgtgccagggaaatggagtggtggtaactcagtttggcctgtactatgaaggcaactttcacctcaataagatgatgggaaatggggtgttgctgtccgaggacgatacaatctatgaaggagagttttcggacgattggacgctctctgggaaagacaactctggtctaatcgaacaagtggggaaatgctcactacttccatactttctaaaggtctgcgaggcactggtcctttttttgctgtag

SEQ ID NO: 214327 - DNA, 1731 bp, synthetic construct
  misc_feature 1..1731: note = Description of Artificial Sequence: Synthetic coding sequence
  source 1..1731: mol_type = other DNA
atgggctatatagcttccctgcatgaactggcgaccaccgaaaggagattttacagcaagctgtctgatattaagtcccagattttgcggccactgttaagtcttgagaatttgggcactacaaccaccgtccaacttctgcaggaggttgccagtcgctttagcaaattgtgttatctgatcggacagcatggcgcatcactcagcagtttcctgcatggagttaaagaggcgcgtagccttgtcattcttaaacacagctcactattcctcgactcctatactgagtattgcacgtctatcactaatttcctcgtcatgggcggatttcagcttttagcgaaacctgctatagactttctaaataagaaccaagagctgctacaggatctgtctgaggtgaatgatgagaacacgcagcttatggagatcctgaacacactgttctttttacctatcaggcgacttcataactacgccaaggtgcttctaaaattagcaacctgttttgaggttgccagtcctgagtatcagaagctccaggactcatctagctgttacgaatgcctcgcactgcatctagggcgtaaacgaaaggaagccgaatatacacttggattctggaaaactttccctggaaaaatgaccgactcccttcgcaaacctgaaagaaggctgctctgcgagagctctaaccgggctctttccttgcaacacgcaggcaggttctccgttaactggtttattttattcaatgatgctctggtacacgcccagtttagtacacaccatgtatttcctttggctacactttgggccgaacctctctcagaggaagccggtggggttaatggtctgaagatcaccactcccgaggagcagtttacactgatcagttcaacaccgcaggagaagaccaagtggctgcgggctataagccaagctgtagaccaggcgctgagggggatgtctgacctgcccccatatggaagtggctcgtccgtacagagacaggagcccccaattagccgaagcgcaaaatacacattctacaaggacccgcgtcttaaggacgctacctatgatggacgttggttaagcggcaagccccacggcaggggcgtcctgaaatggcctgatgggaaaatgtacagtggtatgtttcgtaacggcctggaggatggttatggggagtataggatccccaacaaggcgatgaataaagaagatcactatgtagggcattggaaggaagggaaaatgtgcggtcagggtgtctatagttacgcttcgggtgaagtattcgaaggatgtttccaggataatatgaggcacggtcacgggctgctccggtctggtaagctgacctcatcttccccaagtatgttcattggacagtgggttatggataaaaaagcaggctacggcgtgtttgatgacatcacccgcggtgagaagtatatggggatgtggcaagatgacgtgtgccaggggaatggcgtggtggtcacccaatttggtttgtattacgaaggaaatttccatctgaataagatgatgggcaacggggtgttgctctctgaagatgataccatttatgaaggcgagtttagcgatgactggaccctgagtggcaaggacaactccggtctaattgaacaggttggtaagtgttccctcctgccctacttccttaaggtatgtgaagccctcgttctgtttttactttag

SEQ ID NO: 214328 - DNA, 1191 bp, synthetic construct
  misc_feature 1..1191: note = Description of Artificial Sequence: Synthetic coding sequence
  source 1..1191: mol_type = other DNA
atggacagcaagaaaaggtcatccaccgaggccgaagggtcaaaagagcgtggccttgtgcatatttggcaagcgggaagctttcccatcacgccagagaggctgcctggatgggggggaaagaccgtgctgcaggctgccctgggtgtcaagcacggagtactgctgacagaggacggcgaggtgtattccttcggcacactcccttggagatcggggccagtagaaatatgcccatcttctcccattctggaaaatgctctcgtgggccagtacgtcattactgtcgctactggttctttccatagcggtgcagtaacagataacggagtggcctacatgtggggggagaatagcgccggacaatgcgctgtggccaaccagcagtacgtgcctgaacccaatcccgtaagtatcgccgattctgaggctagtcctcttcttgctgtgaggatcctccagctggcttgtggagaggaacataccctcgccctttccatatctagggagatctgggcttgggggacagggtgtcaactgggactgataaccactgctttcccagtcacaaagcctcaaaaggttgaacacctcgcgggacgtgttgtgctccaggtggcctgcggcgctttccactccttagcgctggtccagtgcctcccctcccaggatctgaaacctgtaccagagcgatgtaatcagtgctcacagctcctcataactatgactgacaaagaagatcacgtgatcatcagcgactcccactgctgtccactcggagtgacgcttaccgagagtcaagccgagaaccacgctagcaccgctctctctccatctacagagaccttggataggcaggaagaggttttcgagaatacactggtggccaacgaccaatctgtcgccaccgagctgaatgcagtgtcagcccagatcacatcctcggacgccatgtcatctcagcagaacgtgatgggaaccacagagatcagctctgctaggaatattccatcttaccctgatacccaggctgtgaacgaatatcttagaaagttgagtgatcactctgtgagggaggactcagaacacggcgagaagcccgtgcccagtcaggtgccagcgcagttctacaaaattaaggtgtgtctcgaactcaactgtatgggattcagcttagaaacacttaagtag

SEQ ID NO: 214329 - DNA, 2178 bp, synthetic construct
  misc_feature 1..2178: note = Description of Artificial Sequence: Synthetic coding sequence
  source 1..2178: mol_type = other DNA
atggaacagtcaaacgactccctgcgggtgaaccataatgacggcgaggaatccaagacatccgcccaggtgttcgagcaccttatctgcatggattcacgcgatagctcttttggccaaaacgacagccctactgtcctgccgatcactacacgcgaggccaacaactccctaattagtcaaaacatccctggccctctcacgcagacgcagacactgtccgcagaacaattccacctggtggaccaaaacgggcaggccatccagtacgagctccagagccttggtgagagcaatgcgcaaatgatgattgtggcaagtcctaccgagaacgggcaggtcctccgtgtaataccaccgactcagaccgggatggctcaggtgattatcccccaaggtcaactggtagacgtgaattccccccgagatgtgccggaagagaagccctcaaatcgcaacctgcctaccgtccgcgtcgatacgctggcagacaacaccagcaactatatcctgcacccacaaacctccttccctctgccaaagaaatccgtaactggcatgctggaagagcctttgctggggcctctgcagccactgtcatcaaacacccccatttgggcttgccggctgcgttcctgtgagaaaatcggagattcatacaggggatattgtgtttctgagactgagctggaatcagtgcttacttttcacaagcagcagacccagagcgtgtggggtactagacagagtccctcaccggctaagcccgctaccagattgatgtggaagtctcagtatgttccttacgatgggatcccttttgtcaacgccggatcacgggcagtggtgatggaatgtcagtacggccctaggcgtaagggctttcagttgaagaaggtgtcggagcaggaaagcaggagctgccagctctacaaagctacctgcccagccaggatttacatcaaaaaagtgcagaagttcccagagtatcgtgtacccacagaccctaaaatcgataagaagataattcgtatggagcaggaaaaggccttcaatatgctgaaaaaaaacttagtggatgcaggaggggtgttaaggtggtatgtccagttacccactcagcaagcccaccaataccatgagctagaaacgccatgtctcaccctgtctcccagtccatttcctgtttcctcactcgaagaagaagaaacggcagtgagggatgaaaactgcgctctgcccagccggttacacccccaggtggcacacaagattcaggagttggtcagccaaggcatagaacaggtgtatgcagtgcggaagcagctccggaagtttgtcgagcgtgagctcttcaagccagatgaggtgcctgagcggcacaacctatctttttttcctacagtgaacgacattaagaaccacattcatgaagtgcaaaagtccttacgcaatggggacacagtgtacaatagcgagattatccctgcgaccttgcaatggacaaccgatagtgggaatatcctcaaggaaaccatgactgtcacgtttgcagaaggtaactcacctggggagagcattacaacaaaagtggaaaccaaccagacccgcggatccttatcacccgagcccacccacctgctgtctagcctgagtagctttcagccaaaaatattcacccagttgcagggattgcagctacaacctcgatacacatctcctgacgagagcccagcagtcgtgagtgtgaacaaccagccctcatcttctccgtccgggctgctggacactattggtagcgccgtcatgaataacaattcgctcctactgggccaatcacacagcttgcagcgagatacctgtttgactcagaataattcaactgcaagcacaatgggtaacttaccggagccagatcagaatcttgtcgcaatggatgaactggtcgaggtgggtgacgtggaggatacaggaaacctggaaggcacagtccatcggattctactgggtgacgtacaaactatccccatccagatcatcgacaatcattccgccttgatagaagagaaccccgagagtactatttcagttagccaggtcaagcaagaacccaaagaacccgctttgtcaatggaggcgaagaagaccgtggactataagaaacttagtgctacttag

SEQ ID NO: 214330 - DNA, 2178 bp, synthetic construct
  misc_feature 1..2178: note = Description of Artificial Sequence: Synthetic coding sequence
  source 1..2178: mol_type = other DNA
atggagcagtccaatgactcactgagggtgaatcacaacgacggggaagagtcgaaaacaagcgcccaggttttcgagcacttgatctgcatggatagccgcgacagcagcttcgggcaaaatgactcccctacagtgctgcccatcactacccgagaggccaataattcccttatttcacagaatattcctgggcctctgactcagacgcagacactgagcgcggaacaattccacctcgtagaccaaaatggccaggccattcaatatgagctccagtccctcggggagagtaacgcacagatgatgattgtggcctcacccaccgaaaatggacaggttttgagagtgattcctccaacccagactggaatggcccaggtcatcatcccccaggggcagctggtcgatgtgaactctcccagggatgtccccgaggaaaagccttcgaatcgaaatttacctaccgtgcgtgtggataccctagccgataatacaagcaactatatcctccatccgcagacatcatttcccctacctaaaaagtccgtcaccgggatgctggaggaacccctgctgggtcctcttcagcctcttagctccaatacccccatttgggcttgccggttgcggtcttgtgagaagataggagacagttacagggggtactgtgtgtccgagactgagttggagtcagtgctgaccttccacaagcagcagacacagtccgtatggggcacgagacagtctccgtcaccagcaaaaccagccacccggttaatgtggaagtctcaatatgttccttacgacggcataccctttgttaatgcagggtcgagagcagtggtgatggagtgccagtatgggcctcggaggaaaggctttcaattaaaaaaagtgtccgagcaggagtcacgcagctgtcagttatataaggccacctgccccgcacggatctacattaagaaggtgcaaaagtttccagaatacagagtgcccactgaccccaaaatcgacaaaaagattatccgcatggaacaagaaaaggcgttcaacatgctgaagaagaacctggtagacgccggtggcgtgttgaggtggtacgttcagttgcctacccagcaggctcaccagtatcacgagctagaaaccccctgccttacacttagtccttcaccttttcccgtcagcagcctggaagaagaagagacagcggttagggatgagaactgcgcactgcctagccgattgcacccacaagtggcccacaagatccaggagcttgtctctcaggggatagaacaggtctacgctgtcagaaagcagctgaggaagtttgtggagcgggagctttttaagccagatgaagtgcccgagcgtcacaacctctccttctttcctactgttaacgacattaaaaatcacattcatgaggtgcagaagtcactgcggaacggagacacagtatataactccgagatcattcctgccaccctgcagtggaccaccgacagtggtaacatactgaaggagactatgacggtcactttcgccgaaggaaacagccccggagaaagcatcacaacaaaagttgagaccaatcagactaggggatccctatccccggagcctactcacctcctatcatctcttagttcgttccagcctaaaattttcacccaactgcaggggctccagctgcagcctcggtataccagccctgacgaatctcctgctgtggtctccgtgaacaatcagccatcctccagcccgagcggcctgctcgatacaattggatctgccgtgatgaacaacaactctctcctcctgggccagagtcacagtctgcagcgagatacatgtcttactcagaataatagcacggccagtacaatgggcaacttacccgagcccgaccagaatttagtggcaatggacgagctggtggaggtaggagatgtggaagatactgggaacttagagggtaccgtgcacagaattcttctgggtgacgtacaaaccatcccaattcagatcattgataaccacagcgcactcattgaagagaatccggagagtaccatctcagtgagccaggtgaagcaagagcccaaagaaccagcactgtctatggaggctaaaaaaacagtggattacaaaaagctgtcagcgacttag

SEQ ID NO: 214331 - DNA, 165 bp, synthetic construct
  misc_feature 1..165: note = Description of Artificial Sequence: Synthetic coding sequence
  source 1..165: mol_type = other DNA
atggagcagtccaacgattctctgagagtcaatcacaatgacggggaggaaagtaagacatccgcgcaggtgttcgaacacttaatctgcatggactcccgagactcatcatttgggcagaatgactcccccaccgtgttacccattacaactcgcgaggcctag

SEQ ID NO: 214332 - DNA, 396 bp, synthetic construct
  misc_feature 1..396: note = Description of Artificial Sequence: Synthetic coding sequence
  source 1..396: mol_type = other DNA
atggagcagagcaacgacagcctgcgggtgaatcacaacgacggtgaggagtccaaaacctcagcccaagtctttgaacatctgatctgcatggactctcgagactcctccttcggccagaatgacagtcccaccgtccttcccatcacgacccgggaggctaataatagcttgatctctcagaacattcctgggcctctcacccaaacccagaccctgtcagcagagcagttccacctcgtcgatcagaatggccaggctatccagtatgagcttcagagcctgggcgaatcaaatgctcaaatgatgatagtcgccagcccaaccgagaacggccaggtactgcgcgtgatcccccctacccagacaggcatggcccaggtgataatcccctag

SEQ ID NO: 214333 - DNA, 66 bp, synthetic construct
  misc_feature 1..66: note = Description of Artificial Sequence: Synthetic coding sequence
  source 1..66: mol_type = other DNA
atggaacagagcaatgattcactcagggtgaaccacaacgacggtgaagagagcaaaacaagttag

SEQ ID NO: 214334 - DNA, 222 bp, synthetic construct
  misc_feature 1..222: note = Description of Artificial Sequence: Synthetic coding sequence
  source 1..222: mol_type = other DNA
atggagcagtctaacgactccctccgcgtgaatcataatgatggggaagagtccaagacctcagctcaggtattcgaacatctaatctgcatggattctagggactcctctttcggtcagaacgacagcccgaccgtgctacccatcacgactcgagaggcaaacaacagtttaataagtcagaacatacctggaccactgacccagacgcagaccctatag

SEQ ID NO: 214335 - DNA, 2178 bp, synthetic construct
  misc_feature 1..2178: note = Description of Artificial Sequence: Synthetic coding sequence
  source 1..2178: mol_type = other DNA
atggagcaaagtaacgatagcctgagagtcaaccacaacgacggggaggagtccaagaccagcgctcaggtatttgagcacctgatttgtatggacagcagagacagctcgtttggccaaaacgattcccctactgtgttaccaattaccaccagggaggcaaataatagtctgatatcccagaacatccccggtccactcacgcagactcaaactctgagcgctgaacaattccacctggtggatcagaacgggcaggccatccagtacgaattgcagtctcttggagagtccaatgcacagatgatgatcgtggcgtcccctaccgaaaatgggcaagtgctcagagtgatcccacccacacaaacagggatggcccaggtaataatcccacagggacagctggtggacgtcaactctccccgtgacgtgccagaagagaagcctagtaaccgcaatttgcctacagtgagagtggacactctggcggacaacacttcaaactacattctgcatcctcagacctctttccccctgcctaaaaagtcagttaccgggatgctggaagagcccctgttaggcccactgcagccgctgagcagcaatacaccgatatgggcgtgcagactcaggtcgtgtgagaagatcggcgacagctacagaggctattgtgtgagtgagacagagctggagtctgtcctgactttccacaagcagcagactcagtccgtgtggggaacgaggcaatctccaagcccagccaagccagccacacggctcatgtggaagtctcagtatgtcccctatgacggcatcccattcgtgaatgcaggctcaagggccgtcgtgatggagtgtcagtatggccctaggcggaagggttttcagctaaagaaggtttcagaacaggaaagccggtcttgtcaactgtacaaggcaacatgccccgctcgcatttacatcaagaaagtgcagaagttccctgaatacagggtaccaacagatccaaagatcgacaagaagattattagaatggagcaagagaaagcgttcaacatgctgaaaaaaaacctagtcgacgctggtggtgtgctgagatggtacgtgcagctgcctacccaacaggctcaccagtatcacgagctggagaccccttgcctgaccctatctcctagtccgttccctgttagctccctagaagaggaggagacagcagtcagggatgagaactgcgccttacctagtcgccttcatccgcaggtggcgcataagatccaggaactggtgtcccaaggaattgaacaggtgtacgccgttcgcaagcagctgaggaaattcgtagagagagagttgtttaaacccgacgaggtacccgaacgccacaacctgtcctttttccctacagttaatgacattaaaaaccacatccacgaagtgcaaaagtctttacgtaatggcgacacagtgtacaactctgaaatcattcctgcgacactacagtggacgaccgatagtggtaacatcctgaaggaaaccatgactgtgactttcgccgagggcaattcccctggagagagcattactacaaaggttgaaactaaccagactagaggctctctctcacccgagcctacccacctactttcaagtctttctagttttcagcccaagatcttcacccagctacaggggttacagttgcaaccccgatatacgagccctgatgagagtccagctgtagtgagtgtgaacaatcagcccagttcctccccaagcggcctgctcgataccatcggaagtgcggttatgaacaataatagtctgctgctgggacagtcccattccctgcaacgggacacttgtctgacccagaacaacagcactgcttccactatgggtaacctcccagaacccgatcagaatctggttgccatggacgaacttgtggaagtgggggacgtggaagatactggaaacctggagggaacagtgcatcggatcttactgggcgacgtacagacaatccccattcaaatcatcgataatcacagcgcgctgattgaagaaaaccccgaatccacaatctctgtctctcaggtcaagcaggagccgaaagaacctgccctatcaatggaggctaaaaagacagtggattacaaaaagctgagtgccacttag

SEQ ID NO: 214336 - DNA, 222 bp, synthetic construct
  misc_feature 1..222: note = Description of Artificial Sequence: Synthetic coding sequence
  source 1..222: mol_type = other DNA
atggaacagagcaacgacagcctccgtgtcaaccacaatgacggcgaggagtcaaaaaccagcgcccaagtgtttgaacacttaatttgcatggactctcgcgactcctctttcggacagaatgacagtccaaccgtcctgccaataaccactcgcgaagccaataattctctcatctctcagaacatccctggccctctgacccaaacccaaacattatag

SEQ ID NO: 214337 - DNA, 288 bp, synthetic construct
  misc_feature 1..288: note = Description of Artificial Sequence: Synthetic coding sequence
  source 1..288: mol_type = other DNA
atggagcagagtaatgatagtttgcgtgtaaatcataacgacggcgaagaaagtaagacctccgcccaagtcttcgaacacctgatttgcatggactccagggattcatcgttcggccaaaatgactctccaacagtgctccccatcacaactcgcgaggctaataatagtctgatttcacaaaacattcccggaccccttactcaaactcagactctatccgctgagcagtttcacctggtggaccaaaacggtcaggctattcagtacgagctgcagagcctgtag

SEQ ID NO: 214338 - DNA, 624 bp, synthetic construct
  misc_feature 1..624: note = Description of Artificial Sequence: Synthetic coding sequence
  source 1..624: mol_type = other DNA
atgttggaagcgtggaacctgaacctttctcactacttgaaacatctcatatgtatggactcccgcgattcatcttttggccagaatgatagtccaacagtgctccctataacaacccgcgaagcaaataattctctgattagccagaatatcccgggaccactgactcagactcaaaccctgagtgccgaacaattccatctcgtcgatcagaacgggcaggctatccagtatgaactgcaaagtcttggggagtcgaatgcgcagatgatgatcgtcgcaagtcccacagagaatgggcaggtgctcagagtgatccctcctacccagaccggaatggctcaagtcattattcctcaggggcagttagtggacgtaaactctccgagagatgttcccgaagagaagccctcgaatcggaatttgccaacagtccgggtcgataccctggccgataacacctctaattacatcctgcacccccagacctcattcccactgcccaaaaagagcgttaccggtatgcttgaagaacctctcctcggtccactgcagcctttgagctcaaacacgccgatatgggcttgccggttgaggtcgtgtgagggggtagaattatggtag

SEQ ID NO: 214339 - DNA, 1914 bp, synthetic construct
  misc_feature 1..1914: note = Description of Artificial Sequence: Synthetic coding sequence
  source 1..1914: mol_type = other DNA
atgctggaagcttggaatctgaatctctctcattacctcaagatgattgtcgcctcccccacagaaaacggtcaggtgcttcgcgtgatacctcctactcagactggtatggcgcaagtcatcataccgcaaggccaactggtggacgtgaacagccccagggacgtgcccgaggaaaagccaagtaataggaacttgccaacggtgcgagttgataccctcgccgacaacacctcaaactacatcctccatccccagacatctttccctctgccaaaaaaatcagtgaccgggatgttagaagagcccttactcgggcctttacaaccactcagttctaacaccccaatatgggcctgccgtctgaggtcttgcgagaagattggcgactcataccgaggctactgcgtcagcgagacagagctcgaaagcgtgttgaccttccacaaacagcagacccagtcagtgtgggggacacgccagagcccttcacctgccaaaccagccacgcgcctaatgtggaagagtcagtatgtgccgtatgatggaatcccattcgtcaatgcgggaagccgggcagtggtgatggagtgccaatacggacctaggcggaaaggctttcagctgaagaaggttagcgaacaggaatccagatcttgccagttgtataaagcgacctgtcccgctaggatatacatcaagaaggtacagaaattccctgaatatagggttccaaccgatcccaaaatagacaagaaaataatccgaatggaacaagagaaagccttcaatatgcttaagaaaaatctcgtagacgccggaggagtattgagatggtatgtccagctcccgacacagcaagcccaccagtatcatgagttggagactccctgtttgacacttagtcctagccccttccctgtcagtagcctggaggaagaggaaaccgccgtgcgggacgaaaactgcgccttaccaagtagattgcatcctcaggtggctcacaaaatccaggaattggtgtctcagggcattgagcaggtctatgccgtgcggaaacaactgcgtaagtttgtggagcgggagctgtttaaaccagatgaggtccccgaacgtcataatctcagtttcttcccgacagttaatgatattaaaaatcacatccacgaggttcagaagagtttaagaaacggggacacggtctataattccgagatcataccggctaccctgcagtggaccacagactctggcaatatcctgaaagaaaccatgaccgttacatttgctgagggtaattccccaggcgagtctattaccactaaagtggaaaccaaccagacaaggggctcactgagtccagagccaacacatctgcttagttctctcagctcattccagcctaagattttcacccagctacaaggtctgcagcttcagccgagatatacaagcccggatgaatctcccgctgtcgtctccgtgaataatcagcccagcagttccccttctggactgctggacacaatcggctcagccgtgatgaacaataattccctccttttaggtcagtcacattctctgcagcgggacacctgtttaactcaaaataactcgacggcgtctactatgggcaacctgcccgagcctgatcaaaatctggtagccatggacgagctcgtagaggtaggagatgtggaagatacaggaaatctggaaggcacggtccaccgtatcctgctgggcgacgtgcaaacgatccctatccagattattgacaaccacagcgcattgatcgaagagaatccagagagcacgatctccgtttctcaggtgaagcaagagccaaaagagccagctctgagtatggaagccaagaaaactgtggattacaagaaactctcagccacctag

SEQ ID NO: 214340 - DNA, 1950 bp, synthetic construct
  misc_feature 1..1950: note = Description of Artificial Sequence: Synthetic coding sequence
  source 1..1950: mol_type = other DNA
atggagcagtcaaacgattctctacgggtcaaccacaatgatggcgaggagtcgaagacatctgcacaggtgttcgaaatgattgtagcctctccgacagaaaatggccaggttctgcgcgttattcctcctactcagacaggcatggcccaggtcataatcccccagggccagttagtggacgtgaactcccctagagatgttcccgaggaaaagccctccaacagaaatcttccaacagtgagagttgacacactggccgataatacctccaattacatactgcacccccagacttctttccccctccctaagaagagcgtgacaggcatgctcgaggagccccttctgggcccactgcagccactgagcagtaatacccccatttgggcgtgcagactgcgctcctgcgagaagatcggggattcttatagagggtactgcgtgagtgaaaccgagttggaatccgtgctcaccttccataagcaacagacgcaaagcgtatgggggacacgccagtccccgagccctgcaaaacccgcaactaggttgatgtggaaaagtcagtacgttccatatgacggaattccattcgtgaatgccggtagccgggcagtggtgatggaatgtcagtacggcccacggagaaagggctttcagttaaaaaaggtgagcgagcaggagagtaggagctgccagctgtacaaagctacctgccccgcacgaatctatattaaaaaggtccagaagttccctgagtatcgcgttcccactgaccccaagattgacaagaagatcatccggatggaacaagagaaggccttcaacatgttgaagaagaatctggtggatgccggaggagtgttgcgctggtatgttcagttgccgactcaacaggcccaccagtatcacgaactcgagaccccctgtctcacgctgagtccatccccttttccagttagcagcttagaggaggaggaaaccgccgtccgcgatgagaattgcgctctccctagtagattgcatccacaagtggcccataagattcaagagcttgtgtctcagggtatagaacaggtgtatgctgtgagaaagcagctgaggaaattcgtagaaagggaactgtttaagccggacgaagttccggagaggcataacctgtccttcttccccaccgtgaatgacatcaaaaatcacatccacgaggtgcaaaagtcccttcgaaacggagataccgtttataattcagagattatacccgcaactctccagtggacaactgattctggtaacattctgaaagagacaatgacagtaaccttcgcagaaggtaactcacctggggagtctatcaccacaaaggtggaaaccaatcagacacgcggatctctgtcacccgaaccgactcacctgttgtcctcactgtcctctttccagccgaaaatttttactcagctgcagggtttacagttgcaaccaaggtatacctctccagatgagtcacctgcagtggtctccgtgaataatcagcccagcagctccccgagcggcttgctggatactatcgggtctgccgtaatgaataataatagcctcctgctggggcagagccattcacttcaaagggatacctgcctgactcagaataattcgaccgcctcaaccatgggtaacctacccgaaccagatcaaaacctggtggcgatggacgagctggttgaggtcggcgatgtagaagatacaggtaatttggagggcaccgtgcaccgtatcctgctgggggacgtacagaccatcccaatccagataatagacaatcatagcgcccttatagaggagaaccccgaaagcaccattagcgtatcacaagtgaagcaggaacccaaggagcctgccctatctatggaggccaagaaaactgttgactacaaaaagctttctgctacatag

SEQ ID NO: 214341 - DNA, 558 bp, synthetic construct
  misc_feature 1..558: note = Description of Artificial Sequence: Synthetic coding sequence
  source 1..558: mol_type = other DNA
atgacgactcctaataagacacccccaggcgctgaccctaagcagctggagcgaaccggcaccgtgcgagagatcggatcccaggcggtgtggagcctttcttcttgcaaaccgggtttcggcgtggatcagcttagagatgacaatttagagacttactggcagagcgatggctctcagccccacttggttaatatacaatttcgtagaaagactacagtcaagactttgtgtatctatgccgactataagtctgatgagtcttatactcccagcaaaatatccgtgcgggtaggaaataactttcacaatctccaggagatcaggcaactagaactggtcgagccctctggttggattcacgtgccattgacagataatcataagaaaccaacgcgcacgttcatgattcagatagcagtattggcaaatcatcagaacggaagggacacgcatatgcggcagattaaaatttatacaccggttgaagagtcttccatagggaaatttcccaggtgcacaactattgacttcatgatgtatcgttccattcggtag

SEQ ID NO: 214342 - DNA, 558 bp, synthetic construct
  misc_feature 1..558: note = Description of Artificial Sequence: Synthetic coding sequence
  source 1..558: mol_type = other DNA
atgacgacaccaaataagaccccaccaggagctgacccaaagcaacttgaaagaactggtaccgttagagagattgggagccaggcagtgtggtctttatcttcatgtaagcccggatttggggtagaccaactgagggacgataatctggagacatactggcagagcgacggaagtcagccccatctggtcaacatccagttcaggagaaagacaaccgttaagactctctgcatttatgcagattacaagtccgacgaaagttacaccccctctaaaatttccgtgagggttgggaataactttcataacttgcaggagattagacagctggagctagtggagccgtccgggtggatccacgtcccattaactgataatcacaagaaaccaactaggacctttatgatacagatcgcggtcttagccaatcaccagaatggaagagacacgcatatgaggcagattaagatctatactcctgtagaagaatctagtattgggaagtttcctcgatgcacgacaatcgattttatgatgtaccgaagcattcgttag

SEQ ID NO: 214343 - DNA, 207 bp, synthetic construct
  misc_feature 1..207: note = Description of Artificial Sequence: Synthetic coding sequence
  source 1..207: mol_type = other DNA
atgacgaccccaaataaaactcctccgggagctgacccaaagcaactcgaaaggacggggactgtgcgtgaaattggaagccaagctgtttggtcattgtccagttgcaaaccaggcttcggggttgaccagctgcgggatgacaatctggaaacctactggcagtctgacggttcccagccccacctagtcaacattcagttttag

SEQ ID NO: 214344 - DNA, 330 bp, synthetic construct
  misc_feature 1..330: note = Description of Artificial Sequence: Synthetic coding sequence
  source 1..330: mol_type = other DNA
atgaccactcccaacaaaacaccacccggagcagacccaaaacagcttgagcggacgggcaccgtgagagagattggtagtcaagccgtgtggtccctcagttcttgcaaacctggatttggtgtggatcagcttagagatgacaacctcgaaacatattggcagtcggatggaagccagccccacctggtgaacatccaattcaggaggaagacaacagtaaagaccctttgcatctatgctgactacaagtcagacgaatcttataccccatctaagataagtgtacgcgttggaaacaattttcataatctgcaggagatccgttag

SEQ ID NO: 214345 - DNA, 558 bp, synthetic construct
  misc_feature 1..558: note = Description of Artificial Sequence: Synthetic coding sequence
  source 1..558: mol_type = other DNA
atgaccacccccaacaagactcctccaggagctgatcccaagcagctggaacggacaggcactgtaagggaaataggaagccaagcagtttggtcgctttctagctgtaagcccggatttggtgtcgatcaattaagagatgacaatctggagacctattggcagtccgacggttcacagccccatctcgttaatatccagttccgccgaaaaactaccgtcaagactctctgtatttacgccgactataagtccgacgagagctacactccctcaaagataagcgtccgagtcgggaataactttcacaaccttcaggagattcggcagctggaactggtagaaccatccggctggatccacgtgcctctgaccgacaaccataaaaagcccactcggacattcatgatccagatcgcggtgctagctaatcaccagaacggcagagatacgcacatgcgccagatcaagatctatactccagtggaggaaagtagcatcgggaagtttcccagatgtacaactatcgattttatgatgtatcggagcatccggtag

SEQ ID NO: 214346 - DNA, 477 bp, synthetic construct
  misc_feature 1..477: note = Description of Artificial Sequence: Synthetic coding sequence
  source 1..477: mol_type = other DNA
atgacaaccccaaacaagacccctcccggtgcggatcccaaacaacttgagcggacaggtactgtacgggaaatcggctcgcaggcagtgtggtctttgagcagctgtaaacctgggttcggtgttgatcagcttcgcgatgacaacctggagacttactggcaatccgatggttctcagccgcatctagtgaatattcaattcaggagaaagactacagttaagaccctctgtatctatgccgactacaaatctgatgaaagctataccccaagtaaaataagtgtgcgagtgggtaacaacttccacaatctacaggaaatcaggcagctggaactcgtggagcctagtgggtggattcatgtgcctctgaccgacaatcataagaaacctaccagaactttcatgatccaaattgcagtgttggccaaccaccaaaatgggagagacactcacatgcgtcaaatcaagatttag

SEQ ID NO: 214347 - DNA, 477 bp, synthetic construct
  misc_feature 1..477: note = Description of Artificial Sequence: Synthetic coding sequence
  source 1..477: mol_type = other DNA
atgacaaccccaaataagacccccccaggggctgaccctaagcagcttgagaggactggaaccgttagggagattggatctcaggctgtgtggagccttagtagttgtaaacccggattcggagtggaccagctcagggatgacaatctggagacgtattggcagtccgatggaagccaacctcaccttgttaacatccaattccgcaggaaaactaccgttaagacactgtgtatctatgcagattataagtcggatgagagctacacccccagcaagattagcgtccgggtaggaaataacttccataatctccaagaaattagacagctggaattggtggagccaagcggctggatccacgtccctcttaccgataaccacaagaagccaactcgaacgttcatgatccagatcgcagtcctcgccaaccatcagaatggaagagatacgcatatgcggcagattaagatctag

SEQ ID NO: 214348 - DNA, 333 bp, synthetic construct
  misc_feature 1..333: note = Description of Artificial Sequence: Synthetic coding sequence
  source 1..333: mol_type = other DNA
atggcagcgagtagcagctcatcaagcgcaggaggggtctcgggcagcagtgtgacagggtccggctttagtgtgagtgacctcgcccctccaagaaaggcgttattcacctacccaaaaggcgctggcgaaatgctcgaagatggaagcgaaaggtttctgtgcgagagcgtttttagctaccaggtggcaagtactctgaagcaggtcaagcacgatcagcaggttgccaggatggagaagttggccggtctcgtggaagaactggaggccgatgagtggagatttaaacctatagagcagctgttaggctttacacctagctctgggtag

SEQ ID NO: 214349 - DNA, 2427 bp, synthetic construct
  misc_feature 1..2427: note = Description of Artificial Sequence: Synthetic coding sequence
  source 1..2427: mol_type = other DNA
atgctgcggttcccaacttgtttcccaagcttcagggtggttggcgagaaacagctgccccaggagatcatctttctggtttggtcccctaaaagagatctcattgccctggcgaacacagccggagaggtcttgctgcataggctcgccagctttcatagagtatggtccttcccccctaatgagaacaccggaaaagaggtcacttgtctcgcgtggcggccagacgggaaactgctagcctttgcattagcggacacgaagaagatcgttctctgcgatgtcgaaaagccagagtcgcttcactcgttttctgtggaggcaccggtttcgtgcatgcactggatggaagtgactgtggagagttcagtgctgacatccttttataacgctgaggacgagtccaatttactgctgcccaaactgccaactctccctaagaactattccaatactagcaagattttttcagaggagaatagcgatgagattattaaactcctgggggacgttagattgaacatcttagtgctggggggatccagcggatttattgagctgtacgcttacgggatgtttaaaatagctcgcgtgacagggatcgcaggcacttgcttagccctttgcctgtccagcgatcttaaatctctgtctgtagtaactgaagtgtccacgaatggggcttcagaggtctcatacttccagctagagaccaatctcttgtattcatttcttcccgaagtgacgcgcatggcaagaaaatttacacacatatccgctttgctgcagtacatcaatttatcactgacttgtatgtgtgaggcctgggaagagattctgatgcaaatggattcgcgtttgactaaatttgtgcaggaaaaaaatacaaccaccagtgttcaggatgagtttatgcacctcttactctgggggaaggcgtcggctgaactgcaaacgctgctgatgaaccagctgactgtgaaaggtctgaagaagcttgggcagagtattgaaagttcatacagtagtatacagaaacttgtgatatctcaccttcagagcggcagcgagtctctcttgtaccacctgtccgaacttaagggtatggcatcttggaagcagaaatacgagcctttgggattggacgctgcgggaatcgaggaggcgattacagccgtgggaagctttattctcaaggcaaatgaactgctgcaggttatagatagctcaatgaaaaattttaaggctttttttagatggctgtatgttgctatgcttcgtatgacagaggaccatgtgctcccggaactcaacaagatgacacagaaggacatcacgttcgttgcagaatttctgaccgagcatttcaatgaagcgcctgacctgtacaatcgtaaaggcaagtacttcaatgtggaacgagttggccagtatttgaaagatgaggacgacgacctcgtgagccccccaaacacggaggggaaccaatggtatgattttctgcaaaatagcagtcatctcaaagagtcacctctgctgttcccttactatccccgaaagagcctgcactttgtcaaaaggaggatggagaatatcatcgatcagtgcttgcagaagccagccgatgtcataggaaagagcatgaaccaggccatctgcatacccctgtatagggatactagatctgaagatagcacgaggcggttgttcaagtttcctttcctttggaataataagacgtcaaatctccactacttactgttcactatattggaggatagtctctacaaaatgtgcatactgcgcaggcacaccgatatatctcaatcagtcagtaatggattgattgccattaagtttggttcttttacctatgccaccacagagaaggtccgacggtctatatatagttgtctggatgcccagttctatgacgacgagacagtgactgttgttctgaaggacaccgtggggagggaaggacgcgaccgtttgttggtgcagttgcccctgtctctggtgtacaactctgaagactcagccgagtaccagttcaccgggacatattctactagactggatgaacagtgttcggccatcccaaccagaaccatgcatttcgagaaacactggcgcctcttggagagcatgaaggcccagtatgtagcgggaaatggcttccggaaagtctcttgtgtcctgagctctaatctaaggcatgtgagagtcttcgaaatggatatcgacgacgaatgggagctggacgaatcgagcgatgaagaggaagaggcctcaaataagcctgtgaaaataaaagaagaggtgctcagcgaatccgaggctgagaatcagcaagccggagctgctgctctcgctcctgagattgttataaaagtggaaaagctagaccccgagctcgactcctag

SEQ ID NO: 214350 - DNA, 489 bp, synthetic construct
  misc_feature 1..489: note = Description of Artificial Sequence: Synthetic coding sequence
  source 1..489: mol_type = other DNA
atgctgagattccctacttgtttcccgtcgtttagggttgtcggtgaaaaacagcttccacaagaaataatttttttagtctggtcaccaaaacgggacctcatcgccttggcaaacacagccggagaggtgctcctccacaggctggcctcatttcaccgggtgtggtcttttccacctaatgaaaataccggaaaggaagtgacatgcctggcttggaggccggacgggaagctcctggcatttgctctggcagacacaaagaagatagtcttatgcgatgtggaaaaacctgagagtctccactctttctcggtagaggccccagtgtcatgtatgcactggatggaagtgactgttgagagcagcgtactgacatcattctacaatgctgaggatgagagtaatcttctccttccgaaactcccaacgctcccaaaaaactatagcaacactagcaaaatctttagcgaggaaaattctgattag

SEQ ID NO: 214351 - DNA, 2430 bp, synthetic construct
  misc_feature 1..2430: note = Description of Artificial Sequence: Synthetic coding sequence
  source 1..2430: mol_type = other DNA
atgctgcgttttcctacatgtttccctagcttcagggtcgttggagagaaacagctgcctcaggaaattatttttctcgtgtggtccccaaagagggacctgatcgctctcgccaacacagcaggggaggttctgctgcatcgattagcgtcctttcaccgggtctggagttttcccccaaacgagaacactggcaaggaggtaacctgtttagcctggaggcccgacggcaaactgttagccttcgctttggcggacacgaaaaaaatcgtcttgtgtgacgtcgaaaaacccgagtctcttcattccttctcagtggaggccccagtgtcctgtatgcactggatggaagtcaccgtagaatcatccgtactgacatctttttataacgcggaggatgagagtaacctcctgctgccaaaattgcccaccttgccaaaaaattattccaacacttcaaagattttttctgaggaaaactccgatgaaatcattaagctgctgggggatgtgagactcaatattttggtgctgggcggatcgtctggttttattgaactgtacgcctacgggatgttcaagatcgcgagggtgaccgggatcgcagggacttgcctggcactttgccttagctccgacttgaagtcactgtctgtcgtcactgaggttagtacaaatggcgcaagcgaggtgtcatacttccagttagagactaatctcctgtatagtttcttacccgaggtgacgagaatggccagaaaatttacccatatttccgccctactccagtatattaatctctccctcacctgtatgtgcgaagcctgggaggagattctcatgcagatggactcccgcctcacaaaatttgtacaggaaaagaacacaacaactagcgtccaagatgaattcatgcacctgctcttatgggggaaggcctcagcggaactgcagactctgttaatgaatcaactgactgtcaagggcttgaaaaaactcggccagagtatagaatcaagttattcatctatccagaaactggtgatctctcacctccaaagcgggagtgagagcttgctgtaccatttgagcgagctcaaaggtatggcttcttggaagcagaagtatgagcctctaggcctggatgccgctggtatagaggaggccataacggctgtcggaagcttcatcctaaaggccaatgaactgctccaagtcatcgattctagcatgaaaaattttaaagcatttttccggtggttgtacgtcgcaatgctgagaatgactgaagatcacgttctccccgaactgaataaagtgatgacccaaaaggatattacctttgttgcagagtttctgaccgagcattttaacgaggcccctgatctatacaatcggaagggcaaatatttcaacgtagagcgtgtggggcagtatctgaaagacgaagatgatgatctagtttcccccccaaacacggagggtaatcagtggtacgacttcttgcagaattcctctcatctaaaagagtcccctttgctgtttccttattatccccgaaagagcctgcacttcgtgaaacgccgaatggaaaatattattgaccagtgcctccagaagccagccgacgtcattggcaaatccatgaatcaggcaatctgcatccctctttatcgtgatactcgctccgaagactctacccgaagattgtttaaattcccgttcctttggaataacaaaacctcaaacctgcattatctgctgtttacaatcttggaggactcactgtataagatgtgtattctgagacggcatacagacatctcgcagtcagtatctaacggcctgatagcaatcaagtttggctcatttacatacgccacaactgagaaggtgcggcgttccatatattcatgcttggatgctcagttttatgatgatgagaccgtcaccgttgtcctgaaggataccgtgggacgcgagggccgtgatcggctgctcgtgcaactgcccttgtcacttgtgtacaattccgaggacagtgcggagtatcagtttaccggcacctactccacacgactggacgagcaatgctcggccatcccgactcgcacgatgcacttcgaaaagcactggcggctgctggagtctatgaaagcccagtacgtggccggaaacggattccgtaaagtcagctgcgtgctctcgtccaacctgagacacgtgagggtgtttgaaatggacatcgacgacgagtgggaacttgacgagtcatccgatgaggaagaggaggctagtaacaaaccagtgaaaattaaggaggaggttttgtctgagtccgaggcggagaaccaacaggccggtgctgcagctcttgcccctgagatcgttataaaggtggaaaagctggatcctgagcttgactcctag

SEQ ID NO: 214352 - DNA, 2268 bp, synthetic construct
  misc_feature 1..2268: note = Description of Artificial Sequence: Synthetic coding sequence
  source 1..2268: mol_type = other DNA
atggccagcgtgcatgagagcctttattttaatcctatgatgacaaatggggtggtgcacgcaaacgtgttcggcataaaggattgggtgactccatataagatcgccgtactggtgctgctgaacgaaatgagcagaacaggcgagggcgcagtgtctctcatggaacgcaggcgcttgaaccagctgctgctgcccctgttgcagggtcccgacatcaccttgtctaagctgtacaaacttatcgaggagtcatgcccgcagctggccaacagcgtccaaatcaggattaaactcatggccgagggcgaattaaaagatatggaacagttcttcgacgacctttccgactccttttcgggtaccgaacccgaggtgcataagacctccgtcgtgggcctgtttctccgccacatgattctcgcatactccaagttgtcgttttcacaggtgtttaagctgtacacagcgctgcagcaatacttccagaacggggaaaagaagacagtggaagacgcagatatggaactcacttctagagatgaaggcgagcggaaaatggagaaagaggagttagatgtatctgtgcgagaagaggaggtgtcttgcagcggcccactgtctcaaaagcaagctgagtttttcttatcccaacaagcctccctcctgaagaatgacgaaacaaaggcactgacaccggcaagtctgcaaaaggagcttaataacttgttgaaattcaatcccgatttcgctgaggcccactatctatcatatttaaataacttgcgcgtccaagacgtattcagctccacgcatagtctgctgcattactttgatcggctcatcctgacaggagccgagtcaaaatccaacggagaggagggatatgggagatccttaagatatgcagctctcaatctcgccgcactgcactgccggtttggccattaccagcaggcagaactggcgttgcaggaagctattcggattgctcaggaaagcaacgaccatgtgtgcctgcaacactgcttgagctggctctacgtgttgggccagaaaagatccgattcctatgtgctacttgaacatagtgtcaaaaaggcggtccattttggattgccctacctcgcttctctgggtattcaatctctggtccaacagcgcgcatttgctgggaagacagccaataagctgatggacgctctgaaagatagcgacctcttacactggaaacattctttgtcagaattgattgacattagcattgctcaaaagacggctatctggcgactgtatgggaggagcaccatggccctccagcaggcgcaaatgcttctttctatgaactcactggaggcagtgaatgctggcgtgcagcagaataacactgaaagttttgcagtggccctatgccacctggctgagctgcatgccgagcaagggtgctttgctgcagcaagcgaagtgctgaagcatctgaaggaaagattcccaccgaattcccagcacgctcagctgtggatgttgtgtgaccagaagattcaatttgacagggccatgaatgacggaaagtatcacctagctgatagtctggtgaccggaattaccgctttgaacagcattgaaggggtctataggaaagccgttgtgttgcaggcccaaaaccaaatgtcggaagcccataagctgctgcagaaactgttagtccattgccagaaactgaagaacaccgaaatggtcatcagtgtcttactgtcagttgctgaactctattggcgctcgtctagccctacgatcgcccttcctatgcttttgcaagccctcgcactgagcaaagagtacagactacagtacttggctagcgaaactgtcctgaacctggcctttgctcaattgattctgggcatcccggaacaggcactcagcttgctccatatggccatcgaaccaattttagcagatggcgcaatcctggacaaaggtagagccatgttccttgtggccaaatgccaggtggcctcagcggcatcctatgatcaacccaagaaggcggaagctctcgaagctgcgatcgagaacctcaatgaagctaagaactattttgcaaaggtagactgcaaggagcgaattagagacgtggtttatttccaggcccgtctgtaccacaccctgggcaagacacaggagagaaaccggtgcgcaatgctcttcaggcaattgcatcaggagctgccgtctcacggcgtgcctctcattaaccatctttag

SEQ ID NO: 214353 - DNA, 1932 bp, synthetic construct
  misc_feature 1..1932: note = Description of Artificial Sequence: Synthetic coding sequence
  source 1..1932: mol_type = other DNA
atggcagagggtgagctgaaggacatggagcagttttttgacgacttgagtgactccttctcgggcacagagcccgaagtgcacaagacatccgtagttggcctatttctccgccacatgatactggcctactccaagctctctttttcacaggttttcaagctctacacagcgctgcagcaatacttccagaacggcgaaaagaagaccgtagaggacgccgatatggaactgacatctcgcgatgaaggagagcggaagatggaaaaagaggagctggacgtatctgtgagggaggaggaggtttcttgttctgggccactgtcgcaaaagcaggcggagttcttcctgagtcaacaggcctccctgctgaaaaacgatgaaaccaaagccttgactcccgctagcttgcagaaggaattgaacaatcttttgaagttcaatcctgattttgcagaggcccactacctgtcttatctaaataacctgagggtgcaggatgtgttctcgtctactcattccctgctccactacttcgatagattgatacttacaggtgcagagagtaagtcaaatggcgaagagggatacggaagatccttgaggtacgccgctcttaatctggcagccttacactgtaggtttggccattatcaacaggctgaactcgctctgcaggaagccatcaggatcgctcaggagagtaatgatcacgtgtgcttacagcactgtttgtcgtggctttacgtccttggccagaagagatctgattcttacgtccttctagagcactcagttaagaaagcagtgcatttcggcctcccccgtgcctttgctgggaaaacggccaataagcttatggacgctctgaaggattcagatctcctgcactggaaacattcactctccgagctgattgacatctccatcgctcagaaaactgcaatctggcgcctctacgggcgttcaactatggcactgcagcaggcccagatgctgctgtcaatgaactccctggaagcagtgaatgcaggtgttcagcaaaacaacactgagagcttcgccgttgcgttatgccacctggcagaactacacgctgagcaaggttgcttcgcagctgcttcagaagtgctgaagcacttaaaggaacggttcccgcctaactcccagcatgcacagctgtggatgctgtgcgaccagaaaattcagttcgatagagcgatgaacgatgggaaataccacctcgcagatagccttgtgaccgggatcaccgcccttaacagcatagaaggggtgtataggaaggccgtggtactgcaagcccagaatcagatgagcgaagcccataagctgctgcagaagcttctggtacattgtcagaagttgaagaatacagagatggtgatatccgtactactcagcgtagccgagctgtactggagatcttcatcacctaccatagctctgcctatgctgctgcaagctctggccctcagcaaagaatacagacttcagtatttagcatccgaaactgtgcttaacctcgccttcgcccaactcatcctgggtatcccggagcaggccctgtctctccttcacatggcaatcgaaccgattctggcagacggtgctatattggacaaaggcagggcaatgtttttggtggcaaagtgccaagtcgcgtcggcggcatcctatgatcagcccaaaaaggccgaggcgctcgaagccgcaatcgaaaacctgaacgaagctaaaaactactttgcaaaggtcgactgcaaggagagaatccgcgacgttgtgtactttcaggctcggttatatcacaccttagggaaaactcaggagcgcaatagatgcgcaatgctcttccggcaactccaccaggagttgccttcccatggcgtgccccttattaaccatctgtag

SEQ ID NO: 214354 - DNA, 1932 bp, synthetic construct
  misc_feature 1..1932: note = Description of Artificial Sequence: Synthetic coding sequence
  source 1..1932: mol_type = other DNA
atggctgaaggcgagttgaaagatatggagcagtttttcgacgatctgtccgacagtttctctggcactgaacccgaggtgcacaagactagcgtggtgggactcttcttgagacatatgattttagcatattccaagcttagcttttcgcaggtgtttaagttgtacacagccctgcagcagtacttccagaacggggagaaaaagactgtggaggacgccgatatggagttaacaagcagggacgaaggcgagaggaagatggaaaaagaggaactagatgtcagtgtgcgggaggaagaagtgagctgttctgggccattgagccagaagcaggccgagttttttctgagccagcaagcttcactgctaaaaaatgacgagaccaaagcgcttacgcctgcaagcctgcagaaagaattgaacaatcttcttaagtttaatcctgatttcgccgaagctcattatctctcctatttgaataacctgcgggtccaggacgtcttcagttccactcattcccttcttcactactttgaccggttgattctcactggagcggagagtaagagtaatggcgaggagggctacggacgtagtcttcgctacgccgcacttaatcttgctgcactccattgcagattcgggcattaccagcaggcagagctggcactgcaggaggcaattcgaattgcacaggagtcaaatgatcacgtctgcctgcagcactgcctcagctggctgtatgtgttgggacagaaaaggtccgacagctatgttctgctcgagcactcagtgaaaaaggccgtacattttggcctaccacgcgctttcgccggaaaaacggcgaacaagctgatggacgccctcaaggacagcgacctgcttcattggaagcacagtctcagcgagttaatcgacatctccattgctcagaaaacagctatttggcgcttgtacgggagatcaactatggccttgcagcaggcacaaatgctcctttctatgaacagcttagaggctgtcaacgccggtgtccagcagaacaacaccgagtctttcgctgtagctctctgtcacctggcggaactgcacgccgaacaagggtgctttgctgcagccagcgaagtcctgaaacatctgaaggaaagatttcccccaaatagccagcatgcccaactttggatgctttgcgatcagaagattcagttcgatcgagctatgaatgacgggaaataccacctggcggactcactggtgactggcataaccgctctcaatagtatagaaggggtgtacaggaaagccgtggtgcttcaagcacagaaccaaatgtccgaggcccataaactcctgcagaagctgctggtgcactgccaaaagttaaagaacactgagatggtgatttccgtgctgttgtccgtggctgagttgtactggcgctcatcttccccaacaattgctctgcccatgctgctgcaagccctagcactgtctaaggaatacagactccaatatctggcctccgagaccgtccttaatctggcatttgcccagctgatccttggaatccctgagcaggctctgtctctcctgcacatggctatcgagcccattttggccgatggggcaattctggacaaaggcagggccatgtttctcgtggccaaatgtcaggtggctagcgctgcatcctacgatcagcccaagaaagcggaggccctggaggccgctatcgagaacctcaacgaggcaaagaattactttgccaaggtggattgtaaggagagaattcgtgacgtggtctactttcaagctcggctttatcacactctgggcaaaactcaagagaggaacagatgtgccatgctgttccgacagctgcaccaggaactgccctcacacggggtgcccctgatcaaccatttgtag

SEQ ID NO: 214355 - DNA, 660 bp, synthetic construct
  misc_feature 1..660: note = Description of Artificial Sequence: Synthetic coding sequence
  source 1..660: mol_type = other DNA
atgctgtccccttgtctgagttcttactttgtgggattatttctgcggcatatgattctggcttattctaaactgagcttctcacaagtgtttaaactgtacacagcattacagcagtactttcaaaatggggagaaaaaaacagtggaagatgccgacatggagctgacttctagggatgaaggcgaaagaaagatggagaaggaggaattggatgtaagtgttcgtgaggaagaagttagctgctctgggccactgtcccagaaacaggctgaattttttctgagccagcaggccagtctgttgaaaaacgatgaaactaaagcactcactcccgcttccctgcaaaaagaactgaataatttgctgaagtttaatccagacttcgcggaagcgcactacttgagctacttaaataacttgcgggttcaggatgtcttctccagcacacactcgctgctgcattactttgaccggctgattctgacaggagcagaatcgaagtccaacggtgaagaagggtacggtaggtcactccggtacgcggcactcaacctggctgccctccactgccgattcggccactacacctcgccaccttgggaatattccccactctttaatagggagttactgctggggcgacggcagacgtcctag

SEQ ID NO: 214356 - DNA, 135 bp, synthetic construct
  misc_feature 1..135: note = Description of Artificial Sequence: Synthetic coding sequence
  source 1..135: mol_type = other DNA
atggcggagggcgaactcaaagatatggaacaattttttgatgatctgtcagactcattctctggaactgagccagaggtacacaagaccagcgttgtgggcctgtttctgcggcatatgatccttgcctactag

SEQ ID NO: 214357 - DNA, 1074 bp, synthetic construct
  misc_feature 1..1074: note = Description of Artificial Sequence: Synthetic coding sequence
  source 1..1074: mol_type = other DNA
atggacgccctgaaggattccgaccttctgcactggaaacactccctgagcgaactaattgacatttctattgcacaaaaaacagccatttggaggctgtatggccgatcaaccatggccctccaacaggcccagatgctcttatctatgaacagcctcgaagctgtgaacgcaggcgtccaacagaacaatacagagtccttcgccgtggcattatgtcacttagctgaactgcacgcggagcagggctgttttgccgctgcttctgaagtcctgaagcacttaaaggaacgttttcctcctaattcgcagcatgcacagctgtggatgctgtgtgatcagaaaattcagtttgacagagccatgaatgacggcaaatatcatctggctgacagcctagttacaggaataactgccctgaatagcattgagggagtttacaggaaagctgtggtactgcaagctcagaatcagatgtctgaggctcacaagctgctacagaagcttctggtccactgtcagaaattaaaaaataccgaaatggtcatttcagtattgttaagtgtggcagaactgtattggcgcagtagctctcccacaatcgcactgcctatgttgctccaagccctggctctcagtaaggagtacaggctccaatacttagcctctgagaccgtgctgaacctggcgtttgcccaacttatactgggaataccagaacaggccctgtcattgctacatatggcaatcgagcccatacttgcagacggggctatcttggataagggacgagccatgtttctcgtcgctaagtgtcaggtggccagcgctgcctcttatgatcagcccaaaaaagccgaggcactggaggcggctatcgagaatctaaacgaggccaaaaattacttcgctaaggtcgattgcaaagaaagaattagggacgtcgtgtattttcaagcccgtttataccatactctgggaaaaacacaggaacggaatcggtgtgcaatgctgtttcgccagctgcaccaggaactgcctagtcacggtgtgcctcttatcaatcacctctag

SEQ ID NO: 214358 - DNA, 2229 bp, synthetic construct
  misc_feature 1..2229: note = Description of Artificial Sequence: Synthetic coding sequence
  source 1..2229: mol_type = other DNA
atggcgtcggtgcatgagtcactgtattttaacccaatgatgacaaacggggtcgtgcatgccaacgtctttggaatcaaggattgggtgaccccctacaagatcgcagtcctggtgttattgaatgagatgtccagaaccggcgaaggcgcagtgagcctgatggagcggaggcgcttgaatcagctacttctgcctctgttacagggacctgacatcaccctgagcaagctgtataagctgatcgaggaatcgtgtcctcaactcgccaattctgtgcaaattcgaatcaagctaatggccgagggagaactgaaagacatggagcagtttttcgacgacctttcagactctttctctggaacagagcctgaggtccataagacctctgtggttgggctgttcctccgtcatatgatcttggcatattccaagctctctttcagtcaggttttcaaactgtataccgcgctccagcaatactttcagaatggagagaagaagaccgtcgaggacgccgatatggagctgaccagccgtgatgagggcgagaggaaaatggagaaggaagagctggacgtgtccgtgcgggaagaagaagtgtcttgttctggtcctttatctcagaagcaggccgaattctttctaagtcaacaggcctcgttactgaagaatgatgaaacaaaggccctgacccctgcctctctccagaaagagttgaataacctgttaaagtttaaccctgacttcgctgaggcccactatctgagttatctcaataacttgagggtgcaagacgttttttcctccacgcattctctcctccactacttcgatcggctgatactgactggcgctgaatctaaatccaacggggaagagggctatgggagatccctcaggtatgcagcgctcaatcttgctgcactgcattgcagatttggtcattatcaacaggctgaactggccctgcaggaagctatccggatcgcccaggaaagcaacgatcatgtttgcctgcagcactgtttgtcttggttgtacgtgctcggacagaaaaggtccgattcatacgtcttgctagagcatagtgtcaagaaggcggtgcattttggactgccacgcgcatttgctgggaagaccgctaataaactgatggacgccctgaaggactcagatctcttacattggaagcattccttgtcagaactgattgacatcagcattgcccagaagaccgcgatatggcggctgtacgggagatccaccatggcgctacagcaggctcagatgcttctttctatgaactccctcgaggccgtgaatgccggagtccagcaaaacaatactgagagtttcgctgtggctctttgtcacctcgctgagctccacgcagaacagggatgttttgctgccgcttctgaagtcttgaagcacctaaaggagcgttttcccccaaactcacaacatgcccaattatggatgttgtgcgaccagaaaatacagttcgatcgggctatgaatgacggaaagtatcacctggcggattccctcgtgacaggaatcactgcgctgaacagtattgaaggggtatatcggaaagccgtagtgctgcaggcccagaatcagatgtccgaggcccataagctgctccagaaattgctcgtccactgtcagaaactgaagaataccgagatggttatatcggtgctcttgtcagtggccgagctctattggcggtccagctcgcctacaatcgcccttcccatgttgttgcaggcgcttgcactttccaaggagtaccgccttcaatatttggcatctgaaacagtactgaacctcgcatttgctcaactgatactgggcattcccgaacaggccctgtccctgcttcatatggccattgagcctattctcgcagatggagcgattctggataaagggagagccatgtttctagttgccaagtgtcaagttgcctctgccgcatcgtacgatcaaccaaaaaaggctgaagccctggaagctgccatcgagaacctcaatgaagccaaaaattacttcgccaaggtagattgcaaagaacggatccgggacgttgtgtactttcaagcacgcctgtaccacactctcggcaaaacacaggaacgcaacaggtgcgctatgctgtttcgtcagctgcatcaagaactgccgtctcatggtgtgcccctcatcaaccatctgtag

SEQ ID NO: 214359 - DNA, 1425 bp, synthetic construct
  misc_feature 1..1425: note = Description of Artificial Sequence: Synthetic coding sequence
  source 1..1425: mol_type = other DNA
atggaactcccgtccggacctggcccagaacggctgttcgactcacataggctgcctggtgattgtttcctgttattagtgctcctgttgtacgctccagtggggttctgcctgctcgtccttcggctttttctcgggattcacgtctttctcgtaagctgtgcactgcccgatagcgtgctcaggagattcgtggttaggacgatgtgcgccgtgcttggactggtagctaggcaggaagacagcggccttagggatcatagtgtcagagtacttatctccaatcacgttactcctttcgaccataacattgtgaatctgctcactacttgttctacagtgagcgagagcgaagccgagagcgcaaccgggcgattccctggtgcccagcttaaggctcccttaagccccctcgcgttcccaatggaggacacggaactgcctctcactccaatcctgtaccctacgtgtcagttcttctttatattcctcaatatcttcctgctggctttttcatcacctggctcacagccactcctcaactctccccctagcttcgtctgctggagtagggggtttatggagatgaatgggaggggggaactcgtcgaaagtttaaaaagattctgtgccagcacccgccttcctccaactccccttctcctgtttcccgaggaagaagccactaatggcagggaggggcttctcaggttttccagctggcccttctcaatccaggacgttgtgcagcccctgacgctccaggtccagcgccctctggtcagcgtcactgtctctgacgcctcttgggtgagtgagttactctggagcctgtttgtcccattcaccgtgtaccaggtgagatggctcagaccagtgcaccgacagcttggtgaggcaaacgaggaattcgccctaagggtgcaacagctcgtcgccaaagaactcggccagaccggtacccgactgacgccggctgataaagccgagcacatgaaaaggcagaggcaccccagattacgccctcagagcgcacaatctagcttccctccaagtccgggacccagtcctgatgtgcagctggcgactctcgcccagcgcgtgaaggaagttttgccacacgtgcctcttggtgttatccaacgagacctcgccaagaccggctgcgtcgatcttaccataaccaacttgttagaaggggctgtggcattcatgcctgaagatataacaaaaggcacacagtctctgccaacagctagtgcatctaaatttccatcttctggacccgtgacgcctcaaccgacagcactgactttcgctaagagcagctgggccaggcaggaaagcctacaggaacgcaaacaggcactttatgaatacgccaggcggagatttacggagcgacgcgcacaggaagctgactag

SEQ ID NO: 214360 - DNA, 1233 bp, synthetic construct
  misc_feature 1..1233: note = Description of Artificial Sequence: Synthetic coding sequence
  source 1..1233: mol_type = other DNA
atggaactgccctcagggcctgggcctgagcgtcttttcgacagccatcggctccccggagactgcttccttctgctggtcctgctactctatgctcccgtaggcttctgtctgctagtactgcggctttttctgggaatccacgtatttctcgtttcctgcgcgcttccagactccgtcctaagacgatttgtggttaggaccatgtgtgccgtgctcggcctggtggccaggcaggaggacagtggactgagagaccactcagtgagagttctaataagcaaccatgtgacacctttcgaccacaatatagtcaaccttctcacgacatgctccacacccctgctgaactcacctcccagctttgtttgctggagtaggggctttatggagatgaatggtcgaggtgaactcgtggagtctttaaagaggttttgtgcatcaacgcggctgccgcctaccccattgctactattcccagaggaggaagccaccaatggtcgggaggggctcctcagattctccagttggcccttctctattcaagatgtcgtgcaacccctcacgctccaagttcagaggccgctagtgagcgtgacagttagcgatgctagctgggtgagcgagttgctgtggtcgctgtttgtcccattcacagtataccaggtgagatggctccgccctgttcatcgccagctgggagaagcaaatgaggagtttgccttaagagttcagcagctggtggccaaagaactcggacagacaggtaccagacttacccctgccgataaagctgaacacatgaagcggcagaggcaccctagactgagaccgcaatctgcccaaagttcattcccaccatctccgggtccctcccccgatgttcaactcgccaccttagcccagcgtgtcaaagaggtcttgccgcatgtgccattaggcgtcatccagcgggacttagcaaagacaggttgcgtagacctaaccatcacaaacttactcgaaggcgctgtcgcatttatgcccgaggatataacaaaaggaacccagtcattacctacagcatcggcttcgaaattcccaagctcgggcccagtaactccgcagcctaccgccctaacgtttgctaaaagttcatgggcccgtcaagaatctctacaggagaggaaacaggctctgtacgagtatgctcgtagacgattcacggaaagacgcgcacaggaggctgactag

SEQ ID NO: 214361 - DNA, 1128 bp, synthetic construct
  misc_feature 1..1128: note = Description of Artificial Sequence: Synthetic coding sequence
  source 1..1128: mol_type = other DNA
atggagctccctagtggacctggtcccgaacgtcttttcgatagccatcggcttccgggtgactgctttctgttactcgtgcttttgttatacgctccagttggcttctgcctgctggtgctgaggctgtttctcggtatacatgtgtttctcgtgtcatgcgccctgccggacagcgtcttgaggagatttcgctttgtggttcgcacaatgtgtgctgtcttggggctggtcgcaagacaggaggacagtggacttagagaccattctgtcagagtgctgatctctaaccacgtgactccattcgaccacaacatagtgaatttactgaccacttgctctaccccgctgttgaactcacctccctcatttgtgtgctggagcagagggttcatggagatgaatggcaggggcgagctggtggaatccctgaaaaggttctgcgcaagcactcggctaccacctactcccctgctgttattccccgaggaagaggccaccaacggacgggagggcctgctgcgcttctcatcatggcctttcagcattcaggatgttgtacagccgctcactctgcaggtgcaaaggccccttgttagcgtcacggtgtcagacgccagctgggtgtctgagttgctctggtctcttttcgtgccctttaccgtgtatcaagtgcgttggctgcggcctgtgcatcgccagctcggggaggctaatgaagagtttgcactgcgggtgcagcaactggtggccaaggagttggggcagactggaactcggctgacaccagcagacaaggcagagcacatgaagagacagaggcatcctcgcctgagaccccagtccgctcaatctagtttccctccgtcccctggccctagtccagacgtacagctggcaactctcgcacagagggtgaaggaggtgctcccacatgtcccattaggggtgatccagcgggatctcgcaaagacaggctgcgtggacttgaccattaccaacttacttgagggtgccgtcgcctttatgcccgaggatataacaaaagggacgcagagcctgccgacagcatccgcatccaaggccttcgacgcgtgtctgatgatgatgacaccgcaggctctttag

SEQ ID NO: 214362 - DNA, 2145 bp, synthetic construct
  misc_feature 1..2145: note = Description of Artificial Sequence: Synthetic coding sequence
  source 1..2145: mol_type = other DNA
atggcttctgaagccccttcaccaccgcgatcacccccacctcccacatccccagagcctgagctggcccaattgagacggaaagtggagaagctggagagagagctccgctcgtgtaaacgccaggtccgcgagattgagaagttactgcatcacaccgagagactctaccagaacgcggagtccaataaccaggaacttcgaacacaggtcgaggagcttagtaaaattttacagcgcggaagaaacgaggataataagaagtccgatgtcgaagtgcagactgaaaatcatgcaccttggtcaattagtgattatttttaccagacttattacaatgacgtgagcctgcccaacaaggtcacagaactctccgatcagcaggaccaggccatcgaaacctccatcttgaactccaaagaccatctgcaggtggaaaatgacgcatatcctgggactgatcggaccgagaatgttaagtaccgccaggtcgatcacttcgcatctaattctcaagaaccagcctccgccctcgcgactgaggatacatcccttgaagggtccagccttgcagaatctctgagagctgcagcggaagccgcagtaagccagactggatttagctacgatgaaaacacgggactgtatttcgaccactctactggattctattatgactccgagaatcagctgtactacgatccatccacaggaatctactactactgtgacgtggagagcggcaggtatcaatttcactctagagtagacctgcagccataccctaccagctctacgaagcagagcaaagataaaaagctcaagaaaaagagaaaagacccggactcctcggccacgaacgaagagaaagatctgaattccgaagaccagaaagcctttagtgttgagcatacaagttgtaatgaagaagaaaacttcgccaatatgaaaaaaaaagccaagattggtattcaccataagaacagtcctcctaaggttaccgtgcctacaagtgggaatacaattgaatcccccctgcatgaaaatatttccaacagtacaagcttcaaagacgagaaaataatggaaaccgattcggaacctgaggagggagagatcacagacagtcagaccgaggattcttatgacgaggccataacttctgaagggaatgtcaccgccgaggatagcgaggacgaggacgaggataaaatctggccaccttgtattagagtgatcgtcatcaggagtccagtgctccagattggatccctgttcatcataactgcggtcaaccccgctacaatagggcgagaaaaagacatggaacatacacttcgcatcccggaggtaggggtctctaaattccatgccgaaatctatttcgaccacgatcttcagagctacgttctggtcgaccagggttctcagaatgggacaattgtcaatggcaagcagattttgcagcccaaaactaagtgtgatccttacgtgttggagcacggcgatgaggtcaaaatcggcgagactgttcttagttttcatattcaccccggtagtgacacttgtgacgggtgtgaacccggacaggtccgggcacaccttaggcttgataagaaggatgagtcttttgtggggccaacactaagcaaggaagagaaggaactagagcgtagaaaagagctcaagaaaatacgggtgaagtacggactacagaatactgagtatgaagatgagaaaacgctgaaaaatcctaaatacaaggatcgcgctggcaagcggcgtgagcaggtggggtctgaaggcacatttcagcgagacgatgcgcctgcatctgttcattccgaaataacggattctaataaaggccgaaagatgctggaaaagatgggttggaagaaaggggagggcttaggcaaagacgggggtggaatgaagaccccgatacagctgcagctgcgtcgcacgcacgcgggactggggaccggtaaaccgtcgagctttgaagatgtccatttgctccagaataaaaacaaaaaaaactgggataaagcaagggaacggttcacagaaaacttccctgagactaagcctcagaaggacgatccaggaactatgccatgggtgaagggcacgctggagtag

SEQ ID NO: 214363 - DNA, 531 bp, synthetic construct
  misc_feature 1..531: note = Description of Artificial Sequence: Synthetic coding sequence
  source 1..531: mol_type = other DNA
atggcatcagaagccccatcgcctcccagatcgcctccacccccaactagtccagagccagaactggcccagctccgacgcaaagtggagaaactcgagcgcgaattgcggtcatgcaagcgacaggtgagggaaatcgagaaattactacaccataccgaaagactgtaccagaacgcggagtccaataatcaggaactccggacccaagttgaggagctatcgaagatcctgcaacggggaaggaacgaggataataaaaagtccgacgttgaagtccaaaccgagaatcacgctccctggtccatctcggattacttttatcagacttattataatgacgtctctctgccaaacaaggtaactgagctgagcgatcagcaggatcaggctattgaaacaagcattcttaacagcaaggaccacctgcaggtggagaacgatgcttaccccggaactgaccgcactgagaatgtcaaatacaggcaggtggatcacttcgcatctaactctcaggttataaaatgctag

SEQ ID NO: 214364 - DNA, 2028 bp, synthetic construct
  misc_feature 1..2028: note = Description of Artificial Sequence: Synthetic coding sequence
  source 1..2028: mol_type = other DNA
atgcccagggcccagccttcatctgcttcttaccagcccgtcccagccgacccgttcgccatcgtctctcgagctcagcaaatggtcgagattctgtcagatgaaaacagaaatctccgacaagagttggagggatgttatgagaaggttgcccgtctacaaaaggtcgaaacagagatccaaagagtcagcgaggcctatgagaatctggtcaaaagctcttccaagcgcgaggcgcttgaaaaagccatgcggaataaactggaaggagagattagacgcatgcatgattttaaccgggacttacgggagcgattggaaacggcgaacaaacagttggccgagaaagagtatgaagggagcgaggatacaaggaagacaatctcccaattgtttgccaaaaacaaagagtctcagagagaaaaagaaaagctggaggccgagctcgcaaccgcacgcagtactaatgaggaccagcgccgacatatcgagatccgagaccaagcactctctaacgcccaggctaaagtcgtgaagctcgaagaagagctaaagaaaaagcaggtgtacgtggacaaagtggagaagatgcagcaggctttggtgcagttgcaagccgcttgtgagaaacgcgagcaattggagcatcggctccggacccgtctggagagggagctcgagagcttgagaatccagcaaaggcagggtaattgccaacctaccaacgtgtccgagtataacgctgctgcgctcatggaactcttaagagaaaaagaagagaggatcctggccttggaagctgacatgactaaatgggagcagaagtatttggaggagaatgtgatgcggcacttcgctctggacgccgcagcaaccgtggcagctcagagggacactactgttatttcgcattcgcctaatactagctacgatactgcattggaagctcgaatccagaaagaagaagaggaaattctgatggccaataaaagatgcctcgacatggagggaaggataaaaacccttcacgcacagatcatcgaaaaggacgcaatgattaaggttctgcagcagagaagcaggaaggagccatcaaagacagaacagctgagctgtatgcgcccagcgaaatctctaatgtctatctcgaacgccggttccggcctcctgtcgcattctagcacactgaccggctctccaatcatggaggaaaaaagagatgacaagtcatggaaagggagcctgggcatcctacttgggggtgattaccgagctgaatatgtgcccagcacaccaagccccgtaccaccgagtacacccctgttgagcgctcattccaagactgggtcacgggactgcagcacccaaacagagaggggaacagagtctaataagactgcggcagtggcgccaatcagcgttcctgcacctgttgctgctgcggcaactgccgctgcgattaccgccactgctgctaccattacgaccaccatggtcgccgcagcccctgttgccgttgccgctgctgcggctccagccgctgcggctgccccatccccagctactgcagctgctacagccgcagctgttagtccggctgcagctgggcagattcccgctgctgcctcagtcgcttccgcagccgcagttgcaccgtcggcagcggctgccgcagcagtccaggtcgcgccagcggctccagcccctgttcccgctccagccctagtgccggtcccagctcctgcggcagcacaggcctccgctcctgctcagacccaggctcccacgtctgctcctgcagtagctcctacccctgccccaaccccaactccagcagttgcacaggcggaagtgcccgcaagcccagcaacgggcccaggcccacaccggctcagtatccccagcttaacctgcaatcccgataaaacagacggtccagtcttccattcaaatactctcgagcgtaaaaccccaatacagatcctgggacaagagcctgatgccgaaatggtcgagtacctgatctag

SEQ ID NO: 214365 - DNA, 1794 bp, synthetic construct
  misc_feature 1..1794: note = Description of Artificial Sequence: Synthetic coding sequence
  source 1..1794: mol_type = other DNA
atggagcatcgcggtcctccccctgagtacccatttaaaggcatgccccctcagtcagttgtctgcaagccccaggagccaggacacttctattctgagcatcggctgaaccagcctggcagaaccgaggggcagctcatgagataccagcatcctcctgaatatggcgcagcgcgaccggcacaggatatctcgctgcctctgagcgcacgtaacagccagcctcactctcccacttcttcgcttacatccggcggttctttgcctctgcttcagagccccccaagcacaaggctgtcaccagcacgtcatcccctagtgcctaatcaaggggaccatagcgcgcaccttcccaggccccagcagcactttcttcccaatcaagctcaccagggagatcactaccgtctgagccaaccagggctctcccagcagcaacagcaacagcagcagcagcatcaccatcaccaccatcatcagcagcagcagcaacaacagccacagcaacagccaggggaggcgtactcggcaatgccaagagcacagccatcatccgctagttaccagcctgtaccggcagacccatttgccatcgtgagcagagcccaacagatggtagaaattctttccgacgaaaatcggaaccttcggcaggaactggaaggatgctacgaaaaggtggcaaggctgcagaaggtggagaccgaaattcaacgagtttctgaggcgtacgagaatctcgtcaagtcaagcagcaaacgagaggctcttgagaaggcgatgaggaataaactagaaggtgagatcaggaggatgcacgattttaacagagacctgagggagcgcctggaaaccgccaataaacaactcgcggagaaagaatacgagggctccgaagatactcgaaagactatcagccagctttttgctaagaacaaagaatcccagagggaaaaggaaaaactggaggcagaattagcaacagcaaggagcaccaatgaggaccagcgcagacacattgaaattcgggatcaggcgttgagcaatgcccaggctaaggtggttaagctggaagaggagctaaaaaaaaagcaggtgtacgtggataaggtggaaaagatgcagcaggcgcttgtacaactccaggctgcctgcgaaaagcgtgagcagctggagcatagactcagaactagactggagcgggaactggaatcattgaggattcagcagaggcaaggaaattgtcagcccaccaacgtgagcgaatacaatgctgccgcattaatggagctgcttcgtgagaaagaagagaggatcctcgctctggaagccgacatgacaaaatgggaacaaaaatatttggaggagaatgtgatgaggcacttcgctctggatgctgccgctaccgtggcagctcagagagacaccaccgtcattagccactcccctaacacctcgtacgataccgccctcgaagcaagaatccagaaagaagaagaggagatcctgatggcaaacaaacgatgcctggatatggagggacggattaaaaccctccacgcccagattatagaaaaggacgctatgatcaaggtgttacagcagcggagtaggaaggaaccgtccaaaaccgagcaactctcatgtatgaggcccgctaagagcttgatgtccatctccaatgccggatcgggtcttctgtcgcactcctccaccctgacgggaagtcctattatggaggagaagcgagatgataagagttggaagggatccttaggtaacgacagtaagtag

SEQ ID NO: 214366 - DNA, 3255 bp, synthetic construct
  misc_feature 1..3255: note = Description of Artificial Sequence: Synthetic coding sequence
  source 1..3255: mol_type = other DNA
atgaggaactccgaggagcagccatctggtgggactaccgtgttgcaacgcctgctgcaggaacagctgcgctacggaaacccctctgaaaatcgctccctgcttgccattcaccagcaggccacaggaaatggaccgcctttcccttctggctccgggaacccagggcctcagtctgatgttctctccccacaagaccatcatcaacagctggtagctcacgccgcacgccaggaacctcagggccaggagatacaatccgagaacttgataatggaaaagcagctgtcaccgagaatgcagaacaacgaggaattaccgacttacgaggaagcaaaggtgcaatcccaatacttcaggggacaacaacacgcatcagtcggggcagcattttatgtgacaggtgtcaccaaccagaagatgcgtactgaaggtaggccttcagttcagcgcctgaacccgggaaagatgcaccaggacgaaggtctgagggacctgaagcagggacacgtgaggtcgctttctgagcgattaatgcaaatgagcttggcaacctcaggggtcaaagcccatccccctgtcactagtgcgccactgtccccccctcaacctaacgacctctataagaaccccactagcagctctgagttctataaagcacaaggtccactgccaaatcagcactcactcaagggcatggagcataggggcccacccccagaatatcccttcaagggcatgcccccacagtccgtggtgtgcaagccacaggaacctgggcacttctacagcgaacacagactgaatcagccgggtcggaccgaaggtcagctgatgaggtatcaacatccacccgagtatggcgctgctagacccgctcaggacatctccctgcccctatccgccagaaactcacagcctcactcccctacaagcagtctgacgagcggcggtagcctccccctactgcagtcacctcccagcactagactgtcccccgcaagacacccactagtccctaatcagggggatcatagcgctcacctgccccgtccccagcagcacttcctccctaaccaggcccatcaaggcgatcattacaggctttcccagcctggcctgtctcagcagcagcagcagcaacagcaacaacatcaccaccatcaccaccaccaacagcagcagcagcagcagcctcagcagcagcctggtgaagcctatagcgcaatgccccgagcccaaccgtcttccgcctcctaccaaccggtgcccgctgatccatttgccattgtttccagagctcagcagatggtcgaaatcctgtccgacgagaaccgtaacttgaggcaggagttggagggctgttatgagaaggtggctcggctacagaaggtggagaccgaaattcagagagtgagcgaggcctacgagaatctggtcaaaagctcttccaagcgggaggcactggagaaagctatgcgaaataaactggaaggcgaaatcagaaggatgcatgacttcaatagggatctccgtgagagactcgagacagctaacaaacagcttgccgagaaagagtatgagggctctgaggatactagaaaaactattagtcagctgttcgcaaaaaataaagaatcccagagagaaaaagagaaactggaagccgaactggccactgccagatcaacgaatgaggaccagcgccgacatatcgaaattagggaccaggccttatccaacgcccaagctaaagttgttaagctggaagaggagttgaaaaagaaacaggtatatgtggataaggtcgagaagatgcaacaggccctggtacaattacaagccgcttgtgaaaaacgagagcagctggagcatcggctgagaacgagacttgaaagggagctggagagcctgcggatccaacaacgccagggcaactgtcagcccaccaatgtcagcgagtataacgctgcagctcttatggagttactgagagaaaaagaggaacggatccttgctctcgaagctgatatgactaagtgggaacagaagtaccttgaggagaacgtcatgcgccacttcgctctcgatgctgccgctactgtggccgcacagcgggataccaccgtgatttcgcattcacccaatacctcctacgacaccgcactcgaggcgagaattcagaaggaggaggaggaaattttgatggccaataaaaggtgccttgacatggaggggagaataaagacactgcacgcgcaaattattgaaaaagatgccatgattaaagtcctgcagcagagatcgcgtaaggagccgagcaagactgaacagctgtcctgcatgcggccagccaaatcactgatgtctatcagcaatgcaggctcaggacttctgtcacattcttctacattgacaggctctcctatcatggaggagaaacgggatgacaagagctggaaaggcagcttaggcattctgctgggaggggattatcgcgctgagtacgtcccctcgacaccttcacccgtgccacccagcaccccgctcctgtcagcccactccaagacagggagccgggattgttcaacccagactgaacgtgggaccgaaagcaataagacagccgcagttgccccaatatcagttccagcgccagtcgcagcagccgctacagcagccgctattacggcaactgcagccactatcactaccactatggtcgccgcagcccctgtggctgtggctgctgctgccgctcccgctgcagccgctgctcctagccccgctacggccgctgcaactgctgcagcagtgtcaccggcagccgcagggcaaattcccgcagctgcgtctgtagcgtcagctgcagccgtggccccaagcgccgcagcagccgctgcggtgcaggtcgcccctgctgcccctgccccagtgccagctccggctcttgtgcctgtgcccgcaccagccgctgcccaggcatcggcccctgcgcagacacaggcacccacaagtgcccctgcagttgcaccaactccagccccaaccccaactcccgctgtcgctcaggcggaagtccccgcatcaccggctaccggacctgggccacaccggctctccattccaagcctcacgtgtaacccagacaaaacggatggtccggtgtttcacagtaatacattggagcgtaagacgccgatccaaatcttggggcaggagcccgacgctgagatggtcgagtatcttatatag

SEQ ID NO: 214367 - DNA, 2559 bp, synthetic construct
  misc_feature 1..2559: note = Description of Artificial Sequence: Synthetic coding sequence
  source 1..2559: mol_type = other DNA
atggaacaccgcggaccccctccggagtatccattcaagggcatgcccccacagagtgtggtctgcaagccacaggaaccgggacacttttactcggagcaccggttaaatcaacctggacgtacagaggggcagctgatgcgctatcagcatccaccagagtatggggcagctcggcctgcccaggacattagccttccattgtcggctcgtaacagccagccacactcccctaccagctcactgacgtccgggggaagccttccactgctccagagccccccaagcactaggctttccccagccaggcatccgttggtccccaaccagggtgaccactctgcccaccttccgaggccacagcagcacttcttgccaaaccaggcccaccaaggagatcactaccgcctctctcaaccgggtctcagtcagcagcagcaacagcagcagcaacagcaccatcaccaccatcatcatcaacagcagcagcaacagcagcctcagcagcagcctggagaagcctattcagctatgcctcgcgctcaacctagcagcgctagctatcagcctgtgccagccgatccttttgccatcgtgagtcgcgcacagcagatggtcgagatcctgtcggacgaaaaccgcaacctgcggcaggaactggagggatgttatgagaaggttgccagactgcagaaggtcgagacagagatccagcgggtctctgaggcctacgagaatctcgtgaagtcgtcaagcaaacgcgaagcactcgaaaaggctatgcggaacaaacttgagggcgaaatcaggcgaatgcacgacttcaaccgggaccttagggaacgcctcgaaaccgctaataaacagttagccgagaaagagtatgaaggctccgaagacacccgcaagaccatttctcagctgttcgccaagaataaggagtcgcaaagggagaaggaaaaattagaagcagaactggccaccgcccgttccaccaatgaagaccaacgcaggcatatcgaaattcgagaccaagctttgtccaatgcgcaagcaaaagttgttaaactagaggaggaactaaaaaagaagcaggtttacgtggataaggtggagaaaatgcagcaggccctagtgcagcttcaggcggcatgcgagaagcgcgaacagctggagcataggctgagaacaagactcgaacgggaactggaatcactgcgcattcagcaacgacagggaaattgccaaccgacaaacgtcagcgaatataatgccgctgctttgatggaacttcttcgcgaaaaagaggaacgtatcttggccctcgaggccgacatgaccaaatgggagcagaaatatctcgaagagaatgtgatgagacacttcgccctggacgcggctgcgaccgttgcagcacagcgcgatacaacggtaattagccactctcctaacacaagttacgacacggctctggaggcgcgaatccagaaagaagaagaagagatactgatggccaacaaacgttgtttggacatggagggaaggattaaaactctgcatgcccaaatcattgaaaaggatgcgatgatcaaggtccttcagcaacgttctcgaaaggaaccaagcaagacagagcaactgtcatgcatgcggcctgctaaatctctgatgagtatatccaacgccggatccggtctactttcccattcctccacattaaccggttcccctattatggaggaaaaacgggatgacaaaagctggaagggatcgctgggcattctccttggaggcgactaccgcgcagaatatgttccctcaaccccttcacccgttcccccaagcacccctctcctgtctgcacatagcaagacaggaagtagagactgctccacccaaaccgagcgcggaacagagtccaataagaccgcggcagtggcccctatcagtgtgccagcccctgtggctgcagcagcaacagccgctgcaatcaccgctacagcagccacaatcacgaccacaatggttgctgccgctcccgtggccgtcgcagctgcggctgctccagctgctgctgctgctccttccccagcaacagccgctgctaccgccgctgccgtttcaccagccgcagccggtcaaatccccgcagcagcctctgtcgcctcagccgctgccgtagccccaagtgccgctgcagccgcagctgtgcaagtcgccccagccgcacccgctcccgtccccgctcctgcactggtgccagtaccagcccctgcagctgctcaagcatctgcccctgcacagactcaggccccaacgtctgcacccgcagtggcacccacccctgctcctacccccacgcccgctgttgcacaagctgaagtgccagcttctcctgcaacaggccctgggccacacaggctgtcgatcccttccttaacttgtaaccctgacaaaacggatggacctgtattccacagcaatactctcgaaaggaaaactcccatccagatcttagggcaggagccggacgctgagatggtcgagtatctgatttag

SEQ ID NO: 214368 - DNA, 549 bp, synthetic construct
  misc_feature 1..549: note = Description of Artificial Sequence: Synthetic coding sequence
  source 1..549: mol_type = other DNA
atgatcaaggtcctgcagcagcgctcaagaaaggaaccttccaagactgagcaactgtcctgtatgcgccctgccaagagcctaatgagcatttctaatgcagggagtgggctcctgagccacagcagcacgctaaccggctcaccaatcatggaagaaaagcgagacgacaagtcatggaaggggagcctcgggattctgctcggtggagattaccgagcggagtatgttccttccacacctagtcccgtgccaccaagcactccattgctaagtgcacatagcaaaactggctcccgcgattgtagcacccaaacagaacgtggcacggagagcaataagaccgccgctgtggcacccatctctgtccccgctccggtggccgctgccgcaactgcagcagcaattaccgccaccgccgcaaccattaccaccacaatggctgcggctgccgctccatctcctgccacagcagccgcaaccgctgctgcagtttctccagccgcagccggtcagatcccggctgcagcctctgtcgctagcgcgtag

SEQ ID NO: 214369 - DNA, 3255 bp, synthetic construct
  misc_feature 1..3255: note = Description of Artificial Sequence: Synthetic coding sequence
  source 1..3255: mol_type = other DNA
atgcggaatagtgaggaacaaccctccggcggaaccactgtcttacaacgattgttacaagagcagctgcgttacgggaacccctcagagaatcggtcactgctcgctattcaccaacaggccaccggcaatggacctcccttccctagtggctccggcaacccagggccacagtccgacgtgttatccccgcaagatcaccatcaacagcttgtggctcatgctgctcggcaggagccccaaggtcaggaaattcagagcgagaatctaataatggagaagcaattgtccccacgcatgcagaacaacgaagaactcccaacctacgaggaggccaaggttcagtcccagtatttcaggggccagcaacacgcatctgttggcgcagccttctacgtaacaggagtcacgaatcaaaaaatgcgaaccgaggggaggccgtccgtccaaagattgaacccaggcaaaatgcaccaagacgagggcctcagggatctgaagcagggtcacgtccgctccctgagcgagcgactgatgcagatgtccctcgccacatccggcgtgaaggcccacccaccggttacatctgccccactttccccaccacaacccaatgatttgtataagaacccgacgtcgagtagcgaattctataaagcgcagggcccactgccaaaccaacacagtcttaagggcatggaacataggggccctcctccagagtaccccttcaagggcatgcccccacaatctgttgtctgtaagccccaagagccaggccacttctattcagagcacaggttgaatcaacccggaagaacggagggacagctgatgaggtaccagcaccccccagagtatggggcagcccgtcccgcacaagatatcagtttaccgctgtctgcgaggaattcccagccccactcaccgacatccagtctcactagcggtgggtctctgccactgctgcagagtcctccgtcaacacgtctctcccctgctcgccatccactagtgcccaaccagggggatcattccgcccatctgccaagaccacagcagcatttcctgcccaaccaggcccaccagggcgaccactatcgactgtcgcagcccggactctcccaacagcaacaacagcagcagcagcagcatcaccaccatcaccaccaccagcagcagcagcagcagcagccgcagcagcagcccggagaagcatatagcgccatgcctcgcgctcagccgtccagtgcttcataccagcctgtcccagccgatcccttcgcaattgtcagtcgggcacagcaaatggtggagatactctctgacgagaatcggaacctgaggcaggagctagagggctgctacgagaaggtggcccgtctgcagaaggtggagactgaaattcagagagtgagcgaagcatacgagaatcttgtgaaatcgtcttcaaaacgggaggcattggagaaggccatgagaaataagttggagggcgagatccgtcggatgcatgatttcaacagagatctgcgcgagcggttagaaaccgccaataagcagctagccgagaaggaatatgaagggagtgaggacacaaggaagactatctcccagctgtttgccaaaaacaaggaatctcaacgcgagaaagagaaactggaagcagagctggccacggctagaagtacgaatgaggaccagcgaagacatatcgagatacgcgaccaggctctctccaacgcacaggctaaagtggtaaaactcgaggaggagcttaaaaagaagcaggtatacgtcgacaaagtggaaaagatgcagcaagcgctcgtacagctgcaggcagcttgcgagaaacgggagcagttggaacaccgcctgcgcacccgactggagcgcgagctcgaatcacttaggattcagcagcgccagggcaactgtcagcctaccaatgtgagcgagtataacgctgctgctctgatggagctgcttcgcgagaaggaggaaagaatactagcccttgaggctgatatgaccaaatgggagcagaagtaccttgaggagaatgtaatgaggcacttcgcattggacgcagcagccacggttgcagcccaacgagacactaccgtcataagtcattcgcctaacacgtcttacgacaccgcactggaagccaggatccaaaaggaggaggaagaaatactcatggctaacaaaagatgcctcgatatggaagggcgaataaaaacgctgcacgcacagattattgagaaagacgccatgattaaagtgcttcagcagcgtagccgcaaagaaccctctaaaactgaacagctgtcatgcatgaggcccgcaaagagcttgatgagcatttccaacgctggctctggactgctgagtcactcgagcactctcacagggtcacccatcatggaagagaaacgggacgacaaatcatggaaaggctccttgggtattctcctggggggtgattaccgagccgagtacgttccatcaacccccagcccagtacccccatccactcctctgctgtcagcccatagtaagaccggcagcagagactgcagcacgcagacagagcgcggaacagagtctaacaaaacggccgcagtggcaccaatttcggtgcccgctcccgtggccgctgctgctactgcagccgcaattaccgccaccgcagcgactattactacaaccatggtggctgccgctccggttgcagtcgcagcagcagccgcacccgcagccgctgctgctccttccccagctacagccgctgcaaccgctgccgcagtctcccccgctgcagccggtcagatccctgcagccgctagcgtggcttctgcagccgcagtggccccatccgccgctgcagcagccgcagtgcaggtggcaccagcagcccctgctccagttccagcaccagccctcgtgcccgtgcctgctcccgcagccgcacaggctagcgcccctgcacagacccaagcacccacctcagccccagcggtcgctccgacacctgccccaacacccactcccgctgtagcccaggccgaagtacctgccagtcccgcaaccggaccgggaccacacagattgtcaatcccaagcctaacctgtaacccagacaagaccgacgggccagtctttcatagcaataccctggagaggaagacgcccatccagatcctgggccaggaacctgatgcagagatggttgagtatctgatatag

SEQ ID NO: 214370 - DNA, 1512 bp, synthetic construct
  misc_feature 1..1512: note = Description of Artificial Sequence: Synthetic coding sequence
  source 1..1512: mol_type = other DNA
atgctgagccagcttgccatgctgcaaggatcgctcctacttgtagtggctaccatgtccgtggcccaacagaccaggcaggaggccgaccgaggatgtgaaaccctggtggtgcagcatgggcactgctcctacacttttctcctccccaaatccgagccctgtccccctggccctgaggtgagtcgcgactcaaacactttgcaaagggaatccctcgcgaatccactgcatcttggtaaactgcctacccagcaggtgaaacagctggagcaggccttacaaaataacacgcagtggctgaaaaaactagagcgagctattaaaaccatcttgaggtctaaattagaacaagtgcagcagcaaatggcacagaaccagacggctccaatgctcgagctgggcacatcgctgttaaaccagacaactgctcagattagaaagctaaccgacatggaggctcagctactcaatcaaactagcagaatggacgctcagatgcctgagacctttctgagtactaacaagctcgagaatcagctgttactgcagcgtcaaaaacttcaacagttgcagggtcagaactctgccctggaaaaacgactgcaagcacttgaaacaaagcagcaggaggaactggcgtccatcttgtctaaaaaagccaagcttctcaatacgctgagcagacaaagcgccgctcttactaacatcgaacggggactaaggggcgtgcggcataactcttcactgcttcaagaccagcagcactccctgcgccagctgttggttctgctcagacacctggttcaggagagagccaatgcatcagcgcctgccttcatcatggccggagaacaggtctttcaggactgcgccgagatacagcggtccggggcttcggcttccggtgtgtatacaattcaagtgagtaacgccacaaaaccgcgaaaggtgttctgcgatctgcaaagcagcggcggacgctggacgctgatccaacggagggaaaacggaacagtgaatttccagaggaattggaaggactataagcaagggtttggcgaccccgctggtgaacactggctgggcaacgaggtggtccaccagttgacgcgtcgtgctgcttatagcctgcgcgtggagttgcaggattgggaggggcatgaagcgtatgcacagtacgagcactttcaccttggctcggaaaaccaactgtacaggcttagcgtggttggttatagcggttcagcgggaaggcagagctccctggttcttcaaaacacaagcttttccacacttgattccgataacgaccactgcctttgcaagtgtgctcaggtaatgagtggaggttggtggtttgacgcatgcggcctgagcaacctcaacggtgtgtactatcacgcccctgataacaagtacaaaatggacggaattaggtggcactacttcaagggcccaagctatagcctgcgagcctcccgcatgatgattcgccctctcgatatttag

SEQ ID NO: 214371 - DNA, 1233 bp, synthetic construct
  misc_feature 1..1233: note = Description of Artificial Sequence: Synthetic coding sequence
  source 1..1233: mol_type = other DNA
atgttgagccagctagcaatgctacagggttcacttcttctggtcgtagccacgatgagcgtggcgcagcagacacgtcaggaagctgaccggggttgtgagactcttgtggtccagcacgggcattgttcttatacctttctgctgcctaagtcggaaccctgtccgccaggcccagaggtgtcccgagatagtaatactctgcagcgggagagcctggcaaacccactgcacctagggaagctccctacacagcaggtcaagcagctggaacaggcgctgcagaacaatacccagtggttgaagaagctcgaacgcgcaatcaaaacaatcttacgctcaaagctggagcaggtgcagcagcagatggcccaaaaccagacagcaccaatgctggagctggggactagtctcctaaatcaaacaactgctcagatcaggaaacttacagacatggaagctcaattgctcaaccagacatctaggatggacgcacagatgcccgagacattcctctcgaccaacaagctcgagaaccaactgctcctgcaaagacagaagttgcagcagctgcagggtcagaacagtgcactggaaaagcggctacaggccctcgaaaccaaacagcaggaggaactcgcttcaattctgagcaagaaagccaaactgttgaataccctctctaggcagagcgcagccctgacgaacattgaaaggggactccgaggggttagacataactcatcgttgctccaggaccagcagcattcactgcgccagctgctggtattgctaagacacctggttcaggaaagggcaaatgccagcgcccctgccttcattatggcaggagagcaggttttccaggactgtgcagaaattcaaaggagcggtgctagtgcctcaggggtctacacaattcaggtttcaaacgcaactaagccaagaaaggtgttctgcgatctgcagagctctggcggtcgctggacactgattcagagaagagagaacgggaccgttaattttcagagaaattggaaggactataaacaggggtttggagaccccgcaggcgaacactggctggggaatgaggtggtccatcagttgacacgtagagcggcatattctttgcgggtggagctgcaagactgggagggccacgaggcatacgcccaatatgaacatttccacctcggttcagaaaatcagttataccgagtagtcgtttag

SEQ ID NO: 214372 - DNA, 1383 bp, synthetic construct
  misc_feature 1..1383: note = Description of Artificial Sequence: Synthetic coding sequence
  source 1..1383: mol_type = other DNA
atgtttaccataaaacttcttttattcattgttcccctggtgattagcagcaggatcgatcaggacaattccagtttcgatagtctgtctcctgagcccaaatcacggtttgctatgcttgatgacgtgaaaatcctcgcaaatgggttgctacagctaggtcacggactgaaggactttgtccacaaaaccaagggacaaatcaatgacattttccaaaagctgaacatctttgatcagtccttctatgatctctccctgcagacatcagagatcaaagaagaggaaaaagagttaagacgtacgacgtataagttgcaagtaaagaacgaggaggtgaaaaatatgtcactggaactgaacagtaaactcgagtccctgcttgaagagaaaatcctactccagcagaaagtcaaatacttggaagagcagctgacaaacctcatccaaaatcaacctgagacaccagagcacccggaggtaactagcctgaaaacctttgtggaaaagcaggataacagcatcaaagacctcctgcaaactgtggaagaccagtataagcagctgaaccaacagcactcacaaattaaggaaattgaaaatcaacttagaaggacctcgattcaagaaccaacggagatctcgctctcttctaagcccagagcaccgaggacaacaccttttcttcaactcaacgagatacgaaatgtaaagcacgatggtattcccgcagaatgcacaacaatctataatcggggagagcacacgagtggaatgtacgctatcaggccttccaattcccaagtgttccacgtctactgtgatgtcattagcgggtctccatggactctgattcagcatcgcattgatggaagccagaactttaatgaaacatgggagaactacaagtacggattcgggagactggacggtgagttctggctaggccttgaaaagatctattccatcgtcaaacagagtaactacgtcctgagaatagagctcgaggattggaaagataacaaacactacatcgagtattccttctacctagggaaccatgagacaaactatactctgcacctagtcgctattaccggcaatgtccctaacgcaatccccgagaacaaggatcttgtcttctccacttgggaccacaaggcgaagggccacttcaactgcccagaaggctattcaggcggttggtggtggcacgatgagtgtggcgaaaacaatctgaatggaaagtataataaaccaagagccaaaagtaagccagaacgtcggagaggtctgagttggaaaagccagaacggccgactgtattcgattaaaagtactaagatgcttatccatccgaccgattccgagagctttgaatag

SEQ ID NO: 214373 - DNA, 1167 bp, synthetic construct
  misc_feature 1..1167: note = Description of Artificial Sequence: Synthetic coding sequence
  source 1..1167: mol_type = other DNA
atgatgtcaccatctcaggccagtctcctctttcttaatgtgtgcatcttcatatgtggagaagccgtgcagggaaactgtgtccaccacagcaccgactctagcgtcgttaacatcgtggaggacggatctaatgccaaagacgaatccaagtccaatgacacagtgtgtaaggaagattgcgaggaaagttgcgacgtgaaaactaaaatcacaagagaagagaagcacttcatgtgtaggaatctccaaaactcgatcgtgtcgtataccaggtctactaagaaactgctgaggaatatgatggacgagcagcaagcttctctggattatctatccaatcaggtgaacgaactcatgaacagggtgctgttgctgactacagaggtatttcgcaaacaacttgacccctttccacaccgcccagtccaatctcacggactggactgcacggacataaaagatacgataggatcagtgacgaagacccccagtggactttacatcattcaccctgaggggtcttcctacccattcgaggtgatgtgtgatatggattacagaggcggagggagaaccgtgattcaaaagcggatcgatggcattattgactttcaaagactgtggtgtgattatttggatgggttcggggacctcttgggcgagttttggctgggtctgaaaaaaatattctatatcgtgaaccaaaagaataccagctttatgttatatgtggccttggagtcagaggatgatacattggcatatgcttcatatgacaacttctggttagaggacgaaacgcgcttctttaaaatgcacttggggagatatagcggcaacgccggagatgccttccgagggcttaagaaagaggacaaccagaacgcaatgcccttctcaacctccgatgtcgacaatgatggctgccgaccagcatgtttggtcaacggacagagcgtaaagagttgctcacacctgcacaataagaccggctggtggttcaacgaatgtgggctcgccaaccttaacggcattcaccacttctcgggcaagttgctggctacagggatccagtggggcacttggacaaaaaataacagtcccgtgaaaatcaagtccgttagtatgaagattcgtaggatgtataatccttacttcaaatag

SEQ ID NO: 214374 - DNA, 1413 bp, synthetic construct
  misc_feature 1..1413: note = Description of Artificial Sequence: Synthetic coding sequence
  source 1..1413: mol_type = other DNA
atgggtaagccctggctcagagcacttcagcttctccttctattaggggcttcctgggccagggctggggcaccaagatgtacatacacttttgtgctcccaccgcagaaatttacgggcgctgtgtgctggtccggtcccgctagcactagagcgactcctgaggctgctaatgcttcggagttggcagccctgcggatgcgtgtgggcaggcatgaggaactcttgcgagagctccaaaggctggctgcagctgacggcgcagtggctggagaggtccgcgctctccggaaggaatctagagggttgtcagcgcgattgggtcagctgagagctcaattgcagcacgaagccggtcccggagcaggacctggtgccgaccttggcgctgagccagcggcagcactggcccttctcggagaaagggtgctgaatgcttcagctgaggcccagagagctgctgcgcgtttccatcagctggacgttaagttccgtgagctggcacagctggtgacgcaacagagtagcctcattgctcgcctggagcggctctgcccaggcggtgctggcggacaacagcaggtcctgccgcctccccctctggtaccagtcgtgcctgtgaggttagtcggctcaacaagtgatacaagcaggatgcttgatcccgctcctgagccacaacgggaccaaacacagcgccagcaggaacccatggcatcacccatgccagccggacaccccgctgtaccaaccaagcccgtgggcccttggcaagactgcgcagaggctcgtcaggctggacacgaacaatccggagtgtatgagctgagagtcggtcgtcatgtcgtgtcagtgtggtgtgagcagcagctggagggaggtggctggactgtcatccagaggagacaggatggcagtgttaatttctttactacttggcagcactataaggccggtttcgggaggccagatggggagtactggttaggattggagccggtgtatcagctgacatcccgtggcgaccatgagctactcgtcttgctggaagattggggcggtaggggggcaagggctcactacgacgggttttctttggagcccgaatctgatcattacagattgcggcttggccaatatcacggagacgcgggagattcgctctcatggcataacgacaagcctttctcaaccgttgatcgtgaccgcgactcttatagcgggaattgtgcgctgtatcagagaggcggatggtggtaccatgcctgtgcccactccaatctcaatggggtctggcaccacgggggacactaccgctccagatatcaggatggcgtgtattgggcagaattccgaggcggtgcttattccctgcgaaaggctgctatgctcattagacccctcaaactgtag

SEQ ID NO: 214375 - DNA, 2199 bp, synthetic construct
  misc_feature 1..2199: note = Description of Artificial Sequence: Synthetic coding sequence
  source 1..2199: mol_type = other DNA
atgggccagggatgggccacagcaggactcccttctctgctgttcctactgctgtgctacggccacccgctgttggtgccaagtcaggaggcctcccagcaggtgactgtcacccacgggacctcaagccaagctaccacgtccagtcagaccacgacacaccaggcaacagcccaccaaacgagcgcccagtcgcctaacctcgtgacggacgaggccgaggctagtaagtttgtcgaggaatatgacaggacttctcaggtcgtgtggaatgagtatgcggaagctaattggaattacaatactaacatcacaaccgagacctccaagatcttgcttcagaaaaacatgcagatcgcgaatcacacgctgaagtacggcacacaggccagaaagtttgacgtgaatcagctccagaatacaacaattaagagaattatcaaaaaggtccaagatctcgaaagggcagctctgcctgcacaggaactggaggagtacaacaagatactgctggacatggaaaccacatattcggttgccaccgtttgccatcccaacgggtcttgcttacagctcgagccagatctcactaatgtgatggccacttctaggaagtacgaagatctcctttgggcttgggagggttggcgtgacaaagccggaagggccatcctgcaattttatcccaaatacgtggagctcataaatcaggcggcaagactcaacggttacgtcgacgctggtgactcttggcggtcgatgtacgaaactccgtcacttgaacaggatctggaacgcctgttccaggaactccagcccctatacctgaacctccacgcgtacgtaagaagggctttgcatcgccattacggagcccagcatatcaacctcgaaggcccaataccggctcacctgctagggaacatgtgggcccaaacttggagcaacatctacgacctggtcgtgcccttcccaagcgcccctagcatggacacgaccgaggcgatgctgaaacaggggtggaccccacggagaatgttcaaggaagcagatgatttcttcacctcgctgggcttgctccctgtcccacccgagttttggaacaagtctatgttagagaaacctaccgatggacgcgaggtcgtgtgtcatgcctcagcttgggatttttacaatggtaaggacttccggattaagcagtgcacgactgtgaatctcgaagatctggtggtggcccaccacgagatgggccacattcaatacttcatgcaatataaagacctgccagtggccctgagagagggtgccaacccgggatttcatgaggctattggagacgttttggcgctcagcgtcagcacacctaagcacctccactccctcaacctgctgagttccgagggtggatctgatgaacatgatatcaatttccttatgaaaatggccctggacaaaatcgcttttattcctttctcatacctggtggaccaatggcgatggagggtgttcgacggaagtatcactaaggagaactacaatcaggagtggtggtcccttcgactgaaatatcagggcctgtgtccgccagtcccacggactcagggagactttgacccaggagcaaagttccatattcctagttccgttccgtatattaggtatttcgtgtccttcatcatacagttccagtttcacgaagccttgtgccaggccgctggccacacgggtccgctgcacaagtgcgatatttatcagtccaaagaagctggccagaggctcgccactgctatgaagttaggctttagccgcccatggcctgaggcgatgcagctgatcacaggtcagcccaatatgtccgctagtgcaatgttaagttacttcaaacccttgctggactggctgaggaccgagaatgagctgcatggagagaaactggggtggcctcagtataactggacacccaacagtgcgcgttcggagggcccactgccagactccggccgtgtcagttttctggggttggatcttgacgcccaacaagctcgcgtcgggcagtggctgttgctttttctggggatagcattactggtggccaccctaggtttgagccagagactgttttcgattagacacaggtcactgcatagacactctcatggcccacaatttggaagcgaggtcgagctgcgacacagttag

SEQ ID NO: 214376 - DNA, 3921 bp, synthetic construct
  misc_feature 1..3921: note = Description of Artificial Sequence: Synthetic coding sequence
  source 1..3921: mol_type = other DNA
atgggcgctgcatctggaaggaggggtcctgggttgctcctgccattgccgctgctcttactgctgcctccccagccagccttggcgctggacccaggcctgcagccaggtaacttcagcgcagatgaggcgggagctcagctgtttgcacagtcttacaattcatccgctgagcaggtgttgtttcagtctgtagcggcaagctgggcccatgacacaaatattactgccgagaacgccaggaggcaggaggaggccgcactcctgtcccaggaatttgcagaagcttgggggcaaaaggcaaaagagctgtacgagccgatttggcagaatttcacagaccctcagttgcgcaggattatcggtgccgtacgcactcttggaagcgccaacctgccactggcaaagagacaacagtacaatgcccttctgagtaacatgtctcgaatttacagcactgccaaagtgtgtctgccaaacaaaaccgctacatgttggtccctggaccctgatttaaccaacattttagcctccagtcgatcctatgctatgctccttttcgcgtgggagggctggcacaatgccgctggcatccctctcaagcctctgtatgaggatttcactgcgttaagcaacgaagcatacaaacaagatggctttacagacaccggggcttactggaggtcttggtacaactcacctacttttgaggatgaccttgagcatctgtaccagcagctggaacccctctacctgaacctgcatgccttcgtcaggagagctctgcacaggcgatatggggacagatacatcaacctgcggggacccatccccgcacatcttctcggtgatatgtgggctcagtcctgggagaacatttatgacatggttgttccattccctgacaaacctaaccttgacgtcacctctacaatgctccagcagggctggaacgcaacacacatgttcagggtggccgaggagttcttcacatctttggaactgtcccccatgccgcctgaattctgggagggtagcatgcttgagaaacccgctgacggtcgggaggtcgtgtgtcacgccagcgcgtgggatttttacaaccgaaaagatttccgaattaaacagtgcactcgagtgacaatggatcagctgtccactgttcatcatgagatgggtcacatccaatattatctgcagtataaagacctccccgtgagtctccgacggggtgcgaatcccggattccatgaggccattggggacgtgctggcccttagtgtgagtaccccagagcacctgcataaaattggcttactcgaccgggtgacgaacgataccgagtcagatattaactacctcctgaagatggctcttgaaaaaattgccttcctgccatttggatacctggtggatcagtggaggtggggcgttttcagcggcaggacaccacctagccgatataactttgactggtggtacctcagaacaaagtatcagggaatttgcccccctgtgacacgaaatgaaacccattttgatgcgggagcaaagttccatgttccaaacgtgactccctacatcaggtactttgtttccttcgttctgcagttccagtttcacgaagccctgtgtaaagaggctggatatgagggaccacttcaccagtgcgacatctacagaagcacgaaggctggtgccaaactgaggaaagttctacaagcagggtcgtctcggccatggcaagaagttcttaaagacatggtggggctggatgccttggacgcccagcccctgttaaagtattttcagcccgtgactcagtggctgcaggagcagaaccagcaaaacggtgaagttctcggctggccagaataccaatggcaccccccactgcctgataattaccctgaggggatagacctcgttacagatgaagcagaggcttccaagtttgtcgaagagtacgatagaacatcgcaagttgtctggaacgagtacgctgaagctaactggaactacaacaccaatattaccacagagaccagcaaaattttactgcagaagaacatgcagattgcaaaccacactttgaagtacgggactcaggcgagaaagtttgatgtgaaccaacttcaaaatacgacaataaagcgaattatcaaaaaggtacaagatttagaacgcgcagctctccctgcacaagaacttgaggagtacaataagatcctactggatatggagacgacatacagtgtggccactgtctgccatccaaatgggagctgccttcagctggaacctgacctcacaaacgtcatggctaccagtagaaagtacgaggacctgttgtgggcctgggaggggtggcgggacaaagcaggacgtgccatactgcagttttaccccaaatacgtggaactcatcaaccaggcagcacggctcaatgggtatgtagacgctggtgactcttggagatccatgtatgaaactccttccctggaacaggaccttgagagactgttccaagagctgcagccactgtacttgaacctgcacgcctatgtacggagagccctccatcgccactatggtgcacagcatattaacctggaggggcctataccggcacatttgctaggcaacatgtgggctcagacatggagcaacatctacgatctggtggtgcctttcccttccgcgcctagtatggataccaccgaggcaatgttaaagcagggatggacccctaggagaatgttcaaagaggctgatgactttttcactagccttggccttcttcccgtgcccccagagttctggaataaatctatgctggaaaaacctactgatggaagggaggtggtgtgccacgcctccgcttgggatttttataatgggaaggacttccgcatcaaacagtgcactacagtaaaccttgaagacctggtcgtcgcccaccacgaaatgggacatattcagtattttatgcagtacaaagatctgcccgtggctctacgtgaaggagctaacccgggatttcatgaagcgatcggtgatgtgctggccctctccgtgagcaccccgaagcatttgcactctctgaacctgctgtcttcggagggtgggtcagatgaacatgacataaacttcctgatgaagatggccctcgacaagatcgccttcataccatttagctacctcgtggatcagtggagatggcgagttttcgacggatccattacaaaagaaaattacaaccaggagtggtggtccttaagactaaaatatcagggcctatgcccccctgtcccacggacccagggggacttcgacccaggagccaagttccacatccccagctcggttccttacattagatattttgtgtcctttattattcagttccagttccatgaagccctttgtcaggccgctggccacactggacctctgcacaagtgtgacatctatcagagcaaggaagccggacagcggctagctacggccatgaagttagggttctcaagaccctggcccgaggctatgcagctgataacaggacagccaaatatgagcgcaagcgcaatgctgagctactttaaaccgctgttggactggctgcgtaccgaaaacgaattgcatggtgagaaactgggatggccccaatataactggactcctaactctgctcggtcagagggacccttgccggatagcgggagggtgtcgttcctgggcctggacctcgatgcacaacaggcaagagtgggacagtggttactcctcttcctgggaatcgctctgctggtggctacccttggcctgtcccagcggctgttttctataaggcaccgctctttgcacaggcatagtcatggaccccagtttggctctgaggtggagcttaggcactcttag

SEQ ID NO: 214377 - DNA, 2076 bp, synthetic construct
  misc_feature 1..2076: note = Description of Artificial Sequence: Synthetic coding sequence
  source 1..2076: mol_type = other DNA
atggggcagggctgggctacagctggacttcccagcctgctgttcctgctgctctgctacggacatcccttgctcgtgcctagtcaggaagcttcacagcaagtgactgtgacccacggtacgtcaagccaagctactacttctagccaaacaaccactcaccaggccacagcccaccaaacaagtgcgcagtctcctaacctggtcactgacgaggctgaggctagtaagttcgtcgaagagtatgatagaacctcacaggtggtgtggaatgaatatgccgaagcaaactggaactacaataccaatattaccacggagaccagtaagatcctacttcagaaaaacatgcagatcgccaaccatactctcaagtacggcacacaagcccgaaagtttgacgtgaatcagctccagaacacaacgatcaagagaatcatcaagaaagtacaggacctggaaagggcagcactccccgctcaagaacttgaggaatataacaagatcttgcttgatatggagacaacctatagtgtcgctaccgtgtgccatccaaatggaagctgtctacagctagagccagatctgactaacgtgatggccacctcacgcaagtacgaagacctcctctgggcctgggaaggctggcgcgacaaggctgggagggcaatactccagttctaccccaagtacgttgagctcatcaatcaggcagctcgactgaatggatatgtggacgctggagatagctggcgttccatgtacgagaccccatctctcgagcaggatctcgaacgcctctttcaagaactgcaacccctgtatctcaatctgcatgcctacgttcgcagggccttacaccgccactacggtgcccagcatattaacttggagggtccaatcccggctcatcttctagggaatatgtgggcccaaacttggtccaacatctacgacctggtggtgccttttcccagcgccccatctatggatactacggaagcaatgctgaagcagggatggactcccaggaggatgttcaaggaggccgatgatttcttcactagtctgggactcctgccagtcccaccagaattttggaacaaatccatgctagagaagcctaccgacggaagagaagtggtctgccatgcatccgcctgggatttttataacggcaaagacttcaggattaaacagtgcaccactgtcaatctggaggatctggtcgtggctcaccatgaaatgggtcacatacagtactttatgcaatataaagatctgcccgtcgccttgcgcgaaggggctaatcccggtttccacgaggccattggcgacgtgctggctctgagtgtaagcacaccaaagcacctccattcactgaatctactgagcagcgagggaggaagcgacgaacacgacattaactttctgatgaagatggctttggataagatagcttttattcccttctcctacctagtggaccaatggaggtggcgcgtattcgatggcagtattaccaaagagaattacaaccaggaatggtggagcctgcgactaaaatatcagggactctgtccccctgtgcctaggacccaaggggatttcgaccccggagctaagtttcacattccgagtagcgttccatatattaggaccgcgatgaagcttgggttctcacgtccctggccagaggcaatgcagctgattaccgggcaacccaatatgagcgctagtgcaatgcttagttacttcaaacccctgctagactggctgagaacagaaaacgagcttcatggggagaaactcgggtggcctcagtacaattggactcccaatagcgctagatccgaggggccactgccagattcaggacgagtctctttccttggcttggacctcgatgctcagcaggccagggtggggcagtggctgttgttatttctgggtatagccctgctcgtagccactttgggactctcccagcgactatttagtatccggcaccgcagtcttcataggcacagccacggaccacagttcggcagcgaggtggagctcaggcactcatag

SEQ ID NO: 214378 - DNA, 1536 bp, synthetic construct
  misc_feature 1..1536: note = Description of Artificial Sequence: Synthetic coding sequence
  source 1..1536: mol_type = other DNA
atgcagattgcgaaccacacgctgaagtacggtacacaggccaggaagtttgatgtgaatcagctccagaatacaaccattaagagaatcatcaaaaaggtccaggatctggagagagccgctctgcccgctcaggaacttgaggagtacaacaaaatactgctggatatggaaaccacgtattcagtggccaccgtttgccaccctaacggtagctgtctgcagctcgagcctgacctgactaacgttatggccacaagcagaaaatacgaagaccttctctgggcttgggaaggctggcgggacaaggcgggtcgtgcgatcctccagttttatccaaaatatgtcgagctgatcaaccaggcggcacgactgaacggaaatatgtgggctcaaacttggagcaacatttacgatctcgtggttccgttccccagcgctcccagtatggataccaccgaggctatgctcaaacaaggctggactcctcggagaatgtttaaagaggccgatgattttttcaccagtctcgggctcctcccagtaccgccagagttttggaacaaaagtatgctggaaaagccaaccgacgggagagaagttgtgtgccatgcttccgcatgggacttctacaatggcaaagatttcagaataaaacagtgtacaactgtcaacctggaggaccttgtagttgcacaccatgaaatgggacacatacagtacttcatgcaatataaggaccttccagtggccctgcgcgagggcgctaacccaggattccatgaggctatcggcgatgtcctcgcccttagtgtctccaccccaaagcaccttcattctcttaacctactctcaagcgaggggggtagtgacgagcatgatataaactttctgatgaaaatggcattggataagatagcttttattccatttagttacctggtggaccagtggcggtggagggtctttgacggcagtatcaccaaagaaaactataaccaggaatggtggagtttacgtcttaagtatcagggactctgccctcccgtccccaggactcaaggtgacttcgatcctggtgccaaatttcatattccatccagcgtaccatatatccgcactgccatgaagctcggcttctcccgcccttggccggaggccatgcagcttatcacgggccagcccaacatgtcggcgagtgcaatgctgagctactttaagccccttctggactggctccgcactgagaatgaactgcacggcgagaagctaggatggccccaatataattggaccccaaattctgccaggagcgaggggccacttcctgattctgggcgagtatccttcttgggcctagatctcgatgctcagcaggctcgcgttggtcaatggctgctcctattcctgggtatcgctctgctagtggcgactctcggcctgagccagagactgttcagtattagacacagatccctccaccgccactcccatggccctcagttcgggtccgaggtggagctgcgccacagttag

SEQ ID NO: 214379 - DNA, 3438 bp, synthetic construct
  misc_feature 1..3438: note = Description of Artificial Sequence: Synthetic coding sequence
  source 1..3438: mol_type = other DNA
atgggcgctgcctccggcagacggggacccggactgttgttaccactgcctctgctcctgctcctgccacctcagcctgcccttgccctggatcccggattgcagcccggaaatttcagcgccgatgaggccggagcgcagctgttcgcccagtcgtacaattccagcgccgagcaggtactatttcagtcagtagctgcctcatgggcacacgataccaacatcaccgcggaaaatgctaggcgccaggaggaggccgctctactttcccaggagttcgccgaggcgtggggacagaaagcaaaggaactgtacgaaccaatatggcaaaacttcaccgacccgcaactgagaagaatcatcggcgcagttaggaccctgggaagtgctaacttacctttagcgaagcggcagcagtataacgccctcctgtccaatatgtcaagaatatacagcaccgccaaagtgtgccttcccaacaagacagcaacctgctggagtttagacccggatctgacaaatatccttgcttcatcccgatcctacgcgatgttactcttcgcttgggagggatggcataatgctgccggaattcccctgaaacctctctacgaggacttcactgccctaagcaatgaagcatataaacaggatggcttcactgataccggcgcttactggaggagctggtacaattcccctaccttcgaggacgatctcgagcatttgtatcagcaattggagcctctttacttaaatctgcatgcttttgtgcggagagccctacacagaagatacggggatcggtatatcaacctgaggggaccgatcccagcccacctcctgggcgatatgtgggcccaatcctgggaaaacatttatgacatggtggtgccttttcccgacaaacctaatctcgacgtcaccagcacaatgctgcagcagggatggaatgcgactcatatgttccgggtggctgaagagttctttacaagtctcgagctcagccctatgccccctgagttctgggaggggtccatgttggaaaagcccgctgacggaagagaggtcgtgtgtcatgcatcggcatgggacttctacaacagaaaagacttccggatcaagcagtgcacaagggtaaccatggaccagttgtcaacggtacaccatgaaatggggcacatccagtactatcttcagtacaaagatttaccggtgagtttgcgcaggggggcaaatcccggatttcacgaagccattggggatgtgcttgcgctatcagtttccacccctgaacacctgcataaaatcggactgctggatagggttaccaacgacacggagtcagacattaattatttgctcaaaatggcattggagaagatagcctttctacccttcggatacctggtggaccaatggcgctggggcgtattttccggccgtacgcccccatctcggtacaacttcgattggtggtacttgcgtactaagtaccagggcatctgccccccagtgacacggaatgagacccacttcgatgcaggagctaagttccacgtcccaaatgttacaccatatattcggtacttcgtatccttcgttctacagttccagttccacgaagcgctgtgcaaggaggctggctacgagggaccacttcatcaatgcgatatatatcgaagtacaaaagccggagccaagcttcgcaaagtcctgcaggccggaagcagtcggccttggcaagaagttctcaaagatatggtgggcctcgatgcactcgacgcccagccattattaaagtacttccagcctgttacccaatggttgcaggagcagaaccagcagaatggggaggttttggggtggcctgagtatcagtggcatcctcctctaccggacaattaccccgagggcattgaccttgtgaccgatgaagccgaggcctcaaagttcgtggaagagtacgaccgaacctcccaggtggtttggaacgagtatgccgaagcgaattggaattacaacactaatattaccacagaaacatccaagatacttctccagaagaatatgcagatcgccaatcacactctgaagtatggcacacaggcccgaaagtttgacgtgaatcaactccaaaacacgacaattaagaggatcatcaagaaggtccaagatctcgaacgggcagccttgcctgctcaagaacttgaggaatacaacaaaattctgcttgatatggaaaccacctatagcgttgccacagtatgccacccaaatggtagttgcctacaactggagccagacttgaccaatgtaatggctactagtagaaaatatgaagacctcctgtgggcttgggaaggctggagggacaaggccggaagggctatcctgcagttctaccctaaatacgttgaattaatcaaccaggccgctcgcttgaatgggtatgtggacgccggagattcctggcggtcaatgtatgaaacaccttctctggaacaggacctcgagcgtctctttcaggagctgcaacccctgtatctgaacttacacgcctacgtgaggcgcgctctgcacagacactacggcgctcagcatattaacttagaaggccctattcctgcccatttgctcggtaacatgtgggctcagacctggagcaatatctacgatttagtcgtgcccttcccttcagcaccatctatggacaccacggaggcaatgctcaagcaaggctggaccccacgcaggatgtttaaggaagctgacgacttctttacgtcacttggactgctgcctgtgcctccagaattctggaacaagtcaatgctggaaaaacccacagatgggcgtgaggtcgtgtgtcacgcctccgcttgggacttttacaacggaaaagacttcaggatcaaacagtgcacaaccgtgaatcttgaggacttggtcgtggcacaccacgaaatgggacacattcagtacttcatgcagtataaggatcttccagttgccctccgagagggcgcaaatccagggtttcatgaggctattggggacgttctcgctctctctgtgtctacacccaagcacctccactctctgaatctgttgtcctcagaggggggttccgatgagcatgacattaattttctcatgaagatggcactggacaagattgcctttatcccattctcctacctggttgaccagtggcgatggagggttttcgacgggagcattaccaaagaaaactacaatcaggagtggtggagcttgcgcttaaagtatcagggtctatgcccccctgtcccgaggactcaaggcgactttgaccctggggcaaagttccatattccctcatccgtaccttacatcagatactttgtgtctttcatcatccagttccatcccttctcccagcacacggctgcatag

SEQ ID NO: 214380 - DNA, 1428 bp, synthetic construct
  misc_feature 1..1428: note = Description of Artificial Sequence: Synthetic coding sequence
  source 1..1428: mol_type = other DNA
atgggggctgcttctgggaggcggggtccgggtttattactcccgctgcctctgcttttgttactccctccacagccagcactcgctctggatccaggcctgcaacccggtaacttctcagcagatgaggctggtgcacagctgtttgcacagagctacaattcttccgctgagcaggtgctgttccaatccgtggcagcttcctgggcgcacgataccaacataactgctgaaaatgctcggcgacaagaggaagccgcacttctcagccaggaatttgctgaagcatgggggcaaaaggccaaggaactatacgagcctatttggcagaacttcactgacccacagttacgaaggattattggagcagtccggaccctgggcagcgccaacctgcctcttgcaaaacgccaacagtataatgccctcctgtctaatatgtctcggatttactccactgccaaggtatgtctgcctaataaaacagcgacctgttggtccctggacccagatctaaccaacatactggcttcttctaggtcatatgcaatgctgttgtttgcttgggaaggttggcacaatgctgccggaattccactcaagccgctgtacgaggatttcacggccttgagcaatgaggcctataagcaggatggattcacagacacaggcgcttattggagatcctggtacaactcccctactttcgaggacgatctcgaacacctctaccagcagttagaaccgctgtacttaaacttgcatgcattcgtccggcgagcgttgcacaggaggtacggcgaccgctacatcaacctgcgtggcccaattccagcccatctgcttggcgacatgtgggcccagtcatgggagaatatttatgacatggtggtccccttccctgacaaaccaaacctcgatgtgacatcaactatgctgcagcagggctggaacgctactcatatgtttcgcgtggcagaggaattctttacgtcattagaactgagccccatgcctcccgaattctgggaaggatctatgctggaaaagcccgctgatggaagggaagttgtctgtcacgctagtgcctgggacttctataatagaaaggatttccgtataaaacagtgcacaagagtcacaatggatcagctgtcaacggtgcatcatgaaatgggtcatatccagtattatctgcaatacaaagatcttcctgtgagcttacgcagaggtgccaacccgggattccatgaggccatcggcgatgtgctggccctaagcgtaagtacacccgaacacctgcacaagatcggattactggatcgcgtcacgaatgacaccgagccatcgatccgcggttccgtgctgcttctgcccgagacaaaacctacacttatgcttgagttatcattcatgttccagatgtag

SEQ ID NO: 214381 - DNA, 1080 bp, synthetic construct
  misc_feature 1..1080: note = Description of Artificial Sequence: Synthetic coding sequence
  source 1..1080: mol_type = other DNA
atgattttgaattcttccacggaggatgggattaagcggattcaggatgactgcccaaaagcgggaaggcacaactacatattcgtgatgatccccacgctttactctattatcttcgttgtgggcattttcggcaactcgctggtggtgattgtaatctacttttacatgaagcttaagactgtcgcttctgtatttctgctgaacctggcactcgcagacttgtgttttcttcttacccttccgctgtgggccgtgtacaccgccatggagtacaggtggccttttggcaattacctctgtaagattgcttctgccagcgtctcatttaatctttacgccagtgtgtttcttctgacatgcttgagtattgaccgttacctggccatcgttcatccaatgaagtcaaggcttagacgcaccatgttggtggcaaaagtgacttgcataattatttggcttctggcaggcttagcgtcacttcccgcaattatccaccgcaacgtttttttcatagagaatacaaacattacggtatgtgcattccattatgagtcccagaacagcactctgccaatcgggctgggacttaccaagaatatcttgggcttcctgttcccatttttgatcattctgacatcgtacacattaatttggaaagcactaaaaaaagcatatgagatacagaagaacaaaccgcgaaatgatgacattttcaaaatcataatggcaatcgtgttattcttcttcttctcttggattccgcaccagatcttcaccttcttggatgtccttatccaattaggcatcatacgggactgtcggattgcagatatcgttgataccgccatgccgattacgatttgcatagcttactttaataactgtcttaacccccttttctacggattcttgggcaaaaagtttaaaagatactttctccagctcttgaagtatattccaccaaaggcaaaaagccatagtaacttaagtacaaagatgagcactctctcctacaggccgtctgacaacgtctcttcatcgactaaaaaaccagcaccctgcttcgaagtcgagtag

SEQ ID NO: 214382 - DNA, 1080 bp, synthetic construct
  misc_feature 1..1080: note = Description of Artificial Sequence: Synthetic coding sequence
  source 1..1080: mol_type = other DNA
atgattctgaactcgtcaacagaggacggcattaaaagaatccaggacgattgcccaaaagcagggagacataactatatctttgtgatgattcccaccctctattccatcatcttcgtggttgggattttcggaaatagcttagttgtgattgttatttatttctacatgaagctgaaaacggttgcatcggtgtttctactcaacttagccctggccgacttatgtttccttctcacccttcccctctgggcggtctacaccgcaatggaatacagatggccatttggcaactacctctgcaagattgcctcagcttccgtctcatttaacttatacgcttccgtgtttcttctgacatgtctcagtatcgatcgctacttggcaatcgtgcacccgatgaagtcccggctaaggcgcactatgcttgtggccaaagttacttgtattatcatctggctactggccggactggcgagtctgcccgctattatccaccgcaacgtgttcttcatcgagaacaccaacataaccgtgtgtgcctttcattatgaaagtcagaatagtaccctccccattggcctgggtctcaccaagaatatcttggggtttctgttccctttcctgatcatactgacatcctacacattgatctggaaggccttaaagaaagcatacgagattcagaagaataagcctaggaacgatgatatatttaagatcatcatggcgatagtgctcttcttcttcttcagttggattcctcatcagattttcacattcttggacgtgttgattcagttgggtatcatccgagactgcagaatcgcggacatcgtggatacagccatgccgatcacaatctgcatcgcttactttaataactgtcttaatccattattttatggctttttgggaaagaaattcaagagatatttcttgcagcttctgaagtatatcccccctaaggctaagtcacattcaaatctgagtacgaaaatgtccaccttaagttatcgtccatccgacaacgtctcatccagcaccaagaaacccgctccatgttttgaggtcgagtag

SEQ ID NO: 214383 - DNA, 1080 bp, synthetic construct
  misc_feature 1..1080: note = Description of Artificial Sequence: Synthetic coding sequence
  source 1..1080: mol_type = other DNA
atgatcctcaattcatcgacagaagatgggattaagaggattcaggatgattgcccaaaggcagggaggcacaactatatttttgttatgatccccacgctgtacagcatcattttcgtggtcggcatcttcggaaattctctggtggtcatagtgatctacttctacatgaagctgaagaccgtagcctcagtgttcctgctgaatcttgcactggctgacctgtgctttcttttaactctgccgttgtgggctgtctacactgctatggagtaccgctggccattcgggaactacttgtgcaaaattgcaagcgcgagtgtgtccttcaacctttatgcctccgtgttcctcctgacctgtctgagtatcgatcggtacctcgcgattgtgcatcccatgaagtcacgcctgcgaaggacgatgctggtggcgaaagtgacatgtattattatctggttgcttgctgggctggcatcactccccgctatcatccacagaaatgtcttctttatcgagaatactaacatcaccgtgtgtgctttccactacgaaagccagaatagcacccttccaattggactcggactcaccaagaacatactcggttttctgtttccgtttctcataatccttacttcttataccctgatttggaaagcattgaaaaaagcctacgaaatccagaagaacaaacccagaaacgacgatatcttcaagatcatcatggccatagtccttttttttttctttagttggatcccacatcagatctttacttttctcgacgtgttaatccagcttgggatcattagggactgtagaattgcggatatcgtagatacggctatgccaatcactatctgtatcgcctattttaacaactgcctcaatcccctgttctacggatttctgggcaaaaagttcaaaaggtacttcctgcaactgctgaaatacatcccccctaaggccaaatcacactcgaatctgagtacaaagatgtcaaccttaagctatcggccatccgataacgtctcctcgagtaccaaaaagcctgctccatgcttcgaggtggagtag

SEQ ID NO: 214384 - DNA, 1080 bp, synthetic construct
  misc_feature 1..1080: note = Description of Artificial Sequence: Synthetic coding sequence
  source 1..1080: mol_type = other DNA
atgattctcaatagctctactgaagatggaattaaaaggattcaggacgattgccccaaggctggaaggcacaactatatctttgtcatgatccccacattgtattcaattatttttgtggtaggaattttcggaaacagcctggtggttatagtgatttatttctatatgaaactcaaaaccgtggccagcgtgttccttctcaacctggcacttgcagatctatgctttctattaactttgcctctctgggctgtctacactgccatggaatacagatggccttttggtaattatctgtgcaagattgcctccgccagcgtcagctttaacctatatgcatctgtgtttttgctgacttgtctgagcattgatcgctatttagccattgtccaccccatgaaatctcgcctgaggaggacgatgctggtggccaaggtgacatgtatcatcatctggctcctggccggtctcgccagcctcccagcgatcattcaccgcaacgtatttttcatcgagaatactaatattactgtgtgcgcatttcattacgaaagtcagaattctacactgccgatcgggctcggcctaacgaaaaatattctgggttttctttttcccttcttaatcattttgacaagctacaccctgatttggaaagccctaaaaaaagcttacgaaatccagaagaacaaacccagaaatgatgacatttttaaaatcattatggcgatagtgctgttcttcttcttcagctggatcccccaccagatttttacatttctagatgtccttatacagctcgggatcatccgcgactgccgtatcgccgatattgtagacaccgcgatgccaattaccatctgtattgcttactttaacaattgcctgaaccccttgttctatggtttcttagggaagaagttcaagagatattttctccagctcctaaagtacatcccaccaaaagctaagtctcattctaatctgtcgactaagatgagcacactctcctatcgcccatctgacaatgtctcaagtagtactaagaaacctgcaccttgcttcgaggtggagtag

SEQ ID NO: 214385 - DNA, 1080 bp, synthetic construct
  misc_feature 1..1080: note = Description of Artificial Sequence: Synthetic coding sequence
  source 1..1080: mol_type = other DNA
atgattttaaacagctccaccgaggacgggatcaagaggatacaagatgattgtcccaaggccggacggcacaactatatttttgttatgatacccaccttatactctattatcttcgtcgtaggtatcttcgggaatagcttagtcgtgatcgttatctacttctatatgaaattgaaaaccgtggcatccgtttttctcctgaacttagcacttgcagacctatgtttcctgctgaccttaccactgtgggctgtgtacaccgcgatggagtaccgatggccctttggaaactatctatgtaagattgctagcgccagtgtgtctttcaacttatacgccagcgtctttctgttaacctgtttgtccatagaccggtatttggccattgtgcatccaatgaagtcaaggctacgacggaccatgctggtggccaaagtgacttgtatcataatctggttgcttgcaggccttgcttccttgcctgccataatccacagaaacgtgttctttatagaaaatacaaatatcaccgtgtgtgcatttcactatgaatcacagaatagtacgctcccgatagggctaggccttacgaaaaatatcctgggctttctgttcccctttttaattatcctgactagttacaccctgatctggaaggccttgaaaaaggcttacgagatccagaaaaataaaccaagaaatgatgacattttcaagatcattatggccatcgtcctctttttttttttctcctggatccctcaccagatcttcacatttctcgacgttttgatccaactcgggattatccgagattgcaggatcgctgacatcgtggacacggccatgcccattacaatctgcatcgcttatttcaataactgtctcaaccctctgttctacggattcttgggcaagaaatttaagaggtacttcctccagctgctaaaatatattcccccaaaggctaaatcccacagcaatttatctaccaaaatgtcaaccctgagttacaggccttccgataacgtatcttcatccactaaaaaaccagcaccttgtttcgaggtagaatag

SEQ ID NO: 214386 - DNA, 1080 bp, synthetic construct
  misc_feature 1..1080: note = Description of Artificial Sequence: Synthetic coding sequence
  source 1..1080: mol_type = other DNA
atgatcctgaactcttcaaccgaagacggtatcaaaaggatacaggatgactgcccaaaggcaggacggcacaactatatcttcgtgatgataccaactctttattcaatcatctttgttgtggggattttcggtaacagcctagtcgtaatcgttatctacttttacatgaaacttaaaacagtcgcatctgtcttcctgcttaaccttgcgctcgccgacctgtgtttcctgctcactctgccgctctgggccgtatatacggctatggagtatcgctggccgttcggcaactatctgtgtaagatcgctagcgcaagtgtgtctttcaatctttatgcctctgtgtttctgttgacctgtctatctattgatcggtatctcgcaattgtgcatcctatgaaaagccgtctccgtcgcacaatgctggtggctaaagtgacctgtatcattatatggctcctcgcaggactggcttcactcccggctatcatccatcgaaacgttttctttattgagaataccaacatcacagtttgtgctttccattatgagtctcagaactctacgctgccgatcgggctcggtttgacaaagaacatccttggattcctttttcccttcttaatcattctgaccagctacaccctcatttggaaagccttgaaaaaggcttatgaaatccagaaaaataaaccaaggaacgacgatattttcaaaattatcatggccattgtgctgtttttctttttctcttggatcccacatcaaatctttacgtttctggatgtgttgatccagttggggatcattcgcgattgtagaatcgcagacattgtggataccgctatgccaattactatttgcatcgcttactttaataattgcctgaatcctctcttttacggctttctgggaaaaaaattcaaaaggtactttcttcagctgcttaaatacataccgccaaaggcaaagtctcattcaaacctttcaaccaaaatgagcactctttcttacaggccttctgacaacgtgagcagttcgactaagaaacccgctccgtgtttcgaggtggagtag

SEQ ID NO: 214387 - DNA, 1080 bp, synthetic construct
  misc_feature 1..1080: note = Description of Artificial Sequence: Synthetic coding sequence
  source 1..1080: mol_type = other DNA
atgatcctgaactccagcacagaggacgggatcaaaagaatccaggacgactgtccaaaggctggccgacacaactatatatttgtcatgatcccaactctgtactctataattttcgtcgtcggcatctttggcaactctcttgtcgtgattgtcatctacttctacatgaaattaaagacagtcgccagtgtgttcctgctaaatctggccctggccgatctgtgcttcctgctcaccttaccactctgggctgtctacacagcaatggaatacaggtggcctttcggaaattacctgtgcaaaattgcatctgccagcgtttcgttcaacctatacgcttcggtgtttctgcttacgtgcctctccatcgataggtacctggctatcgtccaccccatgaagtcccgattgcgacggacaatgttggtggctaaagtaacttgtataatcatttggctgctcgcgggactggcctcactgccagctattattcacaggaatgtcttctttatcgaaaatactaatatcaccgtctgcgcatttcactatgagtcgcagaattctacactccctataggcctggggctgacaaagaacattctgggctttcttttccccttccttattatcctcacttcttacaccctgatttggaaggccttgaagaaggcctacgagattcagaaaaacaagcccaggaatgacgacatcttcaaaatcatcatggccattgtgctgttcttctttttcagctggattccccaccaaatatttacatttctggatgtactgatacagcttggcatcatccgcgactgtaggatcgctgacatcgtggataccgctatgcccattacaatttgcatagcttacttcaacaactgcctcaaccccctcttttatgggttcttgggaaagaagttcaagcgttatttcctgcagctcctgaaatatatccctcccaaagcaaaatcccattccaacttatcaactaagatgtctacactgtcatatcggccaagcgataacgtctcatcttctacaaagaaaccggcaccttgtttcgaagtggagtag

SEQ ID NO: 214388 - DNA, 1080 bp, synthetic construct
  misc_feature 1..1080: note = Description of Artificial Sequence: Synthetic coding sequence
  source 1..1080: mol_type = other DNA
atgattcttaacagttcaactgaggacggtatcaaacggatccaggacgactgccccaaagccggaaggcacaactatatcttcgtgatgatacccacactatactccatcatcttcgttgtgggaatattcggaaatagcctcgtcgttatagtgatatatttttatatgaaactgaagaccgtggctagcgtgtttcttctcaatcttgccttggccgacctctgctttttactcaccctgccgctgtgggccgtctacaccgctatggagtataggtggccatttggcaattatttgtgtaaaatcgccagtgcctcagtttcctttaacctgtatgccagtgtattcctattgacctgtttatccatcgatagatacctggcaatcgtgcatccaatgaaaagtcgcctgaggaggaccatgttggtggctaaggtcacatgcataatcatctggctgctcgcagggctggcctccttaccggctattatacacaggaacgtcttcttcatcgagaacacaaacattaccgtgtgtgccttccattacgagagtcagaactccacgctccctatcggcttaggcctgacgaaaaacattctgggattcctcttcccatttctcatcattcttaccagttatacgcttatctggaaggcactgaaaaaggcttacgaaatccagaaaaataagccgagaaacgatgacatcttcaaaatcattatggcgattgtgctattcttttttttctcctggatcccccaccagatatttacgttcctggacgttcttatccaactaggaataatccgtgattgtaggatcgctgacattgttgataccgccatgccaattacaatctgtatcgcctattttaacaactgcctcaacccccttttttacggctttctgggcaaaaaatttaagagatactttttgcagctgcttaagtacattcctcccaaggcgaaatctcattccaatttatctacaaagatgtctaccctctcttacagaccatcggataacgtcagctcttccaccaaaaaaccggcaccttgtttcgaggtcgaatag

SEQ ID NO: 214389 - DNA, 1080 bp, synthetic construct
  misc_feature 1..1080: note = Description of Artificial Sequence: Synthetic coding sequence
  source 1..1080: mol_type = other DNA
atgattttgaatagttctacggaagacggtattaaaaggattcaggacgactgtcctaaagctggtagacacaactatatcttcgttatgatccctacactttacagcattatctttgtcgtcggaatttttgggaattccctcgtggtcatcgtcatctatttttacatgaaactgaagacagtcgcatccgtgttcctgctgaatttggcgcttgccgatctgtgttttttgttaacactgcccctttgggcggtgtataccgctatggaatacagatggccattcggtaactacttgtgtaaaattgccagcgcttctgtcagttttaatctctatgcttccgtttttctcttgacgtgcctctccatcgatagatatttggctatcgtgcatcccatgaagtcaagacttcgcaggactatgctggtcgccaaggttacatgcatcatcatttggctcctagccggtctcgccagtctgccagcaatcatacacagaaacgtgttcttcattgaaaataccaacataaccgtgtgtgcctttcattacgagagccagaactccaccttaccaattggacttggcctaaccaagaacattctcgggtttctgtttcctttcctcataattctcaccagttacacactgatctggaaagcactcaagaaggcatacgagatacagaagaacaagcctaggaacgacgacattttcaagattatcatggctatcgtgctgttttttttctttagctggatcccacaccagatcttcactttcctggacgttcttatccagctgggcattatcagggattgtagaatcgcagatattgtggataccgctatgccgatcacaatctgtattgcctacttcaacaattgtctgaaccccctcttctacggatttctgggcaaaaaattcaagcgatatttcctgcagctgttgaagtatatcccaccaaaggctaaatcccatagcaatctcagcaccaaaatgtctacactgagctaccggcctagcgataacgtctcttctagtacgaaaaagcccgcaccgtgtttcgaagtggaatag

SEQ ID NO: 214390 - DNA, 1092 bp, synthetic construct
  misc_feature 1..1092: note = Description of Artificial Sequence: Synthetic coding sequence
  source 1..1092: mol_type = other DNA
atgaagggaaactccacactcgctactacatccaagaatataacaagcggcctgcattttgggctagtgaacatcagcgggaataatgaaagtaccctgaactgttctcagaaaccgtctgacaagcacctagatgctatccctattctgtactacatcatcttcgtcatcggctttctggtgaacattgtggtggtcacattgttttgttgccagaaaggccctaagaaagtgagttccatatacatctttaacctcgctgtggctgatttactcctgcttgcaacactccccctctgggccacctactactcgtatagatatgattggttatttgggcctgtgatgtgtaaagttttcggctcattcttaacactgaatatgttcgcctctattttctttattacctgtatgtccgttgacaggtaccagtccgtgatttatccctttctttcccagcgaaggaatccatggcaggcatcatatatagtgccactggtttggtgcatggcatgcctgagctccttgccaactttctatttccgggatgtccgcaccatcgaatacctgggtgtgaatgcttgcattatggcctttccccctgaaaaatacgcacaatggagtgccggaattgcactgatgaagaatatcctgggctttataattccactgattttcatagccacctgttattttggaatccgcaaacacttattgaagacgaattcctacggtaaaaaccgaatcactcgggaccaggtcctgaaaatggccgctgccgtcgttctggccttcatcatttgttggttaccctttcatgtgctgactttcctagatgccctggcctggatgggagttatcaactcctgcgaggtcatcgcggtaatagacctggctttgccgtttgcgatccttctggggtttacaaactcttgtgtcaaccctttcctttactgttttgttggcaatagatttcagcagaagttgcggagcgtattccgggtccctatcacctggctgcagggtaaaagagaatccatgagctgcagaaagtcttcgtcccttcgcgaaatggaaactttcgtgagttag

SEQ ID NO: 214391 - DNA, 1458 bp, synthetic construct
  misc_feature 1..1458: note = Description of Artificial Sequence: Synthetic coding sequence
  source 1..1458: mol_type = other DNA
atgcgcaagagagcgcctcagtccgagatggctcctgccggagtgtccttgcgagcaaccatcctgtgcctgcttgcctgggccggtctcgcagccggtgacagggtgtacatacatccgttccacctcgtgatacacaacgagagtacatgtgagcagctagccaaagccaacgcgggaaaacctaaggacccaactttcatccccgctcctatccaggccaagacttcccctgtggatgagaaggccctccaagaccaattggttctggtcgctgcaaagttggatacagaggacaagctgagggccgctatggtgggcatgttggcaaatttcttgggcttcaggatctatgggatgcactccgagctgtggggtgtggttcacggtgccaccgtgttgagtcccactgccgtttttggcacactcgcctccctgtatttaggggcactggatcatacagcagaccggctgcaggccatactgggagtgccctggaaggacaagaactgcacatcacgattagatgctcataaagtcctgtccgctcttcaggcggtgcagggtctcctggtggcccagggacgcgcagactcccaggcccagttactcctttccacagtagttggagtgtttacagcccctggattgcatctcaaacagccatttgtccagggactcgcactctacaccccagttgtgctgcctaggtcgctggatttcaccgagttggacgttgccgctgaaaagatagacagattcatgcaggccgttactggctggaagacaggttgcagtctgatgggagcgtccgtggattccacccttgcattcaacacatatgtgcacttccagggtaagatgaaaggtttcagtttactggcggagcctcaggagttttgggttgataatagcacgagtgttagtgtgcctatgttgagcggcatgggtacctttcagcactggagcgatattcaggacaattttagcgtgacacaggttccttttaccgagagtgcttgtctcctgctcattcagccccattacgcttccgatttggataaggtcgaggggctgacatttcagcagaacagtcttaattggatgaaaaaactaagcccccgaactattcacctgactatgccgcagttagtactccagggaagttacgacttacaggacctcctggcccaagccgaattacccgctatcctccataccgagctgaacctgcagaagctttcaaacgatcgaatccgggtaggcgaagtgttgaacagcatcttcttcgagctagaggctgatgagcgtgaaccaaccgaatccacgcagcagctcaacaagcctgaggttctggaggttacgttaaatcgcccatttctcttcgccgtctatgaccagtcagccacggcgcttcactttcttggacgggtggcgaaccctctctcaactgcctag

SEQ ID NO: 214392 - DNA, 1212 bp, synthetic construct
  misc_feature 1..1212: note = Description of Artificial Sequence: Synthetic coding sequence
  source 1..1212: mol_type = other DNA
atgcggaagagggctccacagtcagaaatggccccagcaggtgtgtcactccgcgcaactattctctgcctgttggcttgggcaggactcgctgcaggggacagagtgtacatccacccatttcaccttgtgattcacaacgagtccacatgtgagcagctggcaaaggctaacgctggaaagccgaaagatcccaccttcatcccagctcctatccaggcaaaaacaagtcctgtggatgagaaggcacttcaggatcagctagtgctcgttgccgctaagctcgacacagaggacaaattacgggcagcaatggtcggcatgctggccaacttcctgggtttccgcatttatggtatgcattctgagctctggggcgtggtgcatggagccacggttctctccccgacggcggttttcggcaccctggcttcactgtatctcggggcacttgatcacactgccgatagactacaggctatcttagatgttgccgctgaaaaaattgacagatttatgcaggccgttacgggatggaagactgggtgttctctgatgggcgcatcagtggattcaacattggcctttaatacctacgtacacttccaaggaaagatgaagggatttagcctgttggctgaacctcaggagttctgggtagataatagtacctcagtcagcgtgcccatgctgtccgggatgggtacttttcaacactggtcagacatccaagataacttttccgtaacccaggtgccgttcacagaaagcgcctgccttctgcttatccagccgcattacgcttccgacctggataaagtcgaggggcttacctttcagcaaaactccttgaactggatgaaaaagttgtcaccaagaacaattcacctgaccatgccgcagttagttttgcaaggcagttacgacctccaagatctgctcgcacaagcagagttgccagctatcttacatactgaacttaatctgcagaaactgtctaatgaccggattcgggttggcgaagttctgaacagtatcttcttcgagctggaggctgacgagcgcgagcccaccgagtccacgcagcagttaaacaaacccgaagtgctggaggtgactctcaacaggccctttctgtttgccgtttacgaccaatcggccacagctctgcattttctgggtcgagtcgccaaccccctgtctactgcctag

SEQ ID NO: 214393 - DNA, 1479 bp, synthetic construct
  misc_feature 1..1479: note = Description of Artificial Sequence: Synthetic coding sequence
  source 1..1479: mol_type = other DNA
atggtcaaattccctgccctgactcactattggcctctcatccggtttttagttcccctcggaattactaacatcgctatagattttggtgagcaggccctgaacagggggatcgctgccgtaaaagaagacgctgtcgagatgctcgctagctacggcctggcctactcgttgatgaagttctttaccggaccaatgagcgacttcaagaatgtcggactcgtcttcgtcaattcgaagagggacagaacaaaagcagtcctgtgcatggtggtagccggagcaatagctgccgtgtttcataccctgattgcctactcagatcttgggtattatataattaacaaactgcaccatgtggacgaatccgtcgggtcgaagacacgaagggcatttctgtatttagcagccttccccttcatggatgctatggcttggacccacgctggaattctgctaaagcacaagtacagttttctggtcggctgcgcctcgatcagcgatgttatcgcccaggtagttttcgtggccatcctgctgcacagtcacctggagtgtcgggaacccttgctgatccccatcctctccctatacatgggggcactggtgagatgcacaaccctctgtctcgggtattataagaatatccatgacataatccctgacagaagcggcccagagcttgggggagacgccaccatccgtaaaatgctgtctttttggtggcctctcgcgcttattctggcaacacagcgaatctcacgtcccatagttaacctttttgtgtcacgggaccttggcggatccagtgcagctaccgaagccgtggccattctgacagctacttatcccgtcggccatatgccgtacggctggttgaccgagatccgggcagtctaccctgctttcgacaaaaataacccctcaaacaaactagtgagcaccagcaacacagttaccgccgcacacatcaaaaagtttacatttgtctgcatggcactgtccctgaccctgtgctttgtgatgttttggacacccaacgtgtccgagaagatattgatagatattatcggggtggacttcgcgttcgccgaattgtgcgtggtgccattgagaatcttctccttcttcccagtgccggtgacagtgcgcgctcatctcaccggctggttaatgacactgaagaagactttcgtcctagctcccagttctgtgctcaggatcatcgtcttgatagcttcactcgtcgtcctcccatacctcggcgtgcatggagcaaccctgggggtgggaagcctgctggcgggatttgttggggagtcaacaatggtggccattgcggcttgttacgtctaccgcaagcagaaaaaaaagatggagaacgagtctgccactgagggggaggattcagctatgaccgatatgccgccaaccgaagaagttactgacattgtggagatgcgcgaggaaaacgagtag

SEQ ID NO: 214394 - DNA, 885 bp, synthetic construct
  misc_feature 1..885: note = Description of Artificial Sequence: Synthetic coding sequence
  source 1..885: mol_type = other DNA
atgggtgccttagttagatgcaccacactttgcctgggctactataaaaacatccacgatatcatcccagaccgctccggccctgagcttggaggggacgcaactatccgcaagatgctgtccttttggtggccactggccctgatacttgctacgcagcgaattagccgcccaatcgtgaacctgtttgtgtccagggacctgggcggatcctccgcagcaaccgaggccgtggcaatcctgacagctacgtatccagtgggccacatgccttatggctggcttaccgaaatcagggctgtctatccggctttcgacaagaacaacccatccaacaaactcgtgagcacaagcaataccgtcaccgccgctcatattaagaagtttaccttcgtgtgtatggccctgtcactgaccctgtgtttcgtcatgttctggacgccaaacgtgagtgagaaaatcctgatagacataataggagtcgactttgcctttgctgaactttgcgtggtgcctctgcgtatcttcagcttttttcctgtgccagtcacagtccgtgcgcacctcaccggttggctgatgactttgaagaagactttcgttctggcaccatcctccgtcttgaggattatcgtactgatcgcgtctctggtcgtgctaccttaccttggcgtgcatggggctactctcggtgttgggtccctgcttgcaggcttcgtgggggagagtaccatggtagccatagctgcatgctacgtgtaccgtaagcagaaaaagaaaatggagaatgaaagcgcgacagagggggaggatagcgccatgactgatatgcctcctaccgaggaggtgacggacatcgttgaaatgcgagaggagaacgaatag

SEQ ID NO: 214395 - DNA, 471 bp, synthetic construct
  misc_feature 1..471: note = Description of Artificial Sequence: Synthetic coding sequence
  source 1..471: mol_type = other DNA
atgtggaccttcgttactcaactgctggtcaccctcgtgctgctctcattcttcctggtgtcttgccagaatgtgatgcatatcgtgcgaggatccctctgcttcgtcttaaagcatatccaccaggaacttgataaggaattgggagagtccgaaggattaagcgatgacgaggagaccatcagcactcgggtggtccggaggcgcgtctttctgaaagggaatgaatttcagaatattccaggcgaacaggtgacggaggaacaatttactgatgaacagggtaatattgtgactaagaaaatcatcaggaaggtggtccgccagattgacctcagtagtgccgacgccgctcaggaacacgaagaggttaccgtagagggacccctggaagacccatcagagctcgaggtggacatcgattattttatgaagcattcaaaggaccatacctccacacctaatccgtag

SEQ ID NO: 214396 - DNA, 5694 bp, synthetic construct
  misc_feature 1..5694: note = Description of Artificial Sequence: Synthetic coding sequence
  source 1..5694: mol_type = other DNA
atggcacaggcagcaaagcagctgaagaaaatcaaggacattgaagcccaggcgctgcaggaacagaaggaaaaagaggagtccaacaggaaaagaaggaaccggagcagagataggaaaaaaaaagccgatgccgcaaccagttttttaagggccgcaaggagtgggaacctcgacaaggcactggaccacctgagaaatggagtagacatcaatacatgcaaccagaacggcctgaacgggcttcatctcgcctccaaggaaggccatgttaaaatggtcgtcgaacttctgcataaggagatcattctggagacaacaaccaaaaaagggaatactgccttacatattgccgctcttgcaggccaagacgaagttgtacgagaacttgtgaactatggagccaacgtgaatgcacagtcacagaaggggtttacaccactctacatggcagctcaagagaaccatctcgaagtggtgaagtttctcctggagaacggggctaatcagaatgtggctacggaggacgggttcacgcctctggccgtggccttacaacagggccatgaaaacgtcgtcgcacacctgattaactacgggacgaagggaaaagtgagacttcccgcactgcacatcgccgctcgtaacgacgatacaaggacagctgctgtcctgctccagaacgatccaaaccccgacgtactgagtaaaactggatttacacccctgcatatcgcagctcactacgagaacctgaacgtggcccagctccttttaaacaggggcgcaagtgtgaacttcaccccccagaacgggatcactccacttcacatagcgtctaggagagggaacgtcatcatggtgaggctgctgctcgaccgtggagctcagatcgaaaccaaaacaaaggacgagctcacaccgctccattgtgctgcacgaaatggccacgtgcgtatctccgaaattctgcttgaccacggcgctcccatacaggcaaaaaccaagaatggtctgtccccaatacacatggctgcacagggagatcacctggactgcgtccgtctcctgctgcagtacgacgctgagatagacgacattacactcgatcaccttactcccttgcacgtggctgctcactgcggacaccatagagtggccaaggtgctcctggacaagggagcgaagccaaacagtcgggcactgaatggttttactcctctccacattgcctgcaaaaaaaaccacgtccgagttatggagctgttgctcaaaaccggtgccagcattgacgcagtcaccgaatcagggttgacacccctgcatgtggcctccttcatgggacatctccctattgtaaagaacctgttacagcgaggagcatccccaaatgtaagcaacgtgaaggtggagacaccgctgcatatggctgctcgagccggtcatactgaggttgcgaagtacttgctgcaaaacaaagccaaggttaacgcaaaagccaaagatgaccagacacctctgcattgcgccgctaggatcggtcatactaacatggtgaaactgctgctcgagaacaacgcaaacccaaacctggccacaaccgctgggcacactcccctgcatatcgccgctcgagaaggccatgtggagacagtgctcgcgctgctggagaaggaggccagccaggcttgtatgactaaaaagggctttacaccccttcatgttgccgctaagtatggcaaggtcagagtcgcggagctcctccttgaacgggatgcccacccaaacgccgctggcaaaaatggattaacccccctccacgtcgccgtgcaccacaataatttggacatcgtgaaactgttgctcccccgtggtggatctccccattccccggcatggaatggatacacccccctccatatcgctgcaaagcaaaaccaggtggaggtggctcgttctctccttcagtatggcggatccgccaatgcagagtcggtgcagggcgttacaccattgcatctcgccgctcaggagggtcacgcagagatggtggccttgctcttgtccaaacaagccaatggaaacctgggcaataaatctgggctgacccctctgcacctcgtggctcaagagggacacgtgcccgttgccgatgtgctcatcaagcatggggtaatggtcgacgcaacaactaggatgggctacacccctttgcacgttgcatcacattatggcaatattaaactcgtgaaatttcttttacagcaccaggcggatgtaaatgccaagaccaagttaggctatagccccctccatcaggctgcacagcagggacacacagatatagtaactctactattgaaaaatggcgcatctcctaacgaggtgtccagcgacggcacaacaccactcgctatcgccaaacggcttggttacatctcggttacggatgtacttaaagttgttaccgatgagacaagctttgtgctggtcagtgacaagcaccgcatgtcattcccggaaacagttgatgaaatacttgacgtctccgaggacgagggcaccgcacacataaccattatgggggaggagctgatcagctttaaggccgagagacgagattcccgtgatgttgacgaagagaaggagctccttgacttcgtgccaaagcttgaccaggtcgtggaaagccctgccataccaagaatcccatgcgccatgcccgagacagtagtgataagatccgaggaacaggaacaggcgagcaaggaatacgacgaggatagcctgatacccagtagcccagccaccgagactagcgacaacatcagcccagtggcatctccagtgcacaccggctttctcgtgtccttcatggttgatgctcgtgggggatctatgaggggctcacgccacaatggcttgagagtggtgataccccctcgaacatgtgctgctcccacaagaataacgtgtaggctcgtgaaaccccaaaaacttagcaccccaccgccactggcagaggaggaaggattggcctcccggattatagcactgggaccaactggtgcacagttcctgtcacctgtaatcgtcgagattccgcatttcgcatctcacgggcgtggagatcgagaactggtcgtactccgctctgagaacgggagcgtgtggaaggaacaccggagccgctatggtgagtcttacctagaccagatcctcaatggtatggacgaggaactggggtcccttgaggagctcgaaaagaaaagagtgtgtcgtatcataaccaccgattttccactctattttgtcataatgtcccgtctgtgccaggactacgacaccataggaccagagggtggcagcctcaagagtaagctggttccccttgtccaagcgaccttcccggagaatgccgttactaaaagagtgaaattagccctgcaggcgcagccagttcctgacgagctagtaacgaaattgttggggaatcaggcgacattctccccgattgtcactgtggaaccaaggcgacgaaagtttcaccgcccaatcgggctgcgaattcctctccctccttcctggaccgataacccacgggattcaggcgagggagatactaccagcctccgcctgctgtgctctgtaatcgggggtactgatcaggcacagtgggaagatatcaccggtaccactaaactcgtgtatgcaaatgagtgtgcgaatttcaccaccaatgtgagtgctcgcttttggctctcagactgtccccgaaccgcagaggccgtaaactttgccacccttctgtataaggaactcactgcagtcccatatatggccaaatttgtgattttcgctaaaatgaacgaccctcgcgagggcagactgaggtgctactgcatgacagacgacaaggttgacaaaactttggaacaacatgaaaactttgtcgaagtggcccgaagcagagatatagaggttctggagggtatgagcctgttcgcagaactgtctggcaatttagtgcccgtaaaaaaagccgcacaacagcggtccttccatttccagagcttccgcgagaaccgacttgcaatgcctgtgaaagttcgggattccagtcgagaacctgggggaagcttgtctttcctgcggaaagccatgaaatacgaagacacacaacatattctctgtcacctcaatattaccatgccaccctgcgctaagggctccggagccgaggatcggcgaaggactccgactccccttgctctaaggtacagtattctctcagagtctacacccggttctctttctgggactgagcaagccgaaatgaaaatggctgtgatctccgagcatttggggctgagttgggctgaactggcgcgtgagctacagttttcagtggaggacattaacaggataagggtggagaacccaaacagcttgttagagcagtccgtcgctctgctaaacttgtgggtgatccgagagggccaaaacgccaacatggagaacctttacaccgccttgcaatccatagaccgtggagagattgttaacatgctagagggtagcggacgccagtctaggaacttgaagccggatcgccgacacactgaccgggattatagtctttcaccctctcagatgaatggatacagctccttgcaggacgaactactttctcccgctagtcttggttgtgccttgtcctcccctcttcgcgctgaccaatattggaacgaggtggccgtgttagatgccattccgctggcagctacagagcatgatacaatgcttgagatgtctgacatgcaggtgtggagcgcgggtctaactccctcgctagtgaccgcagaagacagtagcctcgagtgtagtaaagccgaggactccgatgccactggccatgaatggaaacttgagggagcgttaagtgaagagccacgtggacccgagctgggctcactcgaactggtcgaagatgacacagtggacagcgatgctaccaacggactgattgacttgctggaacaggaggagggccaacgttctgaggagaagcttcccggaagcaaaagacaggacgatgctactggagccggacaggattccgagaatgaggtttctctcgtgagcggccaccaacggggacaagccagaatcactcattcacccacagtttcacaggtgaccgagaggtcccaggaccggctccaggactgggacgcggacggatctatcgtgtcctatctgcaggacgcggctcagggttcttggcaggaagaggttacacaggggcctcattcgtttcagggcacaagtacgatgacagaggggctggaaccgggaggcagccaggagtacgagaaggtgctggtgagcgtctccgaacacacttggactgaacagcctgaagctgagagtagccaggcagaccgggacaggaggcagcagggacaggaggagcaagtgcaggaggctaagaacacattcacacaagtggtgcaaggtaacgagttccagaatattccaggggaacaggtgaccgaggagcaatttactgacgaacagggcaacatcgtgacaaaaaagatcattagaaaggtggtgcggcagattgacctctcaagcgcggatgcagctcaagagcatgaagaagatcacacatcgacccccaatccctar

SEQ ID NO: 214397 - DNA, 5643 bp, synthetic construct
  misc_feature 1..5643: note = Description of Artificial Sequence: Synthetic coding sequence
  source 1..5643: mol_type = other DNA
atgccctacagcgtgggattcagggaagctgacgcagccactagctttctacgtgccgcaagaagcggtaacctagataaggctctcgatcacctgcgcaatggggtggatatcaatacttgtaatcagaacggattaaatggactgcacctggccagcaaagagggccatgtcaaaatggtggtggaattactccacaaagaaatcatcttggaaactacaaccaaaaagggcaatactgcccttcacattgcagcactggccggacaggacgaggtcgtgcgagaactggtaaactacggagctaatgtgaatgcgcaaagccagaagggcttcacaccgttgtatatggctgcgcaagagaatcacctggaggtcgtgaagtttttgctggagaacggagctaatcagaacgtcgccactgaggacgggtttactccactcgccgtggccctgcaacagggacacgaaaatgtggtggcccatctgattaattacgggacaaaaggcaaggtccggcttcccgcactgcatatagctgcacgcaatgatgatacacgaacggccgctgtactattgcagaatgacccaaatcccgacgtgttgagcaaaacaggcttcacaccacttcacatagccgcacattacgagaatctgaacgtggctcagttgcttctgaacaggggggcttccgtgaatttcacgccgcaaaacggcatcacccctcttcatattgcctcacgcaggggaaacgtaatcatggtcagactgttgttggaccgcggagcccaaatagaaacaaagacaaaggacgagctgactcccctccactgcgccgctagaaacggacacgtacgcataagcgagatactgttggaccatggcgcaccaattcaggctaagacgaagaacggactctcacccatccatatggccgctcagggggaccatcttgactgcgtcagactcctgttacagtacgacgctgagatagacgatattaccctggatcacttgacacctctgcatgtggccgctcattgtgggcatcatcgtgtggccaaggtattgttggacaagggagccaaaccgaattctagggccctcaatggcttcactccgctgcacattgcgtgtaaaaaaaatcacgtgcgggtcatggaacttctcctaaaaacaggggcttctatagatgctgttaccgagtccggcctgaccccgctacacgtggcctctttcatgggccacctgcccatcgtgaaaaatttgttgcagagaggcgcttctccaaatgtatctaacgttaaagtagagacgcctttacatatggcagccagagcaggacacacagaggtggccaagtaccttctgcaaaacaaggcaaaagtcaacgcgaaagccaaggacgaccagactccactccattgcgcggctcggatcgggcacaccaatatggtgaagcttctgctcgagaacaatgctaacccaaacttagctaccaccgccggtcacacgcctctccacatagcggctcgggaaggacatgtcgaaaccgtcctggccctcctggagaaagaggcctctcaagcctgcatgaccaagaagggctttacccctcttcatgtcgctgcaaagtacggaaaggtcagagtggcagagctcctgctggaacgcgatgcacaccctaatgccgcaggtaagaatggcctgaccccgctgcacgtggccgtgcaccacaacaaccttgacattgtgaagctgttgctgccacgcggaggttctccacactctcctgcatggaacgggtacaccccattgcacatcgccgctaaacagaaccaggtggaggtcgctagatctctactgcaatatggtggtagcgccaacgcagagtctgtgcagggcgtgacccccttacacttggcggctcaggaagggcacgccgagatggtcgcgctgctcttgagcaagcaggcaaatgggaatcttgggaataagtcgggactgacaccactgcacttggtagcacaggaaggacacgtgcctgtggccgatgtactgatcaagcatggagtgatggttgacgctaccacacgcatgggatacactccactacacgtagcatcacattacgggaacattaagttagtgaagttcctgcttcaacatcaagccgatgtgaatgccaaaaccaagctgggatattcccctctgcaccaagctgcccagcaaggccacaccgatatagtgacactgttattgaaaaatggcgcaagccccaacgaagtctcaagtgatggaaccacgcccctggccattgctaagaggttaggctatatttccgtgacggacgttttgaaggtggtgactgacgaaacctccttcgtattggttagtgacaagcatagaatgtcttttccagaaaccgtagatgaaatcttggacgtttcagaagacgagggagaagagctgatttcttttaaagccgagagaagagactctcgtgacgtcgacgaagaaaaagaactgctcgatttcgtgcccaagctcgaccaagttgtggaatccccagccatcccgagaattccttgtgcaatgccagagacagtggttatccggtctgaagagcaagagcaagcttctaaggagtacgatgaggacagcctgattccttcgtcaccggctacggagacatctgacaacatctcacccgtggcctcccccgtgcacacagggttcctggtctcgtttatggttgatgcgagaggcggatctatgcggggtagccggcacaatggactgagggtcgtcattcctcccaggacttgcgcagctcccaccaggatcacttgtcggctcgtgaaaccccaaaagctgtcgacacccccacctctggcagaagaagagggcctggcatcaagaataatagccctcggccctacaggagcccagtttctctcgccggtgatcgttgagatacctcacttcgctagccacgggcgtggggaccgggaattagtggtgctccggagcgaaaacggctctgtttggaaagaacacagaagcaggtacggggagagctacctggatcagattttaaatgggatggacgaagagctgggttcattagaggagctggagaaaaaacgggtgtgccgcattattacgacagacttccctttgtactttgtcattatgagcagactgtgccaggattacgacacaatcggtcctgaggggggatctctgaaaagcaaactcgtacctcttgttcaggctacctttcctgaaaacgctgtaactaaaagggtgaaactggccctacaggcccaaccagtgccagatgagctagtgaccaagctcctcggcaaccaggctacatttagtcctattgtgactgtcgagccccgacggaggaaatttcacagacctattggtcttcgaatccccctgcctccatcgtggacggataaccccagggatagcggggagggcgataccaccagcctgcgtctgctctgttcagtgatcggagggacagaccaggcacagtgggaagacattacaggcactacgaaattggtatacgctaacgagtgcgccaattttactactaatgtgagcgccagattttggttgtctgattgccccagaactgctgaggcagtgaactttgccaccctgctctataaggagcttactgccgtcccttacatggccaagttcgtgatttttgctaaaatgaatgatcccagagaagggcgactgcgctgttactgcatgaccgacgacaaggtggacaagactttggaacaacatgaaaactttgtcgaggtggctaggagccgagacatagaggtgctagaaggaatgtccctgtttgcagaactcagcgggaatctagttcccgtgaaaaaggcagcccagcaacgttcctttcacttccagtcttttcgcgagaatagattggcaatgcctgttaaggtcagagactcaagccgggaacctggcggttcactgtctttcctgagaaaagccatgaaatatgaagatacccagcacatactatgtcaccttaacatcactatgcccccttgcgccaaaggatctggcgctgaggacagacggaggactcccacgcccctggcactccgatattccattctctctgagtccacgcccggttccctcagtgggaccgaacaggccgaaatgaagatggctgtgatctccgagcacttggggttgagctgggctgagctggcaagagaacttcagttttccgtggaagacatcaaccggatacgggtggaaaacccgaactcgctgcttgagcaatctgttgctctgctcaacctgtgggtgattcgcgaagggcaaaacgcgaatatggagaacctgtacactgccctgcagagcattgaccggggtgaaattgttaatatgctcgaaggatcagggaggcagagtcggaatctgaaacccgaccggcgacacaccgaccgggattattccctgagccctagtcagatgaacgggtacagttccttgcaagatgagctcctgtccccggctagcctgggctgtgccttgagcagccctctgagagccgatcagtattggaatgaagtcgcagttctcgacgctatcccactagctgctactgaacatgataccatgctagaaatgtcagacatgcaggtttggagcgcgggattgactccctctttagtaactgcggaggatagcagtcttgaatgttctaaggcagaggactctgatgccaccggacatgaatggaagctggaaggggctctgtccgaagaacctcggggtcctgaactgggttcccttgagctggtcgaggatgacactgtggacagtgatgctacaaatggcctgattgatttgcttgagcaggaggagggacagaggtcagaagaaaagctccctggttccaaacgtcaagatgatgctacaggggctggtcaggattccgagaacgaggtcagtctcgtttctggacatcagcgcggtcaggcacggatcacacactcaccaacagtgagccaggtaaccgagcgctcccaggaccgcctgcaggactgggatgctgatgggtccattgtcagctacttacaggacgcggctcagggttcatggcaggaggaggtaacccagggcccacacagcttccagggcacatccactatgactgaggggttagagcccggtggaagccaggaatacgagaaggtgctggtgtccgtctcagaacacacttggactgaacagccagaggcggaatcatcacaggccgacagagaccgtcgccaacagggacaggaggagcaagttcaggaagcaaaaaacacatttacacaggttgttcagggcaatgagtttcagaatatccctggggagcaagttaccgaggagcagtttactgacgaacaggggaacattgtgactaaaaaaattatacgtaaggtggtgagacaaatagacctgagctcagccgatgccgcacaagagcatgaggaggtcgagctgcgcggatccggactgcagcccgacctgatagagggtcgcaaaggcgcacagatagtgaagagggcgtccctaaaaaggggaaaacaatat

SEQ ID NO: 214398 - DNA, 468 bp, synthetic construct
  misc_feature 1..468: note = Description of Artificial Sequence: Synthetic coding sequence
  source 1..468: mol_type = other DNA
atgtggacctttgtgacccagctcctggtgaccttagttcttctgtcttttttcttagtcagttgccagaacgtgatgcatatagttaggggcagcctctgtttcgtgctgaagcacattcatcaggagctcgataaggagctgggggagtcagagggactgagcgacgacgaagagacaatctcaacccgggttgtacgaaggcgagttttcctgaagggcaacgaatttcaaaacatccctggcgaacaggtgacagaggagcagttcaccgatgagcagggtaacattgtcaccaagaaaatcatccgaaaggtggtgcggcagattgacctatcatcggcagatgctgctcaggagcacgaagaggtggagctgcgagggtctgggcttcagcccgacttgatcgaaggtcgcaagggtgctcagatcgtgaaaagggcttccctgaagagaggaaagcaatag

SEQ ID NO: 214399 - DNA, 5645 bp, synthetic construct
  misc_feature 1..5645: note = Description of Artificial Sequence: Synthetic coding sequence
  source 1..5645: mol_type = other DNA
atgccatactcagtgggatttagggaagcagatgctgcgacaagcttcctgcgagctgctaggagtgggaacctggacaaggcattggatcatctgagaaatggtgtagatatcaatacatgcaatcaaaacggattgaacgggttgcatctggctagcaaggaaggccacgtcaaaatggtggtggagctgctgcacaaggaaataatcctggagactacaaccaaaaagggcaataccgcactgcacatagccgcactggcaggacaggacgaggtcgttcgggagctggttaactacggagccaatgtaaacgcccagtcccagaaaggattcacaccactctatatggcggctcaggaaaatcacctcgaggtggtgaagttcttactggaaaacggggctaaccagaatgtggcgacggaggatggcttcactccattagccgttgccctgcagcagggccatgagaatgtcgtcgcacacctgatcaattacggcacgaaaggcaaagtgaggctgcctgcactccatatcgcggcacgaaacgacgacacgaggactgccgctgttttactacagaacgacccaaaccctgacgtgctgtctaagactggattcacccctctacatattgccgcacactatgagaatttgaatgtcgcacagctattactcaacaggggtgctagcgtgaacttcactcctcagaacggaatcacgccgctccacatcgcaagccgtcggggaaacgtcattatggtccgactcctgctggacagaggcgctcagatcgaaaccaaaaccaaggatgagttgactccactgcattgtgccgcaagaaatggtcacgtgcgcatttcagaaattttgctggaccacggcgctcctatccaggctaaaacaaaaaacggcctttcccctatacacatggccgcacagggagaccatctggattgcgtgagactcttgctgcagtacgatgccgaaattgacgatatcaccctggatcacctgacccccctgcatgtcgcagcgcattgcggacatcaccgggtggccaaggtgctgctcgacaaaggggcaaagccaaacagccgcgctttaaacggcttcacaccgctgcatatcgcctgtaaaaagaaccacgtccgcgttatggagctcctgctcaagacgggtgcctctatcgatgctgtgacagaatctggtctgacccctttgcatgtcgcttccttcatgggacatttgcctatcgtgaaaaaccttctgcagcgtggggcaagccctaatgtttcaaacgtgaaagtggagacccctttgcacatggctgctcgggctgggcatacagaggttgccaaatacctgctacaaaacaaagccaaagttaacgcaaaggccaaggatgaccagacgccccttcattgtgcggctaggatcgggcataccaatatggtcaagctgttgctcgagaacaacgcaaatcccaatctcgcaactaccgcaggccacaccccgttgcacatcgccgctagagaggggcatgtggagacagtgctggccctgcttgagaaagaggcctcccaagcctgcatgactaagaaaggatttaccccactccacgtcgcagcaaaatatggtaaagtaagggtggcggagctcctgctagagcgggacgcccatcctaacgctgcaggcaaaaacgggctcacaccactacatgtagccgttcaccacaacaacttggatatcgtcaagcttttgttacccaggggtggtagtccgcacagcccagcgtggaatggatacacaccccttcatattgccgcaaaacagaaccaggtcgaagtggcacggtctctcctacagtatgggggaagcgccaacgcagagagcgtgcagggggttactccactccatctggctgcccaggagggacatgccgaaatggtggctctactactgagcaagcaagccaacggaaatttgggcaacaagagcggcctgactcccctgcatcttgtggcccaggagggacacgtgcctgtggccgatgtccttataaagcatggtgtaatggtagatgctaccacgagaatgggttatactccactccacgttgcttcccattatgggaatataaagttagtcaagttcctgcttcagcaccaggccgatgttaatgccaaaacaaagttgggatactctcctcttcatcaggccgcacagcagggccatacggatatcgtgactttattattaaaaaacggtgcgtctcccaatgaggtgtccagcgatggtaccacaccactggcaatcgccaagcgcctgggttacatcagtgtcactgacgtacttaaggtggttacagacgaaaccagctttgttctcgtcagtgacaagcaccgaatgtcctttccagagacagtggatgagattttggacgtgtccgaagatgaaggtgaggagctcatcagcttcaaagcagagagaagggatagccgagacgtggacgaggagaaggagcttctcgattttgttcccaaactcgaccaagtggtagaatctccagcaattccccgtattccctgtgctatgccagagactgtggtcatcaggtctgaagagcaggaacaagcctctaaagaatacgatgaggattccctgatccccagctcgcccgcaacagaaacttccgataacataagccctgtggctagtcctgtccacaccgggtttcttgtgtcattcatggttgatgctcgaggcggtagcatgaggggatctcgacataacggattacgcgtcgtcattcctcctcgtacctgtgccgctcccaccagaattacctgtcggctggttaagcctcaaaagttgagcacccccccaccccttgccgaggaggaggggttagcaagccgtatcatcgccttaggaccaactggcgctcagtttttgagcccggttatcgtcgagataccccacttcgccagccatggacgaggggacagagagttggttgtactccggtcagaaaacggcagcgtttggaaagaacataggagccgatacggagagtcctacctggaccagatcttaaatggaatggacgaagaactcggtagtctggaggaactcgagaaaaaacgagtgtgccgtatcattacgaccgatttcccgctgtactttgtcatcatgtcgaggctgtgccaggactatgacacaattggcccagagggcggaagcctgaagtctaagttggtcccactcgttcaggccacatttcccgagaacgccgtgactaagagggtgaagctcgccttacaggcgcagcccgttccagatgaattagtcactaaattattaggtaaccaagcgaccttcagcccaatcgtcacagttgaaccacgccgtaggaaattccaccgaccaatcgggctaaggatcccgttgccccctagttggaccgacaaccctagggatagcggagaaggcgacacgacctccctccgactgctgtgcagtgttattggcggtaccgaccaagcccaatgggaggatattactggaacgaccaaactggtctacgcgaacgaatgcgctaactttaccaccaacgtttctgcccgtttctggctttcggactgtccgagaacggccgaggccgtcaatttcgcgactctgctgtacaaggagctgactgcagtgccctacatggctaagttcgtgattttcgccaagatgaatgatccaagggaagggagactccgttgctactgcatgaccgatgataaagttgacaagacactggagcagcacgagaatttcgttgaagttgcgcgtagccgagatatagaggttcttgaaggcatgtcgctgtttgcggagctctccgggaacctggttcccgtgaagaaggccgctcaacagaggagttttcattttcaatctttcagagaaaacagactggcgatgccagtgaaagttagagattcctcgagggaacccggaggtagcctgagtttcctacggaaagccatgaagtacgaagacacacagcatatactgtgccacctcaatatcacgatgcctccatgtgcaaaaggctctggtgctgaggaccgtcggagaactccgactcctctggcattacggtattctatcttgtcagaatccacgccaggaagcctgagcggcactgaacaggcggaaatgaagatggccgtcatcagcgaacatttgggcctctcttgggcagaacttgcgagagaacttcagttttctgtggaagatattaacaggatccgggtggaaaaccctaactccctcctggagcaaagtgtcgccttgttgaatctgtgggtaatccgagagggccagaatgccaacatggagaacctgtataccgccctccagtccattgacagaggtgagatcgttaacatgctggaggggagcggccgtcagagtcggaacctgaagcctgacagacggcatacggacagagactacagcttgtcaccatcgcagatgaacggttacagctccctacaggatgaactgcttagccccgcaagtcttggctgtgcattatcttcgcccctgcgggctgaccagtactggaatgaagtggcggtactcgatgcgataccccttgctgctaccgagcatgacaccatgctggagatgagcgatatgcaagtgtggagtgcaggtctcaccccttccctggtaaccgcagaagatagttctctggagtgctctaaggccgaggacagcgatgccacaggacatgagtggaagcttgagggcgcattgtcggaggagccgaggggacccgagttgggtagccttgagctggtggaggacgatactgtggatagtgacgcaacgaatggacttatagacctgctagagcaggaggagggtcagcggtctgaggaaaaactgcctgggtccaagaggcaggacgacgccactggagctggacaggattctgagaacgaggtcagcctggtgtccggccaccagcggggtcaggctcggatcacccacagtcctacggtgagccaggttacagagagaagccaagataggctacaggattgggatgctgatgggagtatcgtgagctacctgcaggacgccgcacagggaagctggcaggaggaggtcacgcaagggccacattcctttcagggcacgtctacgatgacagaagggctggaaccaggcggaagccaggagtatgagaaggttctggtctcagtttctgagcatacctggacagagcaacctgaagcggagagttcccaagcggatcgcgacagacggcagcaaggacaagaggagcaagtgcaggaggctaaaaatacattcacccaggttgtgcaaggaaacgagttccaaaatattccgggagaacaggtaactgaggaacagttcacagacgagcagggaaacattgtcacaaaaaaaattatccgcaaggttgtgagacagatagatctgagcagcgcagacgctgcccaggaacacgaggaagtgacagtggaggggcctctcgaggacccaagcgaattggaggtggacatcgattattttatgaagcacagcaaggatcatacttcgacacccaaccccta

SEQ ID NO: 214400 - DNA, 330 bp, synthetic construct
  misc_feature 1..330: note = Description of Artificial Sequence: Synthetic coding sequence
  source 1..330: mol_type = other DNA
atgtggacattcgtgacacaactgctggtgaccctcgtgcttctctccttttttctggtgtcatgccagaatgtcatgcatatcgtcaggggaagcctgtgtttcgtcctaaagcatattcaccaggagctggataaagaactcggtgagagtgaagggctcagcgatgacgaagaaacaatttccaccagagttgtgcgcagaagagttttcctgaagggtaacgagtttcaaaacatcccaggcgaacaggtaaccgaagagcaattcacggacgaacagggtaatatagtgactaaaaaagaccatacatccaccccgaatccttag

SEQ ID NO: 214401 - DNA, 5576 bp, synthetic construct
  misc_feature 1..5576: note = Description of Artificial Sequence: Synthetic coding sequence
  source 1..5576: mol_type = other DNA
atgccttactcagtcggtttcagagaagctgacgctgccactagcttcttgcgcgctgccagaagcggaaacctggataaggcactggatcacctgcgaaacggcgttgacataaatacatgcaaccagaatggactcaatgggctgcacctggcctccaaagaagggcacgtgaagatggtcgttgaactgttgcacaaggagattattctggagactaccacaaaaaaggggaacacagccctgcatattgcagctctggccggtcaggacgaggtggtcagggagttggttaactatggagccaatgtgaacgcgcagagccagaaagggttcacccccctgtacatggcagctcaggaaaaccacctcgaagtagtgaagttcctgctggagaatggagcgaaccagaacgtggctaccgaggatggttttacacccctggcagtggcgttgcagcagggacacgaaaacgtcgttgcgcatttgatcaattacgggacaaaaggtaaagtccgactccctgctctgcatattgccgcacgcaacgatgacactaggaccgcggctgttcttcttcagaatgatccaaatcctgacgtactgtccaagactgggtttactccattgcacatcgccgcacactatgaaaacctcaacgtggctcagctcctccttaacagaggcgcttcagtgaactttaccccacagaacgggattacccccctgcatatagccagtcggagggggaacgttatcatggtgcggctcttgctggaccgcggagcacagatcgaaactaagacaaaggatgaactcacaccactacattgtgctgcacggaatgggcacgtgagaatcagcgaaattttgctcgatcacggagcacctattcaagccaagacaaaaaacggactatcacctattcacatggccgctcagggagaccatctggactgcgtccggctgctcctgcagtacgatgccgaaatcgatgacataacacttgaccacctcacccctcttcatgtggctgcccactgcggccaccaccgcgtggccaaggtgctcttagacaaaggcgcaaaacctaacagccgagccctgaatggcttcactccattacatattgcttgcaagaagaatcatgtgcgagtaatggagctgctcctgaagacgggtgcatctattgatgccgttaccgaatcagggctgactcctctgcatgtggccagctttatgggacatctgccaattgtaaaaaacctgctgcaacgaggtgctagccccaacgtttccaatgtgaaagttgagaccccgcttcatatggccgcacgcgcaggacacaccgaggtggccaaatacttattacagaataaggccaaagtgaatgcaaaggcaaaggatgatcagaccccactgcactgtgccgcacgcattggccatactaacatggtcaagctcctcctagaaaataacgcgaatcccaatctcgccacaactgctggtcacacaccattgcacattgctgcccgagagggccacgttgaaaccgtgcttgctttgttggaaaaggaagcgtcccaagcttgcatgacaaagaagggatttaccccccttcacgtcgccgctaagtacggaaaggtaagagttgccgagctcttgctggagcgagacgcacatcccaacgctgccggtaagaatggcctgacacctctgcatgtggcggtgcatcacaataacctcgatatagttaagctgctcctaccgagagggggttccccccattcacccgcatggaatggatacactcccctgcacattgccgcaaaacagaatcaagtagaagtagctaggagcttgctccagtatggcggttcagcaaacgccgagtccgttcagggtgtcacacctctgcatttggctgcacaggaggggcatgccgaaatggtggcgctcctgttgagcaaacaggccaatggaaatctgggcaacaagtccggactgacccccctccacttagtggcccaggaagggcatgtaccagtcgccgatgtcctgatcaagcatggagtcatggtggacgctactaccagaatgggttacactccactgcacgtagcaagtcactacggcaacatcaaactcgttaagttcctgctgcagcaccaggcggacgtaaacgccaagactaagctagggtattcgccattacaccaagcagcccaacaaggtcacaccgatatagtcactctgttactgaagaacggcgcttcaccaaacgaggttagttccgatggaactacaccactggcaatcgcaaaacgactcggctacatcagtgtgaccgacgttctgaaagtggtgaccgatgagacatcatttgtcttggtgtctgataagcaccgaatgagtttccctgagacagttgacgagatcttggacgtttcagaggacgagggagaggagttgatcagcttcaaagcggaaaggagagatagcagggacgtggacgaggaaaaggagcttttggatttcgtccctaaactggaccaggttgttgagtccccggcaatccctcgtatcccgtgcgccatgcctgaaacagtcgtcatccgaagcgaggagcaggaacaggcatccaaagagtacgatgaagactctctgataccttctagtccagccacggagacgtccgataatataagtcctgtggcgtctcccgtccatacaggctttctcgtctccttcatggttgacgccagggggggatccatgagggggagtagacataacggcctccgggtagtcattccacctagaacctgcgctgcacccacccggatcacatgccgtttggttaagcctcagaagctgagcaccccccctccgctggctgaggaagagggattggctagcagaattatagctctcgggcctaccggggctcagttcctgagccctgtcatcgtggaaatcccccacttcgcgagtcacggaaggggggaccgcgaactcgtcgtgcttagatcagaaaacggcagtgtgtggaaggagcaccggagccggtatggagagtcttacctggatcagattctgaacggcatggacgaggaactggggagcctagaggagctggaaaagaagcgggtgtgtcggatcataacaacggatttccccctgtacttcgtgataatgtcacgcctctgccaggactacgacacaattggacccgagggcggttctctgaaaagtaagctcgtgcctctggtacaggctacatttcccgagaatgcagtgacaaaacgggtcaagctggctctgcaggcccagcccgtcccagacgagctggtcaccaagctcctgggcaatcaggctaccttctccccgatcgtaaccgttgaaccgagacggcgaaaatttcatcgtcctatcgggctgaggattcccctgccgccttcttggacagataaccctagggattccggggagggcgataccacttctctgcgcctgctatgctcggttatcgggggtacagatcaggcacagtgggaagacatcaccggcaccaccaagcttgtgtacgctaatgaatgtgctaacttcacgacgaatgtgagtgcacggttctggctaagcgactgccccaggacagccgaagcggtaaacttcgcaacgctgctgtataaggaactcactgctgtgccgtatatggcgaagttcgtgatctttgcgaagatgaatgatccaagggagggccgtctgaggtgctattgcatgacggacgataaagtggacaagaccctggagcaacacgagaacttcgtcgaggtggctcgctcaagagacattgaagtgttggagggcatgtctctttttgcagagctgtctggcaatctggttcctgtgaaaaaagccgctcagcaacgtagcttccatttccagtcattcagggaaaaccggctcgctatgcctgtgaaggtccgggacagttctcgggaacctggtgggtctctgagcttcctccgcaaagctatgaaatacgaagacacgcagcacattctgtgtcacctgaatatcactatgcccccatgtgcaaaaggctctggcgctgaagaccgaaggcgcacccccacacctctcgctcttcgatattcaatcttgagtgaaagcacacccggatctctgtccggcaccgagcaggcagaaatgaaaatggctgttatatctgagcacctgggcctgagctgggcggagttagcaagggagctacagttctcagtggaggacattaacagaatacgggtggaaaatccaaacagtctcctggagcagtctgtcgctcttttaaatctatgggtcattcgggagggccagaacgccaacatggagaacctgtacactgccctgcagtccattgacaggggtgaaatagtgaacatgctcgagggttcaggaaggcaaagccgtaacttgaagcccgacagaagacacactgaccgggattactctcttagtccatcacagatgaatggatactcttctctgcaggatgagctcttgtccccagctagcctggggtgtgcgctgtccagtcccctcagggccgaccaatattggaacgaagtggctgtgttggacgccataccactggccgctaccgagcacgatacgatgctggagatgagcgacatgcaggtctggagtgcaggactaaccccctcactcgttacagctgaggatagcagccttgagtgctcaaaggcggaggattccgatgccacaggccatgagtggaaacttgagggagccctgtccgaagaacctcggggtccagagttaggttctctggagttagtggaggatgacactgtggactctgacgccactaacggcttaatcgaccttctcgagcaggaagagggccaacggtctgaagagaagctgcccggatctaagagacaagacgacgcaactggcgctgggcaggactcagagaacgaagtttcccttgtgtcggggcaccaacgtgggcaggctagaattacacactctcccacggtgagtcaggtgacagaacgctcccaggataggctgcaggactgggatgctgatgggagtatcgtcagctatttgcaggacgcagcgcagggatcctggcaggaggaggtgacccaaggaccacattctttccagggcactagcactatgacagaaggacttgagcctgggggaagtcaggagtacgagaaggttttggtcagcgtatccgaacatacatggaccgaacagcctgaagcagagagctcacaggcagatagggacagaagacagcaggggcaggaggaacaggtgcaggaggcaaagaataccttcactcaagtggtccagggtaatgaattccagaatatccctggcgagcaggtgaccgaggagcagttcacagacgagcaggggaacattgtgactaaaaaggtggagcttcgcggatccggtctccagccagacttaattgaggggagaaaaggtgcccaaattgttaaaagggcatcactcaaaaggggtaagcagta

SEQ ID NO: 214402 - DNA, 4560 bp, synthetic construct
  misc_feature 1..4560: note = Description of Artificial Sequence: Synthetic coding sequence
  source 1..4560: mol_type = other DNA
atgccatactccgtcggatttcgagaggccgatgccgcaacaagtttcctcagagccgcaagatccgggaacctcgacaaggcactggaccatcttcgtaatggggtggacataaacacttgtaatcagaatggtctgaacggcctgcacttagctagtaaagagggacacgttaagatggtggttgagctactgcataaagagatcatattagaaacgacgactaagaagggaaataccgctctccacatcgcagcacttgctgggcaggacgaggtggtccgggagctggtgaattatggggcaaatgtgaatgctcagtctcagaagggatttacgcctctgtacatggcagcacaggagaatcatctggaggtcgtgaagttcctgctcgaaaatggagccaatcagaacgtcgctacagaggacggtttcaccccattggctgtggcactgcagcaggggcacgaaaatgtggtcgctcaccttatcaattatggcacaaaaggaaaagtgcgactgcctgctctccacatcgccgctaggaacgatgataccagaactgccgcagtactgctccaaaatgaccccaaccccgacgtgctgtcaaagaccggcttcacaccactccatattgccgcacattacgaaaatttgaatgtggcacagctcctgctgaacaggggcgcatccgttaattttactccacagaacgggatcactccattacacatcgcctctagacggggtaatgttattatggtgagactgctcctcgatcgtggcgctcaaattgaaacgaagactaaggacgaactgaccccactccattgtgcagcaaggaatggacacgtgcggatctccgaaatactcttagaccatggagcaccgatccaggcaaagaccaagaatggactgtcccctatccatatggcagctcagggggatcacttagactgcgttcggctgctgctgcagtatgatgctgagattgacgacatcactttggaccacctgacccctctgcacgttgccgctcactgcggccatcaccgggttgctaaagtgctccttgacaagggagctaaacccaactctagggctttaaatggctttactccattacatattgcgtgcaaaaaaaaccacgtgcgcgtcatggagctgctcctcaaaactggtgcatcaatcgatgccgtgactgaatcgggcctgacaccgcttcacgtcgcctcctttatggggcatctcccaattgtcaagaacctgctccaaaggggagcgagcccaaacgtctctaacgttaaggtagagaccccactgcacatggctgctagagccggacacacagaggtcgcgaaatatcttctgcagaacaaggcgaaggtcaatgccaaggccaaggatgatcagacaccgcttcattgtgccgcacgaatcggacacaccaatatggtcaaactcttactagagaataatgccaacccaaatctggctacaacagcagggcacactcccttacacatcgccgctagggaggggcatgtggagacagttctcgccctgctggagaaagaggccagccaggcttgtatgactaagaaaggtttcacccccttgcacgtggctgccaaatatggcaaagttcgggtcgccgagctgctgctggaaagagacgcacacccaaatgccgcaggaaaaaatggcctcactccacttcatgtggctgtgcaccacaacaatctcgatatcgttaagctgcttctgcctcgaggtggctctcctcatagcccggcttggaatgggtacacgcccctccatatcgccgcaaagcagaatcaggtggaggttgccaggagtctgttgcaatatggcggaagcgccaatgccgagagtgttcaaggagtcacgcctcttcatctggccgcacaagaagggcacgccgaaatggttgcactcttactgtccaaacaggcaaacggcaatctcggaaataaaagcggactcaccccacttcacttagtggcccaagaaggtcacgttcccgtggctgatgttttgattaaacacggtgtgatggtggatgcaacgaccagaatggggtatacccccctgcatgtcgccagccactacggcaatatcaaactggtgaagttcctgctccagcaccaggccgatgtgaatgcaaaaactaaactgggctatagtccactgcatcaggccgcacagcagggacacaccgacattgtcacactcttgttaaagaatggtgcctcccccaatgaagtctcatccgatggcacaactccactcgcaatcgctaaacgattggggtatataagcgttactgacgtgctgaaagtcgtgacagatgaaacctcattcgttcttgtgagcgacaaacacagaatgagctttcccgaaactgtagacgagatcttggatgtcagcgaggacgagggggaggaactgatcagcttcaaagcagagcggagagatagcagagatgtggacgaggaaaaggagctgttggacttcgtccccaagctggaccaggtggtggagagtccagccataccgaggataccctgtgctatgcccgaaactgtcgtaatcaggtctgaggaacaggagcaagcctcgaaggaatacgacgaagacagtttaataccatcttccccagcaacggaaacttccgataacattagccctgtcgcgtcccctgtccataccggcttcttagtctccttcatggttgacgcccgaggtgggtcaatgaggggcagcaggcacaacggccttcgcgtcgtgatcccacccaggacgtgcgccgcacccactcgcattacttgcagactcgttaaaccccaaaaactgtccaccccgcctccccttgccgaagaagaagggttggcctctcggatcatagcactaggcccaacaggcgctcagttcctcagcccagtgattgtggagatcccacacttcgctagtcatgggagaggagaccgcgagctggttgttctcagatctgagaacggtagcgtttggaaagaacatagatccaggtacggggaatcatatcttgatcagatcctgaatggtatggacgaggaattgggcagtctggaagagctcgagaagaagcgggtgtgccggataatcacgacagacttccctctatactttgtcatcatgagccgcttgtgtcaggactacgataccatcggacctgaagggggttcgctgaagtccaagcttgtgcccctcgtgcaggccacgtttccagaaaacgcagtgacaaagagagtcaaactggcgctgcaggcccagccagttcccgacgagctcgtcacaaagctgctggggaatcaggcaaccttcagcccaattgtgactgtggaaccccgtcggagaaagtttcatcgtccaatcgggctgcggattcccctgccgccaagttggactgataaccccagggattccggcgaaggggacaccaccagcttgagactactgtgtagcgtcatcggcggtactgaccaagcacagtgggaggacatcactgggaccactaagctggtgtacgccaacgagtgtgctaattttactacaaatgtttccgctcgcttttggctttcagactgcccaagaactgcggaggccgtgaatttcgcaaccctgctttacaaggagctcacagcggttccttatatggccaaatttgttatcttcgctaagatgaatgatccccgagaaggcagactgaggtgctattgcatgaccgatgataaggtcgacaaaactctggaacagcacgaaaactttgtcgaggtggcaagatcgagagacattgaggttctggagggaatgtctctttttgccgagctatcagggaatctcgttccagtgaagaaagccgcacagcagcgtagcttccacttccagagtttccgagaaaatagactggccatgccagtcaaagtgcgagacagttcccgggaacctggcggatcactaagttttctcaggaaggcaatgaaatacgaagacactcaacatatcctatgccaccttaatatcactatgcctccctgcgcgaaaggtagcggggcagaggataggcgtagaactccaacaccccttgccctgcgatattcaatactgtccgaatccacacctggaagcctcagtgggaccgagcaggcggagatgaaaatggctgtcatatctgagcatttaggtctgagctgggcagagttggctcgcgaacttcagttttccgtagaggacatcaatcgaatacgtgtcgaaaatcccaactcattgttggaacagtcagttgccctgctgaacctgtgggtcatccgggagggacaaaacgcgaacatggagaatctgtacaccgctctgcagagtatcgatcgaggggaaattgtgaatatgctcgaaggctccggccgacagtcccggaacctgaagcctgacagaagacacactgatagggactattctctgtcacctagccaaatgaacggtatctccactaataacccttag

SEQ ID NO: 214403 - DNA, 5504 bp, synthetic construct
  misc_feature 1..5504: note = Description of Artificial Sequence: Synthetic coding sequence
  source 1..5504: mol_type = other DNA
atgccttattctgtgggctttcgcgaggctgatgcagccacgtcattcctaagagccgcaaggagtggtaacctggataaggccctggatcatctgagaaatggcgttgacatcaacacttgtaaccaaaacggccttaacggcctccatcttgctagtaaagaggggcatgtaaagatggtggtcgaactgcttcataaagaaataatcctagaaaccacaaccaaaaagggcaataccgctctgcacatagctgccctcgctggacaggacgaggtcgtgagagagctcgttaactacggtgccaatgtgaatgcacagtcccagaagggatttacccccttgtacatggccgcacaagaaaaccatctggaagtggtaaaattcctattggagaacggtgctaatcagaatgtggccacagaggacgggtttacgcctcttgccgtcgccctacagcaagggcacgaaaatgtagtagcccacttgatcaattatggtaccaaaggaaaggtcaggctccctgcccttcacattgccgcacgtaacgatgacacccgtacagccgctgttttgttgcagaacgatcctaacccagacgtgctaagcaagactggctttacacccttacatattgcagcccattacgagaatctgaacgtggcccaactgttgctgaatcgtggagcctctgtcaacttcactccccagaacgggatcacgccattacatatagcatctaggcggggaaacgttataatggtgcgtttgcttctcgacaggggggcacaaatagagactaagacgaaagacgaactaacacccctgcactgcgctgcgagaaacggccacgtgagaatcagtgagatcctccttgatcatggtgctcccatacaggctaagactaagaacggactgagtcccatacatatggcggcacagggtgaccaccttgactgcgttcggttgttgctgcagtacgacgcagaaatcgacgacatcaccttggaccacttgacgccactgcacgttgcggcacattgcggtcaccatagggtggccaaggtgcttctggacaaaggtgccaaaccaaactcccgggctctgaacggattcactccactgcacatcgcctgtaagaagaatcacgtgcgcgttatggagctcctcctgaagacaggagcgtccattgatgctgtcacagagtccgggttaaccccactccatgtggccagcttcatgggacacttaccaatcgttaagaacttgctgcagcggggtgccagtcctaacgtgtctaacgtcaaggtagaaaccccccttcatatggccgctcgggctggacacaccgaagtcgccaagtaccttttacagaataaggctaaagttaatgctaaggcaaaggatgatcagacccccctgcattgtgcagccagaatcggacatactaacatggttaagctgctcctggagaataacgcaaatccaaacctggctaccacagccggtcataccccactgcatatcgcagccagagagggacacgtggagacagtgcttgccctgttggagaaagaggctagccaggcctgcatgacaaaaaaaggatttacccctctgcatgttgccgcaaagtacggaaaggtccgagtcgctgaactgctgctggagagggatgcgcaccccaacgccgctggaaagaacggattaacgcctctgcatgtagcagtgcaccataataatctggacatagttaaactattgttgcctagaggcggaagtccacacagcccggcatggaacggttacacccccctgcacatcgcagccaagcaaaaccaagtagaggttgcccgaagtcttctacagtatggcggttccgctaacgctgagtccgtccagggcgtgactccccttcacctggcagctcaggaagggcacgccgagatggttgctttgctcctgtctaagcaggctaatgggaaccttggtaataaaagcgggctaacacccctgcacctggttgctcaggaaggtcacgtgcccgttgcagacgtgctgataaagcatggagtaatggtcgacgccactactcgtatgggatatacgccactccatgtcgcctctcattatggcaacattaaattggtcaaattcttactacagcatcaggccgacgtgaacgcaaagactaaactcggctactccccccttcaccaggctgcccagcagggccacaccgacatcgtgactttattattaaagaatggggcttcccccaatgaggtgagttcggacggtacgacccccctggctattgcgaagaggctcggatatatcagcgttaccgacgtgcttaaagtggttactgatgaaacatccttcgtgctcgtatctgataagcatcgcatgagcttcccagaaaccgtagacgagatacttgatgtctctgaagatgaaggcgaggagctgatttctttcaaggctgagcggagggacagcagggatgtcgatgaggagaaggagctcctcgatttcgtaccgaagctcgatcaggtcgtcgaatcccccgctattcctagaatcccgtgcgcaatgcctgaaactgtggtaatccgcagtgaagaacaagagcaggccagtaaggaatacgacgaagacagccttatcccttccagccccgctactgaaacaagcgataatatttctccagtggctagcccagtgcacaccggcttcttggtgtcttttatggttgacgccagggggggttccatgcgcggatccaggcacaacgggctgcgggtggtcatccctccacgaacttgcgccgcacctacacgcatcacctgtagattagttaaaccgcagaaactctccacacctcctcccttggccgaggaagagggtctcgctagccgtataattgctctaggacctactggtgctcagtttctgagtcccgtgattgtggagattcctcattttgctagccacgggagaggagaccgcgaattggtggtgctaaggtctgagaacggcagcgtgtggaaagaacacaggtcccgttacggcgagtcctacctcgatcagatccttaacgggatggacgaggagctgggctccctcgaagagcttgagaaaaagagggtgtgtcgaattatcacaactgactttccgctttattttgttataatgtccagactgtgccaggattacgacaccatcgggcctgagggaggttctttaaaatccaagttggtgcccctcgtgcaagcaaccttccccgaaaatgcggttaccaagcgagtgaagctggccctccaagcacaaccagtgccggacgagctggtgacaaaacttctcgggaatcaagcaacgtttagtccgatcgttactgttgaaccgagacgcagaaaattccaccgtccaattggcctacgaatacccttaccaccgagctggacagacaatccacgagacagcggcgaaggggatacaacatccctgagactcctttgctcggtgatcggagggacagatcaggcacaatgggaagacattaccggtactaccaagctggtgtatgcaaatgagtgtgctaacttcacaactaacgtctccgccaggttttggctgtcagactgtccaaggaccgccgaggcggtgaacttcgccaccttgctgtacaaagaacttacggccgtcccctacatggccaagttcgttatttttgccaagatgaacgatcctagagaaggacgcctacgatgttactgtatgactgacgacaaagtggacaaaacactagaacagcatgaaaacttcgtggaagtcgccaggagtcgcgatatagaggtgttggagggcatgtctctgtttgctgagctgtctggaaatctggtgcctgtcaaaaaagccgcacagcagagaagtttccattttcagagctttagagaaaaccggctggcgatgcctgtgaaggtacgcgatagctccagggaacccggtggctcactatcctttctaagaaaagctatgaagtacgaagatactcaacacatcctgtgtcatttaaatatcacaatgcccccatgcgcgaaggggagcggagccgaagatcgtcgtcgcaccccaacccccctggctctcaggtactccatactgtccgaatctacaccaggctcactctccggaaccgagcaggcagagatgaaaatggcagtgatctcagagcacctgggcctgtcttgggcagagttagcccgagagttgcagttctccgttgaagatattaaccgcatcagggtcgagaacccaaattcacttttggagcagtctgtggctttattaaatctttgggtcataagggagggccaaaacgcaaacatggaaaatctgtatacagccctccagtccatcgacaggggcgagattgtcaatatgttagaaggatctggcaggcaaagtcgtaacctgaaaccagaccgtaggcacaccgacagagattatagtctatctccttcccagatgaacggatatagcagcttgcaggatgaactcctgtcccccgcttcgcttggctgcgccctatcttcccctcttagggctgatcagtactggaatgaggtggctgttctcgacgcaatccctctcgctgccactgaacacgataccatgctggaaatgagcgacatgcaggtttggagtgccggactcaccccttctctggtgacagcagaagattcatccctcgagtgctccaaggccgaagactccgatgccactgggcacgagtggaaactagagggcgcactgtctgaggagcctcggggtccagagcttgggtcactggagctggtagaggacgacaccgttgacagcgatgccactaacggcctcatcgacctgctcgagcaggaggagggtcagcggtccgaggaaaaacttcccggaagcaaaagacaggacgatgcgacgggggcaggccaggactcagaaaatgaggtctccttagtcagtggtcaccagagaggacaagctaggatcacccacagccccacggtgtcccaagtcactgaaaggtcacaggaccgcctgcaggactgggacgccgatggcagcattgtatcatatctacaggatgctgcacagggctcttggcaggaagaggttacccagggcccacactccttccagggaaccagcactatgacggaaggccttgagccgggtggatcccaggaatacgagaaggtgctggtctcagtgtcagagcacacttggactgagcaaccagaggctgaatcctcacaggccgacagggacaggcggcagcagggccaggaagagcaggtgcaagaggccaagaataccttcacacaggtggtccaaggtaacgagttccagaatatacccggagagcaggtaaccgaggagcaattcaccgacgagcaggggaatattgtgactaagaaggatcacacgagcacaccaaacccata

SEQ ID NO: 214404 - DNA, 5717 bp, synthetic construct
  misc_feature 1..5717: note = Description of Artificial Sequence: Synthetic coding sequence
  source 1..5717: mol_type = other DNA
atgccatatagcgtgggctttcgggaagccgacgccgcaacttcttttttgagggcggcacgctctggaaatttggataaggctttagaccatctgagaaacggcgtggatattaacacctgtaatcagaatgggctcaatgggctgcaccttgcgtctaaggaaggacacgtgaaaatggtggttgaacttcttcacaaagaaatcattctggagaccacaactaagaagggtaacacagcccttcacatagcagcactcgcaggtcaggacgaggtggtgcgagaattggtcaattacggtgccaacgttaacgcccaatctcaaaaaggtttcacccccctttatatggcggctcaggagaatcaccttgaagttgtgaagtttcttctagagaatggcgcaaaccaaaacgtagcaaccgaggatggtttcacacctttggctgtggcacttcagcagggtcatgaaaacgttgtcgctcacctgattaattatggcaccaaaggaaaggtacggctccccgcactccatatcgcggcaagaaacgacgacacccgcaccgccgcagttcttcttcagaatgaccccaatcccgacgttctgtccaagaccggctttacacccctgcatattgctgcccactacgaaaacctaaacgtggcacagctattactgaatagaggagcaagtgtgaatttcactccccagaacggcattactcctctgcacattgccagccgaaggggcaacgtgataatggtacgactgttgctggaccggggagcccagattgaaaccaaaactaaggatgagttgacccctttacactgtgctgccaggaacggtcacgtccggataagtgaaatcctgctggaccatggggcacccatccaggccaagacaaaaaacggtctctcccctattcacatggctgcccaaggcgaccacctcgattgtgtccgccttctgctgcagtatgacgcagaaattgatgatatcacactggatcaccttacgcctctgcacgtggctgctcattgcggccaccatagggtggcgaaagtactacttgataaaggggctaaacccaactcccgggctctgaatggtttcacacctttgcatattgcctgcaagaagaatcatgtgcgagtgatggaattgctcctaaaaactggggctagcattgacgctgtcactgagtctgggctgactcccttgcacgtggccagcttcatgggacacctgcccatagtgaaaaacctcctccagcgtggagcatcccccaatgtgagcaatgtcaaggtcgagacccccctccacatggctgccagggccggacacaccgaggtggctaaataccttttgcaaaacaaagccaaggtgaacgccaaagctaaagacgaccagactccgttgcactgcgccgctcggattggacataccaacatggtgaagcttctgttggagaacaatgcaaatcctaatctggctactacagcaggacatacacccctccacatagcagcacgcgaggggcacgtggaaacagttttggcccttctggagaaggaagctagccaagcatgcatgacaaaaaagggcttcacgccgttacacgtcgccgcaaagtatggcaaggtacgcgttgccgaactcttgttagagagggacgcccacccaaatgccgcaggtaaaaatgggctcactccattacacgtagccgttcaccataataacctggacatcgtcaagctcctgctcccacggggtggctcaccgcacagccctgcatggaatggatacacaccactccacatagcggctaaacagaatcaggtggaggtcgctcgctctctcctccagtatgggggaagcgctaacgccgagtcagtccagggggtgacacctcttcacctggccgcacaggaagggcacgctgagatggtggccctcctcttgtccaagcaggcgaatgggaacctcggcaataaaagcggacttactccgctgcacctggtggctcaggaaggccatgttccagtggccgatgtgctcataaagcacggagtgatggtcgatgcgaccactagaatggggtatacccctttacacgtagccagtcattatggcaatataaaactggtgaaattccttctccagcatcaggccgatgtcaacgcgaaaaccaagctgggatatagtcccctacaccaggctgcccagcaaggccatactgatattgttacgttgctgctgaagaatggagcctctcctaacgaagtttcatcggatgggacaacccccctggcaatcgccaagcgactgggttacatctccgttacagacgtgctaaaggtagtcaccgatgagacctcgttcgttctcgtgtccgacaagcacagaatgtccttcccagaaaccgtggacgagatcctggacgtgtccgaggacgagggtgaggagttgatctcgtttaaagctgaacgtcgggatagtcgtgatgtcgatgaggagaaagagctccttgattttgtccccaagttagaccaggtggtggagtcccccgcaatacctcgcattccgtgcgccatgcccgaaaccgtggtaattagaagcgaggaacaagagcaagcaagtaaggagtacgatgaagactctctgatccccagctcccctgcgaccgagacctcggataacatatctcctgtggcatcccctgtccacacaggtttcttggtaagctttatggtagatgcaaggggtggatctatgaggggcagtcgtcataacggcctgagagttgtcatacctccgcgaacatgcgctgcacctacaagaataacttgcaggctcgtaaaaccacagaagctgtctactccaccaccattggcagaggaggaggggctggcatcacgtatcattgcactcgggcctaccggcgctcaattcctgtctcccgttatagtagaaatccctcacttcgcaagccacggccgtggggacagggagcttgtggtgctgaggtctgagaatgggtctgtgtggaaggaacatagaagcaggtatggggagtcatatttggatcagatcttaaacggaatggacgaagagcttggatccttggaagagttagagaaaaaaagggtgtgcaggatcattacaacagatttcccactttatttcgttatcatgtctaggctgtgccaagactacgacacgataggcccagagggcggatcattgaagagcaagctggttcctcttgttcaggccacattcccagagaatgccgtaacaaagagggtaaaactcgccctgcaggcacaacccgtgcccgacgaactcgttacgaagctgctggggaatcaggccacattttcaccaattgttacagtggagccacggaggcggaaatttcatcggccaataggccttaggatccccctgccaccctcgtggaccgataatccgcgtgattccggggaaggggatacaacttctctacggttgctgtgcagcgtaataggtggcacagatcaggcccagtgggaagatatcaccggaaccaccaaacttgtgtacgcaaatgagtgcgccaattttaccactaacgtgtctgcacgattttggctatccgactgtcccaggacggccgaagcagttaatttcgctactctgctttataaagagttaaccgccgttccttatatggccaaatttgtcatattcgctaaaatgaacgatccaagagaaggtcgcctgcgctgttattgcatgactgatgacaaggtggataagactctggagcaacatgagaacttcgtagaggtcgcccgttcccgcgatatcgaagtgctggaaggcatgtcgctgttcgcagagctaagcggaaacctcgtccctgtgaaaaaagccgcacagcaaaggtcctttcatttccaatcattccgcgagaatagacttgctatgcctgtgaaggtgcgggattcctccagggaaccgggtggttcactttccttcctgaggaaggctatgaagtatgaggacactcagcacatcctctgtcacctgaacattactatgcccccatgcgctaaaggatccggtgcagaagatcggcgtcgaacccccaccccactcgccctgcgctattccattctgtcagagtcaactccaggaagcctgtcaggaaccgaacaagccgagatgaagatggctgttatttcggagcacttggggctgtcctgggcagaattagctagggagctgcagttttctgtggaagatatcaatcgcattagggtcgagaatcctaattctttgttggagcagtctgttgccctgctgaacctgtgggtcatcagagaagggcaaaacgccaatatggaaaatctgtacacagctttgcagtctattgatcggggtgaaattgtaaacatgcttgaaggcagcggcaggcagagccgtaacttgaagcccgacaggcgccataccgatcgtgattacagtttaagtccgagccaaatgaatggctactcctctctgcaggacgaactgctcagtccagcttctctgggctgcgccctgtcctcgcctttacgagctgaccagtattggaatgaagtggccgttctggacgctataccactggccgctaccgagcatgacacaatgctggaaatgtcagatatgcaagtttggtctgctgggctgactccttcactggtgaccgccgaggactctagccttgaatgttctaaagcggaggatagtgacgccaccgggcatgagtggaagcttgagggagcactctctgaagaacctcggggacctgagttaggaagcttagagctggtcgaggacgatacggttgactccgatgctaccaacggactgatagacctcttagagcaggaggagggtcaaaggagcgaagaaaaactccctggctcgaaacggcaggatgatgcgaccggggcaggccaggatagcgaaaacgaggtctccttagttagtggccaccagcggggacaggcaagaattacgcactcccccacggtctcccaggtaaccgagcgcagccaggatcggctgcaggactgggatgccgacggatccatagtgagctatctgcaggacgctgcccagggctcttggcaggaagaggtgacccaagggcctcacagctttcagggtacttcaacaatgacagagggtctggaacctggaggctctcaagagtacgagaaggtcttggtgagcgtgtcagagcatacttggactgagcagccagaggcggaaagctcccaagctgatcgcgatcggagacagcagggccaggaggagcaggtgcaggaggcaaaaaacactttcacccaagttgtgcaaggaaacgaattccaaaatatacctggagagcaggttactgaagagcaattcacagatgagcagggaaatatcgtcactaaaaaaataattcgtaaagtggtccgacagatcgatctatcctccgccgatgccgctcaggagcatgaagaggtcacggtcgagggccctctcgaagacccgagtgagctcgaggttgacattgactactttatgaagcattcaaaggttgaattgcgcggatccggcctgcagcctgacttgattgaaggaaggaagggcgctcaaattgtcaagcgggcaagtctgaaacggggtaaacagta

SEQ ID NO: 214405 - DNA, 5420 bp, synthetic construct
  misc_feature 1..5420: note = Description of Artificial Sequence: Synthetic coding sequence
  source 1..5420: mol_type = other DNA
atgccttattcagtcggcttccgggaagccgacgctgcaacctcttttttaagagctgctagatcaggcaacctggacaaggcactggatcacctgaggaacggggttgacattaatacatgtaatcagaatgggctgaatggattgcatctggccagcaaagaggggcatgttaagatggtggtcgagctgttacacaaggaaataattcttgagacaaccacaaaaaaggggaacacagcgcttcacatcgcagctcttgctggccaggatgaggtcgtacgggagctggtgaactatggggcaaatgtcaacgctcaatctcagaaagggtttacaccgctgtacatggcagctcaagaaaatcatttggaagtagttaagttcctgctggagaatggggcaaaccaaaacgtcgctacggaggacgggttcactcctctggccgtcgctttacagcagggccacgaaaatgttgtggcccacctgataaattacggcaccaaggggaaagttcgccttccagcgctccatatagccgcaagaaatgatgacacccgcactgcagcagttctcctgcagaacgatcctaacccagatgtcctgagtaaaactggatttactcccttgcacatagccgcacactacgaaaacctcaacgttgcccagctgctcctaaataggggagcatcagtgaacttcactccccagaatggaatcacacccctccacatcgcaagtcgtcggggaaacgttatcatggtgcgattgttgctggatcggggagctcaaatagaaacaaagacaaaagacgagcttacccccctacattgcgcggctagaaacgggcatgttagaatttccgagattctcctcgaccacggggctcccatccaggcaaaaactaaaaacggcctctctcccattcatatggcggcacagggtgatcatctggactgtgtgcgacttcttctgcagtacgacgccgaaattgatgacattactctggaccatttgacacctttacacgtggcagcccactgtgggcatcatagagttgccaaggttctccttgataagggcgcaaagccaaattccagagcactcaatggatttacaccactgcacatagcttgtaagaagaatcacgttcgggtgatggagctactgctgaaaaccggagcaagtatcgacgcagtgaccgaatctggattgacccccctacatgttgcctcatttatggggcacctgcctattgtcaaaaacctgcttcagaggggagcaagccccaacgtgagtaacgtcaaggtggagacccctctgcatatggccgctcgagccggtcatacagaagtggcaaaataccttctgcagaacaaagctaaagtgaatgcgaaagcgaaggacgatcagacccccctgcactgcgctgcacgtatcggccacacgaacatggtgaagctgctgctggaaaacaacgctaaccctaatctagcaaccaccgctgggcacaccccactccacatcgctgctcgcgagggccacgtggagaccgtgctggccctccttgaaaaagaggcaagccaagcgtgcatgactaaaaaggggtttacccccctccatgttgccgcaaaatacggaaaggtgcgcgtagctgaattgctacttgagagagatgctcaccccaacgctgcagggaaaaacggtcttacaccgctccatgtggccgtgcaccacaataacctcgacattgtgaaactccttctgcctcggggaggatcccctcacagccccgcttggaacgggtacacacctctgcatatagccgctaagcagaaccaggtggaggttgccagatcacttctccaatacgggggaagcgcgaatgccgagtccgtgcagggcgtgacccctcttcacttggctgcccaggagggacacgccgagatggtggccctgcttctctccaaacaagcaaatggcaacctgggaaacaaatccggtctcactcccctgcatctagtggcccaggagggacacgtccccgttgctgacgttttaatcaagcacggcgtcatggtagacgctactactagaatgggatatacaccgctccacgtggcctcccactacggcaatattaagctggtgaagttcttgctccagcaccaagcggatgtgaacgccaagaccaagctgggatactcacccttacaccaagctgcccagcagggccacacagatatagtcaccctgcttctgaagaacggcgcatctcccaacgaggtgagtagcgacggaaccactcctctcgcgattgcaaaaaggctggggtacatctcggtcactgacgtgttaaaggtagtcactgatgagacctcgttcgtgttggtgtctgacaaacatcgaatgtcgtttccagaaactgtcgatgaaattcttgacgtaagcgaagacgagggtgaagagctgatctctttcaaggccgagaggcgcgattcccgggacgtggacgaagagaaggaactcctcgattttgttcctaagttggatcaggtcgttgagagccccgcaataccgcgtatcccatgtgcaatgcccgagaccgttgtaattcggagcgaggagcaggaacaggccagcaaggagtatgacgaggactccctgattccaagttctccagcaaccgagacatccgataacatcagccccgtggcatccccagtgcacacaggcttcttggtttcttttatggtggacgccagaggcggatcgatgcgcggaagcagacacaatgggctgagggtggtgatacccccacgtacttgtgccgcacccacgaggattacctgtagactagtgaaaccccagaaattatcaacaccaccgcctctagctgaagaggaaggactggcctcacgcattattgctctgggacccaccggggcacagttcttgtctccagtgattgtggaaatcccacatttcgcatctcatggtaggggagatagagagcttgtggttctgcggagcgagaacggttctgtgtggaaggaacaccggtcccgctacggcgaaagctatctcgaccaaatcctgaacggaatggatgaggaattaggcagccttgaagaattggagaaaaagagagtgtgcaggatcatcactacggacttccccctatattttgtgatcatgtcccgcctatgccaggactacgatacaatcggccctgagggaggttctctgaagtctaaacttgttcccctcgtgcaggccacatttcccgagaacgcggttaccaagagagttaaactcgctttgcaagcgcagccagtccctgacgaacttgtcacgaaattacttgggaaccaagctactttcagtcccattgtcactgtagaacctagaagaagaaaatttcaccggcctatcggtctgagaattccactgcccccatcctggactgacaatcctcgcgacagcggggaaggtgacacaacctccctccgattactctgcagtgtcattgggggaacggatcaggcacagtgggaagatataaccggtaccactaagctggtctacgccaacgaatgtgctaattttacgacaaacgtaagtgcaagattttggctttccgattgccctagaaccgctgaagccgtgaattttgctacactgctatataaagagctgaccgcggttccgtacatggcaaagttcgttatcttcgcaaagatgaacgacccccgagagggaagacttcggtgttattgcatgacggacgataaagtagataagacgctggagcagcacgagaacttcgtggaagttgctagatcaagagacattgaggtgctcgagggaatgagtctgttcgcagagctgtcagggaatcttgtgccggtgaaaaaagctgctcaacagagaagctttcattttcagagtttcagggaaaataggttggccatgcctgtcaaggtccgggactccagtagggaacctggcggttcactgagcttcctgaggaaggccatgaagtatgaggacacgcagcacattctgtgccatctgaatataaccatgcccccatgtgcaaagggatccggcgctgaggacaggagacggacacccacccctctggccctacgctactccatcctgtcagaatccacccccggatccctgtcaggcacagaacaagctgagatgaagatggctgtgatcagcgaacatctgggtctgtcatgggcagagcttgcgagggagctgcagttctctgttgaggacataaatcggattagggtcgaaaatcctaactctttgctagaacaatccgtggcgctgttaaatctctgggttattcgcgaaggccaaaatgctaatatggagaatctgtatacggctttacagagcatagaccggggtgagattgtgaacatgctggaaggcagtggccgacagtctcgcaatctgaagcccgacaggcgtcacacggaccgcgactactccctctctccatctcagatgaacggctactcgtctctccaagacgagctattgagtcccgcttctctcggctgcgcccttagctctcccctgagggcagaccagtattggaacgaggtagccgtcctcgacgctattcccctcgccgctaccgagcacgacactatgttagagatgtcagatatgcaggtttggtcggccggtctgactcccagcttggtcaccgctgaggattccagcctggagtgcagcaaggctgaggatagcgacgctaccgggcatgaatggaagttggagggggcactgagtgaagaacctcgcggacccgagcttggcagcctggagttggttgaggacgacaccgtggacagtgacgcaacaaatgggctaatcgatttattagagcaggaggagggacaaaggagtgaagaaaagctgcctggctctaaacggcaggatgatgcaaccggcgctggtcaggattccgagaacgaagtctctcttgtatctgggcaccagcgtggccaggcaaggattacgcacagtcccactgtctcccaagtaactgagcgttcccaggataggttacaagactgggacgctgatgggtcaatagtaagctaccttcaggacgctgctcaaggtagctggcaggaggaagtgacgcaaggtcctcactcgtttcagggaactagtaccatgacagagggcctggaaccgggaggcagccaggaatacgagaaggtgcttgtttctgtgagcgaacatacctggaccgagcagccagaagctgagtcaagtcaggcggacagggatcgaaggcagcagggacaagaggaacaggtacaggaagctaagaatacctttacacaggtggtccaggaccacacgagtactcctaacccata

SEQ ID NO: 214406 - DNA, 330 bp, synthetic construct
  misc_feature 1..330: note = Description of Artificial Sequence: Synthetic coding sequence
  source 1..330: mol_type = other DNA
atgtggacattcgtcacacagctgttggtaaccctggtgctgctgagtttctttcttgttagttgccagaacgttatgcacattgtacgtggttccctctgtttcgtgttgaaacacatccatcaggagcttgacaaggaattgggagaaagtgaaggactctccgatgacgaggagacaattagcaccagggtggtaaggcgacgagtgtttctgaaaggaaatgaatttcagaatatccctggcgaacaggtcactgaagaacagttcactgacgagcagggaaacatcgtgaccaaaaaagatcatactagcacaccgaacccttag

SEQ ID NO: 214407 - DNA, 11775 bp, synthetic construct
  misc_feature 1..11775: note = Description of Artificial Sequence: Synthetic coding sequence
  source 1..11775: mol_type = other DNA
atgatgaatgaggatgcagcccagaaatcagacagtggggaaaaattcaacggctcctcccaacgcagaaaacggcctaagaagtcagattcaaatgcatcgttcctgagagccgctcgtgcgggaaatctagataaggtcgttgagtatctgaagggtggtatagatatcaacacgtgtaaccagaacggcctcaacgctctgcacctcgcagcgaaagaaggtcacgtgggtttggtgcaggagttactagggagaggctcctcggtagactccgcaaccaaaaaaggaaatacagctctccatattgctagcctggccggacaggccgaggtggtgaaagtactcgtgaaagaaggtgctaacattaacgctcaatctcaaaatggtttcactccactctacatggctgcgcaggagaaccacatagatgtggtaaaatacttgctggagaacggagctaatcagtcaacggctactgaagatgggtttactcccctggctgtggcccttcagcagggtcacaatcaagccgtcgccatacttctggaaaatgatacaaagggcaaggtcaggttgcctgccttacacatcgcagcacgaaaagacgatactaagtccgccgcactgcttctccagaatgatcataacgctgacgttcagtccaagatgatggtgaaccgaactacggaaagcgggttcacccccctgcacattgccgctcactatggaaatgtcaatgtggccaccctgttgctcaatcgcggagccgctgtggacttcacagccagaaatggtatcacccccttacatgtcgcatcaaagaggggcaacacaaatatggttaagttgctcttagacaggggcggacagatcgacgccaaaacccgcgacggcctaactccactgcactgcgccgctcgctctggtcacgatcaggtggttgaacttctcctggagcggggagctcctcttcttgccaggacaaagaatggactgtcccccctacatatggccgcacaaggagatcatgtggagtgcgtgaaacatctgctgcagcataaagcacccgtcgatgatgtcacactcgattatctcaccgccttacacgtagcagcccattgcggacattacagggtaactaaattgcttctagataaacgggcaaaccctaatgcacgcgctctcaacggttttacgccgttgcacatagcctgtaaaaagaatcgaattaaagtaatggagttgcttgtcaagtacggagccagtatccaggcgatcaccgaaagtgggctgacacccattcatgttgccgcattcatggggcacctgaatatcgtcctgctcctgcttcagaatggggcaagccccgatgtcactaatatcaggggcgaaaccgccctccatatggctgctcgcgctggacaagtggaagtggtgagatgcttattgagaaatggggcactggtagacgcacgagcaagagaggagcagacccctctgcatatagccagccgacttggtaaaacagaaattgtgcaactgctattgcagcatatggctcacccagacgctgctaccacaaacggttacacaccactgcatatttcagctcgggaaggacaggtcgacgtcgcctctgtacttcttgaggccggtgctgcacactctctggccaccaaaaaaggctttaccccactccatgttgccgctaagtatgggagcctggacgttgccaagctgcttctgcagcgtcgggcagcagccgattctgcaggtaaaaatggactcactccccttcacgttgcagctcattatgacaaccagaaagtggcattactgttactggaaaaaggcgcaagtccacacgcaacagccaaaaatggttacacacccctgcatattgctgccaaaaagaaccagatgcagatcgcttcaaccctcctaaactacggagctgagaccaatattgtcaccaaacagggcgtgaccccgctccatctggcctcccaggaaggtcataccgacatggtgacgctgctgctggacaaaggggcaaacatccatatgtcaaccaagtctgggctgaccagcttacacttggctgctcaggaagacaaagttaacgtagctgacattttgactaagcatggtgccgaccaagacgcccataccaagcttggatacacgcctctgattgtagcctgccactatggtaacgtgaaaatggtaaactttctgctgaaacagggcgctaatgtgaacgcgaaaactaagaatggctatacgcccctgcaccaggctgctcagcaggggcatactcacattatcaatgttctgctccaacacggggcaaagcccaatgccacaacagctaacggcaacactgccctggctatagccaaacgactcggctatatcagcgtagtagatacgctgaaggttgttactgaagaggtgacaacaaccaccactactattacagagaagcataaattgaatgtgccagaaactatgactgaggtcctcgacgtcagcgatgaggagggcgacgataccatgacgggcgatggaggagaatatctcagaccagaagaccttaaggagttaggggacgactctctgccttccagtcagtttcttgatgggatgaattatctgcgatattccctggagggcggacggagtgattccctaaggtcttttagctccgacagatctcataccctgagtcacgcctcttatttgcgagactccgcagttatggatgacagcgttgtgatcccctctcaccaagtatctacgctggcaaaggaggccgaacgtaattcctaccgcctgtcgtgggggactgagaatctagataatgttgccctgtccagttcccctatccacagcggtttcttggtgtctttcatggtcgacgccaggggcggagctatgagaggttgtagacacaatggcttgaggattattatccccccaagaaagtgtacagcacctactcgtgtgacttgcagactggtaaaacgacacaggctggctacaatgccacctatggttgaaggagaaggcctcgcctcccgactgattgaagtggggccttctggggcacagttcctcgggccagtgatagtagagattccacactttgccgctctgcgtggtaaggagagagagctcgtggtccttaggagcgagaacggggactcatggaaggagcatttttgcgattacaccgaggacgaactgaatgaaatcctgaacggcatggatgaggttttggacagtcccgaagatctggagaagaaaaggatctgtcgaataattaccagggatttcccccagtatttcgctgtcgtgagtcgaatcaagcaggatagtaatctgattggtcccgaagggggagtgctgagttccacagttgtgccccaagttcaggccgtctttccggaaggcgctctgaccaaacggatccgtgtcgggttgcaggcccagcctatgcactcagaacttgtaaagaagatcctgggaaacaaagccactttctctcctatcgtgacactcgagcctcgaaggagaaagtttcataaacctataacaatgacaattcctgtgcctaaggcctccagcgacgtcatgcttaatggttttgggggagatgcacccacactgaggttactctgctctataaccgggggaactactccagctcaatgggaggacattaccggaacaactcctctcacattcgtaaatgagtgtgtgagcttcaccacgaatgtctctgccagattttggctcatcgattgcagacagatccaagagagtgtcaccttcgcttctcaggtgtatagggagataatatgtgtgccttatatggctaaatttgtcgtattcgctaagagtcatgatcccattgaagctaggctgcggtgtttttgcatgacagacgacaaagtagacaagaccttggaacagcaggagaattttgccgaggtggcccgttctcgagacgtggaagtgctggaaggcaagcctatctatgtcgactgcttcggcaacctcgtccccctgaccaaatctggccagcaccacatcttttccttcttcgccttcaaggaaaaccgcctgcctttgttcgtcaaggttagagacacaacacaggaaccctgtgggaggctgagcttcatgaaagagccgaagtctacacgagggcttgtgcatcaagctatatgcaatttgaacattaccctgccaatttacaccaaagaatccgagagcgatcaggagcaggaagaggagattgacatgacttctgagaaaaacgacgagaccgagtccaccgaaactagtgtactaaagtcccatctggtgaacgaagttcctgtacttgcttcgcctgacctcctgtctgaagtgtctgagatgaaacaagatctgatcaaaatgactgctattctgacaactgacgtgtctgataaggccggatccatcaaggtgaaggagcttgttaaggccgctgaagaggagcctggcgagccattcgaaatcgttgagagagtgaaggaggatctggaaaaagtgaacgagattctccgctccgggacctgtacgagagatgagtcatcagtgcagtctagcaggagtgaacgcggtctagtggaagaagagtgggtgattgtgtcagatgaagagattgaggaagcaagacagaaggccccactagagatcaccgagtatccctgcgtggaggtgaggatcgataaggagattaaggggaaggtggaaaaggatagcacgggcctggtcaactatctgaccgacgacctgaacacgtgtgtccctctgcccaaggaacagctgcagacagtccaagacaaggcgggaaagaagtgtgaggctctggccgtcggtcgatccagcgagaaggagggcaaggacataccgcctgatgagacacagtctacgcagaaacagcataaaccctccctgggaataaagaaacccgtgcgcaggaaactcaaggagaagcagaaacagaaggaagaaggactccaggcctccgccgagaaggccgaactcaagaaggggagttcagaggagagcctgggggaggatcccggactcgcccctgagcctctgcctactgtgaaagccactagtcctctgattgaagaaacccccattggctccattaaagataaggtaaaggccctacagaagagagtggaggatgagcagaagggtagatctaaactgcctatccgcgtgaaaggtaaagaggacgttccaaaaaaaaccactcatcgaccacatcctgcggcttccccaagtctaaaatcagaaagacacgctcccggttctccaagtcccaagaccgagagacacagcactctcagctctagtgccaaaacagaacgccacccacctgtgagtccttctagtaaaactgaaaagcactcccctgtgtcgccaagtgctaagaccgagcgacattcccctgcctcgagtagttccaagacagagaagcatagcccagtttcccctagcacaaagactgaaaggcacagccccgtgagctctacaaagacagaacgtcatccgcctgtatctccatcgggcaagacagataaacgaccacctgtgtcaccttctgggagaactgaaaagcaccctcccgtgtcacccggtagaaccgagaagcgcctccctgtaagcccctccggacgaaccgacaaacaccaacctgtgtccactgccggtaagacagaaaagcatttaccagttagtccaagtggcaaaacggaaaaacagccacctgtgtcacctactagcaaaaccgagaggattgaggagactatgtctgtgcgagagctaatgaaggcttttcagtctgggcaggacccttctaagcacaaaactggcctgtttgaacacaaaagcgctaagcagaagcagccacaagaaaagggaaaggtgcgtgtggagaaagaaaagggccctatccttacgcagagagaggcacaaaagacggagaatcaaacaattaaaaggggacagcggctgcccgtgacagggacagccgagtcaaagagaggcgtcagagttagctcaatcggcgtaaaaaaagaggatgcagctggagggaaagagaaagtactgagtcataagattcctgagcccgtgcagtcagtgccggaagaggaaagtcatcgcgagtccgaggttcccaaggagaagatggcagacgagcaaggcgacatggatctccagatttccccagaccggaagacaagcacagatttttctgaggtgattaaacaggaacttgaggacaatgacaagtaccagcagttccgtcttagtgaggaaaccgagaaggctcaattgcacttggaccaagtgctcaccagtcccttcaacacaactttcccacttgactatatgaaggacgaatttctgcccgcattgtctttgcagtcaggggcacttgacggttcctctgaaagcctcaagaacgaaggggtggcagggtccccctgcgggtctctcatggagggaaccccccagatatccagcgaagaaagctataagcatgagggtttggccgaaacgcctgagaccagtcccgagagtcttagtttctccccgaaaaaatctgaagagcaaaccggagaaaccaaggagagcaccaaaaccgaaacgaccaccgagatcagatccgaaaaagagcacccgacaacaaaggacattaccgggggatctgaggaaagaggtgccactgttaccgaagatagcgagacttcgacagagtctttccagaaggaggccactcttggatcgccgaaggacacgtcccctaagagacaggacgactgtactgggtcctgttctgtcgccttggccaaggagacccctaccggtcttactgaagaggcggcttgcgatgaaggtcagaggacgtttgggagctccgctcataagacccagactgattccgaggtgcaggaaagtactgccaccagtgatgagacaaaagccctgccgcttcccgaggcttccgttaaaaccgacaccggcaccgaatctaaacctcagggtgttatccgctcaccgcaaggactggagcttgcgcttccttcacgggattcagaagtgctcagcgccgttgcagatgattcactcgcagtgagtcataaggattcgcttgaggcgtctcctgttctggaagacaacagcagtcacaagacccctgattcactggagccttctccattgaaagagtcgccttgtcgcgattccctggaatccagtcctgtggagccaaagatgaaggccggaatctttccatcccacttcccattgcccgcagccgtggcgaaaaccgagttgttaacagaagtcgcaagcgtgaggtcccgtctgttacgcgacccagacggctccgctgaggacgactcccttgagcagacttccctcatggagagttccggaaagtctcccctcagcccagataccccgtcatctgaagaagtcagctacgaagtcacccctaaaacaacggacgttagcactcccaaaccagcggtcattcacgaatgtgccgaggaggacgacagtgaaaatggcgaaaaaaagagatttacacccgaggaagaaatgtttaaaatggtgaccaaaatcaaaatgttcgacgaacttgaacaggaagcaaaacaaaagcgtgattacaaaaaagaacctaaacaggaggaaagtagcagctccagtgacccagacgccgattgttctgtggatgtggacgagcctaaacacaccggttccggagaagacgagtccggagtgcccgtactagtgacatctgaaagcagaaaggtctcttccagcagtgaatcagaacccgagctggcgcaactgaaaaagggcgctgacagcggccttcttccagagccagtgatcagagtgcagcctcctagccccctgccctcctccatggactcaaatagctctcccgaagaagtccagtttcagccagttgtttctaagcaatacacctttaagatgaacgaggacacccaggaggagcccggtaaatccgaggaggagaaggacagtgaaagtcatctggcggaagacaggcatgccgtgtctacagaggctgaagatagatcttatgataagcttaaccgtgacaccgatcagcctaagatttgcgatgggcatggctgtgaagccatgtccccgtcaagtagcgccgcacctgtgtcttccggtttgcagtcccctacaggcgatgacgtcgatgagcaaccagtaatttataaggaatcattggccttgcagggtactcacgagaaggataccgagggagaagaactggatgtgtctagagcagaaagccctcaagctgattgtccaagcgagtccttttccagctccagctccttgccacactgccttgtatcagagggaaaagaattggatgaggatatctctgcaaccagttctatccagaaaactgaggtaaccaaaaccgatgagacttttgagaatcttcccaaggattgtcctagccaggattccagtatcaccacacaaaccgaccggtttagcatggatgtcccggtttccgatctggccgaaaacgacgagatatatgatccacagattacctcaccttatgagaatgttccatctcaatcttttttcagttcagaggaatccaaaactcagactgatgcaaaccacaccacatcctttcactccagcgaagtttacagcgtgactattactagccctgtcgaggatgtagtcgtggcctcctcctccagcggaaccgtgttgtccaaagagagtaattttgagggtcaggatatcaagatggagtctcagcaggaaagtaccctgtgggagatgcaatccgactcggtgagctcatcgttcgagccaacaatgagcgctactaccactgtggtgggcgaacagatatcgaaggtcatcatcacaaagaccgacgtggactctgattcatggtctgagatcagagaagatgatgaggcgttcgaggctcgagtaaaagaagaggagcaaaagatattcggcctgatggtcgatcgacagtcccagggaaccacccccgacaccaccccagccaggacacccaccgaagaaggcacaccaacaagtgaacagaatccattcctgttccaggagggcaaactgtttgaaatgactaggtcgggggctatcgatatgaccaagcgaagttatgctgacgaatccttccacttttttcaaattggccaggaatctagagaggaaacattgagtgaggacgttaaagaaggcgctacaggcgctgacccactgcccctggaaaccagcgccgagtcactggccctgagcgagtccaaagagacggtggatgatgaagctgacctcttacctgatgacgttagtgaggaagtagaagagatcccggctagtgacgcccagttaaactcgcaaatgggaatctccgcgagtactgagacacccaccaaagaggccgtgagcgtcggaaccaaggatcttccgaccgtgcagacaggggacattccgcctcttagtggcgtcaaacagatatcatgccctgactccagtgagcccgctgtgcaggtgcagcttgatttttcgacactcacaagatccgtctacagcgaccggggtgacgacagtcctgacagctctcccgaggagcaaaaaagcgtcatcgaaattccgactgcccctatggagaatgttcctttcactgagtccaagagcaaaattcctgtgaggacgatgcctacgtcaacgcccgctccacctagcgcagaatacgaatccagcgtgagcgaagacttcctgtcttccgtggatgaggagaacaaagcagacgaagcgaagcctaaaagtaagttgccagtcaaagtgcccctgcagagggtcgaacaacagctgagcgatcttgacacgtctgttcagaagactgtggcacctcaaggccaggacatggcctctatcgctcccgataatcgatcgaaaagtgagagcgacgctagctccctggattccaagaccaaatgtcccgtgaagaccagaagttacacggaaacagagaccgaatcacgtgagagagcggaggagttggaactggaatccgaagaaggcgcaactaggcctaagattctgacctcgcggcttcccgtcaagtctcgatctaccacaagctcttgtcggggtgggacttccccaacaaaggaaagcaaagaacatttctttgacctctacagaaacagcatcgaattctttgaagaaatcagcgatgaagcatcaaaacttgtcgaccgcctgacccagtctgagcgggagcaagaaatagtgagcgacgacgagtcttctagtgctctggaggtgagcgtgatcgagaacctgccaccggtggagaccgagcatagtgtccccgaggacatctttgatacaagacctatttgggacgagagcattgaaaccctcatcgagcgtatcccagacgagaacgggcatgaccatgcggaggaccctcaagacgaacaggaacgcatcgaggagaggctcgcctacatcgccgaccaccttggtttcagttggacggagctggcacgcgaactcgactttactgaagagcagattcaccagattcgcattgaaaacccaaatagtctccaggatcaatctcatgctctgctgaagtattggctagaacgggacggaaaacatgctacagatactaatttagtggagtgtctcactaaaatcaatcgcatggacatagttcatctgatggagacaaacactgagcccctccaggagcgcatttctcactcttacgccgagattgagcaaactataacactcgatcactccgaaggattctccgtcttgcaagaagagctgtgcacggcacagcataagcagaaggaagaacaggccgtatccaaggagtcagagacctgcgatcatcccccaatcgtgtcagaggaggacataagcgtgggttatagcaccttccaggatggggttccgaagaccgagggtgatagtagtgctactgcccttttcccccaaactcataaggagcaggttcagcaggacttctctggcaaaatgcaggatctgcctgaagaaagcagcctggagtatcagcaagagtatttcgtgaccactcctggcacggaaacctctgagactcaaaaagcgatgatcgttccttccagccctagcaagacccccgaggaggtgtctacacctgcggaagaagaaaagctgtatctgcagacgcccaccagcagtgagcggggaggatccccaattatccaagagcccgaagaaccctcagagcaccgcgaggaatcatcaccaaggaagacatctttggtgatcgtggagtcagctgacaatcagccagagacctgcgagaggctggatgaagacgctgcatttgaaaagggcgacgacatgcccgagatccctccagagactgtcaccgaggaagaatacatcgatgaacatggccataccgtagtcaagaaggtcacgcgcaaaatcataaggagatacgtctcatcagaaggcacagaaaaagaggaaatcatggtccagggcatgccacaggaacctgtgaatatcgaagaaggggacggatacagtaaagtgatcaagagagtcgtcttgaagtccgacaccgaacagtccgaggacaacaatgagtat

SEQ ID NO: 214408 - DNA, 5591 bp, synthetic construct
  misc_feature 1..5591: note = Description of Artificial Sequence: Synthetic coding sequence
  source 1..5591: mol_type = other DNA
atgtcacaccacattcaaaggtcggacagcaatgcctccttcctgagagctgccagggcaggcaacctggataaagtggtcgagtatttgaagggcggtatcgacattaatacatgcaaccaaaacggactgaacgccctgcatctggcggctaaggaggggcatgtgggcctggtgcaggagttactgggccgtggctcttccgttgattctgcgactaaaaagggtaataccgccctccacattgcctctttagcgggacaggcagaggtggttaaggtcctggtgaaggagggggcaaatattaatgcccaaagccaaaacggatttacacctctctatatggcagcgcaagaaaatcatattgatgtggtcaagtaccttctggagaacggagccaaccagtcgacagccacggaggacggttttactcccctggccgtggccctgcagcagggccataaccaggctgtagctattctgctggaaaatgacaccaagggcaaagtgcgcttgcccgcactgcacatcgctgcacggaaggacgacactaaaagcgcagctctattattacaaaacgatcacaatgcagatgtgcagagcaagatgatggttaatcggacaaccgagagcggattcacacccttacacatcgctgcccattacggtaatgtgaatgtggccactctgctgttgaatagaggcgcagccgtcgatttcacagcgcgaaatggcattaccccccttcacgtcgcctcaaaaagaggaaacacaaatatggtgaagctcctccttgaccgtgggggacagatagacgccaaaaccagggacggactgacgcctctgcactgtgctgcaagatctggacacgaccaggtggtggagctcctgctggagcggggtgctcccctgctggcaagaaccaagaacggcctcagtcctttgcacatggcggctcagggggatcatgtggaatgcgtaaaacaccttctgcagcacaaggccccagtggatgatgttaccctggactatctgaccgcactgcacgttgctgcacattgtggccactatagagtaacaaaactactgcttgacaagagggcaaacccaaatgccagggccctaaacggcttcacaccactgcacatcgcctgtaagaagaacaggattaaagtgatggaactcctggtgaagtatggggctagcatacaggcaatcactgaaagcgggctgactcctatacatgtcgcggcattcatggggcatctgaatattgttctgctgctgctacagaacggagcgagtcctgatgtgactaatatcaggggggaaactgccctacacatggccgctcgtgctgggcaagtggaagtagtgagatgtcttttgagaaacggagccctggtagacgcaagagcgagggaggagcagacgccactgcacatcgccagccgtctgggaaaaaccgagatagtccaactgctccttcaacacatggcccatccagatgcagctaccaccaacgggtacactccacttcatatctcagcgcgtgagggtcaagtagacgttgctagtgtgcttctggaggccggtgccgcacacagcctcgccaccaaaaagggcttcactcctctacacgttgccgctaagtacggatctctggatgtcgccaagttactacttcagcggagagctgctgctgacagtgccggaaaaaacggtctcacccctctccacgttgccgcacattatgataatcagaaagtcgcattacttcttctagaaaagggcgcatccccccatgctactgctaaaaacggatacacgccactgcatatcgccgcaaagaaaaaccagatgcagattgcaagcaccctactgaattatggagctgaaaccaacatcgtgactaaacaaggagtgactcctcttcatctcgctagccaagaggggcacacggacatggtaaccttactgctggacaaaggcgcaaacatccacatgagcacaaaatccggccttacatctctgcacctggctgctcaagaggataaggtcaacgtagccgatatccttacaaaacatggagccgaccaggatgctcacacaaaactgggttacactccactgatcgtggcgtgccattatggaaacgtcaagatggtgaattttcttctgaagcagggagccaacgtcaatgctaagaccaagaacggttatacccctctgcatcaagccgcacagcaaggacatacacatattattaacgtcctcttgcaacacggagccaagccaaacgcaactactgccaatgggaataccgccctggctatcgccaaaagactcggatacatctccgtcgtggacactttaaaggttgtgacagaggaagtcaccactacaaccactaccataacggaaaagcacaaactgaacgtccccgaaactatgacagaggttctggatgtgagtgacgaggaaggtgacgacacaatgaccggtgacggcggagagtaccttaggcccgaggatctgaaagaacttggcgatgactcacttcccagcagccagttcctcgacgggatgaactacctgaggtatagtctggagggcggacgaagtgatagtctgaggagctttagttcagacagatctcatactctgtctcatgcctcgtatctcagggactccgctgtgatggacgacagcgtggtgataccctctcatcaggtgtcaacactagctaaagaagccgagagaaacagttacaggctctcctggggcaccgagaacctcgacaacgttgcgctatcatctagccctatccattcggggcgagcttcaccctgcctggaacgggacaattccagctttctagtcagttttatggtggatgctcgcggaggggctatgcgcggttgcagacacaatggtctgagaatcatcattccgccacgcaagtgtacagcccctacgagagttacctgtagactcgtgaaaagacatcggctcgcaacgatgcctccaatggtggagggtgagggcctggccagccgcctgattgaggtaggccctagcggggctcagttcctaggcaagttgcatttaccaacagcaccaccgcctctcaacgagggcgagtcactggtgagtaggattctccagcttggacccccaggcactaaattcctcgggccagtgatcgttgaaattccccattttgctgccctgcgcggtaaggaaagagagctggtggtattacggagtgaaaacggcgatagctggaaggaacacttttgtgactacaccgaagacgaattgaatgagattctgaatggtatggacgaggttctggactctccagaagacctcgagaaaaaacgcatctgtcgaatcataacacgagactttcctcagtacttcgccgttgtgagcaggattaaacaggacagtaacctaataggccctgagggcggagtcttatcttcgactgtcgtcccccaagtgcaggccgtttttcctgagggggcattaacgaagagaattagagtgggtttgcaggctcagcctatgcatagcgagctagtcaaaaagatcttgggcaataaagccacgttcagcccaatcgtgacccttgaaccccgacggaggaaattccataagccgatcaccatgacaatccccgtccccaaggcctcctccgatgtgatgctcaacggtttcgggggagatgccccaaccctgaggctcctctgtagtataaccgggggaacaacacctgcgcagtgggaggatatcacgggcactacccctctgacattcgtgaatgagtgtgtgagtttcacaaccaatgtgtccgcgcgtttctggttgattgactgccgccaaattcaagaatcggtcacgtttgcctcccaggtgtacagagaaataatttgtgtgccatacatggctaagtttgtagtctttgctaagagtcatgacccaatcgaggcaaggctgaggtgcttctgcatgacagatgataaggtggataagaccctagaacagcaggagaacttcgctgaggttgcaaggagccgtgacgtggaggtgctcgaaggtaagccaatctatgtcgattgtttcgggaacctggtccctttaacaaagtccgggcagcaccacatattttccttcttcgcgtttaaagagaaccgattaccattgttcgtcaaggtccgagatacaacccaggagccttgcggcaggctgtcttttatgaaggagccaaagtccaccagggggctggtccatcaggccatttgcaatctcaatataaccttacctatttacacaaaggagtctgagagcgatcaggagcaggaagaagagattgggcaagagtcccggaggtatccacaggacgagcaagagaggattgaggagagactggcttacattgctgaccatctgggcttctcctggacggagctggccagagagcttgatttcactgaagaacagattcatcagattaggatagaaaatccaaactccttgcaggaccagagccatgccctgttgaaatactggctggagcgcgacggaaaacacgctaccgataccaacctcgttgaatgcttaacgaagatcaaccgcatggacattgtgcacctaatggagactaacaccgaacctttgcaggagaggatctctcactcctatgccgagatcgaacagaccattacactcgatcactccgagggtttctcagtccttcaggaggagctgtgcaccgcacaacacaagcaaaaggaagagcaagccgtaagtaaagagtctgaaacctgtgaccatcccccaattgtgagtgaagaggatatatccgtaggttactctactttccaagacggggtgccaaagacagaaggtgactctagcgccacagctctgttcccccaaacacacaaggagcaggttcaacaggatttctcgggaaaaatgcaagaccttcctgaggaaagctcgcttgaatatcaacaagagtactttgtcacgacccccggtaccgagacgagtgagacccagaaagcaatgatcgtgccttcaagcccttctaaaacacctgaagaagttagcacaccagccgaggaggagaaactgtatctccagacccccaccagctctgaacgcggagggtctcccatcattcaggagcctgaggagccctccgagcaccgcgaagaatccagtccacgtaaaactagtctggtcattgttgagtccgccgacaatcagcccgaaacatgtgaacgactcgatgaggacgcggcattcgaaaaaggcgacgacatgcctgaaatcccaccagaaaccgtgactgaagaagaatacatcgatgagcatggccatactgttgttaaaaaggtgacccgaaagattatacggaggtatgtctcctcagaggggacagagaaggaggaaattatggtgcagggcatgccccaagagccagttaatatcgaggaaggcgatggctatagcaaggtgattaagagagttgtgctgaagagcgatacagagcaatctgaggattccatggagta

SEQ ID NO: 214409 - DNA, 11874 bp, synthetic construct
  misc_feature 1..11874: note = Description of Artificial Sequence: Synthetic coding sequence
  source 1..11874: mol_type = other DNA
atgatgaacgaggatgccgctcagaaatctgatagtggggaaaagtttaacggctccagtcagagacgaaagaggcctaaaaagagtgattccaacgcttccttcctgcgagcagctagagcaggtaacctcgataaggtggtggaatatttgaagggtggtatcgatataaacacctgcaaccagaatggtctgaatgcattgcacctggccgctaaggaagggcatgtgggcttggtccaggaacttcttgggcgaggctctagtgtcgactctgctaccaaaaagggaaacacagctctccatatagcttccttggccggacaagccgaggtcgtgaaggtcctggttaaagagggagccaacataaatgcgcaaagccagaacggttttacgcctctgtacatggcagcacaggaaaaccacattgatgtggtgaagtatctcctggaaaacggggctaaccagtctacagctacggaagatggattcacacctcttgccgtcgctctgcagcagggccacaatcaggccgttgccatcctcttggagaacgacaccaaaggaaaggtacgactgcccgcacttcatattgccgcacgcaaggacgacaccaaatcagcagcactgctgctgcagaacgaccacaatgccgacgtgcagtcaaaaatgatggtcaatagaactaccgagtcaggatttaccccactccacatcgctgcgcactacgggaatgtcaatgtggcaacactgctcctgaaccggggtgcggctgtggattttaccgccagaaacggcatcaccccacttcacgtcgcctcaaagagaggtaacaccaacatggtcaagctgctcttggaccgagggggacagatagatgccaaaactcgcgacgggctaactccgcttcactgtgccgctaggtcaggccacgaccaagtagtggaactgctccttgaacgtggcgctccactacttgcccgaaccaaaaacgggctctcacctctccatatggcagctcagggggatcacgttgagtgcgtcaaacacctgctgcagcacaaggccccagtcgacgatgtgacactggactatctcacagcactccacgtcgccgcacactgcggacactatcgggtcacaaagctgcttctggataagcgagccaaccctaacgctcgggcattaaatggcttcactccactgcatatagcttgtaaaaaaaacagaatcaaggtgatggagcttctggtcaaatatggggcttccatccaggcaattactgagagcggcctgactcccatccacgtcgccgcatttatgggacatctcaatatcgtattgctactgctgcagaatggcgctagccccgacgttacgaatattagaggagagactgcactgcatatggcagctcgggcagggcaggtggaagtggttagatgcctcctgcgtaacggagccttggtggacgcacgggctagggaggagcagacacctctgcacatcgcttcccgtctaggcaaaacggaaatcgtccagctacttctgcagcatatggcccatcctgacgcagctactaccaacggttacacacctctgcacatttcggcacgagaggggcaggtggacgtggcgagcgttctcctggaagccggagctgctcactccctggctacgaagaagggtttcactcccctacacgtggctgcaaagtatggttcactagatgtggccaaactgcttctgcagagaagggccgctgctgattccgcgggaaagaatggcttgactccccttcatgtcgcagctcattatgacaatcaaaaagttgccctgctactcctggagaagggcgcatctccacatgccaccgccaaaaacggttacacgcctctccacatagccgctaagaagaaccagatgcagatcgcttccaccctcttgaactacggagccgaaaccaacattgtgacaaagcaaggcgtgacccccctccacttggcctcacaggaaggccacactgacatggtcaccttgcttctggacaaaggcgctaatattcatatgtccaccaagagtggattgacgtcgttacacttggctgcccaggaggataaggtgaatgtggctgatatactcacaaagcacggggcagaccaggatgcacatacaaaattaggctacacacctctcatcgtggcctgccactatgggaatgttaagatggtcaacttccttctgaagcaaggtgcaaatgtaaacgcaaaaacaaagaatggctatactcccctgcaccaggcggctcaacaagggcatacccacattatcaacgtgcttctgcaacacggcgcaaagcctaacgccaccactgcaaacgggaacacagccctagcaatagccaagaggctagggtatatctcagtggtggacacactgaaagtagtgacagaagaggtcactaccacaaccacgacaatcacagagaagcacaagcttaacgttccagagactatgactgaagtgctggatgtctcagacgaggagggcgacgacactatgaccggggacggtggggaatatctccggcctgaggacctgaaagagttaggcgatgattctctgccatcctcccagtttctcgacgggatgaactacttacgctactctctggaggggggaaggtctgacagtcttagaagtttctccagcgatcggtctcacaccctcagccacgcctcatacctgagagatagcgcggtgatggacgactccgttgtcatcccctcacaccaggtgtcaacactggctaaggaggccgagaggaacagctaccgccttagttgggggacggagaacttagataacgtcgctttaagcagctctcccattcactcaggcttcctcgtgagctttatggttgacgctaggggcggagccatgcggggatgtcgacacaacgggctaaggatcattatcccccctcgaaagtgtaccgctcctactcgagtgacttgtaggttggtgaagaggcacagactggctacaatgccaccaatggtggagggcgagggtctggcctcacggctgattgaggtgggtccatcaggggctcagttcttaggcaaactgcacctaccaacagctcccccacccctgaacgagggcgagagcctcgtgtcccgcatattacagctggggccaccaggcaccaagttcttgggccctgtcattgtggaaatcccacatttcgccgctctgaggggcaaagagcgggaacttgtggtattgcgttcagaaaatggcgacagttggaaggaacacttctgcgactatacagaagatgagctcaatgaaatactgaatgggatggatgaggttctcgactcgccagaagatctcgaaaagaagcggatatgtcggatcatcaccagagatttcccacaatactttgcagtggtctcacgcatcaagcaggacagcaatctgataggtcctgagggaggggtgctcagcagcacggtagtccctcaggtccaggccgtttttccagagggagcactcaccaagcgcatcagggtggggctgcaggcccagcccatgcacagtgagctcgtgaagaagatcttgggcaataaggcaacatttagtccaatcgtgacactcgagcccagaagaaggaagtttcataaacctattaccatgaccatacccgtacccaaagcatccagcgacgtcatgcttaacggctttggaggagatgccccaactctccggctattgtgcagcatcaccgggggaaccacacccgctcagtgggaagacattacagggacaactcccctcacctttgtcaatgagtgcgtcagcttcactaccaacgtttcagctcggttttggcttatagactgccggcagattcaggagagcgtgacattcgctagccaggtgtacagggaaatcatctgtgtgccttacatggcgaaattcgtggtgttcgctaaaagccacgatcctatcgaggccagactgagatgcttctgcatgaccgatgacaaggtcgataagaccctagagcaacaagagaacttcgcagaagtggcacggtctcgggatgtggaggtgctggagggcaagccgatctatgtcgattgtttcggaaatctggttcctctcaccaaaagtggacagcaccacatcttctccttcttcgcatttaaagagaacagattaccacttttcgtaaaagtgagagacactacgcaggagccgtgtggccgactcagctttatgaaagaacccaagagcacaaggggtctggtgcaccaagctatctgcaatcttaacataaccctgcctatctacacaaaggagagtgagtccgaccaggaacaggaagaggaaatcgacatgacctctgagaaaaacgatgaaaccgagtcgaccgaaacaagcgtcctcaagagccatctcgtgaacgaggtccctgtgctggctagcccagatctgctctccgaggtgtccgaaatgaagcaggacctcataaagatgaccgctatcctgacaaccgacgtaagcgataaagcagggtcgattaaagtcaaggagctcgtgaaagccgctgaggaggaacctggcgaacctttcgaaatcgtggaacgcgtcaaggaggacttggagaaggtaaacgagatccttcggtccggcacatgtacccgcgacgaatcatcagtgcagagctctcgctcagagcgaggtctggtggaggaggagtgggtgatagtaagcgacgaggagatagaagaggcaaggcagaaggctccgctcgaaattaccgagtatccttgcgtagaggtgcggatagataaggaaatcaaagggaaggtggaaaaggatagcaccggcctggtgaactatttaaccgacgatttgaatacatgtgtgcctttgccgaaggagcagctgcagaccgtacaggataaggcgggaaagaagtgtgaggccctggccgtgggcagatccagcgagaaagaaggcaaggatatccccccagacgaaactcagagcactcagaagcagcataagccctctctcggtattaagaagccagtgaggcgaaagctcaaagagaagcagaagcaaaaggaggagggactccaggcctctgccgaaaaggcagagcttaaaaaaggctcatctgaggaatcattaggggaagacccagggctggccccagagccactgcctaccgtgaaagctacctctccactgattgaggaaactcccatcggctcaatcaaagataaagtgaaggccctgcagaagcgggtggaggacgagcaaaaagggcgatctaaacttccaatcagggtgaaagggaaggaagacgttccaaagaagactactcatagaccccaccccgctgcatcccccagcctgaaaagtgaacggcacgcccctgggtccccctctcctaagacagagcgacactccacactgagcagcagcgctaagacagagcggcacccaccagtctcaccatcaagcaaaactgaaaagcactcccctgtgtctccatctgcaaaaacggaaagacactcccctgcttcctcttcatctaaaacagaaaaacacagtcccgttagccctagcaccaaaactgagcggcattcacccgtatctagcacaaagacggaacggcaccctcctgtttcaccatccggtaagacggataaacgtcctccagtgtctccaagtggacgcaccgagaagcatccgcctgtttctcccggacgaactgaaaagcgcctgcctgtgtctccaagtggcagaactgacaagcaccagcctgtgtcgacggcaggcaaaactgagaagcacctgcccgtttctcctagcggaaagacagagaaacagccgccagtgtcaccaacctccaagacggaaagaatagaggagacaatgtcggtccgtgagctgatgaaggcgtttcagagcgggcaggatccctccaagcataagacgggccttttcgagcacaagtccgccaagcaaaagcagccccaagagaagggaaaggttagagttgagaaggagaagggcccaatcttgacccagagggaggcccaaaaaaccgagaaccagactattaagagggggcaaagactgccagtgactggcaccgcagagtccaaaaggggagttagggtgtcttcaataggggtgaagaaggaggatgctgccggaggtaaagagaaagtgctgagccacaagatacccgagccagtccagtctgtccctgaggaagagtcccaccgcgaatctgaagtgccgaaagagaaaatggcagatgaacagggggatatggacctgcagatcagtcctgacagaaagacaagtaccgacttttcggaggttataaaacaggaactggaagataatgacaagtaccagcaatttagactgagtgaagagaccgagaaggcccaattgcaccttgatcaggtattgaccagccctttcaacaccaccttcccactggactacatgaaggacgaattcctgcctgctctgtccttgcagtcaggggcactcgacggctccagcgagtcattgaagaacgagggtgttgccggttccccatgtggttcactgatggaaggtacaccccaaatctcaagcgaggaatcctataagcatgaggggttggccgagacacctgaaacttcaccggaaagtctgtcttttagtccgaaaaagtccgaagagcaaacaggcgaaaccaaggaaagcaccaagacggaaactaccaccgagatccgatcagagaaagaacacccaactaccaaagatatcacaggcggtagcgaggaacgcggagccactgtcactgaggacagcgaaacctctaccgaatccttccaaaaggaggcaaccctcggttcccccaaggacacttcccctaagaggcaagacgattgcaccggctcatgctccgtcgccttggctaaagaaacccctactgggctgacagaagaagctgcttgcgatgaaggacagaggacattcggctcgagcgctcacaagacgcagactgactcagaagttcaagaatccacagctacatccgatgaaacaaaggcattgccacttccagaggcttccgtgaagaccgatacaggtactgaatccaagcctcagggtgtgatcagatctccccagggattggaactggcactccctagcagagattcagaagtcctctccgctgtggcagacgattccctggctgttagccacaaagatagcctggaggctagccccgttttagaagacaattcaagccacaagacaccggattcactcgaaccaagtcctctcaaggagtctccttgtcgcgatagcctggagagctcccccgtggagcctaagatgaaagcgggtatcttcccctcccatttccctctcccggctgccgtggctaagacagaactgttgacagaggttgcctctgtgagatccaggttgttacgggaccctgacggcagcgctgaagacgattcactagagcagacaagccttatggagagctccggcaaatctcctttgtctcctgacacaccctcctccgaggaggtttcctatgaggtcactcccaaaactactgacgtctcaactcccaagcccgctgtgattcatgaatgtgcagaggaggacgactccgaaaacggcgaaaagaagagattcactcccgaagaggagatgtttaagatggtgactaaaatcaaaatgtttgacgagctcgaacaggaggcaaagcaaaagagggactacaaaaaggaaccaaagcaggaggaatccagctcctcctctgatccggatgcggattgtagcgtggatgtcgacgaacctaagcacacaggcagcggggaagatgagagcggagtccctgtcctggtaacatccgagagtaggaaggtgtcatctagcagcgagtctgaacccgaactggcacagcttaagaagggagcggatagcgggctgctcccagaacccgtgattcgtgtgcagcccccttccccactgcccagtagcatggattcgaactcctctccagaagaagtgcagttccagcctgtggtatcaaagcagtacactttcaaaatgaatgaggatacacaagaagaaccaggaaagagtgaggaggagaaagacagtgagtcccacttggcggaggatcggcacgcagtctccacagaggctgaagaccgatcctacgacaagttgaatcgagatacagatcagcccaaaatttgcgacggccatggctgtgaggccatgtccccgagcagcagcgctgctcccgtgtcaagcggactgcagagtcccacgggggatgacgttgacgaacagccagtcatctacaaagagtcattagcgctccagggcacacatgagaaggataccgaaggggaggagctggatgtgagtcgcgctgaatcaccacaggcagactgcccctcagagtccttttcaagttccagctcactgccacactgtcttgtgtccgagggcaaggagctggatgaggacatcagcgccacgtcttcaattcagaaaaccgaagtgactaaaacagatgagactttcgaaaacctgcccaaggattgcccaagccaagatagctcgatcacaacacagactgaccgattttccatggatgtgcccgtatctgatctagccgaaaacgacgagatctacgaccctcagattacctctccctacgagaacgtgccttcgcaatcttttttctctagcgaagagtctaaaacgcaaacagacgccaaccataccacctcttttcactcgtctgaggtgtacagcgtgactattacgtcacctgttgaagacgtggtcgtggcatcctctagtagtggaacggtgctgagcaaagaatccaacttcgaggggcaggacataaagatggaatcccagcaggagtcgaccctgtgggaaatgcagagcgactcggtgtcaagcagcttcgaacccaccatgtcagccactactactgtggtgggtgaacagataagcaaggtgatcatcaccaaaaccgacgtggacagcgattcatggtctgagatcagggaagatgacgaggccttcgaagcacgtgttaaggaggaggaacagaaaatcttcgggcttatggtggacagacaatcacaggggacaacacccgacaccacacctgctagaacgccgaccgaagagggcacgccgaccagcgagcagaaccccttcttgttccaggaagggaagctttttgagatgactagatcaggggcaatcgacatgacgaagcggagctatgcagacgaaagcttccatttttttcagatcggtcaggagagtagggaggaaaccttgagtgaagatgtgaaggagggagctactggagcagatcctctgccactcgaaacctctgcagagtccctggctctgtctgagagcaaggagacagtagacgacgaagctgatttgttaccggacgatgtatccgaagaggtcgaagaaatacccgcttccgacgcccaactcaatagccagatgggaatctcagcttctacagagacccctaccaaggaagctgtttccgtcggaaccaaagatcttccaactgtgcaaacaggcgacatacccccactctccggggtgaagcaaatctcatgcccagatagttccgagcccgctgtgcaagtgcaactggattttagcacgctcacgcgatccgtgtacagtgaccggggagacgacagtcctgatagcagcccagaagagcagaagtctgtcatagagatcccaacagcaccaatggagaatgtaccattcacagaatctaagagcaaaatacctgtgaggacaatgccaacttcaaccccggcacccccaagcgccgaatacgagtccagtgtatcagaagacttcctcagttctgtagacgaggaaaacaaggccgatgaggctaaacccaagtcaaaattgccagtcaaggttccactgcagagagtggaacagcagctgagtgaccttgatacgtctgtacagaagactgtagctcctcaggggcaggacatggccagcattgcacctgacaaccgatccaagagcgaatcagacgccagcagcctcgattccaaaaccaaatgccctgtgaagacccggagctatactgagactgagacggaatctcgtgagcgtgccgaagagctggaattagaatctgaagaaggtgcgaccaggccgaaaattctgacaagtcggctgcctgtgaagtcccgtagcacaacgagcagctgtcgcggtggcaccagtcctaccaaggagagtaaagagcacttctttgatttatatagaaactctatcgaattttttgaggaaatctcagacgaagcatcaaaacttgtggatcggttaacccagtccgaaagggaacaagagatcgtctcagacgatgagtcctcctccgcgctcgaggtttccgttatagagaatctcccaccagttgaaactgagcattccgtccccgaggatattttcgatacaaggccgatttgggatgaaagcattgagactctgattgagagaatacccgatgaaaatgggcacgaccacgccgaggatccgcaggacgagcaagagcggatcgaagaaaggctggcctatatcgccgaccacctcggctttagttggacagagctagcacgtgaactggatttcactgaagaacaaattcaccagatcagaattgagaatcctaacagcttgcaggaccagtcgcacgcgctcctgaaatactggttagagagggatggcaaacacgcgactgacacaaacctcgtggaatgcttgaccaaaatcaatcgcatggatatagtgcacctgatggaaacaaataccgagcccctccaagaacggattagccactcgtatgccgagattgaacagaccatcacacttgaccattcagaagggttctctgttcttcaggaggagctctgtaccgctcagcacaagcagaaagaagaacaggccgtctccaaggagagcgagacatgcgaccacccaccgattgtctctgaggaggatatctctgtcggctacagtacattccaggatggcgtgcctaaaaccgaaggcgattccagtgcgactgcccttttcccccagacccataaagagcaggttcaacaagatttcagtgggaaaatgcaggacctgcctgaggagagctctctggaataccagcaggagtacttcgttacgacccccggaaccgagacctccgaaacccagaaagccatgatcgtgcccagctcccccagcaagacacctgaggaagtaagcacaccggctgaggaggagaaattatatctgcagactcctacatcttctgaaaggggcggatcacctattattcaagaacccgaggagccaagtgaacaccgcgaggagtcgagcccacggaaaacaagcctggttatcgtagaatccgcggacaaccagccggaaacttgtgaacgtctggatgaagacgcagcctttgaaaaaggcgacgacatgcccgaaattccacccgagactgtcactgaagaggagtacatcgacgagcacggtcataccgtggtaaaaaaggtgaccaggaaaataatcaggaggtatgtttcttctgaaggaacagaaaaggaggagattatggtccagggcatgccacaggagcccgtgaacatcgaggagggagacggatacagtaaggtgatcaagcgtgtggtactcaagtccgacaccgagcagagtgaggataacaacgaatac

SEQ ID NO: 214410 - DNA, 5618 bp, synthetic construct
  misc_feature 1..5618: note = Description of Artificial Sequence: Synthetic coding sequence
  source 1..5618: mol_type = other DNA
atgatgaacgaggacgcggctcagaagagtgactccggtgagaagttcaatggaagttcccagaggcgtaaacgcccaaaaaaatctgactccaacgcctcctttctccgggctgcgagagccggaaatttggataaggtggtggaatatttaaaaggaggcattgacataaatacctgtaatcaaaacggtcttaatgcactccatctagccgctaaagaagggcacgtgggacttgtccaagaacttttgggcaggggaagttcggttgatagcgctacgaaaaaggggaatacagccctccatatcgcatctctggccggtcaggccgaggtcgtcaaggtcttggtgaaggagggcgctaacattaacgcacagtcacagaacggcttcacccctctgtacatggccgcacaggaaaatcacatcgacgtggtgaaatatctgctggagaacggagccaaccagtctacagctacagaggatgggttcacgcctctggcagtggccctgcaacagggacataaccaggccgtggccatcctactggaaaacgacactaagggcaaagtccggctacctgcgctgcacatcgcagcgagaaaagatgacaccaagtcagccgctctactgctgcagaacgatcacaacgcagatgtccagagtaaaatgatggtcaaccggacgacagaatccgggtttaccccgttgcatatcgcagcccactacggcaatgtgaacgtggcaacattgctgctgaatagaggcgcagccgtagacttcactgccaggaatgggatcacccccctacacgtggcaagcaaaaggggcaacactaacatggtgaagctattgctggaccgcggtgggcaaatcgatgccaagacaagagacggattgacgcccctgcactgcgccgcaaggagcgggcacgaccaggtcgtagagctgttgctggagcggggtgcccctctgctggcccgaacgaaaaacggattgtctcctctgcacatggcggcacagggggatcacgtggagtgtgtgaaacatttgctccagcacaaagcccctgtggatgacgtcaccctcgactatcttaccgccctgcacgttgctgcccattgtggccattaccgtgtgacaaaactgctcctcgataagagggcaaatccaaatgccagggctctcaacggttttacccccttacacatagcttgcaagaagaacaggatcaaggtgatggagctgctggtgaaatacggcgcaagtattcaggctattacagaaagtgggctcacacctattcacgtggctgcctttatggggcacttgaacatcgtgctcctgctgctgcagaacggagcaagtcctgacgtcacaaacatacgaggagagaccgccctacacatggcggcaagagccggtcaagtagaagtggtgcgttgcctgttgcgtaatggcgcacttgtagacgccagggctcgggaggaacagacccctctacacatcgcatcgaggctgggcaaaactgagatagttcagctgttgctgcaacatatggcacaccccgacgcggcaactacaaacgggtacacccctctgcacatatctgcaagggaagggcaagtggatgtggccagtgtcctgctcgaggctggcgctgctcactctctggctaccaagaagggttttactcctctacatgtggccgcaaagtatggtagcctggacgtggcaaagctgctgttgcaaagaagagcagccgcagatagtgcaggaaagaatgggctgacgccactgcacgtcgctgctcattatgacaatcagaaggtggccttacttctgctggaaaaaggagcttcccctcacgcgacggcaaagaatggatatacccccctgcacatcgccgctaagaagaatcaaatgcaaatagcatctacgctacttaactacggggcagagactaacattgttactaaacaaggcgtaactccgttacatctggcatcacaggagggccacacggatatggtaacactgttgctcgataagggcgcaaacattcacatgtctaccaaatctggcctgacatcactccatctggctgcacaggaggataaggttaacgtagccgatatcctgaccaagcatggagcagaccaggatgcgcacacgaaactaggctacactccacttatcgtagcctgtcactacggtaatgtgaaaatggtgaacttcctccttaagcagggggcaaatgtcaatgccaaaaccaagaacggctacacgcctctacaccaggcagcgcagcagggtcacactcacatcattaatgtgctgttgcagcatggcgctaagccgaatgcaacgaccgcaaatgggaacacagcactggctattgccaagcgtctgggctatatctctgttgtagacacactcaaagtagtcactgaagaggtaaccactacaactactaccatcacggaaaagcacaagttgaacgtcccagagaccatgacagaggtgctggacgtgtcagacgaggagggggatgacaccatgacgggcgacggaggcgaatacctccgacctgaggaccttaaagagctcggggatgactctcttccatcctcacagttcctggacgggatgaactacctcagatatagcctggaaggcggaagatccgatagtctccgttcatttagctcagaccggtcccataccctctcccatgcctcctacctgagggattctgccgtgatggacgattcagtcgttatcccgtctcaccaggtgtccaccttagcaaaggaagccgaacggaactcctaccgactgtcttgggggactgagaatctcgataatgttgccctgagctcttctcctatccatagcggtttcctggtgtcatttatggtggacgctcggggtggagctatgaggggttgcagacacaacggtctccggattatcatcccccctcgaaagtgcaccgcacctacgcgtgtgacatgtagactcgtaaaacgccacaggctggcgactatgcccccaatggtcgagggggagggccttgcgtcccgcctcatcgaagtggggccaagcggcgctcagtttctcggtaaacttcatcttcccactgccccacctcccctcaacgagggcgaaagcctcgtgagcagaatcctgcagctgggccctcccggaaccaagttcctgggccctgtgattgtggagattcctcacttcgctgcactgagggggaaggagagagagctagtggtgctgcgctccgaaaacggggacagctggaaagaacatttctgtgactacacggaagacgagttgaatgaaatcctgaacggtatggatgaggttctggatagccccgaggaccttgaaaagaaaagaatttgtcgcatcatcactcgggatttcccccaatacttcgcggttgtttcccgcattaaacaggattctaatcttatcggaccagaaggcggagtgctgtcctccaccgtagtgcctcaggtgcaagctgttttccctgagggggctttgaccaagagaattagggtcggcctacaggctcaacccatgcactctgaactcgtcaagaaaattttgggcaataaagccacttttagccccattgtcaccttagaaccaagaagaagaaaatttcacaaaccaatcacgatgaccattcctgttcctaaggctagcagcgatgtcatgctgaatggatttggcggtgacgccccaacacttcggctgctgtgttctattacaggcggaaccacaccagcccagtgggaggacattacaggaacaacaccactaaccttcgtgaacgagtgtgtgtcatttactacaaatgtgtctgcacggttctggctgattgattgtcgacagatccaagagagtgtgacattcgcctctcaggtgtatcgcgaaattatctgtgtaccgtatatggcgaagtttgtagtcttcgccaagagtcatgaccccatcgaagcccgactcagatgtttttgcatgacagacgacaaagttgacaagaccttggagcagcaggagaacttcgcagaggtcgctcgttcccgggacgtcgaggtgctggaaggtaagcctatctacgtggattgcttcggcaacctggtgccacttaccaaaagtggccagcaccacatcttcagcttttttgcctttaaggagaacagactgccactgtttgttaaagtgagagataccacccaggagccatgcggcagactgtcatttatgaaagagcctaagtccacccggggacttgtgcaccaggctatctgcaacctgaatatcacgctgcctatctatacgaaggagtcagagagcgatcaagagcaggaggaagaaatcgacatgacgagtgagaagaacccacaagacgagcaagagcgtattgaagaacgcctggcatacattgctgatcacctgggtttcagttggaccgagctggccagggaactggattttacagaagaacagatccatcagattaggattgaaaatcctaactcgctccaggatcaaagtcatgcactgctgaagtactggctcgagcgcgacggtaagcacgccactgatacgaatctcgttgaatgcttaacaaaaataaatcgtatggacattgtgcatctaatggaaacaaatacggagccactccaagagcgcatctcccacagctacgccgagattgagcagactatcacattagatcactccgaaggcttctcagtattacaggaggagttgtgcaccgcacagcacaagcagaaagaggagcaagccgtaagcaaggagagcgaaacctgcgatcatccaccaatcgttagcgaagaggacatcagtgtgggatacagcacattccaggatggggtacccaagactgaaggtgatagttctgctacggccctgtttcctcagacccacaaagaacaagttcagcaggacttcagcggtaagatgcaggatctgcccgaagagtcatctctggaatatcagcaggagtacttcgtgaccacccctggtaccgaaacttcagagacacagaaagcaatgattgtacctagctccccttctaagacccccgaggaagttagcacgcctgcggaagaggagaaactgtatctgcaaacaccgacctccagcgaaagggggggatctccaatcatccaggagcccgaagaaccaagcgagcatagggaggaatcaagccctcgtaagacatccctggtcattgtggaatccgccgataatcaacctgaaacctgcgagagactagacgaagatgctgcatttgagaagggcgatgatatgccagagattccacccgagactgtgacagaggaagagtacatcgacgaacatggccacaccgtcgtgaagaaggtcacacgaaaaattatcaggcggtatgtttcctccgagggaacggagaaggaagagattatggtccagggaatgccacaagaaccagtgaacatcgaggagggcgatgggtatagtaaagtgattaaaagggttgtgctgaaaagcgacaccgaacagtcagaggacaacaacgagta

SEQ ID NO: 214411 - DNA, 2988 bp, synthetic construct
  misc_feature 1..2988: note = Description of Artificial Sequence: Synthetic coding sequence
  source 1..2988: mol_type = other DNA
atggatgattccgtggtgatcccatctcatcaggtgagcacactggcaaaggaagccgaaagaaactcttacaggcttagttgggggacggagaatctagacaacgtggcactgtctagctcgcccatacacagcggattcttggtgtccttcatggtggacgcacggggtggagccatgcggggttgtcgacataatggtttgcgcatcattatcccccctcgcaaatgtactgcacccactcgggtgacatgtcgactggttaagagacatagactcgctaccatgccacctatggtagagggagaaggcctggcgagcagactgatagaagttggaccatctggagctcagtttctggggcctgtcatagtggagattccacattttgctgctctgcggggaaaggagcgggagctcgtcgtgctcagaagcgagaacggtgactcatggaaggaacatttctgcgattacacagaggatgagttgaacgagatactgaacggtatggacgaggtgttagactccccggaggaccttgaaaagaagaggatttgccgaatcataactagggattttccgcagtactttgcggtcgtgtcccgcataaagcaggacagtaacctcatcgggcctgaaggtggtgtcctgagttctactgtcgttccacaagttcaggcagtctttcccgagggggcacttaccaagcgaatcagagttggcttgcaggcccaaccgatgcactctgaactggtgaaaaagatccttggcaacaaagctaccttcagtccaattgtcaccctagagccaaggaggcgtaagttccataaacctatcacgatgacgatccctgtgcccaaggcatcttcggacgtgatgttgaacggatttggcggagatgctcccacacttcgactcctgtgttccataacagggggaaccacacctgcacagtgggaggacatcactggcacgacacctctaacgtttgtgaacgaatgtgtgagcttcaccaccaacgtcagcgctagattctggctgattgactgtcgtcagattcaggagtccgtgacatttgccagccaggtctaccgtgaaatcatctgtgtgccatatatggccaaatttgtagtctttgccaagagccacgatcctattgaagccagactgaggtgcttctgcatgactgatgataaagttgataagacattggaacagcaggagaatttcgccgaggttgccagatccagagatgtagaagtgctggaaggcaaacccatctacgtggactgttttggcaaccttgtcccccttaccaagtcgggacaacaccatatattcagttttttcgcatttaaggaaaatcggctgcctctgtttgtcaaggtcagagacactacacaagaaccttgcggcaggctttccttcatgaaggagcccaaaagcacacgcggactggttcaccaggccatctgcaatctgaacattaccctacccatctacacaaagaccgagacgacaactgagatccacccacaggacgagcaagaacggatagaggagcggctcgcctacattgcagaccatctcggtttctcttggaccgaactcgcccgtgagctggatttcaccgaagaacagatccatcaaataagaattgagaaccctaacagtctgcaagaccagtcacacgctttgttgaagtactggttggagcgcgacggaaagcacgcaactgacaccaatctggttgagtgcttaacaaagataaaccgcatggatattgtgcacctcatggaaaccaataccgaacccctgcaagaaaggatcagtcattcatacgccgagatagagcagactataacactcgatcactctgagggattcagtgtactgcaagaggagctgtgcacagctcaacataaacagaaggaggagcaggctgtgtccaaagagagcgaaacttgtgatcacccccctatcgtctctgaggaagatatttcagttggttactcgacgtttcaggacggggtgccaaaaaccgagggtgactccagcgctactgcactgtttccacaaactcacaaagaacaagttcagcaggacttctccggcaagatgcaagatttgcctgaagagtcctctctggagtatcagcaggagtattttgtcacaacaccgggtacggagacatctgagacgcagaaggcaatgattgtaccatcctccccatccaaaacccccgaggaggtctcaacaccggctgaagaggaaaagctgtaccttcagacaccaaccagttccgaaaggggcggttctccaattattcaggagccagaggaaccctcagagcacagagaggagtcctcaccacgtaagacttcactggttatcgtggaatctgccgataaccagccggagacttgtgagagactggacgaagatgccgcatttgagaaggagctcacagaagagctaggagagttggaggcctcttctgacgaagaagccatggttaccacccgcgtggtgcgtcgcagagtcattatacagggagatgatatgccggagataccgcctgagacggtgaccgaggaggagtatattgatgaacatggccacactgtggtaaaaaaggtaaccagaaaaattattcggaggtacgtgtcaagcgaaggcacggagaaggaagagattatggtgcagggtatgccccaggaacccgtgaacatcgaggagggagacgggtacagcaaggtgattaagcgagtggttttgaaatcagacaccgaacagtctgaagtgacgctgtgcgaaccctctatcctgagctctacatcacagttccaggcagaacccgtggaaggcagacgggtgtccaaggtggtgaagactaccgtcgtgctgggggaacggatggagaagcatttaggggactctagcctagcaacggacctgccaagcgcaaaagacgatttcgaggaatag

SEQ ID NO: 214412 - DNA, 3345 bp, synthetic construct
  misc_feature 1..3345: note = Description of Artificial Sequence: Synthetic coding sequence
  source 1..3345: mol_type = other DNA
atgacgacaatgctgcaaaaatccgacagcaacgccagctttctccgcgcagctagagctggcaacctggacaaggttgtggaatacctgaagggaggcattgatatcaacacttgtaatcagaatggactcaatgcactgcaccttgccgcaaaggaaggtcatgtcgggttagtgcaggaactgctgggcagaggctcctcagtggacagcgccaccaagaagggtaacactgctctgcacatagcgtcacttgccggacaggcggaagtcgtgaaggtactggtgaaagaaggtgcaaatatcaacgcccagagtcaaaacggattcacccccctgtacatggctgcacaagaaaaccacatcgatgtggttaaatacctgctggaaaacggcgctaatcagtcaaccgcaacagaggatggctttactcctctggctgtcgccctccagcagggacacaaccaagccgttgccattctactagagaatgacactaagggcaaggttcgcctcccagctctgcacattgccgcaaggaaagacgacacgaagtccgcggcattactcctgcagaatgatcataacgcagacgtccagtccaaaatgatggtgaatcggactacagagagcggatttacgcccttacacatagccgctcattatggtaacgtgaacgtcgccacactgctccttaatcgcggagccgcagtagacttcaccgcgagaaacggcatcacccctcttcatgtagcctccaagaggggtaatacgaatatggtgaagctgctcctggacaggggaggtcagatagatgctaaaacaagggacggtctgacacctttgcattgcgctgccaggagcggccacgatcaggtggtagagctcctgctggagcgcggagcgcctctcttggctcggacaaagaatggtctgagtccactgcacatggccgctcagggtgatcacgtcgagtgtgtaaagcacttgctacaacacaaggcaccagtggacgatgtaactctggactacctgacagccctgcacgtagcggctcactgtgggcattatagggtgactaagctactgctggacaagagagctaatcctaacgcacgggctctcaacggtttcacacctctgcatatcgcctgcaagaagaataggattaaggtcatggaattgcttgtgaaatacggagcttccattcaggccatcactgaatctggtctgacccctatccatgtcgctgccttcatgggacacctaaacattgtgttactcttgttgcagaacggagcttcaccagatgtcacaaatattcggggagaaaccgccctgcatatggcagcccgtgctggccaggtggaggtggtacgctgcctgctgcgtaatggcgctttagtcgacgctagggccagggaagaacagacccccctccacatagcatcccgtttggggaagaccgaaattgtgcagctgttgctccagcacatggcgcacccggatgccgcaaccaccaacgggtacacaccactgcacattagtgcacgggagggccaagtcgatgtggccagcgttcttctagaagctggagcagcccactccctcgctactaagaagggcttcactccattgcacgtggccgctaagtacggcagcctggacgttgctaaactgctgcttcagaggcgcgctgcagctgactctgctggtaagaatggcctgacaccactgcacgtggctgcccattacgacaatcagaaggtggcccttcttcttctagagaagggagcatctccacacgccaccgccaagaatggctacacacccctccacattgccgcaaagaagaaccagatgcaaatagcctctacactgctaaactacggggctgaaactaatattgtgacaaagcaaggtgtgacccccctgcacctcgctagtcaggagggtcatactgacatggtgactctccttctcgataagggcgctaacatccatatgtccaccaaaagcggtttgaccagtctccacttagcagctcaggaggataaggtaaatgttgccgatattctgacgaaacacggggctgatcaggacgcccatacgaagctcggctacactcctctcatcgtcgcctgccactacggaaatgtcaagatggtaaactttttgcttaagcagggcgctaacgtcaacgcaaagaccaaaaatggctacacacctctgcaccaggccgcacagcagggccacacccacatcattaatgttctccttcagcacggggctaaaccgaacgcgaccactgcgaacgggaataccgcactggctatcgcaaagcggctgggatatataagcgtcgttgacaccttgaaggtggtgacagaagaagtgactacaacgacaaccactattactgagaagcataagctgaatgtgcctgagactatgactgaggtcctcgacgtctctgatgaggaaggagacgataccatgaccggagacggcggtgagtatctgaggccggaggacttgaaagagttaggggacgatagcctgcctagctcccagttcctggatggaatgaattacttgagatactccctggaggggggtcgatccgactctctgagaagcttctctagtgacagatcccacaccctttcacatgccagctacttgcgggattcagctgtaatggacgactccgtagtgattccaagccaccaagtgtcaacgcttgccaaagaagctgagcgaaacagctaccgcctatcgtggggaacagagaacttagataacgtagccctgtcgtcttcacccattcatagcgggtttctggtatcatttatggtcgatgccagaggaggggcaatgaggggctgcagacataacggtcttcgcatcattatccccccacggaaatgtaccgccccaacccgcgtgacctgtagattggtaaaacgccataggctcgccactatgccacccatggtcgagggtgaaggcctggcaagcagattaatcgaagtgggcccaagcggcgcacaatttctcggaaagctgcacctccccacagcccctcccccactgaacgaaggtgagagtctggtctcacgcatcttacagctcggtcctccgggtactaaatttctaggaccagtgatagtagagattccgcatttcgcagctttgcggggtaaggagagggagctggtggtgctccggtccgaaaacggggacagctggaaggaacacttttgcgattatactgaggatgagctcaatgaaatactcaatggcatggacgaggtccttgattcgcctgaagatttggaatag

SEQ ID NO: 214413 - DNA, 5192 bp, synthetic construct
  misc_feature 1..5192: note = Description of Artificial Sequence: Synthetic coding sequence
  source 1..5192: mol_type = other DNA
atgatgaacgaagatgcagcccagaaatccgactcaggagaaaagtttaacggtagcagtcaaaggcggaagaggcctaagaaggtgacttgtccgcagatgaagccggaggctgcaaatattgaaaaaagtgattctaacgcctccttcctgagggcggctcgggctggcaatctcgacaaggtggtggaatatctgaaaggaggaatcgacatcaacacctgtaatcagaatgggctgaacgcactgcacctagccgcaaaagaaggccacgtaggactggttcaggagctcctgggccgaggtagcagcgtggattctgcgacaaagaagggcaatacggctctgcatattgctagcctggccggacaggcagaagtggtaaaagtcctcgtcaaggagggcgcaaatatcaacgcccaatcacaaaatggcttcacgcctctgtatatggctgcacaggaaaaccatatcgatgtggtaaagtacttgctagagaatggcgctaaccaaagcaccgctacggaggacgggttcacacctctggctgtagccctgcaacaggggcacaaccaggccgtggccatcctattagaaaacgatacaaaagggaaggtcaggttgcccgctctccatattgccgctagaaaggacgacaccaaaagtgccgctctcctgctccaaaatgatcataacgccgacgtacagagcaagatgatggtgaacaggactactgagtccggcttcactcccctgcacatagccgcacactacggcaacgtcaacgtagcaactctcttgttaaacagaggtgcggcagtggatttcactgccagaaatggcatcaccccactgcacgtggcctctaagagaggcaataccaacatggtgaagctgctcctcgacagaggtgggcagattgacgccaagacccgggatggactcacaccgttacactgcgccgctcgctcgggacatgatcaggtagtggagcttcttttggaacgaggagcccctttgctggctcgtactaagaacggcctgagccctttgcatatggccgctcagggtgaccatgtcgagtgcgttaaacatctgctccagcacaaggcgccagttgatgacgtcactctcgattatcttacagctcttcatgtggctgcccattgtggccattatcgagttactaaactactcctggataagagagccaaccccaatgcacgcgcattgaacggatttacaccacttcatattgcatgcaaaaaaaaccgcattaaggtgatggagctcctagtgaagtacggagccagcattcaggctatcacagaatctggtctgacaccgatacatgtggcggcttttatggggcatcttaacattgtgctgctgctgctacaaaatggggcttccccagacgtcaccaacataaggggagaaacagcattacacatggccgcacgcgcaggccaggtcgaggtggttcggtgtcttctcagaaatggagccctggtcgacgctcgggctcgggaagagcagacacccctgcacattgcctcaaggctcggcaaaaccgagattgtgcaattactgctccaacacatggcccacccagacgcagctacaacaaatgggtatacaccactacatatctctgctcgggagggccaggtagacgttgcctctgtgttgctcgaagcaggcgctgctcatagcctggcaacaaagaagggttttacgccactccatgtggccgcaaagtatggaagtctggatgtcgctaaacttctgcttcaaaggagggcagctgctgattcagccggaaaaaacggattgacacctctgcacgtggccgctcattatgataaccagaaagttgctttgctgctcctagagaaaggggcaagcccacacgcgactgcaaagaatgggtacacaccccttcatatcgcagcgaaaaagaatcagatgcagatagcaagcactctacttaattatggagcagagacgaatattgtgaccaaacagggagtcacgccattgcatcttgcctcccaagaaggccatactgacatggttaccttgttactggacaaaggggcaaatattcatatgtctaccaagagcggcttaaccagcctgcatctggccgcacaggaggacaaagtgaatgtggccgatattcttactaagcatggagctgaccaagacgctcatacaaagctgggctataccccgctcatcgtagcttgccattacggcaatgtaaagatggtaaattttctcctgaaacagggcgctaatgtaaacgcaaagaccaagaatggctacacacctttgcaccaggcagctcagcaaggtcatacgcatatcataaacgtgctgctgcagcacggcgctaaacccaatgcgacaactgcaaacggaaacactgccctggcgattgctaaacggctcgggtacatctctgtcgttgacacactcaaggttgtcaccgaagaagtcaccaccacgacaacaaccatcaccgaaaagcataagctcaacgttcccgagacaatgacggaggtgctcgatgtgtctgatgaggaaggagatgacaccatgaccggtgatgggggagagtacctgaggcccgaggatcttaaggaactgggtgatgattcccttcccagttcacagtttctcgatgggatgaattacctcaggtacagcctcgagggcggacggagcgatagtcttcggagtttctcatccgacaggtcccatacactctcccacgccagctacctcagagattctgcagtcatggacgattccgtagtcattcccagtcatcaggtgagtacactcgctaaagaggcagagcgcaacagttatcgactctcctggggaacagagaatctggacaatgtggctctgtcctcaagtccaatccatagcggattcttggtctcatttatggtggatgcccgtggaggcgctatgagaggatgtcgccataacggtctgaggattattataccacctaggaagtgcactgcaccgactcgcgtgacttgtcgcttagttaaaagacaccgcctcgctacgatgccgcctatggtggaaggtgaaggcttggcctcaaggttaattgaagttggtccttccggcgcacaattcctcggcaaattgcacctgcctacagcccctcccccattgaacgagggagagtctctggtctcccgaattctccagctgggaccacctggtaccaagttcttgggtccagttatcgtcgagatacctcactttgcagcgctccggggaaaagaaagggaactcgtggtattaagaagtgaaaacggagattcatggaaggaacacttttgtgactatacagaggatgagcttaacgagatcttgaatggtatggacgaagtcctggactctccggaggatctcgagaaaaagcgcatctgcaggattataactcgggacttccctcagtattttgccgtcgtcagtcgcatcaaacaagactccaatctcatcgggccagagggcggtgtgctgagttccaccgtcgtcccccaggtgcaggcggttttccccgagggcgcattaacaaagagaattcgagttggcttgcaggctcagcccatgcactctgagctggtaaaaaagattttggggaacaaggccactttttcccctattgttacacttgaacccagacgcaggaagtttcacaagccaatcaccatgaccatccctgtgccaaaggccagctcagatgtgatgcttaatgggttcggtggggatgcccctactttaagattattgtgtagcatcacaggtggaaccacgccggcacagtgggaggacatcacaggcaccacaccattgacgtttgtgaacgaatgcgtaagttttaccactaatgtgagcgcgcgtttttggctgatcgattgccggcagattcaggagagcgtaacctttgctagtcaggtttaccgggagattatttgcgtgccatacatggccaagtttgtcgtcttcgctaagagccatgatcctattgaggctcgtctgcgttgtttctgtatgactgacgacaaagttgacaagacactggagcagcaggaaaacttcgccgaagtcgctagatctcgggacgtcgaggtgctggaaggtaagccaatatacgtggattgtttcgggaacctggttcctctgactaagtcaggtcagcaccacatcttttcatttttcgcattcaaagaaaaccggctgcctctctttgtgaaagttcgcgatacgactcaagagccatgcggaagactgagctttatgaaggagccaaagagcacgcggggattggtgcaccaggccatctgcaacttgaacattacactacctatctataccaaggagtctgagtcagaccaagagcaggaggaagaaatagacatgacaagcgaaaaaaacgacgaaacagagtcgacggagacctccgtactcaaaagccatttagtgaacgaggtccctgtcctggcttctccagacctgcttagcgaggtttctgaaatgaaacaggacctcattaagatgaccgccatcctgacaactgacgttagcgataaggcaggctctattaaggtcaaagagttggtgaaggctgccgaggaggagcctggcgaacctttcgagatcgtggagagagtgaaagaggacctcgagaaggtgaacgagatccttagatccggtacttgcacaagagacgagagctctgtccagtcgtcccgctccgagcggggtctcgtggaagaggaatgggtgatcgtttctgatgaggaaatcgaggaggctcgccagaaggcccctctggaaatcacagaatatccttgcgtggaagtacgaatcgataaggagataaaagggaaggttgagaaagattctacagggctggtgaattatctaactgatgatttgaatacatgcgtacctctgccaaaggagcagcttcagactgtgcaggataaggctggaaaaaaatgtgaggccctggctgtcgggcgatcaagcgagaaagagggtaaggatatccctcctgatgagactcagagtacccaaaagcagcacaaaccttctctaggaatcaagaagccggtgcggaggaaattgaaagaaaagcagaagcagaagta

SEQ ID NO: 214414 - DNA, 5591 bp, synthetic construct
  misc_feature 1..5591: note = Description of Artificial Sequence: Synthetic coding sequence
  source 1..5591: mol_type = other DNA
atgaccaccatgttgcagaaatccgattctaacgcctcatttctgcgggcagccagggccggtaatttggataaggtggttgaatacctgaagggaggcatcgacataaacacctgcaaccagaatgggctgaacgcgctccacctggccgctaaggaggggcacgtgggtctggtgcaggaactgcttggtcgtgggtcctcagtcgatagcgctacaaaaaagggcaacaccgcccttcatattgcaagcctggccggacaggcagaggttgtgaaggtgctcgttaaagagggtgctaacattaatgcgcaatctcagaatggctttacaccgttgtatatggccgctcaggaaaaccatattgacgtagttaagtatctccttgagaacggagcaaatcagtctacggcaactgaagacggatttacacccttagctgtggcacttcagcagggccataatcaggcggtggccatcctgttggaaaatgacactaaagggaaggtccgcctgcccgctctgcatatcgctgcaagaaaggatgacactaagtctgccgctttgttgctgcagaacgatcacaatgcggacgtccagtcaaagatgatggtaaacagaacaacagagtctggctttacacccttacatattgctgcgcattatggaaacgtcaacgttgcaactctgttgctgaatcgtggagccgcagtggatttcacagcacgtaacggcatcacccctctacacgtagctagtaagaggggcaataccaatatggtcaaacttctccttgaccgagggggacagatcgacgccaaaactcgagatggacttacccctctacactgcgcagcgaggtcaggccacgatcaagttgtcgagctgttgctggagagaggcgcacccttgctggccagaactaagaacgggttgagcccactgcacatggctgcccagggcgaccacgttgagtgtgtgaagcatcttctacagcacaaagctccagttgacgatgtcactcttgattatctaacagcgctccacgtcgcagcgcactgcgggcactatagagtcacaaaactgctccttgacaagagagccaaccctaacgccagggccctgaatgggttcacaccacttcatatcgcttgcaagaaaaacagaatcaaagttatggagctgcttgtgaagtatggagcctcaatacaagctatcaccgagagtggacttacacctatccatgttgccgcttttatgggtcatctcaacattgtgctgctgctgctccagaatggcgctagccctgacgtaactaacatccgcggtgaaactgcgctccacatggcagcccgagcagggcaggtcgaggttgtgagatgtcttttgcgcaatggcgcattggttgatgctagggccagggaagagcagacacccctgcacatcgcctcccggctaggcaaaacggagattgtgcagttgctcctccaacacatggcacatcctgacgctgctactacaaatggctacacacctttgcacatctcagcccgtgagggccaggttgacgtggcttccgtgctgctagaggcaggggctgctcatagccttgccacaaaaaaggggtttactcctctacacgtcgcagctaagtatgggagcctggacgtggcaaagctgttgttgcaacgaagggccgctgctgacagcgctggcaagaatggtctcacacccttgcacgtggctgctcattacgacaatcaaaaagtcgcacttcttctgcttgagaaaggagcatccccccacgccaccgcaaaaaacggctacacgcccctgcacatcgctgccaaaaaaaatcagatgcaaatcgcatccacactgctgaattacggggctgaaactaacattgtgacaaaacagggcgtgacacctctccatctggcttcccaagaagggcacacagatatggtgacactgctccttgacaaaggcgctaatattcatatgtcaacaaaaagcggtttgacaagcctgcacttagccgctcaggaggataaagtcaatgtggcggacatactcacaaaacacggagccgaccaggatgctcatacaaaattaggctacacccctctcattgttgcatgtcactatggcaacgtaaaaatggttaatttcctgcttaaacagggggctaacgtaaacgccaaaacaaagaatggatatacacccttgcatcaggcggcacagcaggggcacacccacattattaacgtgctgctccaacacggagccaagcccaatgctaccactgcgaatggaaatacggcattggcgattgcaaagcggctcggctatattagtgttgtggataccctgaaggtggtcaccgaagaagttacaaccactacaacgacgatcaccgagaaacataaactaaatgtgcctgagacgatgaccgaggtgctggacgtgagcgatgaggaaggtgatgacaccatgactggtgacggaggcgagtatctgcgacccgaggacctcaaagagctgggcgacgatagtctgccgtcaagtcagtttctggacggtatgaattacttaaggtactctctagagggaggtcgttcagattccctgaggtcctttagttcggatcgtagtcacacactctcccacgccagttatctgagggactcggcggtcatggacgacagcgttgttatcccctctcaccaggtcagcacccttgctaaggaggcagaacgaaattcttaccgcttaagctgggggacggagaacctggacaatgtggccctgtccagctcaccaatacactcaggcagagctagcccttgcctcgaaagggataattcctcattccttgtgtccttcatggtagatgccagggggggagcaatgagaggatgccggcacaatggtcttaggatcataatccctcccaggaaatgtacagccccaactcgcgttacatgcagattagtaaaacggcatcgattagcaaccatgccccctatggtggagggagaggggctggcttcacgcttaattgaagtgggcccatcaggcgctcagttcctagggaagctgcatctgccaactgctcctccgcctctgaacgagggcgagagcctcgtgagcagaattctacaactgggaccaccagggaccaaattcctgggacccgtgatcgtcgaaatcccccacttcgcagccctgcgcggtaaggaaagagaactggtggtgttgcggagtgagaacggtgattcgtggaaggaacacttctgtgactataccgaggacgagctgaacgagattctgaacggtatggacgaggtcctggattctcctgaagatttagagaaaaagagaatatgccggatcatcaccagggattttccacaatacttcgctgtcgtctcccgcatcaagcaggattccaacctgatcggacctgagggaggtgtgctaagcagcaccgtcgtgcctcaggtccaagcagtgttccctgagggtgccctgacgaagaggattcgcgtgggcttgcaggcgcagccaatgcactctgaattggtgaaaaagatccttggcaataaggccactttcagcccgattgtgaccctcgaacctagacgccgtaaattccacaaacccattacgatgacaatccctgtgcctaaggccagcagcgacgttatgctcaatggatttgggggagacgcgccaacgctcaggctgctgtgctccatcacaggaggcaccacaccagcccagtgggaggacattaccggcaccacccccctcacctttgtgaacgagtgtgtgagcttcactacaaatgtctctgctaggttttggctgattgattgtcgacagattcaagagtctgtgacatttgccagccaagtctatcgtgaaatcatttgcgtgccctacatggccaagtttgtggtgtttgctaaaagccacgatcctattgaggcaaggctgcggtgtttctgtatgaccgacgataaggtagataagactctggaacaacaggaaaacttcgcagaagttgccagatcccgtgatgtcgaggtgttggaggggaaaccaatctatgtcgactgcttcggcaaccttgttccgctgacaaaatctgggcagcaccatatcttttcgttctttgcgttcaaagagaaccgtttacctctgttcgtcaaggtgagggacactacacaggaaccgtgtggaagactgagctttatgaaagaaccaaagtctacgaggggactcgtgcaccaagccatctgcaacctgaacatcacgctgccaatatacactaaggaaagcgaatccgatcaggaacaagaagaagagattgatatgaccagcgagaaaaatcctcaggacgaacaggaaaggattgaggaaagactggcttacatcgcagaccaccttggattcagctggaccgagttagctcgagagctggactttacagaggagcaaatacaccaaatcagaattgagaatcctaacagcctgcaggaccaaagccatgcactgctgaaatactggctggagcgggatggcaagcatgccacagacaccaacttagttgagtgcctgacgaaaatcaatagaatggacatcgtccacttaatggagaccaatacagagcctctgcaggagcgaataagtcacagttatgccgagatagagcaaacaataaccctggaccacagtgaaggattttctgtgctccaggaggagctatgcaccgcccagcacaaacagaaggaggagcaggccgtgtctaaggaatctgagacctgcgatcaccccccaatagtttctgaagaagacatctccgtgggctactcaactttccaagatggagtccccaagactgaaggcgacagttctgccactgctttgtttcctcaaactcacaaggagcaagtccaacaggatttctcaggcaagatgcaggacctgcccgaagaatcctctctcgagtatcagcaggagtacttcgtgacgactcccggtaccgagacctccgaaactcagaaggctatgatcgtcccttcgtctccttctaaaacccccgaggaagtatccactccagccgaggaggaaaagctttacctacaaacccccacaagctctgaaagggggggttccccgatcatccaagagccagaagagccaagtgagcacagggaggaatcgagtcctaggaaaacatccctggttattgtcgaatcagcagataatcagcccgagacttgtgaaaggctggacgaggatgcagcctttgagaaaggtgatgacatgccagagatccctcccgaaactgtgacagaggaggaatacattgacgaacatggccataccgtggtaaaaaaggtgacgcgaaaaataatcagacgctatgtatccagtgagggaactgagaaggaggagataatggtgcagggaatgccgcaagaacccgtaaatattgaagagggagatggatactccaaggttataaagagagtcgtgcttaaaagtgataccgagcagtctgaggataataatgagta

SEQ ID NO: 214415 - DNA, 5585 bp, synthetic construct
  misc_feature 1..5585: note = Description of Artificial Sequence: Synthetic coding sequence
  source 1..5585: mol_type = other DNA
atggcgtcatccgctagctcttcccccgctggcaccgaagatagtgctcctgcccaggggggatttggatccgattactcccgttcctccaggaagagcgacgccaacgcttcatatctgagagctgcaagggctggccacctggagaaggcgctggactacatcaagaatggcgtagacataaacatttgcaaccagaacggcctgaatgctctgcaccttgcctctaaagagggccatgtggaggtcgtgtcagagctcctccagcgcgaagccaatgtggacgcggctaccaagaaaggcaacactgccctccacatagcctctctggctgggcaggctgaagtggttaaagtgctggtgacaaatggagcaaacgttaacgcccagtcccagaacggctttacacctctgtatatggccgcacaggaaaaccatctcgaggtcgttaagttcttacttgataacggcgctagccagtccctggctacagaggacgggttcactccgcttgcagttgccctacagcaaggacatgaccaggtagtatctctgcttctggaaaacgatactaagggtaaggtcagactcccagccctgcatattgccgctcgaaaagacgacacgaaggccgcagccctgctccttcagaacgacaacaacgccgatgtggagtcaaagtccggatttaccccactccacatcgcagctcactatggcaatattaacgtggcaaccttgctgctgaatcgagccgcagccgttgactttaccgcccgaaatgacattacccctttgcacgtggcttccaagaggggcaacgcgaatatggtgaagctgctgctggatcgtggggctaaaatagacgcaaagacgcgggacggtttgacaccgcttcactgcggggcaagaagcggtcacgagcaggtggtggaaatgctgctggaccgggcagcccctattttaagcaagacaaaaaacgggcttagtcccctacacatggcgacccagggagaccatctgaactgcgtccaactcctattgcagcacaatgtcccggtggacgacgtcacgaacgattacctgacggccttgcacgtcgctgctcactgtggccactacaaagtggccaaggttctgctggataaaaaggctaaccccaacgcaaaagcattgaacggcttcaccccgttgcacattgcttgtaagaagaaccggataaaggtgatggagctattgcttaagcacggcgctagcattcaggccgtaacagaatccggactcacgcctattcatgttgcggctttcatgggacacgtgaatattgttagtcagctgatgcaccacggcgctagccccaatacaactaacgtgaggggcgaaaccgcgctccacatggccgcacggtccggccaggccgaggtggtcaggtatttggtccaggatggagcacaagtcgaggctaaggccaaggacgatcagacccctcttcacatctctgcacggttaggcaaggctgacatcgtccagcagttactgcagcagggagcatcccctaacgcagctacaactagcggctacactcctctccacctttcggcgagagagggccatgaagatgtggctgctttccttcttgatcacggcgcatcactctctatcacaactaaaaaaggattcacacctttgcatgttgctgctaaatacggcaaactcgaagttgccaatctgctcttgcagaagtctgcttcgccggatgcggcagggaaatcaggccttactccgcttcacgttgctgctcactatgataatcagaaggtggccctgctcctcctggatcagggtgcctcgccccacgccgctgctaagaacgggtatacacccctgcacatcgctgccaaaaagaatcagatggatatcgccaccacactacttgaatatggagccgacgccaatgctgttacacgccagggcatagcatccgtgcatcttgctgcacaggaaggacatgtggatatggtgtcacttttattgggcagaaatgccaacgtcaacctgtctaataagtctgggctgacacctctgcatctagccgcacaggaggacagagtcaacgtggctgaagttctcgttaaccagggcgcacacgtggacgcgcagactaagatgggctacactcctttgcacgtgggctgtcattacggcaatattaagattgttaacttcctgctgcagcactctgctaaagtgaatgcaaagaccaagaacggatatacgccactgcatcaggcagctcagcagggccacactcatataataaatgtcctactccagaataacgctagccctaatgagctgactgtgaacggcaacacagcactgggcatcgcgcgacgcttaggatacattagcgtggtggatacactcaaaatcgttaccgaagagacaatgactacaaccaccgttaccgaaaagcacaaaatgaacgtccctgagacaatgaatgaagtgttggacatgagcgacgacgaggtgaggaaggcgaatgctcccgaaatgttatccgatggcgaatatatctcggacgtggaagagggagaggatgctatgacaggtgataccgataagtacttgggcccacaggatctgaaagaactcggggacgatagtctccccgcagagggctacatgggcttcagtctgggcgctagatccgcatccctgcggagtttctcctccgatcggagctacacactgaacaggtcttcatacgccagggatagcatgatgatagaggagctattagtccccagtaaagaacagcacctaacattcactagagaattcgatagtgacagcctgagacattacagctgggcggctgatacactggacaacgtaaatctggtcagcagcccgatccattctggctttttggtgagctttatggtcgatgcaagggggggtagtatgcgcggatcgcgacaccacggaatgagaatcataattccaccccgtaaatgtacggcgcctacccgaataacctgtcgactggtgaagagacataagcttgcaaatcctcccccaatggtcgagggcgagggacttgccagtcgcctcgtggaaatgggtcccgctggcgcacagtttttaggcccagtgattgtcgagatcccacactttgggtctatgagggggaaagagcgcgaactgatagtactcagaagcgagaatggggaaacttggaaggaacaccagtttgactccaagaatgaggatttgacagaactgttaaacggaatggatgaagaactcgatagccctgaggagctgggcaagaaaaggatttgcagaataattaccaaggattttccccagtactttgctgtcgtgtctagaatcaaacaggagagcaaccagatcggtccggagggaggaatcctgagttccacgacggtgcccctagttcaggctagttttccagagggagccttgacaaaaaggatccgggtgggactgcaggcacaacccgtgcctgacgagatcgtgaagaaaatccttggcaataaggcaacattttcccccatcgttacagtagaacccaggcgtcgtaaattccacaagcctataactatgactattccagtacccccacctagcggtgaaggggtgagtaacggatataagggagatactacccccaacttgcggctcttatgctcaattaccggcggtacaagccctgcccagtgggaggacattacaggcacaaccccgctgacattcattaaggactgtgtaagttttactacaaatgtgtccgcacggttctggttggcagattgtcatcaagtgttggagactgtgggtctagcgacacagctatatcgtgagctaatctgtgtaccctacatggccaagttcgtggtctttgcaaagatgaacgaccccgtggagtcttccctccggtgcttttgcatgactgatgacaaggtagacaaaacccttgaacagcaagagaacttcgaggaagtggctcgtagtaaagacattgaggtgttggaggggaagcctatctacgtagactgctatggtaatcttgcgccactgaccaagggaggtcaacaattagtgtttaacttctactcattcaaagagaatcgactgcccttctctattaagatccgagatacatcacaagagccctgtggccgattgtccttcctaaaagaaccaaagaccaccaagggcctgcctcagaccgccgtttgcaaccttaatattaccctgcctgcccacaaaaagatcgagaaaactgaccgtagacaatcttttgccagcttggcacttaggaagagatacagctacctcaccgagcctggcatgagtccgcagtccccctgcgaacggacagatattagaatggccattgtggccgatcatttgggacttagctggaccgagcttgcacgagagctgaatttttccgtcgacgaaatcaaccagattcgggtcgagaatccaaatagtctcatatcccagtcattcatgttgctcaagaagtgggttacaagagacgggaaaaacgccaccacagacgccctcactagtgttctcaccaaaattaaccgtatcgacatagttactttgttagaaggcccaatcttcgactacggtaacataagcggcactcggagttttgctgacgaaaataacgtgtttcacgatcctgttgatggctacccctcgctgcaggtggaattagagactccaacgggactccactacacgcctcccacaccgttccagcaggacgattatttcagcgacatctccagcatcgaatctccgttaagaaccccgagcagactcagcgatgggctggtgccaagccagggcaacatcgaacactccgcagatgggcctccggtggtgacggcagaagacgcaagcctcgaagactcaaagcttgaagactctgttcccttaaccgaaatgccggaagccgtcgatgtagatgaatcacagttagagaacgtctgcctatcttggcagaatgagaccagttcaggaaacttagaatcctgcgcgcaagcccgtagagttacaggcggtctgttagaccgtctggatgactcaccagatcagtgtcgcgacagtatcacttcatacctgaaaggagaagcaggcaaatttgaagctaacggatcccacactgaaattactcccgaagccaaaacaaaatcatatttccctgaatcccagaatgatgtcggtaaacaaagcacaaaagaaactctcaaaccaaaaatccacggcagtggacacgttgaggagccagcaagtcctctagccgcataccagaagagcctcgaagagacgtcaaaactgatcattgaggaaaccaaaccatgcgtgcctgtgagcatgaaaaagatgagcagaacaagcccagcagacggcaaacccaggctcagcctgcatgaagaggagggcagctctgggtcggagcaaaaacagggggagggatttaaggtgaagaccaagaaggagatccgacacgtcgagaagaagagccactcata

SEQ ID NO: 214416 - DNA, 5606 bp, synthetic construct
  misc_feature 1..5606: note = Description of Artificial Sequence: Synthetic coding sequence
  source 1..5606: mol_type = other DNA
atgtccgaggagcccaaggaaaagaacgcaaaaccagcgcaccgtaaacggaaggggaagaagtctgatgctaatgccagttacctcagggccgctcgagccggtcaccttgaaaaagccttggactatattaagaacggcgtcgatatcaacatatgcaaccagaatggcttgaacgccttacacctcgcctccaaggaaggccatgtcgaagtggtatctgagttgctgcagcgcgaggccaacgtagatgccgcaaccaagaagggaaacacggctttgcacatcgcatctttggctgggcaggccgaagtggtgaaagtactcgtgacgaacggagccaatgtaaacgcacaaagtcaaaatggatttactcctctgtacatggccgctcaagaaaatcacctggaagtggttaagttcctccttgacaatggcgcatctcaaagtctagccaccgaggatggcttcacacccctggcagtggccctgcaacagggccacgatcaggtggtttcactcttgctggaaaacgacaccaagggaaaagtccgcctgcccgcattacatattgcagcccgaaaagacgacactaaggctgccgctcttctgctgcagaatgacaacaacgcggacgtcgagagcaagagtggatttacccccttgcacatcgctgcccactatggaaacatcaacgtggcaacactgctgctaaaccgggcagctgcggtggattttacggccagaaatgatatcactccccttcatgtcgcctctaaacgcggtaatgccaatatggtgaagttactgttagatagaggagccaagattgatgctaagacgcgagatggcctgacccctctgcattgtggtgctcgctccggccatgaacaggtggttgagatgctgctggatcgcgcagcgcctatactgtccaagaccaagaacggactgtctccactgcatatggccacacagggggaccatctgaattgtgttcaactgctgctgcaacataatgtgcccgttgatgatgtaacgaacgattacctcactgccctacacgttgctgcacactgtgggcactataaggtcgcaaaggttctattggacaaaaaggcaaatccgaacgccaaagccctgaacgggtttacaccgttgcatatcgcgtgcaaaaagaatcgaatcaaggtgatggagctccttctgaagcacggagcttctattcaggctgtaacggagtctggcttaacacctattcatgtcgcagctttcatggggcacgtgaacatagtgtctcagctgatgcaccacggtgcgtcacctaatactactaatgtacggggagagactgccctgcatatggctgccaggtcgggccaagcagaagtggtccgatacctggtccaagatggtgcccaggtcgaggctaaagcaaaagacgatcagacacccctgcacatatccgccagactgggtaaggcagacattgtgcagcaattattacaacagggagcctcccctaacgccgcaacaaccagcggctacacgccactgcacctcagcgcacgagaaggccacgaggacgtcgccgctttcctgctggaccatggcgcttccctgagtattaccaccaagaagggcttcacccccctccatgtagctgcgaagtatggcaagctcgaggtggccaacttacttctacaaaagtcagcgtcccccgatgctgccggaaaaagcggattgactcctctgcatgtggccgctcattacgacaatcaaaaagtggcactgctcttgctggaccagggagccagtccacacgccgcagccaagaatggctacacgccgctgcatatcgccgcaaagaagaatcagatggatatagcaaccactctgctggagtacggggctgacgccaatgcggtcactaggcagggaatcgcttccgtccaccttgctgctcaagagggtcacgtggatatggttagcctcctgcttggccgtaatgccaacgtgaacctctccaataagagcgggctaaccccactgcatctcgcggctcaggaggaccgggtgaatgtggctgaggtgcttgtgaatcagggcgctcacgtggacgctcaaacgaagatgggatacacccctctccacgttggttgtcactacgggaacattaaaatcgtaaacttcctcctgcagcacagcgcaaaagtcaatgccaagaccaagaatgggtatacgcctctccatcaggccgctcaacaggggcatacccatatcataaacgtcctgctgcaaaacaatgcctctcccaatgagctgacagttaacggtaataccgcccttgggatagctcggaggttgggttacatctcagtggtcgacactttgaagatcgtgactgaggagaccatgacaacaactactgtcaccgaaaaacacaaaatgaatgtgccagaaaccatgaacgaagtgttagatatgagtgacgacgaagtaagaaaagctaacgccccagaaatgctgagcgacggtgagtacatctctgacgtggaggagggcaacaggtgtacatggtataaaattcccaaggtgcaagaatttaccgtgaagtctgaagacgcaatgactggagataccgacaaataccttggcccacaggatcttaaggagctgggcgatgactcccttcccgctgaaggctatatgggcttttccttaggggctcgatcagcatccctgagatctttctcttcagatagaagctataccctgaatagaagcagctacgcacgggacagcatgatgatagaggagctgctggtgccttctaaggagcagcacctcacattcaccagggaatttgatagcgattccttgaggcactactcatgggcagccgacacacttgacaatgtaaaccttgtctctagtcctattcactcggggttcttggtgtcgtttatggtcgacgctcgtgggggatcgatgaggggatctcgccaccatggtatgagaatcattataccccctcgaaagtgcacagccccaaccagaatcacatgccgcctcgtgaagcgccacaagctcgccaatccgccaccaatggttgaaggagagggcctggccagcagactggttgaaatggggccagctggcgcacagttccttggacccgttatagtcgaaattccccatttcggatccatgcgcggaaaggagcgcgagttaattgtactcagatccgagaacggggaaacgtggaaggagcaccagttcgattccaagaacgaagatctcactgagcttttaaatggtatggacgaggaactagattccccagaagagcttgggaaaaagaggatctgcagaatcataaccaaggattttccgcaatatttcgccgtggtgagccgcataaaacaggaatccaaccagatcgggcctgagggcggtatcctgtcatccaccactgtaccgctggtgcaggcatccttccctgaaggagcactgaccaaaaggattagggttggtctgcaggcccagcccgtgcccgacgaaatcgtgaagaaaatcttaggcaataaggccacatttagtccgatcgtcactgtcgaacccagacgccgtaagtttcacaaaccaatcactatgacaattcctgtcccgccaccttcaggcgagggcgtgagtaatgggtataaaggcgacaccaccccgaacctgagactactctgttccatcacagggggaacttcccctgcccagtgggaggatatcactggcactacaccactcacatttatcaaagattgcgtttctttcactacaaatgtaagtgctaggttttggcttgcagactgccaccaggtactggagaccgttggactggccacgcaactgtacagggagctgatctgcgtcccatatatggccaagttcgtggtcttcgctaaaatgaatgatcctgttgagagttccctgcgatgcttttgcatgactgacgataaggttgacaaaacccttgagcaacaggagaactttgaagaggtggcccgtagtaaggatatagaggtgctggaggggaagcctatctacgtggactgttacggtaatctggcaccattaaccaagggaggccagcagctagtcttcaatttttactcttttaaagagaacagactgccattctctattaaaattcgtgacaccagccaggaaccttgtggccgactcagctttttgaaagagccaaagacaacaaaaggactcccacaaactgccgtgtgtaacctgaacattacgctgcccgcacacaagaagattgagaagactgacaggaggcagagcttcgcatcactagcacttaggaaacgctactcctatctgaccgagcctggcatgtctcctcaatccccctgtgagagaaccgacattcggatggccattgtggccgaccatctcggccttagctggacagaattggccagggagctcaatttctcagtggacgagatcaatcaaatccgggtcgagaatccaaattcccttatttcccagagctttatgctgcttaagaagtgggtgactagggacgggaaaaacgcaaccaccgacgcactgacctctgtccttactaaaataaatcggattgatattgttactctcctcgaagggcctatctttgattatgggaatatttcagggactcgcagtttcgcggacgaaaacaatgtatttcacgaccctgtcgatggctacccttctctgcaagtcgaacttgaaacacctaccggcctccactataccccccctaccccattccagcaggacgattacttctctgatatctcttcaattgaatccccccttcgaacccccagccggctgagcgatgggctcgtacccagccagggtaacatcgaacacagcgctgatggtcctcccgtagtgacagcagaagatgcttcattggaggacagtaagcttgaagatagcgttccactgactgagatgcccgaagcggtggacgtggacgaaagtcaactcgagaacgtgtgtttatcctggcagaatgaaacctcatcaggcaatttagaaagctgtgctcaggcaaggcgcgtcaccgggggtctgctggatcggcttgatgattctccagatcagtgtcgtgacagtatcacgagctatctgaagggtgaagcaggcaaatttgaagcaaatggatcacatacagaaattaccccagaagccaaaacgaaatcgtacttccctgagtcccaaaatgacgtcgggaagcagtctaccaaggagaccttgaaaccaaaaatccacggctccggacacgttgaagagccagctagtccactggccgcataccaaaagtccctggaggagacctcaaaactcattatcgaagaaacgaagccctgcgtgcccgtctctatgaaaaagatgtctcggacctcccccgctgatggaaaaccacgactttccctgcacgaggaggaaggttcctccggatctgagcagaagcagggggaaggctttaaggtgaagaccaagaaggaaatccgacacgtcgaaaagaagagtcatagcta

SEQ ID NO: 214417 - DNA, 13134 bp, synthetic construct
  misc_feature 1..13134: note = Description of Artificial Sequence: Synthetic coding sequence
  source 1..13134: mol_type = other DNA
atggcacacgctgcctcccagctgaagaaaaacagggaccttgagataaatgcagaggaagagcccgagaagaagcgaaagcaccgaaagaggagtagggatcgcaagaagaagtcagatgccaatgcgtcctatctaagagctgccagagctggccacctggaaaaggccctcgactatattaaaaatggcgtggacattaacatttgcaaccagaatgggttaaatgcactgcacttagcctcaaaggagggacacgtagaagtggtctctgaactcctccagagagaagccaacgtggacgcagctaccaaaaaggggaacaccgctctgcatattgcttccctggccggacaagctgaggtcgtcaaagtcctggtaacaaatggcgcaaatgttaacgctcagagccaaaatggtttcaccccactttatatggctgctcaggagaaccacctggaagtggtaaaatttctgcttgataacggagccagccagagtcttgccacagaggacggtttcacgcctctggctgttgcattgcagcaaggccacgaccaggtggtgagcctactgttagagaacgacaccaaagggaaggtacgcttacccgcactccacatcgccgctcgcaaagatgataccaaagctgctgccctgctacttcagaatgataataacgccgacgtggagagcaagtccggctttacacctttacacattgccgcacattatgggaacataaacgtggcaacgctgctgttgaatagggctgcagctgtcgatttcaccgctaggaatgacatcacaccactgcacgttgcatccaaacggggtaatgccaatatggtgaagctcctcttggatcgaggagctaagatagatgccaagaccagagatggattgacacctctccactgtggagctaggagtgggcacgagcaggtggtggagatgctgctcgaccgcgctgcccctattctctccaagaccaagaacggactctctccccttcatatggccactcaaggagaccatcttaactgcgtgcagctactacttcagcataatgtgccagtggacgacgtgaccaacgattacctcactgctctgcacgttgctgcccactgtgggcactataaggtggctaaggtgttgctggacaagaaggccaacccgaacgcaaaggctttgaatggctttaccccgctgcacatagcttgcaagaagaatagaataaaggtgatggagcttctgctcaagcacggcgctagtatccaggccgtgactgagtcagggctcacacccattcatgtcgctgctttcatgggccatgtgaatatcgtgtcccaacttatgcaccacggcgctagtcctaatacaactaacgtcagaggtgagaccgctttgcacatggctgctaggagtggccaggccgaggtcgtccggtaccttgtccaggatggcgctcaggtggaggccaaagccaaagatgaccagactcctcttcatatctctgccaggttgggcaaggctgatattgtgcagcagctattgcagcagggagcttcaccaaacgccgctacaacaagtggttacacccctctacatctgtcagcgagggaaggtcacgaggatgtcgccgcattcctgttggatcatggtgcgagtcttagcattaccactaagaagggattcacgcctcttcacgttgcggctaagtatggtaagcttgaagttgccaacctgcttctgcagaagtctgccagcccggatgctgccggtaagagcggtctgaccccattacacgtagctgcgcactatgacaaccaaaaggtggccctgttactgttagatcagggcgctagcccccatgccgctgcaaagaatggatataccccgcttcatattgccgcaaagaagaatcagatggatattgcaacgaccttactagagtatggagctgacgccaacgcagtgacgagacaggggatcgcttcagttcacctagctgctcaagagggccatgtggatatggttagcctactgctcggccgaaacgccaatgtgaacctctccaataagagtggcctcacccccctgcacttagcagcacaggaggatcgcgttaatgttgctgaggtgttagtaaatcaaggtgcccacgtggatgctcaaactaaaatgggttatactcctctgcacgttgggtgtcattatggaaacattaaaatcgtgaacttcctgctgcaacactctgcaaaggtgaatgccaagacaaaaaatggctatacacccctccatcaggccgcacaacagggccacacacacattatcaacgttcttcttcaaaataacgccagccccaatgagcttaccgtgaatgggaatactgcattaggaatagctaggaggctgggttacatcagcgtggtggacaccttgaaaattgtgacagaggagacaatgactaccaccactgtcacggagaaacataaaatgaacgtacccgaaactatgaatgaggtgctggacatgagcgacgacgaagtcaggaaggccaatgcaccggaaatgttaagcgacggtgagtacatatctgacgtcgaagaaggcgaggatgcaatgaccggggacacagacaaatacctcggtccccaggacctcaaagagcttggtgacgatagcctccctgcagagggttatatgggattctctctcggggctcggtccgcctcacttaggtctttcagctcggacaggtcatacaccctgaaccggagttcttacgcccgagactctatgatgattgaggaactgctggtgccatctaaagagcagcacctgaccttcacgcgcgaattcgatagcgactccctccgtcactattcctgggcagccgatactttagataatgttaaccttgtctcttcccctatccactccggattcctcgtgtccttcatggttgacgccagggggggtagcatgagggggagccgacaccacggaatgaggatcataattcccccacgcaagtgtaccgcaccgacccggatcacatgtaggctagtgaagaggcacaagctggccaatccccctcctatggtggagggtgagggacttgccagtagactggtggagatgggacccgcaggtgcacagttcttggggcctgtgatagtggagatccctcactttgggagtatgcggggaaaggaacgggaactgatagtgctacgatccgagaacggagaaacgtggaaggagcaccagtttgactctaaaaacgaagacttgacggagctgttaaacggcatggacgaggaacttgatagcccggaggaactgggtaaaaagcgtatatgtaggatcataacaaaagatttcccccaatacttcgcagtcgtttcccgcataaaacaggagagcaatcaaattggacccgaaggtggcatactgtccagcactaccgtgcccttggttcaggctagtttccccgaaggcgcactcactaaacgaatccgggtggggctgcaggctcagcctgtgcccgatgaaatcgtgaaaaagatcctgggtaacaaggcaacttttagtcccattgttacagttgagccacgccgtcggaaatttcataagcctattacaatgactattccagtcccaccgccaagcggcgagggcgtctcaaacggctacaagggcgacaccactcctaaccttcgcctgctgtgctctataaccggcggtacatccccggcacagtgggaagatatcacggggactactccgctgaccttcataaaggattgcgttagttttactacaaatgtatctgcacgcttttggttagcagactgtcaccaggtgttagaaaccgtggggcttgcaacccagctgtacagggaactgatctgcgtgccctacatggccaagtttgtggtcttcgccaaaatgaatgatccagtggagtcaagcctgcgctgtttttgcatgactgacgacaaggtagataagactctcgagcagcaagagaacttcgaggaggtcgcaaggtccaaggatatcgaggtgcttgagggcaagcctatttacgtagactgctacggcaacctcgcgccactcaccaagggcggacaacagttggtattcaacttttattcttttaaggagaacaggctccctttttccatcaagattagggacaccagccaggagccatgcggccgactgtcttttctcaaggagccgaagactacgaaggggctcccacagaccgctgtttgcaacctaaatataacgttaccagcacacaagaaggagaccgaaagcgaccaggacgacgagatcgaaaagacagaccggagacaatccttcgcctctttagcgctgagaaaacgatacagttacctgactgaacccggaatgatcgagcgcagcaccggcgctacaagatcgcttcccacaacatactcctacaagccattcttttccacacgtccgtaccaatcatggacaacagcgcctattactgtccccggtcctgccaagtctgggttcacatctttatctagctcatccagcaatactccatccgcgtctccattgaagagcatatggtccgtgagtactccttcacccattaagtctactctgggagcatccacaaccagctcagtgaagagcatttccgatgttgcaagcccaatccggtcatttagaaccatgtcttccccgattaagacagttgtgagccaatccccttacaatattcaggtcagcagcggcacgttggcccgtgcccctgcagtcacagaagccacccccctcaaggggctggcctctaactccacattttcctctaggacatctcccgtgactactgccggatctcttctggagcgctcctccattacaatgacaccaccagcaagccctaaatcaaatatcaacatgtactcgtctagtctcccattcaaatccattattacaagcgcagcccctctgatttctagtccactaaagtctgtagtgagccccgttaagtcagcggtcgatgtgatatcaagcgccaagatcactatggcctcctctctctccagccccgtgaaacagatgcctggacacgctgaggtcgcactggtgaacggaagcatcagtcctcttaaatacccctcctcttccaccctcataaacggctgtaaagctaccgccacccttcaggagaaaattagttctgccactaattccgtgtctagtgtggtgtctgcagccactgatacagttgagaaggttttttctactacaaccgcgatgccctttagtcccctgcggtcctatgtaagtgccgctcctagtgcctttcagtccctgcgcacgccatcagcctcagctttgtacacgtcactggggagctcaatcagtgccactacaagcagcgtgacatccagcatcattacagtaccagtgtacagcgtggtgaacgtgctcccggaaccagctctaaaaaagctaccagactcgaacagctttacaaagtctgcagcagccctgctgagtcctataaaaacgctcaccacagagacccaccctcagccacacttttcccgcacgagtagtcctgtcaaatcctccttgttcttggccccttctgccttgaagctttcaactccctcgtctctgagttcaagtcaggagattctcaaggacgtcgctgagatgaaggaagatttgatgaggatgacggctattttgcagaccgacgttcctgaggagaaacccttccagcctgaactgcccaaggaaggcagaatcgacgacgaagagccctttaaaattgttgagaaagtgaaagaagatctggtgaaagtgtcggaaattctgaagaaagacgtctgcgttgacaacaaaggatctcccaagagcccaaaatcagacaagggccacagtcccgaggacgactggattgagtttagctccgaagagatcagggaggcacggcaacaggccgcagcatcccagagtccatccctgcccgagcgcgtccaggttaaggccaaagcagcttccgaaaaagattacaatctgaccaaagtgattgattacctgaccaacgacattggctcttcgtcgctgactaacctcaaatataagttcgaagatgccaagaaagatggtgaggaacgtcaaaaacgggtactaaagcctgcaattgctctgcaagaacacaagttgaagatgccaccagctagcatgcgcacctctacctcagagaaggagctttgtaaaatggcggattcattttttggcactgatacaattctggagagtccagatgattttagtcagcacgatcaggataagtctcccctgagcgactccgggttcgagacccggtccgaaaagacgccatctgctccacagagtgcagagagcaccggtcccaagccactgttccatgaggtccctatcccacctgtgataacagagactaggacggaggtggttcacgtgatcagatcctatgacccttctgctggcgacgtgcctcagacacagcccgaggaacccgtgtcccccaagccatcacccaccttcatggaactggaaccaaagcctaccacctcctcaattaaagaaaaagtgaaggccttccagatgaaagcaagctccgaggaggacgaccacaatcgagttttatccaaaggcatgcgggtgaaggaggaaactcatattaccaccactacgcgcatggtctatcattcccctccagggggagagggcgcaagcgagaggatcgaggaaaccatgtctgttcatgatattatgaaagcctttcagtccggcagagacccatccaaggagctggctgggctgttcgagcacaagagcgccgtctcccctgacgtacataaatctgccgcagagactagcgcacagcacgcagagaaggacaaccagatgaaacctaagctggagaggataattgaggtccacatcgagaaaggcaatcaggcagagccaaccgaggtcattattcgggagaccaagaagcatcctgagaaggaaatgtacgtttaccagaaggacctcagccgaggggacattaatctcaaggattttttacctgagaagcacgacgcgtttccatgtagcgaagaacagggtcaacaagaggaagaggaacttaccgccgaagagtcactgcctagttacttggagagctcgcgggtcaacaccccagtgagccaagaggaggatagccgtccctcaagtgcccagctcatctcagacgactcatacaagactttgaaactgctgtcccagcattcaatcgagtatcatgacgatgaattgtcagagctccgtggtgagagttatagattcgccgagaaaatgctgctcagtgagaaactcgacgtttcccactcagataccgaagagtcagttaccgaccatgccggaccaccatcctcagagctgcagggcagtgataaacgaagtcgagagaagatcgccacggctcctaaaaaggagattctgagtaaaatctacaaggatgtgtctgaaaacggggtcggaaaggtatcaaaggatgagcatttcgacaaagtgacagtgctgcattactccggaaacgtctcttctccaaagcacgccatgtggatgcggttcactgaggaccgcctggaccgaggccgagagaagttgatctatgaagatagagtggatcgcacagttaaggaagcggaagagaagctgactgaagtgagtcagttcttccgcgataaaacagagaaactgaacgacgagctgcagagccctgaaaagaaggctcggccaaagaacggtaaagaatactcgtcgcagtctcctacaagctcttctccggaaaaggttctcctgaccgagctacttgccagtaatgacgagtgggtgaaggcccgtcagcatggtcccgacggccaggggtttccaaaagccgaagaaaaagccccaagccttccatcttcccccgagaagatggttttgtcccagcaaacagaggacagcaagtcaaccgtggaagctaagggctcgatttcccagtctaaggcacctgacggcccacagagtggattccaactgaagcaatcaaaactcagctctatacgcttgaagttcgagcaggggactcatgcaaagtccaaagacatgagccaagaggaccgcaagtccgacggccagtcacggatccctgtgaaaaaaattcaggagtccaaactgcctgtgtaccaggtttttgcacgggagaaacaacagaaggccattgacctccccgatgagtccgtctcggtccagaaggatttcatggtgctgaagacaaaagacgaacatgcccagtctaacgaaatcgtggttaatgacagcgggagtgataatgtaaagaaacagcgtacagaaatgtcttcaaaagctatgcctgacagtttctcagagcagcaagccaaagacctggcctgtcacatcactagcgacctggccacccgcggaccatgggacaaaaaagtgttccggacttgggagtccagcggagctacgaacaacaaaagtcagaaggaaaagctgtctcacgtattagtgcacgatgtcagagagaatcacataggacatcccgagagcaagtcagtcgaccagaagaatgaattcatgtccgtcaccgagagggaaagaaaactcttgaccaatgggtccctgagtgagattaaggagatgaccgtgaagagtccttctaagaaggtgttatatcgcgaatatgtcgtcaaggagggcgaccacccaggaggccttctcgaccagccctcgagacggagtgagtcatctgcagtgagccatattccggtgcgtgtcgcggatgaacgaagaatgctatcttctaacatccccgacgggttctgcgagcaaagcgcttttcccaaacatgagctgtctcaaaaattgagtcagagctcaatgagcaaagaaactgtggagacacaacattttaatagcattgaggacgagaaggttacttactccgagatatcaaaggtgtccaaacatcagagttatgtggggctgtgtccccctctggaagaaaccgaaacatctcccacaaagagtccagattcactcgaattcagccccggaaaagaatccccatcctcagacgtattcgatcacagcccaattgacgggctggagaaactagcccctctggcccagactgaagggggaaaggagattaagaccctgcctgtctatgtctctttcgtacaagtgggtaaacaatacgagaaggagatccaacaggggggtgtcaagaagattatttcccaggaatgcaagacagtgcaagaaactagaggcaccttctataccacacggcagcaaaagcagcccccttcccctcaggggagccctgaggacgatacgctcgagcaggtctcattcttggattcctctggaaagagtcctctgactcccgaaacaccctcttccgaggaggtgagttacgagtttaccagcaaaactcccgattcccttattgcctacattcctggtaaaccgtccccaataccagaggtgtctgaggagtctgaggaagaggagcaggctaaaagcacttccttaaagcaaaccaccgtggaagaaacggcggttgagcgagagatgcccaatgacgtcagcaaagattctaaccagcggcctaaaaacaatagagtggcctacatcgaatttccgcctcctcctcccctggatgctgaccagattgaaagcgataaaaagcatcattacctccccgagaaggaggtggacatgatcgaggtgaacctacaagatgaacacgataaataccagctggctgaacctgtcatcagggttcagcccccttcccctgtaccacctggcgcagacgtcagtgatagctcagatgatgagtctatttaccagcctgtgcccgtaaagaaatatacattcaagttgaaggaggtggatgatgaacagaaggagaaaccaaaagcgtccgctgaaaaggcatcaaatcaaaaagaactggagagcaacgggtcaggcaaggataatgaattcggactggggcttgacagtcctcagaatgagatcgcacagaacggcaacaatgaccagtctatcactgagtgcagcatcgccacaactgctgaattctcacatgacaccgatgcaaccgagattgactccctcgacggatatgatctccaggacgaagatgatggccttactgagtccgacagcaaactgcctatccaggccatggagataaagaaagacatttggaacactgaggggatcctgaagccagcagataggtcattttctcagtccaaacttgaagttatcgaggaagaaggcaaggtgggccctgatgaggataaaccaccttccaagagttctagcagcgagaaaactcctgataagactgaccagaagtctggtgctcagttttttacactcgaaggcaggcatcctgatcggtctgttttccctgatacttatttctcatacaaggtggatgaggagttcgccacgcccttcaaaaccgtggcgacgaaaggcctcgactttgatccttggagcaacaaccgcggtgatgatgaggtattcgactcaaaaagtcgtgaagacgaaaccaaaccattcggccttgccgtggaagataggtcacctgcgactactccagatacaacacccgcacgcacgcccacggacgagagcactcctacatccgagccaaacccgtttcccttccacgagggtaagatgtttgaaatgacccgatcaggggcaatcgatatgtccaagcgagactttgttgaagagcggctgcaatttttccagataggcgaacacacctcagaaggcaaatccggagaccagggggagggggataaatctatggttaccgccactccgcagccacaaagcggggatactaccgtggaaaccaacttggagcgaaatgtggagacacctacagtggagccaaacccctccatcccaacaagtggtgagtgccaagaggggacaagcagctcaggcagcctagaaaagtcagcagccgctaccaacacctctaaggtggacccaaagctgcggacccctatcaagatggggatttcagcaagcacgatgacgatgaaaaaggagggaccaggggagatcaccgataaaatcgaggccgtgatgacatcatgtcaaggactggagaacgaaaccatcacaatgattagtaacaccgctaactcacaaatgggtgtaaggccccatgaaaagcacgacttccagaaagataatttcaacaataacaacaatctagattcttccacaattcaaacggataacatcatgtctaatatcgttctgactgaacactccgccccaacttgcactactgagaaggacaatccagttaaggtgtccagcggaaagaaaaccggcgtattgcaggggcactgtgtacgcgataaacagaaagttctcggtgagcagcagaaaaccaaggagctaattggtattcggcagaaatctaaattgccaattaaggcaactagcccgaaagatacctttccccctaaccacatgagcaatacgaaagcaagtaaaatgaagcaagtgtcacagagcgagaagactaaagcactgaccacctccagctgtgtggatgtcaagtctcggatcccggtcaagaatactcacagggataacattatagccgtaagaaaggcctgtgccacacagaaacagggccagcctgagaagggaaaggccaaacagctccctagcaaactgccggtcaaggtgcgcagcacgtgcgttaccacaacaactaccaccgcgactaccacgaccaccacaaccacaaccactactactagttgtactgtcaaagtgagaaaaagtcaacttaaggaggtttgcaaacacagcatcgagtactttaaaggaatctccggggaaacgctgaagctagtggataggctgagcgaggaagaaaaaaaaatgcaatccgagctgtccgatgaagaggagtccaccagccgaaacacctcgctatccgaaacatctagagggggacagcccagcgtgaccaccaaatcagccagagacaaaaagaccgaggccgcacctctgaagtccaagagcgaaaaagcgggaagcgagaagcgcagctccagaaggactggcccacagagcccttgcgagagaaccgacatcagaatggctattgtggccgatcacctgggcctgtcctggaccgaactcgccagggagctgaatttctctgttgacgagatcaatcagattagagtcgaaaaccctaactccctcatttctcagtcattcatgttacttaagaagtgggtgacacgggatgggaaaaatgccactacagacgcacttaccagcgtcttaacaaagatcaacagaatcgacatcgtcacgcttctcgaaggacccatctttgattatgggaatataagtggtacccggagttttgccgacgagaataacgtattccacgacccggtggacggttggcagaacgagacttcatctggcaacctcgaatcatgtgcccaggccaggcgagtgaccgggggtctgctggataggctggacgattctcctgaccagtgtagagatagtatcacctcttatctgaaaggcgaggccggaaaattcgaggccaacggcagccatactgaaatcacaccagaggctaagaccaagtcatacttcccagagtcgcaaaatgacgtaggcaaacagtccacaaaagagactctgaagcctaagattcatggctctggacacgtcgaagaaccagccagtcccctggctgcctaccaaaagagcctcgaagagacatcgaagctgatcattgaagaaacaaagccatgcgtgccagtttccatgaagaaaatgtctaggacaagtccagcagacggaaagccgcgtctatcacttcatgaggaggagggctctagcggaagcgagcagaagcagggcgaaggtttcaaggtgaagaccaagaaggagatcagacacgttgagaaaaagtctcattcatat

SEQ ID NO: 214418 - DNA, 3006 bp, synthetic construct
  misc_feature 1..3006: note = Description of Artificial Sequence: Synthetic coding sequence
  source 1..3006: mol_type = other DNA
atggccctgccacaaagcgaagacgcaatgaccggggatacagataaatacctggggccacaggacctcaaggagttgggagatgactctcttcctgccgaagggtacatggggtttagtttgggggcacggtccgcatccctacgctccttttcgagcgatcgcagctacaccctgaatcgatcttcttacgccagagattcaatgatgatagaggagcttctagtgccaagcaaagaacagcatcttacctttacccgggagttcgattcagattctcttcggcattattcctgggcagctgatacactcgataatgtgaacctagtatcttcccccattcactccggctttcttgtaagttttatggttgatgccagagggggaagtatgagaggatcgagacatcacggaatgcgaatcattatccctcctcggaaatgtactgctcctactagaattacatgcaggctggtgaagcgtcacaagctggccaatcctccaccgatggtggagggagaagggctggcctcccggcttgtggagatgggcccagccggtgcgcagtttctgggacccgtcatcgtggaaatccctcattttggatccatgcggggaaaggaaagggagttaatcgtcctgagatctgagaacggcgaaacttggaaggagcaccaattcgattccaaaaacgaagaccttacggaactacttaatgggatggacgaagagctcgacagccccgaggaattgggcaagaaacggatctgccgtatcataactaaagatttcccccaatactttgctgtggtctcccgaatcaaacaggaatccaaccagatcgggcctgaggggggtattctgtcttccactaccgttcccctggttcaggcctcttttcccgagggcgcactcacgaaacggatcagagtggggctccaggcacagcctgtgccagacgagatcgtgaaaaagatcctggggaacaaggccaccttcagtcctatcgttacagttgagccacgtaggagaaagtttcacaagccgattaccatgacaattccagtccctccaccttcgggcgagggagtcagcaacggctataagggcgacaccacccctaacttacgcctgctgtgctctattacaggtggtacgagccccgcacagtgggaggatataaccggaaccacgccattaacattcatcaaggactgtgtcagttttactaccaacgtttctgctagattttggctggcagattgccatcaggtgctggagacagttggcttggccacgcagctgtacagggaactgatatgcgtgccctacatggcgaaattcgtggtgtttgcaaagatgaatgatcccgttgagtcctcgctgagatgtttctgtatgaccgatgataaggtggacaaaactctggaacaacaggagaattttgaggaggtggctagatctaaggacatcgaagtgctggaaggtaagcccatatacgtagactgctatgggaacctggcacccctgacaaaaggtggccaacaacttgtgttcaatttctatagcttcaaagagaataggctgcccttctctattaagatccgggatacaagccaggagccatgcggaaggttatcattcctgaaggagccgaaaacaactaagggattgcctcaaacagctgtgtgcaacttgaatatcaccttgcctgctcacaaaaaaatcgaaaaaaccgataggcgccaaagctttgcttctctcgccctgcgcaagcggtatagttatctcactgaacctggaatgtccccacagtctccctgtgagagaaccgacataagaatggccattgtggcggatcatcttggcctgagctggaccgaactggccagagaattgaacttctccgtcgacgaaattaaccaaataagagttgaaaatcccaactcccttatcagtcagtctttcatgctgcttaaaaaatgggtcacccgcgacgggaaaaacgccactaccgacgccctaacatccgtgctaacaaagattaatcgcattgatatcgttacattattggaggggccaatcttcgactatgggaacatcagcggtacgcgttcatttgctgacgaaaataatgtgttccatgacccagtggatggctatccctccctgcaggtggaactggagacacccacagggctgcattacacacccccaaccccctttcaacaggacgattatttctcagacatttcatcaatcgaatcacctctgaggacgccatcaaggctgtccgacggtctcgtgccctctcagggaaacatcgaacactctgccgatgggccacctgtcgtcacagccgaggatgcgtcactggaagacagcaaactcgaggacagcgtcccccttacagagatgcctgaggctgtggacgtcgacgagtcgcaactggaaaacgtgtgcctttcctggcagaatgagacctcaagtggcaacttggaatcctgtgcccaggccagacgcgtgaccggaggactgctggatcggctggacgacagtcctgaccagtgtcgggattctattactagttatctcaaaggggaagccggaaagttcgaggcaaatggctctcacaccgagataacccctgaggccaaaactaaaagttactttcccgagtctcagaatgacgtggggaagcagtccaccaaagagaccctaaagccaaagatccacggctcgggacatgtcgaggagcccgcatctccactggcagcgtaccagaagtctttggaggagacctcaaagttaattatcgaggagaccaagccgtgtgtgcctgtgagtatgaagaaaatgtcacgtacctctccagcagatgggaagccacgtctctctttgcacgaggaggaggggagtagcggtagcgaacagaaacagggggagggctttaaggtcaaaaccaagaaggaaattaggcacgtcgagaaaaagtctcatagttag

SEQ ID NO: 214419 - DNA, 3306 bp, synthetic construct
  misc_feature 1..3306: note = Description of Artificial Sequence: Synthetic coding sequence
  source 1..3306: mol_type = other DNA
atgtcagaggagcccaaggaaaaaaacgccaaaccagcacaccggaagaggaaaggcaagaagtcggatgccaacgcgtcttatctgcgggcagcacgagctggtcacttggagaaagctcttgactacatctctgtcgtagacactttaaaaattgtgacagaagaaacaatgacaacgactaccgtgactgaaaaacataagatgaatgttcccgagacaatgaacgaagtgctagatatgtccgatgacgaggtgcgaaaggctaacgcgcctgagatgctatctgacggcgaatatatcagcgacgttgaagagggagaggatgctatgacaggagacaccgacaaatacctggggccacaggatctcaaggaactgggggatgacagcctgcctgcagaaggatatatgggattcagcctgggcgctagaagtgcatcccttaggtcattctcaagtgatcgatcttacactcttaatcgttcatcttacgccagagacagcatgatgatagaggaactgctggtgccaagtaaggaacagcatttgacatttaccagggagtttgactctgactcactgcggcattacagttgggcggcagacaccttagacaacgtgaacctggtgtctagccccatccacagcggatttcttgtgagcttcatggtggatgcacggggagggagcatgcgcggatcacgacatcatggcatgcgtatcatcatccctcctcgaaaatgcacagcaccgactaggatcacatgcaggcttgtaaaaaggcacaagttagctaacccacctcccatggtcgagggggaagggcttgcttcgcgcctcgtagaaatggggcctgccggtgcgcaatttctggggccagtaatcgtggaaattccacatttcgggtccatgcgaggcaaggagagagagctcattgtactccgatcggagaatggtgaaacttggaaggagcaccagttcgactctaagaatgaagatctgaccgagctgctcaatggcatggatgaggaactggattctcccgaggaactcgggaagaaaagaatttgtaggattatcacaaaggactttccacagtattttgctgtggtaagcaggattaaacaggaatccaaccagatcggccctgagggtggcatcctcagctctactacagtacccttagtgcaggcttcattccctgagggcgctctgactaaaaggatcagggttggccttcaagctcagccagtccccgacgagattgtgaagaagattctaggaaataaggccacgtttagtcccattgtgaccgtagaacccaggagacggaagttccacaaaccgatcaccatgaccatccccgtccctcctccatccggcgagggagtaagcaacggctataaaggcgacacaacccccaatcttaggctcctgtgctcaataacaggtggcacctcccccgcacagtgggaagatatcacaggcacaaccccgctcacgtttatcaaagattgtgtttctttcactacgaacgtcagtgcccgtttttggttggccgattgccaccaggtgcttgagaccgtggggctggctactcagctgtatagagagctcatctgcgttccctacatggccaagttcgtggttttcgctaagatgaacgacccagtagaatcatccttgaggtgcttttgcatgactgacgataaggttgataagacattggagcagcaggaaaatttcgaagaggtcgctagaagcaaggacatcgaggtgctggagggcaagcccatttacgtcgactgctacggcaatctcgctcctttgacaaaaggagggcaacagctggtctttaatttctatagcttcaaggagaatcgtttaccttttagcatcaagatccgcgacacgtcacaggagccatgcggacgactaagcttcctgaaggaacctaagaccacgaagggtttacctcaaacggctgtctgcaacttgaatatcaccctgccagcccacaagaagattgagaagaccgacagacggcaatccttcgccagcctggccttgcggaagcgctactcttacctcacagaacctggcatgagtccccaatctccttgtgagcgcaccgatatcaggatggccatcgtggctgaccaccttggcctttcctggaccgagctcgcccgagagcttaacttctctgtggatgagatcaaccaaattagggtggagaaccccaactctcttatcagccaaagctttatgctacttaaaaaatgggtgacccgggacggcaaaaatgctacaacagacgcgctcaccagtgtgctgaccaaaataaatagaatcgacattgtgacactcttggaagggcctattttcgattatggaaatatctcaggcacccgctcgttcgccgatgagaacaacgtttttcatgaccccgtggacggataccctagcctgcaggtggagctagaaacgccgacaggactccattatacccctccaacaccctttcagcaagacgattacttctccgacatcagctcgattgagtcaccattgcggacacccagtcgattatctgatgggttggttccaagccagggcaatatagaacattctgctgacgggcctcctgtagtgaccgccgaggacgcttctctagaggacagtaagcttgaggatagtgtacctctgactgagatgccggaggccgtcgatgtggacgaatcacagctggagaatgtatgcctgagttggcagaatgagacctctagcggtaacttggaaagctgcgctcaggcacggagagtgacaggaggcttactggaccgcctcgacgacagccccgatcaatgccgcgactccatcacgtcctacctgaagggagaagctgggaagttcgaggctaacggaagccacacagagatcactcccgaggcaaagactaaatcgtactttcccgagtcccagaacgacgtcggtaaacagtctactaaggaaacccttaaacccaaaatccacgggtccgggcacgtcgaagaaccggcaagccccctggccgcttatcagaaaagtttggaagagacgagtaagctcatcattgaagagacaaagccatgtgtgcccgtgtctatgaagaaaatgtcccgcacgtctccagccgatggcaaacccagactaagtctgcacgaagaggagggctcttctggcagtgagcaaaaaggcgaaggattcaaggtgaagaccaaaaaggagatccgccacgtggagaaaaagtctcactcctag

SEQ ID NO: 214420 - DNA, 3387 bp, synthetic construct
  misc_feature 1..3387: note = Description of Artificial Sequence: Synthetic coding sequence
  source 1..3387: mol_type = other DNA
atggcaacacagggggaccacctgaactgcgtgcagctgctactacagcataacgtgcccgtggacgatgtcaccaatgactacctcaccgcactccacgtagccgctcactgcggacattacaaggttgcgaaagtgttactggacaagaaggctaaccctaacgctaaggccctcaacgggtttacacccttgcacattgcatgcaagaaaaaccgaatcaaagtcatggaattgctactcaagcatggggctagcatccaggctgtaactgaatccggtctgactccgatccatgtggccgcttttatgggtcacgtcaatatagtatcacagttgatgcaccacggtgcttcccccaataccacaaatgtccggggagagactgcactccacatggccgcacgatctggccaagccgaggtggtgagatacctggtccaggacggagcccaggttgaagccaaggccaaagacgatcagacacctcttcacatctcagcgagactgggtaaagctgacatcgtacaacagctgctgcagcagggggcttcacccaacgcagcgacgactagcggctacacccctttacacctgtctgcgagggaaggtcacgaggatgtcgctgccttccttttggaccacggcgcttccctgtccatcaccacgaaaaaggggttcactccattacatgtggcagccaaatatgggaaactcgaggttgctaatctactacttcagaaaagtgcaagtcccgatgctgccggaaagtccggactcacacctctccacgttgcagcccactacgacaatcagaaggtggcgttgctgctgctcgatcagggagcctccccacacgcggctgcaaagaacggatacacgccactacacatcgccgctaaaaaaaaccagatggacattgccactactctgctggagtacggcgctgatgctaacgccgttacacggcaaggtatagccagcgtgcacctggcagcccaggagggccacgtggatatggtgtctctcctgttggggagaaatgccaatgttaacttatccaacaagagtggcctgacccctctacacctagccgcacaggaggacagagtaaatgtggcggaggtgctggtgaatcagggagcgcacgtggatgcccagaccaaaatggggtacaccccccttcacgtcggttgccactacggtaatattaaaatcgtgaactttctgctccagcacagtgctaaagtgaacgccaagacaaagaatgggtatacacctttgcaccaagcagcacagcagggacacactcacatcatcaatgtgctacttcagaacaacgcctctccaaacgagctgacggtcaatggaaatacagcattaggtatagctaggcggcttggctacatctccgtcgtagacactctgaagatcgtgacagaggagacaatgacaacaaccaccgttacagaaaagcataaaatgaatgtccccgaaacaatgaacgaagtactggatatgtccgacgacgagggggaggatgccatgactggggacacagacaagtatctgggtccccaggatcttaaggagttaggggacgactctctacccgcagaaggttatatggggtttagcctcggggcacgctccgcaagcagcgatcggtcatacactctgaatcggtccagctatgcccgtgacagtatgatgattgaagaattactggtccctagtaaggaacaacatctgactttcacccgggagtttgattccgattctcttagacattatagttgggccgctgacacccttgacaacgtcaatctggtctctagtcctattcatagcggcttcctagtcagcttcatggtcgacgctagaggagggagcatgcggggttcaaggcatcatggcatgcgcatcattatccccccaagaaaatgcacggcccctacacggatcacctgccggctggttaagaggcacaagcttgcaaacccccctccaatggtcgaaggagagggcctcgcgtctcggttagtggagatgggccctgcaggggctcagttccttggtcccgttattgtggaaatcccacatttcggttctatgaggggcaaggagagggagctcatagtgttgagaagcgaaaacggtgagacctggaaggagcatcaatttgatagtaagaatgaggatctgaccgaactcctgaacggaatggacgaagagctcgactcaccagaagaattggggaagaagcgcatttgtagaattatcacgaaagactttcctcagtacttcgctgtggtgtcaagaattaaacaagagtcgaatcagataggcccagaaggcggtattttatccagcactacggtccccctggtgcaggcctcgttccctgaaggggcacttaccaaacggatcagggtcgggttgcaggctcagcccgtcccggatgaaatagtaaaaaagatcctcggcaacaaagccactttttccccaattgtcactgttgagccaagacgtcgcaagttccacaaaccgatcacaatgaccatacccgttccacctccttcgggagagggcgtgtctaacggctataaaggagacaccacccctaacttgaggctgttatgcagcatcacagggggtacatctcccgctcagtgggaggacataaccggcacaacgccattgactttcatcaaagactgtgttagcttcacaactaacgtgagtgctcgcttttggctggctgactgccatcaggtgttagaaaccgtgggtctagccacgcagctgtatcgcgaattgatttgtgtgccgtatatggcaaagttcgtggtatttgccaagatgaatgaccctgtggaaagctccctgcgctgcttctgtatgaccgacgacaaggttgacaaaacactggaacagcaggaaaattttgaagaggtggccagaagtaaagatattgaggttctcgaggggaaaccgatctacgtcgactgctatggaaacttggcacccctgactaagggtggccagcaattagtgttcaatttctactcttttaaggaaaatagattgcccttttctatcaagattcgagatacatcccaggagccttgtggaaggctcagtttcttaaaagagcccaaaacaaccaagggcctgccgcagacagccgtttgtaatttgaatatcacactacctgcgcacaaaaaaattgagaagacggatcgccgacagagttttgcatcgctggctttgcggaaaaggtatagctacttgaccgaacctgggatgtccgagtttcctaataccttcacgaatacgtggatttttatcagacgtgatatctttagcattcagactaaattctag

SEQ ID NO: 214421 - DNA, 5543 bp, synthetic construct
  misc_feature 1..5543: note = Description of Artificial Sequence: Synthetic coding sequence
  source 1..5543: mol_type = other DNA
tctgatgcaaatgcctcttatttacgggctgcacgagccggtcatctggagaaggcccttgattatattaagaacggcgtcgacattaatatatgcaatcagaatggtctgaatgcactgcacctggccagcaaagaagggcacgtcgaggttgtttcggaacttcttcagcgggaggccaatgtggacgctgccaccaagaaggggaacaccgcattacatattgcctcattggccggtcaggcagaggtcgttaaagtactggtcactaacggcgctaacgtcaatgcacagagtcagaatggctttacacctctgtatatggcagctcaggagaatcatctcgaggtggtaaaatttctacttgataatggcgcaagccagtccctggccacggaagatggtttcacccctcttgctgtggctctacagcaaggccatgaccaagttgtctcactcttactcgagaatgacaccaaggggaaagtgcggctccccgctcttcacatcgcagctcgaaaagacgatactaaagcagctgccctgcttcttcaaaacgataacaatgccgatgtggaatctaagagtggtttcactccacttcacatcgcagcacactacggaaacattaatgtcgcaacactccttctgaacagggctgcagccgtggacttcaccgctcggaatgacattacgccactccacgttgctagcaagcggggaaacgccaatatggtgaagttactcctcgacagaggcgctaagatcgacgccaaaacgcgcgacggattgacaccactgcactgcggagctcgatcgggccatgaacaggtcgtcgagatgttactcgaccgggctgcccctatactgagtaaaacaaaaaacggcttgtccccacttcacatggcaactcagggggatcacctgaactgcgtgcagctactgctccaacataacgttccagttgatgacgttaccaatgattatctgaccgctctccacgtggctgcccactgcggccactacaaagtggcgaaagtgctgctcgacaaaaaggcgaatcccaatgcaaaagccctgaacgggttcacccctctccatatcgcatgtaagaaaaataggatcaaagttatggaactgcttctcaagcacggcgctagcattcaagccgtgaccgaatcaggattgacaccaattcacgtggcggcttttatgggccatgttaacatcgtgtcacagctgatgcaccatggagcttctccaaatacgactaatgtgaggggtgaaaccgctctgcatatggccgctcgaagcgggcaggcagaagtggttagataccttgtccaggacggtgcacaggtagaggccaaagctaaagatgaccagacccccttacatatcagcgcaaggctggggaaagctgacatcgtccagcagctgttacagcaaggagcctctcccaacgccgctactacatccggctatacccctcttcatctgagcgctcgtgagggccacgaggacgtggccgctttcctccttgaccacggagccagcctcagcattacaacaaagaaaggttttacacctttgcacgtggctgcaaaatacggaaagttggaggtggctaacctcttgttgcagaagtccgccagccccgacgcagccggaaagtctggtctgacgccactacatgtggctgcacattacgacaaccagaaggtcgccctgttgctgcttgatcagggagccagtccgcacgctgcagcaaaaaacggttatacaccactgcacatcgcggcaaagaaaaatcagatggacatcgcgacgactctattggaatatggtgccgacgctaatgccgtgacacgtcagggtatcgcgtcagtccatttagccgcacaggagggacacgtcgatatggttagtttgctcctggggcgaaatgcaaacgtaaatctttctaataagagcggtctgacccccctccatctcgccgcacaggaggacagggtaaatgtggctgaggtgctcgtcaaccaaggggctcatgtggacgcacagacaaaaatgggctatacaccgcttcacgtcggctgccattacggcaacataaaaattgtgaattttcttctccagcactccgctaaagtcaacgctaagactaaaaacggctataccccgctccaccaagctgcacaacaggggcacacacatataattaacgtcctgttacagaacaacgcttcccccaatgaactgacagtgaacggaaatacagcgctcggcattgcacgaaggctgggctacatctcagtggttgacacattgaaaattgtcacagaggagactatgaccacaaccacagtcactgagaaacacaagatgaatgtgccagaaacaatgaacgaggtactcgatatgagcgatgacgaagttcggaaggcaaacgctcctgagatgttgtcagacggcgaatacattagtgacgttgaggaaggaaataggtgcacgtggtataaaattcccaaggtgcaagaatttaccgtaaaatccgaagatgccatgacaggcgacactgataagtatcttggcccacaggatttgaaggagttaggcgacgatagcttgcccgcagaaggatacatgggatttagtctcggcgctcgatccgcttccctgcgcagcttctcgtccgatcgaagttacacactgaacagaagctcctatgctcgcgactcgatgatgattgaggagctactagtgccatctaaagagcagcatctcactttcaccagagagttcgactccgatagcctgagacattacagttgggccgctgacacacttgacaatgttaatttggttagctcacccatccactctggctttctggtgtctttcatggttgatgcgcgtggtgggagtatgaggggttcacgacatcacggcatgcgcatcattatcccgccaaggaaatgtaccgccccaacccggattacctgtcggcttgtgaagaggcacaagctcgccaatcctccacccatggttgaaggagagggtctggctagtaggctcgtggagatgggacccgctggtgcccagttcctcggcccagtcattgtggaaattccacacttcgggagcatgcgaggcaaagaaagggagcttattgtgctaaggtctgaaaacggggagacctggaaggagcatcaattcgacagcaaaaatgaggacctgacagagctcctgaacggcatggatgaagaactggatagccccgaggaactcgggaagaagaggatctgcagaattataactaaagatttcccacaatacttcgccgtcgtgtctcggattaaacaggaatccaatcaaatcggtcccgagggcggaatcttgagctctacgaccgtccctctggtccaagccagcttcccagagggcgctttaacaaagaggattcgtgtagggctgcaggcccaaccagtccctgacgagatcgtaaaaaagattctcggaaataaagcgacattttctcctattgtcacggttgaacctcgtagaagaaagttccacaaacctataacgatgaccatccccgtaccaccaccttcaggcgaaggcgtgtctaacgggtataaaggggatacgactcctaacctgaggctgctatgctccattactggaggtaccagccctgcacaatgggaggacatcacaggaaccaccccactgacgttcattaaggactgcgtctcatttaccaccaacgtgtcagccaggttctggcttgctgattgccaccaggtgcttgagacagtgggcttggctactcaactgtacagggagctcatatgcgtgccctacatggccaagtttgtcgtgttcgctaaaatgaacgatccagtcgagagttctctcaggtgtttctgcatgactgacgataaggttgacaagactcttgaacaacaagaaaatttcgaagaagtcgcaagatcaaaagacattgaggtcctcgaaggcaaacctatctacgtggactgctacggtaatctcgctccactaactaaaggtggccagcagctggtttttaatttctacagcttcaaggaaaataggctgcctttctcaattaagattagggatacatctcaagagccttgtggaagactgtccttcttgaaagagcctaagactaccaaggggctacctcaaaccgccgtttgcaacctgaatatcaccttgcccgctcataagaagattgaaaagaccgaccgtcgacagtcgttcgcctccctcgccttacggaagcggtactcgtacctaaccgaacccggaatgagcccccagagcccctgtgagcgtacagacatacggatggctattgtggccgatcacttgggactcagctggacagaactggccagagagttgaacttttcagtggatgagatcaaccagatccgcgtcgaaaaccccaacagcctcatctcccagagtttcatgctgctgaagaaatgggtgactcgcgatggaaagaacgctactaccgatgcactgaccagcgtgctgaccaagatcaaccgaattgacatcgtgactctgctggaaggccctatcttcgactatggcaatatcagcggaacacggagcttcgctgacgagaacaatgtattccatgacccggtggacggctatccctcactccaggtggaattggagactcccactggcctgcactatactcccccaacaccatttcagcaggatgattattttagtgatatctcgtctatcgagagtccactccgaaccccctctcgcctcagcgatgggctggtgccctcccaaggcaatatcgaacacagtgcagacggacccccagtggtgactgctgaagatgccagcctggaggacagtaaactagaggacagcgtacccctcacggagatgccagaagctgtcgacgtcgatgagtcccagcttgaaaacgtctgtctctcctggcagaacgaaacatcttctgggaacttggagagctgcgcccaggccaggcgagtgaccggtggccttctggaccgactggacgactccccagatcagtgtcgagattctattacaagctatctgaagggtgaggcagggaagttcgaggcgaacgggtcccacacagagatcacgccagaggcgaaaaccaagtcatactttccggagagtcagaacgatgttggaaaacagtccaccaaagaaaccctcaagccgaaaatacacggtagcggccatgtcgaggaacctgcatctcccctggcggcataccagaaaagcctggaggaaactagcaagctgattatcgaggagactaaaccatgcgtgccagtcagcatgaaaaagatgagtcgcacctcgccagccgacggcaaaccccgtctcagcctacatgaagaggaggggtccagcggatctgagcaaaaacaaggagaaggctttaaggtgaagaccaagaaagagatccgccatgttgagaaaaagtcacactcata

SEQ ID NO: 214422 - DNA, 3354 bp, synthetic construct
  misc_feature 1..3354: note = Description of Artificial Sequence: Synthetic coding sequence
  source 1..3354: mol_type = other DNA
atggccacacagggagatcacctcaactgcgtacagttgctgctgcaacataatgtgcctgtcgacgacgtgactaatgactatttaactgcgctgcatgtcgcagcacactgcggccactataaggtcgcgaaagtactcctcgacaaaaaagccaatccgaacgcaaaggctctgaacggatttacaccgctgcatattgcatgcaagaaaaacagaattaaggtgatggagctgctgctcaagcacggagcctccattcaggccgtcaccgagagtggccttacccccattcacgtggctgccttcatggggcacgtgaacatcgtgtcacagctgatgcatcacggtgcatcccctaataccactaacgtgcgaggtgagacagcactccacatggcagcacggtccgggcaggccgaagtagttcggtacctggtacaggacggagctcaggtagaggcaaaggcaaaggacgaccagactcctctgcacatcagcgctcggctgggtaaagccgatatagtgcagcaactgctgcagcagggggcttctcccaatgctgcaaccacaagtggttacactccgctccacttaagtgctagggaaggccacgaggatgttgcagcattcctccttgatcatggtgcatccctatccataaccaccaaaaagggattcactcctttacatgtcgccgctaaatatggaaaacttgaggtggccaacctgctactccagaaatccgcttcaccggacgccgctggtaagagcgggttaacacccttacacgtggccgctcactacgacaatcagaaggtagccctgctgttgctggatcagggagcctcccctcacgccgctgcaaaaaacggctacactcccctgcatattgctgccaagaagaatcagatggacatcgctactaccctgcttgaatatggcgctgacgccaatgccgtcactagacagggcatcgcctcggtccacctcgcagcccaggaaggtcatgtagacatggtgtctctgctcctgggccgtaacgccaatgatagtggactgactcccctgcatcttgccgctcaggaggacagggtgaacgtagcagaggtgctggttaatcagggtgctcacgtagatgctcagacaaagatgggatatactccactgcatgtcggctgtcactatggtaacataaagatcgtaaactttctgttgcagcactcagctaaagttaacgcaaagacgaaaaatggctatacccctctccaccaggctgcacaacagggacacactcatattattaatgttctgctacagaacaacgcatcccccaacgaacttaccgtgaacggcaatacggccctggggatcgcgcgtagactcggatacattagtgtggttgatactctcaaaattgtgacagaggaaaccatgaccaccacaaccgttacagaaaaacacaagatgaacgtgccagagacgatgaacgaggttttggatatgtcagacgacgagggggaagatgcgatgaccggtgacaccgacaaatatttgggccctcaggatcttaaggaacttggcgatgatagtctcccggcagagggctatatgggcttcagtttgggcgctaggagtgcttcactgcgcagtttctcctccgacagatcttacacgctgaatcgtagcagctacgcccgagacagtatgatgattgaggaactgctcgtcccttccaaggagcagcacctgacttttacacgcgagtttgactcagactcccttaggcactacagctgggctgctgataccctagacaatgtgaatctcgttagcagcccaattcactccggttttctagtgagcttcatggtggatgccagaggaggctcaatgcggggatcacggcaccacgggatgagaatcatcatcccacccaggaagtgcactgctcccacaagaatcacctgcagattggtgaagcgccataagttggcaaatccccctccaatggtggagggcgaagggctagcaagcaggcttgtcgaaatgggaccagcaggggctcagttcctcgggccagttattgtagaaattcctcacttcggctccatgagaggtaaagaaagggagttaatcgtgttacggtctgaaaacggcgaaacctggaaggagcaccaattcgattcgaaaaatgaagatctaactgagttactgaacggtatggatgaagagctggattcccctgaggaactcggcaaaaaacgtatctgtagaataattaccaaagactttccgcaatactttgcggtcgtcagtagaatcaagcaagaatcaaaccagattggccctgaaggcggtatcctgtcatcaacgactgttccgctggtacaggcaagcttccctgagggtgccctgacaaaaagaattagggttgggctgcaggctcaacccgtgccggatgagatcgtgaagaaaattctgggtaacaaagctacgttcagccccattgtgaccgtggaacccaggcgcagaaagttccacaagcccattacaatgactatccctgttccacccccaagcggcgagggcgtaagtaacggctacaagggggacactacccccaatctacgtctgctttgctcgatcaccggaggaacttcacccgcacagtgggaggatatcaccggaactaccccattgacttttattaaggactgtgtgtctttcaccactaacgtgtctgctcgcttctggcttgctgactgccaccaagtgttggaaacagtcggactagccacccaattatatagagaactgatctgcgtgccttatatggcgaagtttgtcgtatttgctaagatgaacgaccctgtggagagctctttgcgctgcttctgcatgaccgacgataaggttgacaagaccctcgaacagcaggaaaacttcgaggaagttgcaagaagtaaagacatagaggtgctggagggtaaacccatttatgtggattgttacggcaacctggctcctctcaccaagggcggacaacagttggtcttcaacttctacagcttcaaggagaaccgccttcctttctccatcaaaatacgggatacctcgcaggaaccatgtgggagattgtcgtttctgaaggaacctaagacaactaaaggcctcccccagaccgctgtgtgtaacctgaatatcacactgcccgcacacaaaaaaatagaaaaaacagaccggaggcagagcttcgcatcactcgctctaaggaaacgatatagctatctcaccgaaccaggaatgtcagagtttcccaacacatttacaaatctgcggggtttctcttag

SEQ ID NO: 214423 - DNA, 2436 bp, synthetic construct
  misc_feature 1..2436: note = Description of Artificial Sequence: Synthetic coding sequence
  source 1..2436: mol_type = other DNA
atggccctgcctcagagcgaagacgctatgactggggacactgataaatacctcggtcctcaggatttgaaagaactgggagatgactcccttccggcagaggggtatatgggattttcactgggcgctcggtctgcatcactacggtcattttcctccgatcgaagctatactctcaatcggtcatcttacgcacgtgattctatgatgattgaggaactgctggtcccatctaaggagcagcacctgacattcacgagagaatttgatagcgactcgcttcgccactacagttgggcggctgatacattggacaatgttaacctggtcagtagcccaattcatagtggattcctggtatcctttatggtggatgccagaggcggaagcatgcgaggctcacggcatcatggcatgcgaatcattatccctccgagaaagtgtaccgcgccaacaaggattacctgtcggctggtcaaacgccataaactggcaaatccccctccaatggtcgagggagagggtttggcgagtcgcctcgtcgagatggggcctgccggagcccaatttctgggccctgttattgtggagatcccccacttcgggtcaatgaggggtaaagagagggagttaatcgtgttgagaagcgagaatggggaaacctggaaagaacatcagtttgacagtaaaaatgaagacctgactgagttactgaacggcatggacgaggaacttgactctcccgaagaactcggcaagaaacgtatctgtaggattatcactaaagacttcccccaatactttgctgttgtttcaagaataaagcaggagtccaatcagattgggccagagggagggattctcagctccacaacagtgccattagtccaagcctcatttcccgaaggagcactgaccaagcgcatccgcgtgggcctccaagcacagcccgttccagatgaaatcgtaaaaaaaatcctgggaaacaaagccacgttcagcccaattgtgactgtggagcccaggcggcgaaaatttcataaaccaattaccatgaccatccctgtcccccctccgtctggcgagggggtgagcaatggatataagggcgacaccacacccaatcttcgcctgctgtgtagtatcaccggcggtacgtcacctgcccagtgggaggatattacaggcaccacaccccttaccttcatcaaggattgcgtgtcctttacaaccaacgtgagcgctcggttttggctcgccgattgccaccaagtcctggagaccgttggcctggcaactcagctatatcgggaactcatctgtgtcccctacatggccaagtttgtggtctttgctaagatgaacgatcccgtagaatcctcactgaggtgtttctgtatgactgatgacaaggtagacaagacactggaacagcaggagaactttgaagaggtagcaagatctaaagacatcgaggtcttggagggaaaacctatttacgttgattgttatgggaacctggcaccccttaccaagggtggacagcagctagtctttaacttttattcatttaaggaaaatagactcccgttctccatcaaaatcagagacacatcacaggagccatgtggcagactcagcttccttaaggaaccgaaaacaacaaaagggctgcctcaaactgctgtctgcaatctgaacataaccctccctgcccataagaagattgagaaaaccgaccggcgtcaatctttcgccagcctcgcactgcggaagagatactcttacctgacagagcctggcatgagcccacagagcccatgcgagcgcaccgatattcgaatggctattgtggctgaccacttgggtttgtcttggaccgagttagcaagggagctgaatttcagcgtcgacgaaatcaatcagatcagggttgagaaccccaatagcctgatttctcaatccttcatgcttctgaaaaagtgggtcactcgggatgggaagaatgccaccactgatgccctaacaagtgtgctcacaaaaataaaccgcatcgatatcgtgaccctgctggagggccctatctttgattacgggaacatttccggtactcgatcatttgctgacgagaacaacgtgttccacgatcccgttgatggatacccttccctccaggtagaactcgaaacaccgacaggcctccattatacaccacccactccattccaacaggacgactacttttctgacatctcttctattgagtcaccactgcgaacccccagcaggctgagtgacggtttggtcccctcccagggtaacattgaacacagtgcggatggtccacccgtggtgactgccgaggatgcttcgttggaagacagtaagctcgaagactctgtgcctctcacagagatgccggaggccgttatgtag

SEQ ID NO: 214424 - DNA, 2796 bp, synthetic construct
  misc_feature 1..2796: note = Description of Artificial Sequence: Synthetic coding sequence
  source 1..2796: mol_type = other DNA
tttacgttggcccatgtgccacaacggggagagaccgcactacatatggcggctcgatcagggcaagctgaggtcgtccgctacctcgttcaagacggagcccaggtcgaggcaaaagccaaagatgatcaaacccctctgcacatctcagccaggctcggcaaagcagacatcgttcagcaactcttgcagcagggggcatcacctaatgcagcgacaacttcaggttatactcccctacacctctccgctagggaggggcatgaagatgttgccgcatttttactggatcatggcgcttcactatccattacgacaaagaagggctttacccccctgcacgtggccgctaaatacggaaaattggaagtcgctaacttgttgctgcagaaatcagcaagcccagacgcagccggaaagtctggtctgactcctctgcacgtggctgcacattacgacaatcagaaggtagccttactgcttcttgaccagggggcttccccacacgctgcggctaagaatggatacacccctctgcatattgccgcaaaaaaaaaccaaatggatatcgcgacgaccctcctcgagtatggagcggatgccaacgcagtgacccgacagggtatagcttccgttcatctcgccgctcaggaaggacacgttgacatggtgagcttactgctgggccgaaatgctaacgttaacttatcgaataaaagcggattgacaccactacatttggccgctcaagaggatcgtgtgaatgtcgccgaggtgctcgtgaaccaaggagcccacgtagacgcccagacaaaaatgggatacacgccactgcacgtcgggtgccattatgggaacatcaagattgtcaacttcctcctgcaacattctgccaaggtgaatgcaaagactaagaacggctacactcccctgcaccaggccgcacagcaggggcatacccacatcataaacgtcctgttgcagaacaatgcaagtcccaatgagctgacagttaacggcaataccgccctaggtatcgccaggagactgggttatattagcgtggttgatacactcaaaatagtgactgaggaaacaatgacaaccaccaccgtgaccgaaaaacataaaatgaacgttcccgagaccatgaacgaggtgctcgacatgagcgatgatgaaggagaagacgccatgacgggggatacagataagtacctgggtccccaagatctgaaggagcttggagacgattcattgcctgccgaagggtacatgggcttctcactgggcgcaagatcagccagtcggagtttctcctcagacaggagctacactttaaatcgaagttcatatgccagggactcgatgatgattgaggaactgctggtccccagcaaggaacaacacctgacctttacccgagagttcgatagtgatagtctacgccactattcttgggctgccgatactctggacaacgtgaatctggtatccagccctatccacagtggatactcctccccgttaccccagtacgattcacggtttctggtttccttcatggttgacgcacgcggtggcagcatgcgtgggtcacgccaccacggaatgcggattataatcccgcctcgcaagtgcaccgcccctactagaatcacttgccgcctggtgaaacgacacaagctggcgaatcccccaccgatggtggagggagaaggcctcgcttctagattagtggagatgggccctgccggagcccaatttttgggccctgtgattgtagagattccacatttcggaagtatgcgaggtaaggagcgcgagctaatcgtgctcagaagtgaaaacggcgagacttggaaggagcatcagttcgactccaagaatgaagacctgactgagttattgaatggaatggatgaggagctggacagccccgaggaactggggaagaaacgtatatgtagaatcatcactaaagacttccctcagtattttgcggtggtatctcggattaagcaagaaagcaaccagatcgggcctgaaggagggatcctgtcttcaacaacagtaccactggtgcaggcatcgtttcccgagggcgctctgacaaaacggatcagagttggcctgcaagcacagcccgtaccagacgaaatcgtgaagaaaatcctgggtaataaggcaaccttttctcctatagttaccgtggagcctcgacgtcggaaattccacaaaccgataacgatgacaatccccgttcccccaccctcaggggagggcgtctctaatggatataagggagacactactcccaacctgcggctgctgtgttctataacaggagggacaagcccagctcagtgggaggacatcacaggtaccacccctctgacctttataaaggactgcgtttcattcacaaccaacgttagcgcaaggttctggttagccgactgccatcaggtactagagactgttggcctagctacccaactctaccgcgagttgatttgcgttccatatatggctaaatttgttgtatttgcaaagatgaacgatccggttgagagttctctacgctgcttctgcatgacagacgataaagtcgataagacacttgaacagcaagagaactttgaagaagttgctcgcagcaaggacatagaagtcccttgcagccagaagcaggttcattttataacatattcaaggtacgaggtgctattttgcggcctgaacagtacgcactacaagattccttctgctctgctgattttgttgcttctgtag

SEQ ID NO: 214425 - DNA, 1647 bp, synthetic construct
  misc_feature 1..1647: note = Description of Artificial Sequence: Synthetic coding sequence
  source 1..1647: mol_type = other DNA
tccctgcctgagtccgaagacgccatgactggggacaccgataagtacttaggcccacaggacctgaaagagttaggggacgactcgctccccgctgaaggctatatgggcttttctctgggggctcgctccgcatctctgcgatccttctcttctgataggtcatacacgttgaaccgctcttcttatgcacgtgatagtatgatgatcgaggaactactggtgccttctaaagagcagcatttgaccttcacacgcgagttcgactctgacagccttagacactattcttgggccgcagacaccttggacaatgtgaatctggtttcatcccctatccattcaggcttcctggtgtcctttatggtggacgctcgagggggatcaatgagaggtagtcgccaccacggcatgcggatcattatcccccctaggaagtgcaccgctcctacaaggatcacctgtagactcgtgaagagacacaagctcgcgaacccccctcccatggttgaaggcgaagggctggcatccagattggtggaaatgggacctgccggtgcccagtttctcggaccagtaatagtcgagattcctcacttcggatctatgaggggcaaggagagagagctgatagtgctgcgctctgagaacggtgagacatggaaggagcatcaatttgactcaaagaacgaagacttaacagaactgttaaatggaatggacgaagagctggattcccccgaggaacttggaaagaagcgcatctgtaggatcatcacgaaggacttccctcaatattttgcggttgtgagtagaattaaacaggaatccaatcaaatagggcctgaagggggaatactcagttcaacaactgtcccactcgtgcaggcgagtttccccgagggcgctttaactaaaaggatcagggtggggctccaagctcagcctgtgcccgatgagatcgtgaaaaaaatcctcggcaataaggccaccttctctcctatcgttactgtcgagcccagacggaggaaattccacaaacctatcacaatgactatccccgtgccaccaccatccggagagggcgtaagcaacggatataaaggcgacactacccccaatttaagattgctctgttcgatcacagggggaacatctcctgcacagtgggaggacatcaccgggacgacgccattaacattcattaaggattgtgtgtccttcacaaccaacgtgtccgcccgtttctggctcgcagattgtcaccaggtgctggaaactgtgggacttgccacccagctttaccgcgaactgatttgtgttccctatatggctaagtttgtggtgtttgctaagatgaacgatccagttgagtcttccttgcgttgtttttgtatgactgatgacaaggttgataaaacgctggaacaacaggagaactttgaagaggtcgctagaagcaaagatattgaagtcttagaaggcaagccgatctatgtcgactgctacgggaatctggcacccctgaccaaagggggacagcagctggtcttcaacttctatagctttaaagagaacagactgcctttcagcattaaaattagagacaccagccagaatatagttcagctgtcatgcctcctgtag

SEQ ID NO: 214426 - DNA, 1443 bp, synthetic construct
  misc_feature 1..1443: note = Description of Artificial Sequence: Synthetic coding sequence
  source 1..1443: mol_type = other DNA
atggccgtcgcccgtgccgctctcgggcctctggtgacaggactgtacgatgtacaggccttcaagtttggcgacttcgtgttaaaatcaggcctctcctcgcctatttatatagacttacgcggtatcgtgtctcggccaaggcttctctcccaggtcgctgacatactgtttcagaccgcccagaacgccggaatctcttttgacacagtctgtggcgtgccctatacggctctccctttggctacagtgatatgctccaccaaccagataccgatgttaattcgaagaaaggaaaccaaggactatggaactaagagactggtggaaggtactattaacccaggtgagacatgcttgattatcgaggacgtggtgacgagtggatcaagcgttctggagaccgtggaggtgcttcaaaaggaaggattgaaagtgacggatgctatagttctgttggatagagaacaggggggaaaagataagctgcaggcccatggaatcaggctgcactctgtgtgtactctcagcaaaatgttagagattctagagcagcagaagaaggtcgacgcagaaaccgtgggaagagtgaagaggtttatccaggagaatgtgtttgtggccgcaaatcacaatggttctccactctcaatcaaagaggccccaaaggaactgtccttcggtgccagggcggagctcccaaggatccaccccgtggcctccaaattgttgaggcttatgcagaaaaaagagacgaacctctgccttagtgctgatgtgagtctggccagggaactgcttcagctcgcagatgctttgggaccttcaatttgcatgctgaagactcatgtcgatattttaaacgacttcacactggatgtgatgaaagaactcatcactctggctaaatgtcatgagtttctgatttttgaagatagaaagtttgcagacatcggcaacacggtgaaaaagcagtatgaggggggtatatttaaaatcgcctcctgggcagatctcgtgaacgctcatgtggtgcctggaagtggcgttgtgaaaggacttcaggaggtgggcctcccgctgcataggggctgtcttctcatagcagagatgtctagcaccggatccttggctacaggggattatactagagccgcagtgcggatggcggaggagcattcagagttcgttgtcgggttcatcagtggctcgcgcgtctccatgaagccggagttcctccatctgacacccggtgtgcaactggaggccggaggcgataacttgggtcaacagtacaactctcctcaagaggtaatcggaaagagaggatctgacatcatcattgtcgggcgtggaattatctcagccgctgatcgtctcgaagctgccgagatgtataggaaagctgcctgggaagcctatttgagtagattgggtgtgtag

SEQ ID NO: 214427 - DNA, 1218 bp, synthetic construct
  misc_feature 1..1218: note = Description of Artificial Sequence: Synthetic coding sequence
  source 1..1218: mol_type = other DNA
atggataccagtgacctattcgcctcttgtagaaaaggcgacgtgggaagggtgagatatctgctcgaacaagtgctgtacctgctggctaacggcgcacggtgtgaagctaacacgtttgacggagagcggtgcctctacggtgccctgagcgatcctataagacgcgctcttcgggattataagcacccactgctctgggatctgctctcagacctcgaggccaaatgcgagaaggtctccgagtttgttgcaagcaagcctggaacttgcgtaaaggtgctaactatcgaacctcccccagcagaccctagactgagagaagacatggcgctccttgcagattgcgctcttccacccgagcttagagctttcttttgtggcaggagtgattacttccgtgccctactggacgaccacttccgggaatccgaggagccagcaacttctggtggaccaccagccgtcaccctgcacgggatttcacccgatgtgttcacacatgttctgtactacatgtattccgaccacaccgagttgagccccgaagccgcttatgacgtactgtcagtggccgacatgtacctgttgcctgggctgaaacggctctgcgggaggtcactggctcagatgttggacgaagacacagtcgtgggagtctggagagtcgctaaactatttcggcttgctcggctggaagatcagtgtacggagtatatggccaaggttattgaaaagttagtggagcgagaagattttgtggaagctgtcaaagaagaggccgctgccgtcgctgcccgacaggagacggacagcatccctctcgtcgatgacattaggttccatgtggcttctacagtgcagacatacagcgccattgaggaggctcagcagcgcttaagggccctggaagacacctctatgtgcatgcgcctgtgcgctgctttgctgcccgcaccatgcaccttgcgcgcatcctggggcgtgcgtggtgcgcagtggggcttttccagtctgcacgaacccggagatccccgaggaggttcaatctgggacgagccccctccccctaacgcccaagcatcaccccaggacccaggtgggggacaccactccgggaagcccggtgtaggcgttggattcggcctttccacttttctcttacagatccctcctactcacccttcacctaaatcctctcccttagcgctcgcttag

SEQ ID NO: 214428 - DNA, 1011 bp, synthetic construct
  misc_feature 1..1011: note = Description of Artificial Sequence: Synthetic coding sequence
  source 1..1011: mol_type = other DNA
atgctggacacaaaatggaagggcaagtccgtcgtcgtacttcggcaccccttgattaatccggttgccttcggagcccttctgcagtatctgtacactggccgactggatattggagttgagcacgtcagcgattgtgaacggttagctaaacagtgccagttgtgggatctgctcagcgatctggaagcaaagtgtgaaaaagtgagtgagttcgtggcttctaagccaggaacctgcgtgaaagtgctcacgatcgagccgccacccgcagaccccaggctgagggaggatatggccctgctagcagactgtgcgcttccccctgagttaaggggtgacctgtgggagttgccgtttccctgtcctgacggctttaattcgtgtccggatatctgctttagggtggcaggttgctctttcctgtgtcataaggcatttttctgcggtcgcagtgattattttagagccctgctagatgatcatttccgggaaagtgaggagcctgcaaccagtggaggacctcccgcagttaccttgcacggtataagcccagatgtttttactcacgtcttgtattatatgtattcagatcataccgaactcagcccggaggctgcctatgacgtgctctccgtcgctgatatgtacctcctgccgggacttaagcgcctctgtggcaggtcactggctcagatgctcgatgaagatactgtggtgggagtttggcgcgttgccaaactgttcaggttagccaggctggaagaccagtgcacagagtacatggcaaaagtgatagagaagttggtggagagagaagatttcgtcgaggccgttaaggaggaagcagctgctgttgcagcgaggcaagagacagacagtattccgctggtcgatgacatccgctttcacgtcgctagcactgttcaaacctactcggcaatcgaggaggctcagcaacgactgagagcacttgaggacctcctggtgtcaataggtctcgattgctag

SEQ ID NO: 214429 - DNA, 1011 bp, synthetic construct
  misc_feature 1..1011: note = Description of Artificial Sequence: Synthetic coding sequence
  source 1..1011: mol_type = other DNA
atgctagataccaaatggaaggggaaatctgtggtggtgctcaggcatccgcttatcaacccggtggctttcggcgctctgctacagtatttgtacacagggcgtcttgacattggagtggagcatgtcagcgactgtgagcggctggcgaagcaatgccaactttgggacctgttgagcgatctggaagccaagtgcgagaaagtttcagagttcgttgctagcaagccaggaacgtgcgtcaaggtgttaaccattgagccccctccagcagacccccgactgcgcgaggatatggccctcctggccgactgtgcgctgcctcctgagttgcgcggagatttgtgggagctcccctttccgtgtccggatgggtttaactcttgccccgacatctgcttccgggtcgctggctgttcattcctgtgccataaggctttcttttgtggtcgatcagattactttagggccttactagacgatcatttcagagaatctgaggagccggcaacttccggtggtccccctgccgtgaccctgcatggtatctcacccgacgtcttcacccacgtcctctattacatgtactccgatcataccgaactgtcccccgaggccgcatacgacgtgctctccgtggccgatatgtatctcctcccaggcctcaagagattatgcggcagatcactcgctcagatgcttgatgaggacactgttgtgggggtgtggagagtcgcaaagctttttcgcctggctaggttggaagatcaatgcactgaatatatggctaaggtgatcgagaaactcgtggagcgggaagacttcgtggaagccgtcaaagaggaggccgctgctgtagcagcccgtcaggagaccgacagcatacctctcgtagatgacatcagatttcacgtcgcaagcaccgtgcagacatacagcgcaattgaagaggctcagcagcggctgagggccctcgaggacctgctggtgagcatcggtctggattgctag

SEQ ID NO: 214430 - DNA, 1011 bp, synthetic construct
  misc_feature 1..1011: note = Description of Artificial Sequence: Synthetic coding sequence
  source 1..1011: mol_type = other DNA
atgctagataccaagtggaagggcaagagcgtggtggtgcttaggcacccactgatcaatcctgtcgcattcggagcactactgcagtatctgtacacgggacgcctagacattggcgtggaacatgtctccgattgtgagaggctggcgaagcagtgccagctatgggacctgctcagcgacctcgaggccaaatgcgaaaaggtgagtgagttcgttgctagtaagcccggtacatgtgtaaaggtactgactatagaaccaccaccggctgaccctaggctgagggaagacatggctctgctggctgactgcgccctgcctcctgaactgaggggagatttgtgggagctgcctttcccctgcccggatggctttaacagctgcccagatatttgcttccgagtggcagggtgcagtttcctgtgccacaaagctttcttttgtggaagaagcgattacttccgagccttgctcgacgatcacttccgggagtcagaggaacccgctacctcgggaggccctccagccgtgacactgcacggtatctctcccgacgtgttcactcatgtgctgtactatatgtatagcgaccacacagagctgtctccagaggctgcctacgatgtactatccgtggcagacatgtacctgctgcctggtttgaagagactttgcggtaggtcccttgctcagatgctggacgaagacaccgtagttggagtgtggcgggtagccaaattgtttcgcctggctagactcgaagatcagtgtaccgagtacatggccaaggttattgaaaagctcgttgagagagaggatttcgttgaagccgttaaggaggaggcggctgccgtggctgccaggcaggagaccgactccataccactcgtggatgacatcaggtttcacgttgcttcgacagttcagacctattcggcaattgaagaagcacaacagcgactgagagctctcgaggatttgctcgtgagcattggcctagactgttag

SEQ ID NO: 214431 - DNA, 2061 bp, synthetic construct
  misc_feature 1..2061: note = Description of Artificial Sequence: Synthetic coding sequence
  source 1..2061: mol_type = other DNA
atggaggccagccaagagggacaccttgaattggtgaaatatctcctcgcctcaggggctaatgttcacgctacgaccgcgacaggcgacaccgctctgacctacgcctgtgaaaacgggcacaccgatgtggccgacgttctgctgcaggcaggagctgaccttgacaagcaagaggacatgaaaaccattttagagggcatcgatcctgcgaagcatcaggagcatgagtcagagggtggcagaactcccctaatgaaggccgcaagagcaggacacctctgtacagttcagtttctgatctctaagggggctaatgtcaaccgagctacagcaaataatgaccacactgtcgtgtccctcgcttgtgccggaggccacctggcggtggtggagctgttattagcccacggggcagacccaacacacaggctcaaagacgggtctacaatgctgatcgaggctgccaagggaggacacaccaatgtcgtgtcttacttacttgactaccctaacaatgtgttgtcagtgccaacaaccgatgtctcccagctgcccccaccgtcccaggaccagtctcaggagcccgatcgcacgagccaggagaattcaccagctctactaggggtgcagaaagccgtttcaaccagagtaccaacaggctccaactccagcagtcagacaactgaatgtctgacaccggaatcttgcagccagaccacctccaatgtagcctcccagagtatgcctccagtctacccgtctgtagatatcgacgcccatacagagagcaatcacgatactgccctgacactggcgtgcgccggtggacatgaggagctggtttccgtgctcattgctagggacgctaagattgaacaccgtgacaagaaaggattcaccccgcttattctggcagctaccgcagggcacgtgggcgttgttgagatcctgctggacaagggcggtgacatcgaggcccagtccgaacgaacaaaagatacaccactcagtcttgcttgctccgggggtcgtcaggaggtcgtcgatcttttactggcccgtggggcaaacaaagagcatcgcaacgtctctgactatacgccgctgagcctggcagcctctggcggatacgtgaacattatcaagatcctgctgaacgcgggtgccgaaattaactctcggaccggctccaagttgggaatctcccccctaatgttggccgcaatgaatggtcatgtgcccgctgtgaagctgctgctggacatgggcagtgatattaacgcccagatagagaccaatcgcaacacagccctgaccttagcctgcttccagggaagagcagaagtggtatcactgctgcttgaccgaaaggctaacgtcgaacacagagcaaagactgggttgaccccgctgatggaggcagcctcaggtgggtatgccgaggtcggcagggtcctgctggataagggcgctgatgttaatgccccacctgtaccctcatcaagggacaccgcactcactatagctgccgataaagggcattataaattttgcgaactgctcatccataggggcgcacatatagacgtacggaacaagaagggaaacactccactgtggctcgcctctaacggcggtcatttcgatgtggtacagctgcttgttcaggctggcgctgacgtcgacgctgcggataatcgcaaaattactccacttatgtctgccttccggaagggccatgtcaaggtcgtccagtacttggtgaaggaagtcaatcagtttccctccgatattgaatgtatgagatacatcgcaaccatcaccgataaggaacttctcaaaaagtgccaccagtgcgtcgagactattgtcaaggctaaagatcagcaggctgccgaggccaataaaaacgcttctatcctcctgaaagagctggatctagagaagagcagggaagaatcccggaaacaagcgctggccgcaaagagagaaaaaagaaaggaaaaacggaaaaagaagaaggaggaacagaaaaggaagcaggaggaggacgagtag

SEQ ID NO: 214432 - DNA, 7623 bp, synthetic construct
  misc_feature 1..7623: note = Description of Artificial Sequence: Synthetic coding sequence
  source 1..7623: mol_type = other DNA
atgctgactgactccggcggaggaggcacatccttcgaggaggacttggactctgtagctcctcgaagcgctcccgcaggcgctagtgagcctcctccaccaggcggagtcggcttgggtattagaacggtgagactgtttggcgaggcaggccctgcctcgggagtgggctcatccggcggaggtggttccgggtctggaaccggagggggagacgccgctctcgatttcaagctggcagccgcagtgctgaggaccggtggaggcggaggcgcttcaggttccgacgaggacgaggtgagcgaagtagaatcatttatcctggaccaggaagacctggataacccagtccttaagacaacctccgagatttttctttcttctacagccgagggcgctgatctgagaaccgtggaccccgagacacaggcacggctggaggcactgctggaggccgcaggcattggcaaactgagtacagccgatgggaaggcattcgctgatcccgaagtgttgcgcaggctcacctctagtgttagctgtgctctggacgaagccgctgctgcccttacccgcatgaaagccgaaaatagccataacgccggtcaggtggatacaaggagcttggccgaggcttgctctgatggcgatgtcaatgctgttcggaagctgttggacgagggccgatccgtcaacgagcatacggaggaaggggaatcccttctgtgcctagcttgcagcgcaggctactatgagctggcccaggtgctgttggctatgcatgccaatgtagaggaccggggaaacaagggagacataacccctctaatggccgcaagctccggcggttacctcgatattgtgaagttgctgttactccacgatgccgatgtaaactcacaaagcgccaccgggaacaccgctctgacgtatgcttgcgccggaggctttgttgatatcgtgaaggtcttactgaacgagggcgcaaatatcgaagaccataacgagaatggacacacacccctgatggaggcagcaagtgccggacacgttgaagtggcccgtgttctcttggaccatggtgcaggtattaacacccactctaacgagttcaaagagtcagcactgacactggcttgttacaaagggcatctcgatatggtcagattcctgctggaagccggagccgaccaagaacataagacagatgagatgcatacagcgcttatggaggcttgcatggatggtcacgtggaggttgccaggctgctgctggattctggggctcaggtcaacatgcccgcagatagctttgagagtcctctgactttggcagcatgcggcggacatgtggaactcgccgctttgctgatcgaaaggggagcaaacctagaggaagtcaacgatgagggatatacaccactaatggaagctgctagagaggggcacgaagagatggtcgctctgctgttagctcagggcgcaaatatcaatgcccagacagaagagacgcaggaaaccgccctcaccttagcttgttgtggcggtttttctgaggttgccgattttctcatcaaggcaggtgcggacatagagctaggttgttccacgcccctgatggaggccagccaggagggccaccttgagctagtgaaatacttattggcatccggagccaacgtacacgctactaccgcgacaggcgatacagctctgacctatgcgtgtgagaatggccatacggacgtagcggatgtcctcctgcaagcgggtgctgatcttgagcacgagtcagagggaggcaggactcctttgatgaaagccgcaagagccggacacctgtgcactgtccagttcctgatttctaagggcgctaacgtgaaccgcgcaaccgccaataatgaccacaccgtagtgtcactggcctgtgcgggtggacacttggcagtcgtcgagctgcttctcgcccatggggctgatcctacccacagattaaaggacggcagtaccatgctgatagaggcggcaaaggggggacataccaacgtcgtatcttacctgctggactatcccaataacgtgctgtccgttccaacaaccgatgtgagccagcttccacccccatcacaggaccagtcccaggtgcctagagtgcccacacatactcttgccatggtggtgccaccacaggagcccgaccggacctctcaggaaaactctccagctctgctcggcgtgcaaaaagggacgagcaaacaaaagtccagcagcctccaggtggccgaccaggacctactgccaagcttccatccataccaaccgctggagtgcattgtggaagagaccgagggtaaattaaatgagttgggccagagaatctctgcaatcgagaaagcccagctgaaaagccttgagctgatccaaggagagccccttaacaaagataaaattgaagagttaaagaaaaaccgcgaagaacaggtgcagaagaagaaaaaaatactgaaggagctccagaaggtcgaaagacaactccagatgaagacacagcaacaattcaccaaggagtacctggaaactaaaggccagaaggatacggtgtcacttcaccagcagtgcagtcatcgcggtgtcttcccagaaggtgaaggagacggatccctccctgaagaccattttagcgaactcccacaagtcgacaccattttattcaaggacaatgatgtcgatgacgaacagcagagtccccctagtgccgaacagattgatttcgttccagtccagccgctttcctcaccccaatgcaatttcagtagcgatctgggcagtaacgggaccaactcactggagttacagaaggtgagcggcaatcagcagatcgtgggccagccccagatagctatcacaggccatgaccagggtttgcttgttcaggagccagatggccttatggtcgcgactcccgctcagacacttaccgatactctagacgatctgattgcagctgtttctactcgcgtgcccaccggaagtaatagcagtagccagacgacggagtgccttacacctgaaagctgctcacagaccacttcgaatgtggctagccagagcatgccgcctgtgtacccatctgttgatattgacgcccacactgaatccaaccatgacacagcattaacgctggcttgcgccggaggccatgaggagctcgtgtcggtgctaatagctcgagatgctaaaattgagcatcgtgacaaaaagggctttaccccgcttatcttggcggctactgctgggcacgtgggcgtggttgaaatcctgctcgacaaggggggagacattgaggcacagagcgagagaacaaaggacaccccactgagcttggcctgctccgggggtcggcaggaggtagtggatttattgctggcacggggagctaacaaagagcaccggaacgtaagcgactacacccctctcagtttggccgcatcaggcggatatgttaatattattaagattctcctaaacgcaggggcagaaatcaattctcggactgggtcgaagctcgggattagtccccttatgctagcggctatgaacggacacgtacccgcagtcaagctgctgctggatatgggttcagatatcaatgcccagatcgagactaatcgtaataccgccttgacactcgcctgtttccagggtcgtgcagaagttgtttccctgcttctcgaccgcaaggcgaatgttgagcaccgggctaagacaggactgactcccctgatggaggccgcttctggaggctacgcggaggtgggaagagtgctactggacaaaggggcagacgtcaatgcccctccagtgccctccagccgagacacggcactcaccatcgctgcagataagggacactacaagttctgcgagctgctgatccatcggggagcccacatcgatgtgcgcaacaaaaaaggaaatacccccctgtggctagcaagtaacggcggacacttcgatgtcgtgcaacttctcgtccaggccggtgctgatgttgatgcggcagataatcgcaaaattacacccctcatgtccgctttccggaaagggcatgtcaaggtcgttcaatatctcgtgaaagaagtgaatcagtttccaagtgacatcgagtgcatgcgctatattgcaaccattacggacaaggaactgttgaaaaagtgtcatcagtgtgtggaaaccattgttaaggcaaaagaccagcaggccgcagaagctaataagaatgcttcaattctgctgaaggagctggacttggagaaatcccgggaggagtcaagaaagcaggcattggctgctaaacgggaaaaaaggaaagagaaacgcaagaagaagaaggaagaacagaagcgtaagcaggaggaggatgaggagaacaaaccaaaggaaaactcagaactccccgaggacgaggatgaggaggaaaacgatgaggacgtggagcaggaagtcccgatcgaaccacccagcgccactactaccacaaccattggaatcagcgctacctcagccactttcacaaacgtttttggaaagaagagagccaatgtggtgaccacacctagtactaacaggaagaacaagaagaataaaactaaagagacgccaccaactgcccatctgatactgcccgagcagcacatgtctctggcccagcagaaggccgacaagaacaagataaacggtgaaccacgcggtggcggtgcaggcggtaatagcgacagcgacaatttagattccactgactgcaactcagagagctcctcaggcggaaaaagtcaagaactgaattttgtcatggacgtgaatagctccaagtatcctagtcttcttctgcatagtcaggaggaaaagacatccactgctactagtaaaacccaaacccgactggaaggagaggtgacacccaacagccttagtacctcgtataaaaccgtatctctgccactgagctccccaaatataaaactcaaccttacctccccaaagcggggacagaagagagaggaaggatggaaagaggtggtgcggagaagtaagaaactgtctgttccagcctccgtcgtgagccggattatggggcgtggcggttgtaacattaccgctattcaggatgtgactggcgcacacatcgacgtggacaaacagaaagacaaaaacggggaacggatgatcactatccgcggaggaactgaaagcacccgctacgccgtgcagctgattaacgctctgattcaggatccagcaaaagagctcgaggatctcataccaaaaaaccacattcggacgcccgcaagcacgaaatctatccacgccaattttagctctggagtcgggaccacagccgcatccagcaagaacgcgttcccactaggtgcgcctaccttagtaacttcgcaggctacaaccctgagcacatttcagccggctaataagttgaacaagaacgtgcctacgaatgtccgttcctctttcccagtgagcctgccattagcataccctcaccctcacttcgctttactcgcagctcagactatgcagcagatccggcaccctaggctcccaatggcccagttcggcggaacgttttcgcctagtcctaatacctggggcccttttcctgttaggcctgtgaacccgggaaatacaaatagtagtccaaagcataataatacttcaagactgccaaatcagaatggaactgtcctgccttcggaatccgcaggtctggcgaccgccagctgccctattaccgtgtcaagtgtggttgccgctagtcagcaactttgtgtgacaaataccagaacccctagttccgtgcgtaagcaactgttcgcctgcgttcctaaaacctcccccccagccaccgtgattagttcagtcacctcaacatgctcctccctgcctagtgtaagcagtgctcctattacttctggtcaggcgcctaccacgtttttgccggcatctacgtcccaggcccaactctcctctcagaaaatggaatcattctctgccgtgcctcccaccaaggaaaaggttagtacccaggatcagcctatggcaaatctgtgcactcccagttctacggccaatagttgcagctcttcagctagtaatactccaggtgcacctgagacccacccgagcagtagtccaacccccacttcatccaatacacaggaggaggcccagcctagtagcgtatctgacttatctccgatgagcatgccatttgcctccaatagcgaacccgctccccttactctgacatcccccagaatggttgctgctgataatcaagatacctctaacctgcctcagctggctgtgccagctcccagagtgtcccataggatgcagcctcgcggtagcttttattctatggtcccgaacgcaacaatccatcaagaccctcagtccattttcgtgaccaatccggtgaccctcaccccgccacagggaccccctgcagcagttcagctctcttctgcagtgaacattatgaacggctcccagatgcacattaatccggctaataaaagtttaccacctacatttggcccagccacccttttcaaccatttcagctcactttttgatagtagccaagtgcctgcaaaccagggatggggcgatggccctttgtcatcccgggtggccaccgacgcatcttttacagtgcagtcggcctttctggggaacagtgtgttaggccacttggaaaacatgcatccagataactctaaggccccaggttttagacctcctagccagcgagtgtcgacgagccctgttggtctaccatctatcgacccttctggaagcagcccttcctccagctctgccccactcgcatctttctctggaattccaggaacccgggtcttcttacaggggccagccccagtaggaacgcccagctttaataggcagcacttctctcctcatccttggacatccgcttctaattcctgtgatagccctattccctctgtgagcagcggatccagttccccacttagcgctactagcgcccctcctactctgggtcagcccaagggagtgtccgcatctcaggacaggaagatcccgcctccaattggcacggagcgactggccagaattagacagggaggctctgtcgctcaggccccagccggtactagtttcgtggcgcctgttggacactctggcatctggtcattcggggtgaatgctgtgtcagagggactttccggctggagtcagtctgtgatggggaatcatccaatgcatcaacagctctccgatccctcaacattttctcaacaccagcccatggagagagatgacagcggcatggtggccccttctaacattttccaccagcccatggcttccggattcgtggatttctcaaaggggctgccaatttcaatgtacggcggaaccattatcccttcacacccgcaactggccgatgtcccaggtggccctcttttcaatggattgcacaaccctgatcctgcttggaatcccatgatcaaagttattcagaactcaacagaatgcaccgacgctcagcagtaa

SEQ ID NO: 214433 - DNA, 7853 bp, synthetic construct
  misc_feature 1..7853: note = Description of Artificial Sequence: Synthetic coding sequence
  source 1..7853: mol_type = other DNA
atgctcaccgattcgggcggaggaggcacaagctttgaggaggatctagatagcgtcgcccctcggtccgcccctgctggcgcttcagagcccccacctcctggtggagtcggactgggcatccggaccgtacggctcttcggggaagctgggccagcctcaggtgtggggtcttctgggggaggcggatctggctcggggactggaggaggagacgccgctctggattttaagctcgccgctgccgtgctcagaactggcggagggggtggggctagcgggtccgacgaagacgaagtgtccgaagtggaaagtttcatattggatcaggaggatctggacaaccctgtgcttaagacgacttccgagatctttctgtcttctaccgccgagggagcagacctacgcactgtggatcccgaaactcaggcgcgactggaggctctcctggaagccgctggtataggcaagttaagcactgcagacggaaaggcattcgccgacccggaagtgctgcgcaggctcacttccagtgtctcatgcgcgctggacgaggcagccgctgcattgactaggatgaaggctgagaactcccacaacgccggacaagtcgacacacgctcgctggctgaggcttgttccgatggcgatgtcaatgccgtgaggaaattgctcgacgaaggtaggagtgtgaatgagcacacagaggaaggcgagtcacttctgtgtcttgcctgtagtgctggatactatgagcttgcccaggtgctgctcgccatgcacgcgaatgtggaagatagggggaacaagggtgacatcacaccactcatggccgcaagctcagggggttacctggacattgtgaagctgctcctcctgcacgatgcagatgttaattcccagagcgctaccggtaacactgccctgacctatgcctgcgcagggggatttgtagatattgtgaaggtcctgctgaatgagggtgcaaacattgaagaccataacgagaacggacacaccccccttatggaggccgcatcggccggacatgtggaagtggcccgagtgttactagaccatggagcgggaataaacacccattccaacgaatttaaggagtcagccttgaccctggcatgttataaaggccacttagatatggtcagattcctgctggaggctggagcggaccaagagcataaaacagacgagatgcacactgccctgatggaggcctgtatggacggccacgtggaagtggctcgcttgttgctcgacagcggggctcaagtgaacatgcctgccgacagcttcgagagccccctcacgttggccgcatgtggcggtcacgtggagctcgccgcattgctgattgagagaggagccaatctggaggaggtgaacgatgaaggatatactcccttgatggaagctgcgagggagggtcacgaggaaatggtcgcactgttgctggcacagggtgccaatattaacgctcagaccgaggagacgcaggagacagctctcactctggcatgttgcggtggtttttcagaggtggctgattttctgataaaagcaggtgcggacattgagcttggatgttccacccccttgatggaggcaagccaggaaggacatcttgaacttgtgaagtaccttctcgccagcggtgctaatgtccacgctactaccgcaactggggacacggcattaacctatgcttgcgaaaacgggcatacagatgtggcagatgtattgttgcaggccggagccgacttggaacatgagagcgaagggggaagaaccccattgatgaaggctgcgagagccggtcatctgtgcacggtgcagtttctgatttccaaaggtgctaatgttaatcgagccacagcaaataatgatcatactgtggttagccttgcctgcgccggtggccacttagcagtagtggagctgctgttggcgcatggagccgaccccacacaccggctcaaggacggatcgacaatgctgatagaagccgctaaaggcggacatacgaacgtcgtaagctacctgctggactatcctaataatgtcttgtctgtccctacgacagacgtctcccagctacctcccccatctcaggaccagtcacaggttccaagagtgccaacacatacgctggctatggtcgtccccccacaggagcctgacagaaccagccaggagaactcaccagcccttcttggggtgcagaaagggacaagtaagcagaaatcgtcaagcctgcaggtggcggatcaagacctgttacctagcttccacccctaccagccgttggaatgtatcgtcgaggagacagagggcaaattgaacgaacttggccaaagaatttcagctattgagaaggctcagctcaagagcctcgaactaattcagggtgagccattgaacaaagacaaaattgaggagctcaagaagaacagggaggagcaggtgcagaaaaaaaaaaagatcctcaaagagctccagaaagtggaaagacagctgcagatgaagactcagcagcagtttactaaagaatacttggagaccaagggtcaaaaagacacagtgagcttgcaccaacagtgctcgcatagaggggtcttccctgagggcgaaggtgacggatctctgcctgaggatcacttttccgaactcccacaggttgatacaatactgtttaaagataacgacgttgacgatgagcagcaaagcccacccagtgcggagcagatagattttgtccctgtccagcccttgagctctccccaatgtaacttttccagcgaccttggctccaatgggaccaacagcttggagctgcagaaggtgtcggggaatcagcagatcgttggtcaaccgcagatcgccatcacagggcacgaccagggtctcctggtgcaggagccagatggcctcatggtagcgacccctgcccagaccctgactgacaccctggatgaccttatcgcagctgtgtccactagagtgcccacagggtctaacagttcttctcagactacggagtgtcttacacctgagagctgtagccaaaccacaagtaatgtggcatcacagtctatgccaccagtatatcccagtgttgacattgacgcacacaccgagagcaatcacgataccgccctgaccttagcctgtgctggagggcatgaagagttggttagcgtgctgatagctcgcgacgctaaaatcgagcaccgggataagaaaggcttcacacctctgattctggcagccacggctggacacgtgggggtggttgagatcctgctcgataaaggaggagacattgaagcacagtctgaaagaacaaaggacacacctctgtcacttgcttgctcaggcggaagacaggaagtggttgatcttctactagcacgcggagctaacaaagaacatcgcaacgtttccgattatacgccactgtcccttgcggcttccgggggttatgtgaacatcataaagatcctactaaacgctggggcagagatcaacagccggacgggcagtaaactcggtattagtccactgatgcttgctgccatgaatggccacgttccagccgtcaagctgctgttagacatgggctctgatataaatgcacagattgaaactaacagaaataccgcattgacactcgcttgctttcaaggtagggctgaagtcgtatctctcctcctggacaggaaggccaacgttgagcatagggcaaaaacgggtctcactcccctgatggaggccgcttccgggggttacgcagaagttggacgggtgctcctcgataagggcgcagacgttaatgccccaccagtcccatcctccagggacaccgccctgaccatagccgctgataaggggcattacaagttctgcgagcttcttatccataggggagcacatattgatgtgaggaataagaagggcaatacacctttatggcttgctagcaacggcggacactttgacgtggttcagctgctcgtacaggccggagcagacgtcgatgccgcagacaatcggaagatcacaccactgatgtcagcctttaggaagggtcatgtcaaggtggttcagtatcttgtgaaggaggttaatcaatttccatccgatatcgaatgcatgcgctacatcgcaaccatcactgacaaggaacttctaaaaaagtgccaccagtgtgtggagacaattgtcaaagccaaggatcaacaagccgcagaggcaaataagaatgcaagcatcctcctcaaggaattggatttggagaaaagtagagaggagagccgcaagcaagctttagcagcaaaaagagagaagaggaaagaaaaaagaaaaaaaaagaaggaggaacagaagagaaagcaggaggaagatgaagagaacaagccaaaagaaaattctgaactgcccgaggatgaagacgaggaggaaaacgatgaagacgtggagcaggaagttccaattgagccaccatccgccacgactactaccacaatcggcatttccgcgacatccgccaccttcacaaacgtgtttggcaagaagcgggcaaacgttgttacaaccccctcaaccaataggaaaaataaaaagaacaagacaaaagagacccctccaaccgcacatctgattctccccgagcagcatatgtcactggcgcagcagaaggccgacaaaaataagatcaatggcgagcccagggggggtggtgccggaggcaattcagattcagataacctcgactctaccgattgcaacagcgaatcatcttctggtgggaagagtcaggagctgaatttcgttatggatgtgaatagcagcaaatatccctctctccttctacactcccaggaggagaaaactagtaccgctaccagtaagacacaaactagacttgagggggaggtcacgcccaattccctttcaacttcttacaaaaccgtctctctgccgctgagctctccgaacataaagctgaatctgacatcccccaaacgtggtcagaagcgcgaggaaggatggaaggaagtggtaaggcggagcaagaaactatcggtccccgcatcggtggtcagtcgcattatggggagagggggttgcaacatcacagcgattcaggatgtgaccggggctcacatcgacgtggacaagcaaaaagacaaaaatggcgaaagaatgatcaccataagaggaggcacggagtcaactcggtatgccgtacaactgatcaacgccctcatccaggatcctgctaaagaactggaggacctcatcccaaaaaatcatattcgaactcccgctagcactaagagtatacacgccaatttttcatctggcgtgggcacgacagccgcatccagcaagaatgcattcccgctgggagcccctaccctcgtcacctcacaagccacaactttgtccacatttcagcccgctaacaagttaaataaaaatgtgcctacgaatgtgcggtcctcattccctgtgagcctgccactggcttatccccatccccacttcgcgcttttagccgctcagaccatgcagcaaatccgacaccctcggttacccatggctcaattcggcggtacattttcacccagccctaatacctggggcccatttccagtcaggcctgtgaacccgggaaacactaattcttcccctaagcataataacacctcgcgcttgcccaaccaaaacgggacggtgctcccttcggaatctgcaggactagctacggcttcatgtcctattactgtgtcctcagttgtcgcagcaagtcagcagttgtgtgtcacaaataccaggacaccttcaagcgtaagaaagcagctgtttgcgtgtgtccccaagacctctccccctgcgacggtgatcagttcggtaacgtccacctgctcttccctccccagcgttagctcagcaccgataacttcaggccaggcgcctaccaccttcttgcccgcaagcaccagtcaggcacagctgagttcgcagaaaatggaatctttttccgctgttcccccaacgaaggaaaaggtgtccacgcaggaccagccaatggccaatttgtgcacaccttctagcaccgccaacagctgctcctcctccgcatcaaacacacccggagcacccgagactcacccctcatcatcccctacgccaacatcttctaatacccaggaggaggctcagccgtcatcagtgtcggacttgagccctatgagcatgcccttcgcatcaaacagcgagcccgcacccttgaccctgactagtccgcgaatggtggcagccgataaccaggatacctccaatctgccacaattggccgtaccagcacctagagtatcacacagaatgcagccacgcggatccttttattcgatggtgccaaacgccaccattcaccaagaccctcagtctatttttgttacaaatcccgtgaccttgacaccaccacaagggcctcctgccgcagtgcagctgagctccgccgtgaatattatgaatggctcacagatgcacataaatccagccaacaagtctctgccacccacatttggtccagccactcttttcaatcatttctcgtctttatttgacagctcacaagtgcccgctaaccaggggtggggggacggacctctgagttcaagggtggccactgacgcttcttttactgtgcagagtgcttttctcggcaatagtgtgctgggtcacctcgaaaatatgcatcccgacaattccaaggcccctgggtttcgccctccatctcaacgcgtctccacctctccagtggggctgccttccattgacccttctggttcttctcccagttcctcctctgctcctttagcctccttctctggaattcctggaaccagagtgttcttacaagggcctgcccctgtgggaactcctagttttaatagacagcatttttctccccacccctggacaagcgcctctaacagttcgacctcagctcctccaacgctcgggcagcctaagggggtctccgcttctcaggaccggaaaattccgcctcccattggtacggagaggctggctcgcatacgccagggtggctctgtggctcaggcaccggctggaacctctttcgtggctcctgtgggccacagcggcatctggtcatttggcgttaacgctgtgtccgagggcttgagtgggtggtcacaatcagtgatggggaatcaccccatgcatcagcagctgagtgacccttcaacattcagccagcaccaaccaatggaacgcgatgattcagggatggtggcaccatccaacatctttcatcagcccatggcaagtggatttgtggacttttcaaagggactgcccatttcgatgtacgggggaaccataataccaagccacccccagttggccgacgttccaggcggaccgctgttcaatggactgcataatcctgatcctgcttggaatcccatgatcaaggtgatacagaatagcacagaatgcaccgacgcccaacaggcctctctgctcccatctgtcccagctctgaagggcgaaattccttcccctcagctgactcgccctaagaagcgtattggaagacccatggtcgcatctccgaaccaacgccaccaggatcatctgcgccctaaagtgccagccggtgttcaggagctgactcactgtccagacactccactccttccgccaagtgacagccgcggacacaactcctcaaactccccttctctccaggcaggcggagctgagggcgctggggataggggacgggacacaagata

SEQ ID NO: 214434 - DNA, 3024 bp, synthetic construct
  misc_feature 1..3024: note = Description of Artificial Sequence: Synthetic coding sequence
  source 1..3024: mol_type = other DNA
atggtggctcttcttctcgcgcagggagccaacataaatgcccaaactgaggaaactcaagagaccgctttgactctggcttgttgtgggggattttcagaagtggccgatttcctcatcaaagcaggggctgatattgaactcggctgctctactcctttgatggaggcctcacaagaggggcatctggagctagtcaagtatttgctcgctagtggagccaatgtgcacgccacgactgctaccggagatacagcactgacctacgcctgcgaaaatgggcatacagacgtcgcagatgtgctcctccaggccggtgccgacctcgataagcaggaggacatgaaaactattctcgagggcatcgacccagcaaagcaccaagagcatgaaagcgaggggggtcgcactccactaatgaaggcagcaagggccggacacctttgtaccgtgcaattcctcatctcaaaaggggcaaacgtaaatcgggctaccgcaaacaatgatcacaccgttgtgagcctcgcctgcgccggagggcaccttgccgtagtggaattactgcttgctcacggcgctgaccccactcaccgactaaaggatgggtctactatgcttatagaagccgcaaaggggggtcatactaatgttgtgagttacctcctagactaccctaataatgtgcttagcgttccaactacagatgtgagtcagctgccccctccatcccaggatcagtctcaggtgccccgtgtacccacccatactttagccatggtggtcccccctcaggaacctgaccgtacaagtcaggagaactcacccgctttgctaggagtgcagaaggggacttccaagcagaagtcctcaagtctccaagtggccgatcaggatctcctacccagctttcacccttaccagcccctggaatgcatcgttgaggagactgaaggtaaactgaacgagctgggacagagaatctctgctattgaaaaagcccagctcaagtccctagagctgatacagggcgagcccctgaataaggacaagatcgaagagttgaaaaagaacagagaagagcaggtccagaaaaaaaaaaaaatactgaaagaactgcagaaggtagagcggcaactccagatgaaaactcagcagcaatttacaaaagagtacctggaaacaaagggtcagaaggacaccgtgtccctacaccagcagtgtagccataggggggtttttcctgagggtgagggcgacggatcactgcccgaagaccatttttctgagctcccccaggtcgatactattctttttaaggacaacgatgtagatgacgagcagcaatctcctcccagtgcagagcaaattgacttcgtgccagttcagcccctgtcctcaccacaatgcaatttttctagtgacctcgggtcgaacggaacaaactccctggagctgcagaaggtttcgggcaaccagcaaatcgttggccaacctcagattgccattacaggtcatgatcagggcttgctcgttcaggagcccgatgggttaatggtcgcaacaccagcacagaccctcacagacacactggacgatttgatcgccgcagtaagcactagagtgcccaccggttccaatagcagttcccaaacaactgagtgcctgacccctgaaagttgctcccagacaacatcaaacgttgcatctcagtcaatgccgccagtgtacccatctgttgatatagacgcccacacagaatctaaccacgataccgcactgactctggcgtgtgccggaggccacgaagaactggtatccgtgttaattgccagagatgccaaaatcgaacaccgcgataaaaagggctttactccactcatactcgctgctaccgctggacacgtcggggttgtagaaattctgctggacaaaggtggagacattgaggctcagtcagagcgcaccaaggatacccctctgtctctagcatgttccggcggtcgacaggaggtggttgacctcttgctggctcgcggagctaataaggagcaccgtaatgtttctgactatacgccactctccttagccgcttctggagggtatgtgaacatcatcaaaatcctgctgaatgccggagcagaaatcaatagtagaacggggagcaaactggggatcagcccgctgatgttggccgctatgaacggccatgtcccagcggtcaagttgttgctggatatgggctccgacattaacgcgcaaatcgaaaccaataggaatactgctctgacgctggcctgctttcaggggagggccgaggtggtatcattgctgctcgaccgcaaagccaacgtagagcatagggcgaaaactggattaaccccactgatggaggcagcctcaggcggatacgcagaggtcggacgcgtgttactcgataaaggcgctgacgtgaatgctccacccgtcccctcgtccagagacactgccttgactatagcagccgacaaaggccattacaagttctgcgagctcttgattcatcgcggtgcgcacatcgatgtacgcaataaaaagggcaatacccccctatggctagctagtaatggaggtcactttgacgtagtgcagctgcttgtacaagccggtgcagacgtggacgccgctgataatcgtaaaattaccccccttatgtctgcattccggaaaggccatgtgaaggttgtacaatacctcgtcaaggaggtcaaccaatttccctcggacatcgagtgtatgcgctatattgccacaataactgacaaagaactcctcaagaaatgccaccaatgcgtcgagaccatcgtcaaggccaaagatcagcaagccgctgaagcaaataagaacgcttctatcctgcttaaagaacttgacctcgagaagtctcgcgaagagagccgaaaacaagcactagcagccaagagagagaaacggaaggagaagaggaaggagaagcgtgggacagagaaggagacagggagacgctag

SEQ ID NO: 214435 - DNA, 7628 bp, synthetic construct
  misc_feature 1..7628: note = Description of Artificial Sequence: Synthetic coding sequence
  source 1..7628: mol_type = other DNA
atgctgacggattcaggcggaggcggaacctcattcgaagaagacctggattcggtggccccaagaagcgctcccgcaggagcctctgaaccacctcctcccggtggagtgggtctcggcatccggacagtgagactttttggggaggccggtcccgcttccggagtagggtcttctgggggtggcggtagcgggtcaggaacaggaggaggagacgcggcactagactttaaactggcggctgccgttctgcggactggcggaggcggtggggcttcaggaagcgacgaagatgaagtgagtgaagtagaaagcttcatactcgaccaggaggacctcgataatcctgtgctcaaaacaaccagtgaaatcttcctctcgtctacagctgagggcgctgacttacgtactgtcgaccctgaaacccaggccagactcgaagccctactcgaggctgctggcatcgggaaactgtccaccgccgatggcaaggcttttgctgacccagaagtactccgccgtctgacaagctctgtcagttgcgcactcgatgaagctgcagctgccctgacccgcatgaaggcagaaaactctcacaacgctggccaagttgatacacggagtcttgctgaagcctgttcagacggcgacgtgaatgccgtgaggaagttattagatgaagggaggagtgtaaacgaacacacggaggaaggtgagagcctgctctgtctggcatgtagcgcaggatactatgagttagctcaagtccttctcgcaatgcatgccaatgtcgaggatcgagggaacaaaggcgacataacccctctgatggctgcctcaagcggcggttatttggatattgtaaaactactcctgcttcacgatgctgatgtgaactcccaatccgcgacaggaaacaccgccttgacctacgcctgtgctgggggtttcgttgacatagttaaggtactgttgaatgagggcgctaatatcgaagatcacaatgagaatgggcacacaccacttatggaggccgcatccgccggacatgttgaagtagccagggtacttctagaccacggagctggcattaacacccattctaatgagttcaaggaatctgccctgacccttgcctgctataagggacatctggatatggtcaggtttctgttggaggctggcgctgaccaggaacacaagactgatgaaatgcatacggcactgatggaagcctgcatggatggccacgttgaagtggccagattgttgctggactcaggggctcaggtgaacatgcccgctgatagctttgaaagcccattaaccctcgccgcatgcggaggtcacgtagaactagccgctttgttaattgagcggggtgccaatcttgaggaagtgaatgacgagggctacaccccactgatggaggccgctcgcgaagggcacgaagagatggtggccctgctcctggcgcaaggagccaatatcaacgctcagacagaagagacccaggaaactgccctgaccctcgcctgctgtggaggtttttcagaggttgccgacttcttaattaaagccggagccgacattgagcttggctgctctacaccgttgatggaagcttctcaggagggccacctcgaactggtcaagtacttgctggccagtggagccaatgttcacgccactaccgccacaggagacacagccctcacctatgcctgcgaaaacggacacactgacgtagctgatgtgctactacaggccggagccgacctggagcacgaaagtgagggcggacgcacaccgctgatgaaggccgctagagctggtcacctttgcaccgtccaattcctgatatcgaagggagcaaatgtgaaccgggctaccgctaacaatgatcacaccgtagtctcgctggcctgtgccggtggccacctcgccgtagtcgagctgttgttagcgcacggcgctgatcctacccatcggctgaaggacggctctaccatgctgatcgaggctgctaagggaggtcacacaaacgtggtctcttacctgctcgactaccccaacaacgtactttctgtgcccacaacagatgtatcccaactacccccaccaagtcaggaccaaagtcaagttcccagggtccccacccacacccttgctatggtcgtgccaccacaggagcctgatcgcacctctcaggagaattcgcctgccttactgggagtgcagaagggaacaagcaagcaaaagtcttcatccctccaagtggccgatcaggaccttctgccatctttccacccatatcaacccctcgaatgcatagttgaggagacagaagggaagctgaatgagctcgggcagagaataagcgccattgagaaagcacaactgaagagcttggaactgatccagggggagccacttaacaaagataaaatcgaagaattgaaaaaaaacagggaggagcaggtccagaaaaaaaagaagattttaaaagagttgcagaaagtcgaacgtcaattacagatgaaaacacaacagcaattcacgaaagagtacctcgagaccaagggccaaaaggacacagtatcgctgcaccagcagtgttcccacaggggagtgtttcccgagggagagggggatggaagtctcccagaagatcacttttccgagctgccacaggtcgacactatcctgttcaaggacaacgatgtggacgatgagcagcaatcacctccaagtgccgaacagattgatttcgtacccgtgcaaccactgtcgtcaccgcagtgtaatttctccagcgacctcggctccaacggtaccaacagtctggagctgcagaaggtctcaggtaatcagcagatcgtaggacagccacaaatcgccatcacaggacatgaccaggggttgcttgtccaggagcctgacgggttaatggtggcgaccccagcccagacactgaccgacactctggatgatctgatagccgcagtatcaacaagggtgcctactggaagcaatagtagctcacagactacggagtgtctgaccccagagtcctgctcacaaacaacctccaatgtggcatctcagtctatgccacctgtgtatccgagtgtggacatcgacgctcacacagagagtaaccatgatactgccctgactcttgcctgcgccggagggcacgaagagctggtctccgtcctcattgcacgggatgcaaagatcgagcaccgcgataaaaagggttttacacctctgatactggctgccaccgcgggtcacgtgggggtggttgaaattctgctggacaagggaggagacattgaggctcaaagcgagcgcacaaaggacacgccattatcccttgcgtgctcagggggtcgacaggaggtcgtggacttactccttgccagaggcgctaataaagaacacaggaacgtgtcagactacactccactgagcttggccgcatctggcggatacgtgaatatcattaaaatcctgttgaatgcgggagctgagattaattcacggactggcagcaagctcggcatctcccccctcatgctggcagctatgaacgggcacgtccctgccgtcaagctgctgctcgatatgggctctgatatcaatgcacaaatcgagaccaaccgtaatacggcccttactcttgcttgttttcaaggaagggcagaggtggtctcccttcttctcgaccgcaaagcaaacgtggagcatagagcaaagactggcctgactcctctcatggaggccgcttctggtggatacgccgaagtgggaagagtgctcctggacaagggcgctgatgtgaatgccccacctgtcccatcgtccagagataccgcactgactatcgccgcagataaaggtcactataagttctgtgagctgttaatacaccgtggagcacacatagatgtccgcaacaaaaagggcaacactcccctgtggctcgcctccaatggtggccatttcgacgtagtgcaattacttgtacaggctggagccgacgttgacgctgccgacaaccgaaagatcacgccacttatgagtgcttttaggaaagggcacgtcaaggtggtccaatacctcgtgaaagaagtgaaccaattcccatcggacattgagtgcatgcggtacatcgctacgataaccgataaggagctcttgaagaaatgtcatcagtgtgtggaaactattgtaaaagctaaagaccagcaggctgccgaggccaataagaatgcgagtatactgctgaaagaacttgatctggaaaagtctcgcgaagagagtaggaagcaagccctagctgctaagagggagaagcgaaaggagaagcgtaagaaaaagaaagaagaacagaagagaaagcaggaagaggacgaagagaataagccaaaggagaacagcgagctgcctgaggatgaggatgaggaggagaatgatgaggacgtagagcaagaagttcctatcgagccaccatcagctacaactactaccacaatcggtatttctgccaccagcgccactttcaccaacgtgttcgggaaaaaaagggcaaacgtcgtgacaaccccttctaccaaccggaagaacaagaagaacaaaactaaggaaacacccccaacagcccacctgatattgccagaacagcatatgagtctggcccagcaaaaggccgacaagaacaagatcaacggggagcctcgtggaggcggagcgggtggaaatagtgatagcgataatctggactctacagactgcaactccgagtcttcttccggcggtaagagccaggaactgaattttgttatggacgtcaatagcagtaaatacccctccctcttgctgcattcccaagaggaaaagacttcaacggctacctctaagacccagacacgacttgaaggcgaggttaccccaaattccttgagcacctcatataagaccgtctccctacctctctcgtcaccaaacatcaaattgaacctgacctcaccaaagcggggacagaagcgcgaggaagggtggaaggaggtcgtccgccgtagtaaaaagctatccgttccagccagcgttgtctctcgaataatgggaagaggaggatgcaatatcaccgcaattcaagatgtgactggggctcatattgacgttgataagcaaaaggataaaaacggagaacgaatgatcacaattcgcggaggtacagagtccacaaggtacgctgtgcagctaattaacgctctcatccaggacccagccaaggaactggaagacctgatcccgaagaaccacattagaacgcccgctagcactaaatccattcatgcaaatttctccagtggggtagggacaacagctgcctccagcaaaaatgcctttcccctaggtgctccgactttagtgacaagtcaggccacgaccctgtcaacattccagccagcaaataaactcaataagaatgtccccacaaatgtccggagctcctttcccgtatctctacccctggcctatcctcatcctcacttcgcgctcctggcggcacaaaccatgcagcaaattcgacatcctcggttgccgatggcgcaatttggcggaactttttcacctagtcccaatacgtggggccctttccccgtgaggccagtgaaccccggaaatacaaacagttctcctaagcataacaacacttctaggctcccgaaccagaacggcaccgtgctcccgtccgagagcgccggtctggccaccgctagctgtccgatcacggtctccagcgtggtagcggcatcacaacagctgtgcgtaactaacacccggaccccctcttctgtgagaaaacagctgtttgcttgtgtccctaaaacttctcctccagctacagtgataagcagtgtgacctctacctgctccagtctcccttctgtcagcagcgcccctatcactagcggtcaggctccgacaacattccttcccgcaagtacttctcaggcacagctttctagccagaagatggaatcattcagtgctgtgcctcccacgaaggaaaaagtcagcactcaagaccagcctatggccaacctgtgcactccatcctccaccgccaattcctgttcctcgtcggcgtctaatactcccggagcccctgagacccatccgtcatcaagccccacgcccaccagttccaatacacaggaggaggctcagccttcttcagtgtcagacctcagccctatgagcatgccattcgcctctaattcagaaccggcacctttaacgctcacatcccccagaatggtagcagccgataaccaggatacgtctaatcttcctcagcttgctgtgcccgctcctcgagttagtcaccgaatgcaacctcggggttctttttattccatggtaccgaatgcaacaatccaccaagatccccagtccatcttcgtgacaaaccctgtcactctgacccctccccagggcccacctgccgctgtgcagctcagttctgctgtgaacattatgaacgggtcgcaaatgcacatcaatccggctaataaatccctccctccaacctttggtcccgctactttgttcaaccacttttcatccctgttcgactcatctcaagtgcccgctaatcagggctggggggatggcccactctcttcgcgtgtggcgactgatgcctccttcaccgtgcagagcgccttcctgggcaattccgttctgggtcatctcgagaacatgcatcccgacaatagtaaagctcccggttttagacctccttcacagagagtgtctacctcaccagtcggtctgcccagcattgacccatctggttctagccccagcagctccagtgctccacttgcatcattttcaggtatccccggaactcgcgtattcctccagggacccgctccagtcggaacgccaagttttaaccgccagcacttctctccccacccttggacttccgcgtccaattcatcaacttcagctcctccaaccctgggacaacctaagggggtcagcgctagtcaggatagaaagattccccctcctataggaaccgaaaggctcgctagaatcaggcaggggggaagtgtggcccaggcccctgcaggcacatcctttgtggctcctgtcgggcactcaggtatttggtccttcggcgtcaacgcggtctccgagggattatccggctggtctcaaagcgtaatggggaatcaccctatgcaccagcagctgagcgacccttccaccttctcccagcatcagccaatggaaagagatgatagtggaatggtcgctccttccaatatatttcaccagcctatggcttcagggtttgtggactttagtaaggggctgcctattagtatgtacggcggaactattatccccagccacccccagttggccgatgtccctggcggtccactgttcaatggactgcataaccccgatcccgcatggaaccctatgataaaagtgatacagaactccacagaatgtacggacgctcaacaaatctggccaggcacgtgggctccacatattggcaacatgcacttaaagtatgtgaacta

SEQ ID NO: 214436 - DNA, 1851 bp, synthetic construct
  misc_feature 1..1851: note = Description of Artificial Sequence: Synthetic coding sequence
  source 1..1851: mol_type = other DNA
atgctcacagacagcggaggcggaggcacatctttcgaggaggacttggattcggtggctcccagatccgcacccgctggggcttccgagccacccccaccgggaggcgtgggcctcggtatcaggactgtgagactcttcggcgaagccggacccgctagcggggtcggaagctcgggcggagggggatccggtagcggaactgggggaggcgatgctgcgctagatttcaaactggcggctgctgtgcttcggacagggggaggaggtggcgcttctggctctgatgaagatgaggtgtccgaggtagagtccttcatactcgatcaggaagatctagacaatcccgtcctcaagaccacctccgaaattttcttaagcagcaccgcagagggcgctgacttaagaactgttgatcccgagacacaggctcgccttgaggcactccttgaagctgcagcctttgcagaccccgaagtgcttaggcgtttaacctcgtccgtgtcctgtgctctggatgaagctgccgctgccctcacgagaatgaaggccgaaaatagccataacgcagggcaagtcgataccagatcgcttgccgaagcctgttccgacggggatgtgaacgccgtgcgcaagctgttggacgaaggtcgatctgtcaatgaacacacagaagagggggaatccctgctgtgcctcgcctgctcggccggttattacgaattagcccaggttttgcttgcaatgcatgcaaacgtggaagacagggggaacaagggagatatcacgcctctgatggcggcaagcagcggaggttatctggacattgtgaagctgctcctgctgcacgacgccgatgtaaacagccaatctgccaccggcaacacagcccttacctatgcatgtgccggtgggtttgtggatatagtgaaagtgctgctcaatgaaggcgcaaatatcgaagatcacaacgagaatggtcataccccgttgatggaggccgctagtgcagggcatgtggaggtagcacgggtgctgctcgatcacggcgcagggatcaacacccacagtaacgagttcaaggaatccgcacttacactcgcatgctataagggacacctggatatggtccgatttcttctggaggctggagccgatcaggagcacaagacagacgagatgcacacagctctgatggaagcctgcatggatggacatgtggaggtggcacgcctcctcctggatagcggagcacaggtgaatatgcctgccgactcattcgagagccctttaacactggcagcgtgtggtgggcatgtggagctcgcagcattgctcattgagaggggtgccaaccttgaggaagtgaacgacgagggctatacccccttaatggaggctgctagggaggggcacgaggagatggtggcgctcttgctggcccagggtgctaacatcaacgcccagactgaggaaactcaggaaactgctctgacattggcttgttgtggcggattttccgaagtggccgactttctgataaaggccggagctgacattgagttaggttgttcaactcctctaatggaagcttcacaagaggggcatttggagttggtaaaatacttgttagcatccggcgctaatgtacatgcgaccactgcaaccggcgacaccgcactcacctatgcctgcgagaatgggcacacagacgttgccgacgttctgctacaggcaggcgcagacctcgacaaacaggaagacatgaagactattctggagggtattgatccggcaaagcatcaggtgcgagtcgcgttcgacgcttgtaagctgctgcggaaggaatag

SEQ ID NO: 214437 - DNA, 1884 bp, synthetic construct
  misc_feature 1..1884: note = Description of Artificial Sequence: Synthetic coding sequence
  source 1..1884: mol_type = other DNA
atgctcaccgactctggtggcggagggacaagctttgaagaggacctggacagcgtggcaccacggtccgcgccagccggagcctctgagcccccacctccaggtggtgtgggcctaggaattcgcacagtgcgactgttcggggaagcgggtccagccagcggggtgggctcctcgggagggggaggttccggttccggaacaggtggcggtgatgcagctctggattttaaactggccgctgcagtactgagaaccggtgggggagggggagcctctggcagtgatgaggatgaagtgagtgaggtggagagttttatcctggatcaggaagacctcgataatcctgttctcaagaccactagcgaaattttcctgtcttccactgccgaaggcgcagacctgagaaccgtcgaccctgagacccaagcccgactggaagcgctgctcgaagcggctggcataggcaaactgtctacagctgacggcaaagccttcgctgatccggaagtgctgagaaggctcacctcatctgtttcctgtgcattagatgaagccgctgccgctcttaccagaatgaaagccgagaatagccataatgctggtcaggtcgacacccggtctcttgccgaggcctgtagtgacggcgacgttaacgcagttcgcaagctgttagacgagggccgatccgtgaacgagcacaccgaggagggcgagtctctcctttgtctcgcttgttccgccggatattatgagcttgctcaggtgctcctggctatgcacgccaacgtggaagatcgagggaataaaggcgacattacgcctctgatggccgcttcatctgggggttatttggatatcgtcaaattacttctgctacacgacgcagatgtcaacagtcagagcgccaccgggaataccgcacttacgtatgcctgtgccggtggattcgtcgacattgtgaaggtgcttctgaatgagggagctaatatcgaagatcacaatgagaacggccacaccccactcatggaagcagcgtctgcaggtcatgtggaggtggctagggttctgttagaccatggcgctggcatcaacacccactctaatgagttcaaggagtctgctttgacccttgcctgctataagggacaccttgatatggtgcgcttccttttggaggctggcgcagatcaagaacacaagaccgacgaaatgcacaccgcgctaatggaagcatgtatggatgggcatgtggaggttgccagacttctgctggattctggcgctcaagttaatatgccggcagacagcttcgaatcccccctaacactagcagcttgtggtggccacgtggagttggctgccctgctgatcgagagaggcgctaacttggaggaggtgaacgacgaagggtacacaccactgatggaagcagccagagaagggcacgaagagatggtggccttgctgctagcccagggagccaatatcaatgcgcagaccgaggagacgcaggaaacggcactaacccttgcttgttgtgggggattcagtgaagtcgccgatttcctgattaaagccggagctgatatcgagctcggctgctccacccctctgatggaagccagtcaggaaggacatctggagttggtcaagtacctcctggcgtccggcgctaatgtgcacgccacaactgctactggagacacagctctgacttacgcatgcgaaaatggccacacggacgttgctgacgtcctactgcaggcaggggctgatctggacaagcaagaggacatgaagaccattttggaaggaatagacccagcgaaacatcaggttagggtcgcgtttgatgcatgtaagctgttgcgcaaagaatag

SEQ ID NO: 214438 - DNA, 4461 bp, synthetic construct
  misc_feature 1..4461: note = Description of Artificial Sequence: Synthetic coding sequence
  source 1..4461: mol_type = other DNA
cccagggtgggcaggcacaggcttcggctaagggtcagaacaatgctgacagattcagggggagggggaacctcattcgaggaggaccttgactccgtcgccccaagatccgctcctgcgggtgcaagtgagcctcctccgcctggtggagttgggctgggaatacgtacagtcagattgttcggagaggctggtccagcttctggggtgggcagctccggcggaggaggctcagggtcagggacagggggaggcgacgctgccctggatttcaagctggccgctgccgtgctaaggactgggggaggtgggggagccagcggcagcgatgaagatgaagtgagcgaggtggagtctttcatactcgatcaagaagacctcgataaccccgttctgaagaccacttcagaaatctttctcagctcaaccgctgagggcgctgatttgcggacagtggatcctgagacgcaagctcgcttggaggcattactggaggcggcaggcattggcaagctgtcaacagcagacggaaaagccttcgctgaccctgaggttctcagacgtttgacctctagcgtgtcgtgtgctttggacgaggctgccgctgcactgacccgcatgaaagcagagaattcccataacgctggccaggtggatactcgctccctcgccgaggcttgctcagacggcgatgtgaacgctgttcggaaactcctcgacgagggccgtagcgtcaacgagcatacagaggaaggcgagtcattgctgtgccttgcttgttctgcgggatattacgaactggcccaggttctgctggcaatgcatgctaatgtggaggatagaggtaacaagggcgacatcacgcccctgatggctgcaagttcaggaggttatcttgacattgttaagctgctgcttctgcacgatgcagatgtgaactctcaatcagccaccggtaacactgcacttacgtatgcgtgtgccggaggcttcgtggatattgtgaaggttttactgaacgaaggcgcaaatattgaggatcacaatgagaacgggcatacccccctaatggaggccgcttctgcaggacacgtcgaggtggctcgagtgctcctggaccacggtgcgggtataaacactcatagcaatgagttcaaagagagtgcactgacactggcctgctacaagggccatctggatatggtgagatttttgctggaagctggcgctgatcaggagcataagaccgatgagatgcatacagccctgatggaagcttgcatggacggacacgtggaggtggcacgacttcttttggacagtggggctcaggtgaatatgcccgcagactctttcgaaagtccactcaccctcgcggcatgcgggggtcatgttgaattggccgctctgctgatcgagcgcggtgctaacctggaggaagtcaacgatgagggctacactccgctcatggaagctgccagagaaggccacgaagaaatggtggctcttctcctcgcacaaggggctaacattaacgcacagaccgaggaaacccaggaaacagccctgaccctggcttgctgcggcggtttttcagaggtagcagattttttgataaaagctggtgcagatatcgaactcggctgctcgacaccccttatggaggcatcccaggaaggacatctggaactggtgaagtacctgctcgctagcggcgctaacgtgcatgccacaacggccacaggggacaccgctctgacctacgcttgcgagaatggccatacagatgtagctgatgtgctgctgcaagcaggcgctgatttggataagcaggaggacatgaaaactattttggaaggaatagacccggctaaacaccaggaacacgagtcagaaggcggtcgaacccctttaatgaaagcagcacgtgctggtcacctctgcacagtacagttccttattagcaagggcgcaaacgtgaacagggcaacagccaacaatgatcacactgtagtctccctggcatgcgcagggggacatctcgcagttgtggagcttttactggctcatggcgcagatccgacacacaggttaaaggacggctcaaccatgttgattgaggctgccaaggggggacacacaaatgtcgtctcatatcttctcgactacccgaacaacgtgctctccgttccaaccacagatgtttcacagctgcccccaccaagccaggaccaaagtcaggtgccgagggtccccacgcataccttggcaatggtcgtgccccctcaggaaccagataggacaagtcaggagaacagtcccgctttgctcggcgtgcagaagggcacttcaaagcagaagtcaagcagtctacaggtggcagatcaagacctacttccctctttccacccatatcagccattggaatgcatcgtcgaagagaccgaaggaaaacttaatgaattgggccagcggatcagtgcaatagagaaggctcagctaaagagcctcgagctaattcagggagagccacttaataaagacaagatagaggaattgaaaaagaatcgagaagaacaggtgcagaagaagaagaaaatcctgaaagagctacagaaggtggagcgtcagcttcaaatgaagactcagcaacagtttacaaaagaatacctggaaaccaagggccagaaggatacggtgtctctccaccagcagtgtagtcacagaggtgtatttccagagggagaaggagatggatctttgccagaggatcactttagcgagttaccacaggtggacactattttgttcaaggacaatgacgtggatgatgagcaacagagcccgccatcggctgaacagatagatttcgtgccagtgcagccactgagttcgccccagtgcaacttttcaagtgatctagggtccaatggtaccaactctctggagttacagaaggttagcggaaatcagcagattgtagggcagcctcaaatcgcaattacaggacacgatcaaggactgctagtgcaggaaccagacgggctcatggtcgctacacccgcacagaccctgacggacactctggatgacctgatcgcagcagtttcaacgagagtaccaacaggatcaaacagctcatcccaaaccacagagtgcctgacgccagagagctgctcacagaccacaagcaatgtggcttcccaaagcatgcccccagtgtacccttccgtggacatagacgcacatacagagtccaatcacgacaccgccctaactctggcgtgcgccggagggcacgaagagcttgtgagcgtgctcatcgccagggacgctaaaatcgagcaccgggataagaagggatttactcccctcatcctcgctgccactgccggacacgtcggcgtggtggagatcctgctggataagggaggcgacatcgaggcccagagcgaacggaccaaggacaccccactgtctctggcctgtagcggtggccgtcaagaggtggtggaccttctgttggcgcgaggggctaacaaagagcaccgcaacgtttcggactatacacctttgtctctggcagcatccgggggttacgttaatattattaagatactgttgaatgccggagccgagatcaattcgcgcactggaagtaaactcgggatttcaccgctgatgctggcggctatgaatgggcacgtcccagccgtaaaactcttgctcgatatgggatccgatataaacgcccagattgaaaccaaccgcaacaccgccctcaccctggcttgtttccaggggagagccgaagtggtgagcctcctgcttgacagaaaagctaatgttgagcatcgtgccaaaaccgggcttacacctctgatggaagccgcatcaggaggctacgcagaggtgggacgggtgctgctcgacaaaggagccgatgtcaatgcccctcccgttccatccagtcgcgacaccgccctgacaatagccgcagataagggtcactacaaattctgcgagctactgatccatcggggtgcacacatagacgtccggaataagaaggggaacacccccctctggctcgcatcgaatggcggacacttcgacgtagtacaactgctggtgcaggctggagcggacgtggatgctgcagataacagaaagataaccccccttatgtctgcctttagaaagggccacgtgaaagtagtacagtacctggtgaaggaagtaaatcagttcccatccgacatcgagtgtatgcgctatatagccaccatcaccgacaaggagctcttgaaaaagtgccaccagtgcgtggagacaatcgtcaaggccaaagaccaacaagccgctgaggccaataagaacgccagcatcctgcttaaagagctggatctggaaaagtcccgcgaggaatcgcgaaagcaggctctggccgcaaagcgctag

SEQ ID NO: 214439 - DNA, 1863 bp, synthetic construct
  misc_feature 1..1863: note = Description of Artificial Sequence: Synthetic coding sequence
  source 1..1863: mol_type = other DNA
atgtctctggctcagcaaaaggcagacaagaacaagatcaatggagaaccgcgtggaggtggcgctggcggtaactccgattctgacaatctggattcaactgattgtaattcagagagcagttcgggaggtaagtcgcaggaacttaatttcgtcatggatgtcaattcatctaagtacccgtcgctattgctgcattctcaagaagagaaaacatccaccgccacctccaaaactcagacgcgccttgaaggggaagtcacccccaatagcttatcgacttcttataaaacagtgtcactgcctctcagcagccctaacatcaagctgaatctgactagtcccaagcggggacaaaagcgcgaggaggggtggaaggaagtggtgcggaggagcaaaaaattgagcgtgccggcttctgtcgtgagtagaataatgggcaggggcggatgtaacatcaccgccatccaggatgtgactggggctcatattgatgttgacaagcagaaggataagaatggggagagaatgattacaattcgcggaggaactgagagtacccgctacgccgttcagctaataaatgcacttattcaggacccggcaaaggagctggaggacctgatccccaaaaaccacatcaggaccccggctagcacaaaatctattcacgcaaatttttcttccggggtcggtaccacagccgcttcatctaaaaatgccttcccactcggggctcccactcttgtgacaagccaggcgactactttgtccactttccagcctgcgaataagctaaataagaacgttcccacgaatgtccgaagctcctttccagtgtcgctgcccttggcgtaccctcacccccactttgccctgttggcagcacagactatgcagcagattcggcaccctagacttccaatggcacagttcgggggaacctttagtccgtcgcccaacacttggggtcctttccctgtaaggcctgtgaaccccggtaatactaattcgagtccgaaacacaacaacaccagtaggctgcctaatcaaaacgggacggtgctccctagtgaaagtgccggactcgcaaccgcatcctgtccaatcaccgtaagttcagtcgtcgcagccagccaacagctgtgtgtcacaaatacacgcacccccagcagcgttcgcaagcagctgttcgcctgtgtcccaaagacatctcctcccgctacagtgataagttcagtgacgtcaacctgttcttctcttccatcagtgtctagtgccccaatcaccagtggccaagcgccaacaacatttctaccggcttcgacatcccaagctcagttgtcctcccagaagatggaaagcttcagtgcagtccctccaactaaagaaaaagtcagcactcaggaccagccgatggctaatctgtgtaccccttcctctacggctaactcttgttccagcagcgcctcaaacactcccggagctccagaaacccatcctagcagctcgcccacacccacgtctagtaacacccaggaagaggctcagccgtccagcgtgtcggacctgtcacctatgagtatgccgttcgcttccaactctgagcccgctccattgacgctaacaagtcctagaatggttgcggcagataaccaggacacctctaacctgcctcagctggcggtgccagcccctagggtctcgcatcgaatgcaacccagggggtctttttactccatggtgccaaacgcgactatccaccaggatccgcaaagcatcttcgtaacaaatcctgttacactgtgggaggccgaggccagtgggttgcatgaagtacggagcctgcgtcaagcgtggtag

SEQ ID NO: 214440 - DNA, 2601 bp, synthetic construct
  misc_feature 1..2601: note = Description of Artificial Sequence: Synthetic coding sequence
  source 1..2601: mol_type = other DNA
atggatgtgaactcctctaagtaccctagtttactactgcatagtcaggaagagaagactagcactgctacaagtaaaacccagacaaggctcgaaggtgaggttaccccaaactctctgtctacaagttacaaaaccgtgtcacttcccttgtcgtcgccaaacattaagttgaacctgacttcacccaaacgaggacagaagcgcgaagagggctggaaggaagtcgtgcgcagatcaaaaaagctgagcgtgccggcaagtgtggtgagcagaattatgggtcggggtggatgcaatatcacagccattcaagatgttacaggggctcatattgacgtggacaaacagaaggacaaaaacggagagaggatgataaccatcaggggcggtacagaatccacccggtacgcggtgcagcttattaacgcattgatccaggatcctgcaaaggaactggaagatctgatccccaagaatcatatccgtaccccagcctccacgaagtccatccatgcaaactttagctccggagtggggactactgctgccagcagcaagaatgctttccccctgggcgcaccaacacttgtgacaagccaggcaaccacgttaagcacatttcagcccgctaataaattaaacaaaaacgtgccaactaatgtgagatcttctttcccggtgtcattacctctcgcatatccccaccctcattttgcacttctcgccgctcagacaatgcagcagattcggcaccctagacttcctatggctcagttcggcggaactttctcaccttctcccaatacatgggggccttttcctgtgaggcccgttaatcctggcaataccaactctagccctaagcacaataatacttcaagattgccaaaccagaatgggaccgtgctgcccagtgaatccgctggtttggccactgccagctgtcctatcacggtttcatccgtggtcgccgcaagccagcaactctgtgtgacaaacacgaggaccccttcctcagtacggaagcagctgtttgcatgcgtacctaagacttccccaccagccaccgtcatcagtagcgtgactagtacatgtagcagtctcccatcagtgagttctgcccctatcacttctggccaggccccaactacatttttgcctgccagtacatctcaagcacaactgtcctctcagaagatggaaagcttctcggccgttccccctacaaaagaaaaggtgtcgacccaggaccagccgatggctaacttatgcaccccatcgtcaacagcaaatagttgctcctctagtgctagcaacactcccggtgccccagaaactcatccttcgagcagccccacccctacaagcagtaatacacaggaggaggcacagccatcttccgtttcagacttaagcccaatgtctatgccgtttgcttcaaactctgaacccgctccccttacactgactagccccagaatggtagccgcagataatcaggacacatcaaatctgccacagcttgctgtgcctgctccgagggtttcacaccgcatgcagccgcgtggatctttttactcaatggtgcctaatgcaacaattcatcaggacccgcagtccattttcgtcaccaatccagtgaccttgacacctcctcagggcccacccgctgcagtgcagctgtcttcggcagtgaacattatgaacggctcacagatgcacatcaaccccgcaaacaagagtttaccccctaccttcggaccagcaactctgttcaatcactttagtagtttgtttgatagctcgcaggtgcctgctaaccagggttggggtgatgggcctttgtcatcccgggttgctactgacgcttcattcacagtgcagtccgcttttctgggcaattctgttctggggcatctggaaaatatgcaccccgacaactctaaagcaccgggttttcggccaccgtcccaaagggtgtccacctcccctgtcgccaccagcgcccctccaacccttggacagcccaagggagtttctgcctcgcaggataggaaaatccctcctccgatcggtaccgagcgcctagctcgcattagacaagggggatccgtggcgcaggcaccggcaggtacatcttttgttgcaccggttgggcatagtggaatctggagtttcggagtcaatgccgtgtcagaaggcttgtccggttggtcacaaagtgtgatgggaaaccaccctatgcaccaacagctgtcagacccatctacattcagtcaacaccagccgatggagcgcgatgacagcgggatggtggcgccatctaatatcttccatcagccgatggccagtgggtttgtggattttagtaagggacttcccatttctatgtatgggggtaccattataccatcccacccccagctggctgatgttccaggaggtccgctctttaacggactgcacaatcctgacccagcctggaatcctatgatcaaggtcatccagaactcaacagagtgcactgacgcacagcagatatggccaggcacttgggcccctcatattggcaacatgcacctaaagtacgttaattag

SEQ ID NO: 214441 - DNA, 2298 bp, synthetic construct
  misc_feature 1..2298: note = Description of Artificial Sequence: Synthetic coding sequence
  source 1..2298: mol_type = other DNA
atggccgcagatccaaccgaactaagactgggaagtctgcctgtgtttactagagacgatttcgagggtgactggagactggttgcaagcggcggattctcacaggtttttcaggcacggcatcggaggtggaggaccgagtacgctattaagtgtgcaccttgtctccccccagacgctgccagtagtgatgtgaattatttaattgaggaggccgctaagatgaagaagataaagttccagcacattgtgtccatctacggcgtctgtaagcagcccttaggaatcgtgatggagttcatggctaatggatcattggagaaagtgctcagcacacactctttgtgctggaagctgagattcagaatcatccacgaaacctccctcgctatgaactttctgcactccatcaaacccccattgctgcacctagatttaaaacctggcaacatccttttagattctaatatgcatgtgaaaattagcgattttggtctgtcaaaatggatggagcagagcacccgaatgcagtatatcgaacgcagcgccctccgaggcatgctgtcttatattccccctgagatgttccttgaatccaacaaggctcctggcccaaagtacgacgtttattctttcgccatcgtgatatgggagctgctgacacagaagaaaccctattccgggttcaacatgatgatgattatcatcagagtcgctgctgggatgcggccttctctacagccagtgagtgaccaatggccaagtgaggctcagcaaatggtagacctcatgaaacgttgctgggaccaggacccaaagaagagaccatgtttcttggatatcacgatagaaacagacatcctcctgtctctccttcagtctcgggtggccgtgccggaatctaaagcacttgcgcgaaaagtctcctgcaaactgagcctcaggcagcccggtgaagtgaacgaagatatctctcaggaactgatggactccgatagtggtaactatctgaaacgggctttgcaactgtctgatcgaaagaatctggtgccaagggatgaagaattatgcatctacgaaaacaaagtaaccccactgcatttccttgtcgcccaagggtccgtggaacaggtgcgacttctcttagcccatgaagtggatgtcgattgtcagaccgcctccgggtacacacccctgctgatcgctgcacaagaccagcagcctgatctttgtgctttgctgctggcccacggggctgatgccaacagggtggatgaggacggctgggccccactccatttcgctgcccagaacggagacgacggcacagcccgattgttactggaccatggcgcttgtgtggatgcccaggagcgggagggctggaccccactgcacttggcggcacaaaacaattttgaaaatgtcgctcggctcttggtaagccgccaggcggatcctaatttgcatgaggctgagggaaagactccactgcatgtggccgcttatttcggccacgtgtcgctcgtgaaactactaacctcgcaaggcgctgagctggacgctcaacagcggaacctgcgtacaccccttcacctggcggtggaacgtggtaaagtacgcgcaattcagcacttgctaaaaagcggtgctgtgccagacgcgctggatcagagcggatatggccctctccacacagccgctgctcgaggcaagtacctgatctgcaaaatgctgttgcgctacggagctagtctggagttgccaacacatcaggggtggactccactgcatcttgcagcttacaagggccatttggagatcattcacctcctcgcagaaagccatgctaatatgggtgcgctgggcgctgtcaactggacccccctgcatctcgccgctcgccacggagaggaggccgtcgtgtctgccctgcttcaatgtggggctgatcctaacgcagccgagcagtctggttggacccctctgcaccttgccgtgcagcgatctacctttttgtctgtgatcaatcttttagaacatcacgccaacgtgcatgcacggaacaaggtgggttggacacctgcccacttggccgctctgaaaggaaacactgccatcctaaaagttctggtggaagctggcgctcagctggatgtccaggacggagtgtcatgcactcccttacaattagctctgcgcagtaggaagcagggaatcatgtcgtttctggaagggaaagagccaagcgtggcaaccctgggaggatccaaaccaggagccgaaatggaaatttag

SEQ ID NO: 214442 - DNA, 1008 bp, synthetic construct
  misc_feature 1..1008: note = Description of Artificial Sequence: Synthetic coding sequence
  source 1..1008: mol_type = other DNA
atggctgaaggaggcagtccagacggaagggccggaccaggatcagccggtcgtaatctcaaggagtggctacgcgagcagttctgcgaccaccccctggaacattgtgaggatacccggttgcacgacgccgcatacgtcggcgatctgcaaaccctccgctctctgctgcaggaggagagttacaggtcccgcattaatgagaagtctgtgtggtgctgtggctggctcccatgcacacctctccgtatcgccgctacagccggtcatggcagctgcgtggacttcctgattcgaaaaggcgctgaggtggatctggtcgacgttaaagggcagaccgctttgtatgtcgctgttgtcaatgggcaccttgagtcaactcaaatcctgctcgaggcgggtgcagatcccaacggcagtcgacaccaccgcagcaccccagtgtaccatgctagcagagtcggcagggccgacattcttaaggcacttatccggtatggcgctgatgtggacgtcaaccaccacctgacccctgatgtacaaccacgcttctcccggcgtctcacgtcactggttgtgtgtcctttgtacatttctgccgcttatcataacctccagtgtttcaggttgctccttctcgctggtgccaaccctgacttcaattgcaatggacccgtcaatacccagggcttctaccgaggctcccctggctgtgtcatggacgctgtgctacgtcatggctgcgaggctgccttcgtgagtctgctagtcgagttcggggcaaatttgaacctcgtgaaatgggagtcactggggcctgaatcacgcggacgacgcaaggtggaccctgaggccctgcaggtattcaaggaggctcggtccgtgccacgcaccctgctgtgcctgtgccgtgtggcagtacgcagagccttgggaaagcacagactccacttaatcccaagcctgcccctgcccgatcccatcaaaaaattcctccttcacgaatag

SEQ ID NO: 214443 - DNA, 909 bp, synthetic construct
  misc_feature 1..909: note = Description of Artificial Sequence: Synthetic coding sequence
  source 1..909: mol_type = other DNA
atgctccagctcactggcgaaaacgagaaaaactgcgaagtgtccgaaagaattagacgttccggtccgtggaaggagatctcatttggagactacatctgccacaccttccagggggactgctgggccgacagaagcccattgcatgaggctgcggctcagggcagactgctggccttgaagacgctgatcgcacagggagtcaacgtcaatctggtgactatcaacagagtttctagccttcatgaggcttgcctggggggacatgtcgcatgcgctaaggcgctccttgagaacggggcacacgttaatggagtgacggtgcacggggctacgcctctgttcaatgcgtgctgctcggggtcagcagcctgtgtaaacgtgttgctggagttcggtgcaaaggcccaactcgaggtacacctggcttcgcctatccacgaagctgttaagcgcggtcacagagagtgcatggaaattctcttggcaaataatgtcaatatagatcacgaggtgccccaactgggcacccccctgtacgtggcctgtacttaccaaagagttgactgtgtgaaaaaactgcttgaattgggcgctagcgtagatcatggccagtggttggatacccctctccacgccgcagctcgacagtcaaatgtcgaggtgatacaccttctgacagattatggggctaaccttaaacggaggaatgcccagggtaaatctgccttggacctggccgcacccaaatcctctgtggaacaagcacttctactgcgagagggccctcccgcattgagccagctgtgcagactgtgcgtgcgtaagtgcctcggacgcgcatgccaccaggctatccataagctccacctgccagagccactggaacggtttctgctgtatcagtag

SEQ ID NO: 214444 - DNA, 972 bp, synthetic construct
  misc_feature 1..972: note = Description of Artificial Sequence: Synthetic coding sequence
  source 1..972: mol_type = other DNA
atggaggacggcccagttttttacgggtttaaaaacatttttataaccatgttcgctactttcttcttctttaagttgctgatcaaagtgtttctggcactgctcacccatttctatatcgttaaagggaataggaaagaggccgctcgcattgccgaggagatttacggcggaatctccgactgctgggctgataggtcaccccttcatgaagccgctgcacaaggtaggcttttggcgttgaaaaccctgattgctcagggggtcaatgtgaatctagtcactattaatcgggtgtcttccctacacgaagcctgcctcgggggacatgtggcctgcgctaaagcgctgctcgagaacggagctcacgtcaacggagtgactgttcatggagcaacgccgctgttcaatgcctgctgtagcggctctgccgcttgcgttaatgttctgcttgagttcggcgcaaaggcgcagctcgaggtccatcttgcatctcccattcacgaagctgtgaaacgcggtcatagagagtgtatggaaattctcctagcaaataatgtcaatattgaccacgaggttccccagctcggtacacctctgtacgtggcttgcacctaccagcgtgtagattgcgtgaagaagctactggaactgggggcttctgtggatcacgggcagtggctggacactcccctacacgccgctgcaagacagagtaacgtggaggtgatccaccttttgacggattatggtgcgaacctaaagaggcgaaacgcacaggggaagtcagctttggacctggcagcacctaagtccagcgtggagcaggccctattgctacgggagggaccacccgctctttcccaattatgccgtctgtgcgttagaaagtgtctgggacgcgcttgtcatcaagcgattcacaagctccatctccctgaacctctggaaaggtttttgctttaccaatag

SEQ ID NO: 214445 - DNA, 909 bp, synthetic construct
  misc_feature 1..909: note = Description of Artificial Sequence: Synthetic coding sequence
  source 1..909: mol_type = other DNA
atgctgcagctgacaggggagaacgaaaaaaattgcgaagtttctgaacgcatccggaggagcggcccatggaaagagatctccttcggagattacatttgccatactttccaaggcgattgctgggccgacagatcacccctacatgaggctgccgctcaaggcaggttactggctttaaagacactgatagcccagggcgtgaacgtgaatttggtaacaatcaacagagtgagtagtctacatgaagcttgtctcggcggacacgtcgcttgtgcaaaagctctgctggaaaatggggcacatgtgaacggcgtaaccgtgcacggggcaacccccttgttcaatgcctgctgcagcggcagcgcagcctgcgtgaatgtactgctggagtttggggcaaaagcacagctggaagttcacttagcctctcccattcatgaggccgtgaagaggggacacagagaatgtatggaaattctgcttgcgaataatgtcaatatcgatcacgaggtcccccaacttggcacccccctctatgtggcctgcacctatcagcgggtcgactgtgtgaaaaaactgcttgagctcggggcaagtgtcgaccacggccagtggctggacacgcctttgcacgccgcagccagacaatccaatgtggaagttatccatctgctgaccgactacggagccaatctgaagcgaaggaacgctcagggaaaaagcgctctcgatcttgccgcacccaagtccagtgtggaacaagcactcctcctacgggaaggacccccagccctatcacagctctgtcgcctttgcgtaaggaaatgtctgggaagagcctgccaccaggcaattcacaagctgcatctccccgaacctttagaacgattcctcttgtaccaatag

SEQ ID NO: 214446 - DNA, 921 bp, synthetic construct
  misc_feature 1..921: note = Description of Artificial Sequence: Synthetic coding sequence
  source 1..921: mol_type = other DNA
atggaggacggccctgtcttttatggttttaagaacatcttcatcaccatgttcgcaactttcttcttttttaaactgctgatcaaggtattccttgctctgttgacccatttttacatcgtcaaagggaaccggaaagaggcggctagaatcgccgaggaaatctacggagggatctcggactgttgggctgacaggtctcctctacacgaggcggcagctcaaggacggctcctcgcactgaaaactctcattgctcaggcctgtttgggtggacatgttgcctgtgctaaggccctgctggaaaacggggctcatgttaacggggtgactgttcatggggcaactccgctattcaacgcgtgttgttccggcagtgccgcatgcgtcaacgtgctactcgaattcggggctaaagcccagctggaggtccatctagcctccccaatccatgaggcagtcaagcggggacatcgggaatgcatggaaatcttgctcgccaataacgtaaacatagaccatgaagtgccccagctcggcacacccctgtacgtagcctgtacatatcagagagtggattgcgtgaaaaaactgctggagctcggggcaagtgtcgatcatggccagtggttggatacacctctccacgctgctgccaggcagtcaaacgtggaagtgatccacttgctcacagactatggagcaaatttgaagcggagaaatgcccagggcaagtctgccttggacctggccgctccaaagtcaagtgtagagcaagcattgctgctgcgagaaggccctccagcactatctcaactgtgcaggctgtgtgtcaggaaatgcctcgggagggcgtgccatcaggccatccataagttgcacctccctgagcccctcgaaaggttcctgctctatcagtag

SEQ ID NO: 214447 - DNA, 1764 bp, synthetic construct
  misc_feature 1..1764: note = Description of Artificial Sequence: Synthetic coding sequence
  source 1..1764: mol_type = other DNA
atgacccggttcagctatgccgagtatttctccctttttcactcctgcagcgcccctagcagatccacagcacctccggagtcatctcccgctagagcgcctatggggctgttccaaggagttatgcaaaagtattctagttctctgttcaagacatctcagctggcgcctgctgacccccttattaaggccatcaaggacggcgatgaagaggccttaaagacaatgatcaaagagggcaagaatctagctgaacctaataaggaagggtggctgcccctgcatgaagccgcatattatggtcaggtagggtgtttgaaggtgttgcagagggcgtatcctggcacaatcgaccaaagaaccctgcaggaagagaccgcggtgtacctggctacgtgtagggggcacctggactgtctactgtccctgctacaagccggagccgaacccgatatcagcaacaaaagccgagagacccctctctataaggcatgcgaaaggaagaacgccgaggccgtgaaaatcttggtgcagcacaacgcagatacaaatcaccgctgcaatagaggatggaccgccctacacgaaagtgtctctcgcaacgatctggaggtgatgcaaattctggtaagcggaggggcaaaggtggagtctaaaaatgcatatggaattactcctctgttcgtggccgctcagtccggacagctggaggccttgcgattcttagccaagtatggcgctgatatcaacacacaggcctcagataacgcctccgcactgtatgaggcatgtaaaaacgagcatgaggaggtggtcgagttcctgctgtctcagggggctgatgccaataagacaaataaggatggcctactgcccctccacattgcttcaaagaaagggaattacagaatcgtccagatgttactccccgtgacaagcagaacccgtattcgtagaagtggggtcagcccactgcaccttgctgcggagcgtaaccacgatgaggtactcgaggcactactgtccgcacggttcgacgttaacacccctctggccccagagcgcgctcggctgtacgaagaccgaaggagtagcgcgttgtacttcgctgtggtgaataacaacgtctacgcgaccgagctactcctgcagcacggagcggaccctaaccgagacgtgataagtccccttctggtcgctatcaggcacggctgccttcgcacaatgcaacttcttctggatcatggcgcaaacatcgatgcctacattgccacacaccctaccgctttccctgctaccattatgtttgccatgaagtgcctttccctgctgaaattcctgatggatttggggtgcgacggagaaccatgtttcagctgcttatacgggaatggtccccaccccccagcaccacaaccatcttcacgcttcaatgacgctccagcagccgacaaggagccatccgtggtccagttttgtgaatttgtgtctgcaccggaagttagccgttgggctggccctatcattgacgttttgctcgactacgtcggaaatgtgcagctctgtagcaggcttaaagaacacatagactcttttgaagattgggccgtgatcaaagagaaggccgagccgcctcgaccgctggctcacctgtgtaggcttagagtccgtaaggcgattggcaagtatcggattaagctgctcgacacccttcctttacccggtaggcttattcggtacctgaagtacgaaaacactcaatag

SEQ ID NO: 214448 - DNA, 1812 bp, synthetic construct
  misc_feature 1..1812: note = Description of Artificial Sequence: Synthetic coding sequence
  source 1..1812: mol_type = other DNA
atggcaatcgaacagagcctcgctgataaaacgcgcggtcctactactgccgaagccacagccagtgcttgtacaaatcgtcagcctgcccacttttacccatggacccggagcacggccccacctgagtcctctcccgcaagggcccctatgggcctctttcagggagtcatgcagaagtattcgtccagcctctttaaaaccagccagctggcccctgccgaccccctgattaaggccattaaggacggggacgaagaagccctcaaaacaatgattaaggaagggaaaaacctagcagaacctaataaagaaggttggctgcctctgcatgaagccgcatactacggtcaggtaggttgcctaaaagtgctgcaacgggcatacccgggaaccatagatcaacggactctgcaggaggagacagccgtctatctggccacgtgtagaggacatctggattgtttattgagcctgctgcaagctggcgctgaaccggatatctcaaacaagagcagggagactccattatacaaggcttgtgaacgtaaaaacgctgaggccgtcaagattctcgtccaacacaatgccgacaccaatcatcgctgtaaccgtgggtggacagccctacatgaatccgtaagtcggaatgatctcgaggttatgcagatacttgtctccggcggagccaaggttgagagcaaaaatgcttacggcataactcctttattcgtggctgcccaatcaggccagctggaagccctcaggttcctcgcgaagtatggtgctgatatcaacacacaagccagcgataatgcctctgctttgtatgaagcatgtaaaaatgagcacgaagaagtggtggaattcttgctgagtcagggtgctgatgccaacaagacaaataaggatgggttactgccgttgcacattgcttccaaaaaagggaattaccgcatcgtacagatgctgttgcccgtgacttccaggaccaggatacgcagatccggcgtctccccattacacctggcagcggaaaggaaccacgacgaagtgctggaggccttactgagtgcccgatttgacgtgaatactccgttagcaccagaaagggccaggttatacgaggatagacgatcatccgctctttactttgccgtagtgaacaacaacgtgtatgctactgaattactactgcaacacggcgctgacccaaatagggacgtgatctcacctctgctcgtggccatcagacatggttgcctgaggactatgcaattactgctggatcatggtgccaatattgacgcatacatagcgacgcacccaacagcctttccagccaccattatgttcgccatgaaatgtctctctcttctcaagttcctgatggacctgggctgcgacggtgagccatgtttctcatgcttgtacgggaatggtccacatccccctgcaccgcagccctcgtcacgattcaatgacgccccagccgctgacaaggaacccagtgtggtgcaattttgcgaatttgtatccgccccagaagtgtctagatgggctgggcctataattgatgtgctgcttgattatgtgggaaacgtgcaattgtgctcccggctgaaggagcatatcgactctttcgaggactgggctgtgataaaagaaaaagccgaaccgccacgtcccctggctcacttatgccgactcagagtccgtaaggcaattggtaaataccgaatcaaactcctggacacacttccgctccctgggcgtcttatcagatatctcaagtatgagaacacacagtag

SEQ ID NO: 214449 - DNA, 1470 bp, synthetic construct
  misc_feature 1..1470: note = Description of Artificial Sequence: Synthetic coding sequence
  source 1..1470: mol_type = other DNA
atgcgcccagccgaccccctgattaaagccattaaagacggtgacgaagaggcattgaaaacaatgatcaaggaaggtaagaacctggctgaacctaataaagaaggctggctacctctgcacgaggccgcttactatgggcaagtggggtgtctaaaagtgctgcagagagcttatccgggtacaatcgaccagcggactctccaggaggaaacggccgtgtacttagctacttgccgcggtcatttagattgtttgctcagcttgctgcaggctggggctgagcctgatatctcaaacaagtcccgtgagacccctctgtataaagcctgtgaaagaaagaatgctgaagccgttaagatcctggtgcaacacaacgccgatacgaaccacagatgtaatcgcggttggaccgcgctgcatgaatccgtgtcccggaacgatctggaggtgatgcagatcctggtctctggcggtgccaaggtcgagagtaaaaacgcatacggaattactcccttgtttgtggccgctcaatctggacagctcgaggcactgagatttcttgcaaagtacggcgctgacatcaacactcaggcctctgacaatgccagcgcgctgtacgaagcctgtaaaaatgagcacgaggaggtcgtggaattcctgctctcccaaggggcagatgcgaacaagactaacaaagatggcctgctgcccttacacatcgcctccaaaaaaggcaattatcggattgtgcagatgttgctgcccgtgacttctcggacgcgaattaggaggtccggggtgtctcctttgcaccttgctgccgaaagaaatcacgacgaggtcctcgaggctcttctgagcgctagatttgatgttaataccccattggcacctgaaagagccaggctgtatgaagatcggaggtccagcgcgttgtactttgccgtggtcaataacaatgtctatgctacagaactcctgctgcaacatggcgcagaccctaatcgggatgtgatcagtccgcttttggttgcgatcaggcacggctgtctccgcactatgcagctgctgctggaccacggtgccaacattgacgcttatatcgccacacaccccactgctttcccagccactattatgttcgccatgaagtgtttgtcactcctgaaattcctcatggatttggggtgcgatggcgaaccatgctttagctgcctgtacggcaacgggcctcaccctcccgctccgcagccgtccagccgctttaatgacgcccctgccgctgacaaggagccttcagttgtgcagttctgtgaatttgtctctgcacctgaggttagcagatgggcaggacccatcatcgacgtattgctggactatgtggggaatgttcagctctgtagtagattaaaagaacacatcgattccttcgaggattgggttcttgaggggttcgtgaagtactag

SEQ ID NO: 214450 - DNA, 1908 bp, synthetic construct
  misc_feature 1..1908: note = Description of Artificial Sequence: Synthetic coding sequence
  source 1..1908: mol_type = other DNA
atggctacacagatttctacaagggggagtcagtgtaccattgggcaggaggagtactccctctactcaagccttagtgaggatgagctggttcagatggctattgagcaatccctagccgacaagactcgcggaccgacaaccgccgaagccacagccagcgcctgtaccaaccggcagcccgctcatttctatccatggacgagatcaaccgcaccacccgagtcctcgccggcaagggctcccatggggctgtttcaaggcgtgatgcagaagtattccagcagtctatttaaaactagccagctggctcccgctgaccctttgataaaggcaattaaagatggggatgaggaagctctcaagactatgataaaagagggcaagaacctcgctgaaccgaacaaagaaggctggctccccttgcacgaagccgcttactacggccaggtaggttgcctgaaagtgttgcaacgtgcctacccaggaactatagatcagcggactttgcaggaggagaccgccgtgtacttggccacttgcaggggccacctggattgtctcctgtcactgcttcaggccggagctgagcccgacatttcgaacaagtcaagagagactccgttatataaggcctgtgagcgtaagaacgccgaggcagtgaagattctagtgcaacacaacgccgataccaatcatcggtgcaatcgaggctggaccgcactccatgagtcggtcagcaggaacgatcttgaggtcatgcagatactggtcagcggaggcgcaaaagtcgagagcaaaaatgcgtatggcattaccccgttatttgttgctgcacagagtggacagttagaggcactcaggtttcttgccaagtatggtgcagacattaatacacaagcgagcgacaacgcttcggcgctctacgaggcctgtaagaacgaacacgaagaggtagttgagttcctactctcgcagggcgctgacgctaacaagacgaacaaggacgggctgctcccacttcacattgcttccaagaagggcaattacaggattgtgcagatgctgttgccagtgacatctaggaccagaattagacgttctggagtgtcaccgcttcacctcgcagccgagcgaaaccacgatgaagttttggaagccctgctgtcggctcgcttcgatgttaatacccctctcgccccagagagggcacggctttatgaagaccgcaggtcctcagctctctacttcgcagtggtcaataataatgtctatgccacagagctgctcttgcagcatggcgctgatccgaatcgcgatgtcatatcccctctactagtagcgatccggcatggttgcttgagaaccatgcagttgctactagaccacggtgcaaatatcgatgcttacatcgctactcacccaaccgcctttcctgctactatcatgttcgccatgaaatgcctgtccctgctcaagtttctgatggacctcggttgtgacggggaaccatgtttctcatgcctgtacggaaacgggccacaccctcccgctccacagccctcctcccggttcaatgacgccccagcagccgataaagaaccatcagtggtccagttctgtgaatttgtctctgcaccagaggtttccaggtgggccggtcccatcatcgatgtgctcctagactacgttggaaacgtgcagctgtgctctcggctgaaagagcacattgactcctttgaagattgggccgtgatcaaagaaaaggccgagcctcccaggccactcgcacatttgtgtcgtctgcgcgttaggaaggccattgggaagtatcgcataaagctccttgacaccctgccactccctggcagattgatcagatatttgaagtatgagaatacccagtag

SEQ ID NO: 214451 - DNA, 1557 bp, synthetic construct
  misc_feature 1..1557: note = Description of Artificial Sequence: Synthetic coding sequence
  source 1..1557: mol_type = other DNA
atggatttcactgaagcatatgctgacacatgctccacagtcgggctggcagcccgtgagggaaacgtcaaggtgcttcgcaagttgcttaaaaaggggaggtctgtggacgtggccgacaacagaggttggatgccgatacacgaggccgcttaccataactctgtagaatgtctacagatgttgattaacgctgatagcagcgagaactacattaaaatgaaaacctttgaagggttttgcgccctccatctcgctgcgtcgcaagggcactggaagattgttcagatcctgttagaggcaggagccgatcccaatgcaacaacacttgaggagaccacacccctgtttttggcagtggaaaatgggcagatcgatgtgttgaggctgctgctgcagcacggagcaaatgtgaacggcagccactcgatgtgcggttggaacagcctccatcaagcctcgtttcaagaaaatgctgagatcatcaaactgctgctccggaaaggggcaaacaaagagtgccaggacgactttgggataactcctctgtttgtggcagcacagtatggtaaactagaaagtctgagtatcctgatcagctcaggagccaacgtcaactgccaagcactcgacaaggctaccccactcttcattgctgctcaagaaggccacaccaagtgcgtagagttacttctctctagtggtgctgaccctgacctgtactgtaacgaggattcctggcagttacccatccatgctgctgcgcagatgggtcacaccaaaatactggatttgcttatccccctgacaaatcgagcttgcgatactgggctgaacaaagtgagtccggtttactcagccgtgttcggcggacacgaagactgcctggagattctgctccgcaatggctatagcccggacgcccaagcatgcctcgtcttcgggttctcctccccagtgtgtatggctttccaaaaagattgtgagttttttggcattgtaaatattctgcttaaatatggcgctcaaattaacgaactacatttggcatattgtctgaaatacgagaaatttagcatcttccgctattttctgcgcaaaggatgctccttgggtccctggaaccatatatatgagtttgtgaatcatgccattaaggcacaggccaagtacaaagagtggctaccccatctgttggtggctggattcgatccgctgatcctgttgtgcaactcatggattgactccgtgtccattgacactttaatatttactttggagttcaccaattggaaaaccctggccccagcagtggaacgcatgctctcagcacgagctagtaacgcctggatcctccaacagcacatcgccactgtgccatcactaacgcacttgtgcagacttgagattcggtctagtctcaagtccgagagactgcgatcagactcctacatctctcagcttcccttaccgaggtcgcttcacaactatctgctgtacgaagatgtactgagaatgtatgaggtgccagaactggcggctatccaggatgggtag

SEQ ID NO: 214452 - DNA, 1671 bp, synthetic construct
  misc_feature 1..1671: note = Description of Artificial Sequence: Synthetic coding sequence
  source 1..1671: mol_type = other DNA
atggccatgatgcctctcgttctgcatcatcccgaacgccaagccgaactaggcagcggcctgcgggacgggggtggcgcagcattgaggcctcctggacgcctggtgaaacaaatggatttcacagaggcgtacgccgacacctgctccactgtcggcctggcagcacgtgagggcaacgtcaaagtcctaagaaagctcctgaaaaagggcaggtctgtggacgtggccgacaatcgagggtggatgccgatccacgaagctgcttaccacaatagtgtggaatgtttgcagatgctgataaacgctgactcaagcgagaattatatcaaaatgaagacattcgagggcttttgcgcacttcaccttgcagcctctcaggggcattggaagattgtccagatcctgttagaggccggagccgacccaaatgcgacaacgttggaggaaactacacccctcttcttggcagttgagaatggacagattgacgtcttacgcctgcttctgcaacacggggcaaacgtgaacggctcccactcaatgtgtggatggaattcactccatcaggcgtcttttcaggagaatgccgagatcataaaacttctcctgcggaaaggtgctaataaggagtgccaggatgattttgggatcaccccactctttgtggccgctcaatacggaaagcttgaaagcctgtccattctgatcagctccggcgctaacgtgaattgccaagccttggacaaagccacaccactgttcatcgctgcacaggaagggcacactaagtgcgtcgaactccttctgagcagtggggctgatcccgatctgtactgtaatgaagacagctggcagcttccaattcacgccgcagctcagatgggtcacactaaaatcttggatctccttattcctcttaccaaccgggcttgtgatacgggcctcaacaaagtttcacctgtttacagcgccgtgttcggcggacatgaagactgcctcgaaatcctgctgcggaacggatactcaccagatgctcaggcctgtctcgtttttgggttcagttcaccggtgtgcatggctttccagaaggattgtgaattcttcggcatcgtaaacatactgctgaaatacggcgctcagattaatgagctccacctagcttactgcctgaagtatgaaaagttcagtatattccggtattttctccgcaaggggtgttctctggggccatggaaccatatatatgagtttgtaaaccatgctatcaaggctcaggccaagtacaaagaatggctgccccatttgctggtcgctggctttgatcctctcatactgctatgcaattcttggattgattcggtgtccatagatactctgatctttactctggaattcacgaattggaagacgcttgcccctgcagtcgagcgaatgctgtccgccagagctagcaacgcttggattctccagcagcacatcgccactgtgccttcgctcactcacctgtgtcgcttggagattagatcttccttaaagtcagagaggctacggtcagactcctatatatcccagcttcccctccccaggagtctgcataactatctcctttatgaggacgtcctgcgcatgtatgaagttcccgaactcgcagccatccaggacggatag

SEQ ID NO: 214453 - DNA, 1338 bp, synthetic construct
  misc_feature 1..1338: note = Description of Artificial Sequence: Synthetic coding sequence
  source 1..1338: mol_type = other DNA
atgaagaccttcgagggtttctgtgctttgcatctggccgctagccaggggcattggaagatcgtccagatactgctggaggccggtgcagacccgaacgcaactacactggaagaaaccacccctctcttccttgccgttgagaacggacagatcgatgttctgcgtttgctgcttcaacacggtgccaatgtgaatgggagccactcaatgtgtggatggaattcccttcatcaggcctcttttcaggaaaacgctgagatcatcaaactgctcttgcgaaaaggtgccaataaagagtgccaggacgactttgggattactcctttatttgttgccgcacagtatggcaagcttgagtctctctccatcctgatctcaagtggagccaatgtaaactgccaggctctggacaaagctaccccattgtttatcgcagcacaggaaggacacacaaagtgcgtggagttactcctgagctccggtgcagatccggacctctattgcaatgaggacagctggcagctcccaatccatgcggctgcccagatgggacataccaagatcctggacctgttgatccctctgaccaatagagcttgcgataccggcctaaacaaggtctccccggtgtactccgccgtcttcggcggacacgaagactgtctggaaatcttactcagaaacggctatagcccggacgcccaggcctgcctggtgtttggattctccagcccggtgtgcatggcctttcagaaagattgcgagttctttgggattgttaatatcttgttgaaatacggcgcacagattaacgagctgcatctggcatattgcctgaagtacgagaagtttagcatctttagatacttcctccggaaggggtgtagcttgggaccttggaaccatatttatgaattcgttaatcatgccatcaaggcccaggcgaagtacaaggaatggctgccacacctgctggttgcgggttttgatccactcattctgttgtgtaattcttggattgactccgtgtctatagatacactgatatttacgcttgagtttactaactggaagactctagccccagctgtagagcgcatgttaagcgctagggcgtccaatgcttggatcctgcaacagcatatcgcaactgtgccatcactcacgcatctctgtagactggagatcagaagctcccttaagagcgaacggcttcgatcggacagttatataagccagctgccactgcccagatctttgcacaattacttgctgtacgaggacgtgcttagaatgtatgaggttccagaattggcagcgatccaggacggttag

SEQ ID NO: 214454 - DNA, 1662 bp, synthetic construct
  misc_feature 1..1662: note = Description of Artificial Sequence: Synthetic coding sequence
  source 1..1662: mol_type = other DNA
atgcctctagtcttacatcatccagagcgacaggccgaactgggctccggtcttcgtgacgggggtggggctgcattgcgacccccaggtaggctggtcaaacagatggatttcactgaagcctatgccgacacctgctcaaccgtaggcttggccgctcgggaggggaacgtaaaggtgctgcgcaaactcctgaaaaaaggtagatctgtggatgttgcagacaatagggggtggatgccgattcatgaggcagcgtaccataactctgttgaatgtctccagatgctcataaacgccgattctagcgagaattatataaagatgaagaccttcgagggtttctgcgcccttcacctggctgcctcacaaggccactggaagattgtgcagattcttttagaggctggcgctgaccccaatgccacaactctcgaagaaactacccccctttttctggccgtggagaacggccagattgatgtccttcgccttctattgcagcatggggcaaatgtgaacggctcccacagcatgtgcggctggaactccctgcaccaggctagttttcaggagaacgctgaaatcatcaagcttctgcttcgaaaaggcgcaaataaggagtgtcaagacgacttcggcattaccccgctcttcgtggctgcccagtacgggaaactcgaaagcttgtcgatccttattagcagtggagccaacgtcaactgtcaggccttggataaggcaactcccctgttcatcgctgcacaggaaggccacaccaaatgcgtcgagctacttctctctagcggagccgatccagatttgtattgcaatgaagattcctggcagctgccaatccatgcagctgcacagatgggtcacacaaagatcctcgatttgctgataccgcttaccaaccgggcatgtgatactggactcaacaaagtgtcccctgtatattccgcagtgttcggcggacacgaggattgcctcgaaatcttactgaggaacggctacagccccgacgcccaagcatgcctggtgttcggcttctcatctccagtttgcatggcattccaaaaggattgtgagttttttggaattgtgaacatattgttgaaatacggtgcccagatcaatgagttgcatctggcttactgccttaagtacgaaaagttctctatcttcaggtattttctgcgaaaggggtgctccttggggccatggaatcacatttacgagtttgtgaatcacgccatcaaggcccaggctaagtataaggaatggttacctcatttgctcgtagccggattcgatcccttaatcctcctatgtaacagctggatagattctgtgtcgattgataccctcatttttactcttgagttcactaattggaaaacactggcccctgcagtagaacggatgctgtctgccagggcatcaaacgcatggatcttgcaacaacatatcgcaacagtcccaagcctgactcacctctgccgtctggagatacgctccagccttaagtctgaaaggcttaggagcgactcgtatatctctcagcttcctttgccacgttccctccataattatctgctctacgaggacgtgctccgaatgtatgaggtgcctgagctggctgctatccaagacgggtag

SEQ ID NO: 214455 - DNA, 1338 bp, synthetic construct
  misc_feature 1..1338: note = Description of Artificial Sequence: Synthetic coding sequence
  source 1..1338: mol_type = other DNA
atgaaaactttcgaaggattttgtgctttgcacttggctgcttctcaaggccactggaagatcgttcagattctcttggaggctggggcagatccgaacgccaccactctggaggagacaacccctctgtttctggccgtggagaacggacagatcgatgtgctcagattgctgctccagcacggcgcaaatgtcaatggcagccactccatgtgcgggtggaattcgctccatcaggcctcatttcaagaaaacgcagaaatcatcaaattgcttttgagaaagggcgcaaacaaggagtgtcaggacgacttcggaataacgccgctgttcgtggcagctcagtacggtaaattggaaagtctttccatacttattagcagtggagcaaatgttaattgccaggccttggataaagccacgcctctcttcattgcagcacaggaggggcataccaagtgcgttgagctcttgctatccagtggtgccgaccctgacctgtactgtaacgaggattcctggcagctgccgattcatgcagctgctcagatgggtcatacgaagattctagacctcctcatcccactgaccaaccgcgcatgcgacacagggctaaataaggtgagtccagtatatagtgctgtattcggcggacacgaggattgtctggaaatcctgctgagaaacggatactccccagatgcccaggcatgtctcgtgttcggcttctcgtcaccagtttgtatggcatttcagaaagattgtgaattctttggtattgtgaatatactcctaaagtatggggctcagatcaatgagctccatctggcctattgtttgaagtacgagaaattttccatcttccggtactttctcagaaaaggatgctcgctcggtccctggaaccatatatacgaattcgtaaaccatgcgattaaagcccaggccaagtataaggagtggcttccccacctcctggtggctggattcgacccattaatcctgctgtgtaacagctggattgatagcgtatcgatagacaccttgatttttaccctggagtttacaaactggaagaccctcgctcccgctgtggagagaatgttaagcgctcgcgcttcaaatgcttggatcttacagcagcacattgctactgtcccatctcttacccacctttgccgcctggagatacggtcatcgctcaaatcagagcgtctccgatctgactcatacatctctcaactccccctccccaggtctctccacaattatctgctgtatgaagatgtgttgagaatgtatgaggtgccggaactggccgcaatccaagatgggtag

SEQ ID NO: 214456 - DNA, 1314 bp, synthetic construct
  misc_feature 1..1314: note = Description of Artificial Sequence: Synthetic coding sequence
  source 1..1314: mol_type = other DNA
atggattttacagaggcttatgcagatacttgctctaccgtgggtctcgccgcacgggagggtaatgtgaaggttctgcgaaaactgctaaagaaggggaggtccgtggacgtggccgacaaccgcggttggatgcccatccatgaagctgcctatcataattcagtagaatgcttgcagatgctcattaatgccgatagctcagagaattacataaagatgaaaaccttcgagggcttttgtgccctgcacctggctgcctcacaaggccactggaagatcgtgcagattctgctggaggccggagccgaccccaacgccacgacgctggaagaaactactcctctgttcctgggagctaatgtgaattgccaggctttggacaaggccacaccactcttcatcgccgcacaggagggtcacacaaagtgtgtggagcttttattgagttcaggtgcggacccagacctttattgtaacgaggactcatggcagttgccgatccacgcggcagcccagatgggccacacgaagatcttggatctactcattccccttacaaatcgcgcatgcgacactggtctgaataaggtaagcccagtctactctgccgtgtttggtgggcacgaggactgtttagaaatccttctgagaaacggttattctcccgatgcgcaggcatgcctggttttcggctttagttcaccagtgtgtatggcattccaaaaggagtggtcctgtgagtttttcgggatcgtaaatattcttcttaagtacggggctcagattaatgagctgcatctggcatactgtctgaagtatgaaaagttctctattttccgatatttcttgcggaaaggctgcagcttgggtccctggaatcatatatatgagttcgtcaaccacgctatcaaggcccaggccaagtacaaagaatggctgccccacctactggtggcaggattcgatccactcattctgctgtgcaacagttggattgactctgtaagcattgacactttgatcttcacgctggagtttactaattggaaaacattggctcctgcagtcgaaagaatgctttctgcccgtgccagtaacgcatggattctgcagcagcacattgctaccgtgccttccctgacccatctctgtaggcttgagatccggagcagcctcaagagtgagagactacgatcagattcatacatcagccaactgccacttccccgatctctgcataactatctgctatacgaagacgtgctgcgcatgtacgaagtgcctgagttggcagcgattcaggatggatag

SEQ ID NO: 214457 - DNA, 1281 bp, synthetic construct
  misc_feature 1..1281: note = Description of Artificial Sequence: Synthetic coding sequence
  source 1..1281: mol_type = other DNA
atggacggtactaccgcacccgtaacaaagagcggggcagcaaaactagtgaagcgaaatttcctggaggccctgaaaagcaatgacttcgggaagctgaaggccatcctcatacagcggcaaattgatgtggacaccgtgtttgaagtggaagatgaaaatatggttctggcatcgtacaagcagggatactggctgccaagctacaagttaaagtcgagttgggcaaccgggctgcatttgagcgtcctgtttgggcacgtggaatgtctgcttgtgctattggaccacaatgctaccatcaactgcagacccaacgggaagactcccctacacgtagcttgcgaaatggccaatgtggactgcgtcaagatactgtgtgaccgcggtgctaaacttaactgttactccctgtcaggtcacaccgctctgcacttttgcaccaccccttcaagcatactatgcgccaaacaattggtctggaggggcgctaatgtcaatatgaaaaccaataaccaagatgaggaaacaccgcttcacacagccgcacatttcggcctatctgagctcgtggccttctatgtggagcatggcgctatcgtggactccgttaacgcgcacatggaaacaccactggctatagcagcttattgggctcttagattcaaggagcaagaatacagcactgaacaccatcttgtgtgccgcatgctgcttgattacaaagcagaagtgaacgcacgcgacgacgatttcaagtcaccactacacaaagctgcttggaattgtgaccacgtgttgatgcacatgatgctagaagctggcgctgaggcaaacctcatggacattaatggctgcgcggcaattcagtatgtgctaaaagtgacttccgtgaggccagccgctcaacctgaaatctgttaccaactgctgttgaaccatggcgctgcacgtatttacccgcctcagtttcataaggtgatacaagcctgccacagctgccccaaggccattgaggtagttgtgaacgcttacgagcacatcaggtggaatacaaaatggaggagggccattccagatgacgatttagagaagtactgggacttttatcactcactttttaccgtgtgctgcaactctcctcgtactctgatgcacctgtcccggtgtgccatcagaaggactttgcataaccggtgtcatagggctatcccactcctgtcattaccgcttagcctgaagaaatacttgctgctggagcctgagggcatcatttactag

SEQ ID NO: 214458 - DNA, 1050 bp, synthetic construct
  misc_feature 1..1050: note = Description of Artificial Sequence: Synthetic coding sequence
  source 1..1050: mol_type = other DNA
atggatggaacaaccgcgccagtaacaaaatctggcgcagcaaagctcgtgaaacgcaattttctggaggcactgaaatctaacgactttgggaagctgaaggccattctgattcagcgacagatcgatgtggacacagtgtttgaggttgaagatgaaaatatggttttagcgagttataagcagggctattggctcccaagttacaaactcaagtcctcctgggcgactgggctccacttgtcggtactgttcggacacgtagagtgtctattggtactgctcgatcacaacgccaccattaattgtaggccgaacggtaagacaccgctgcacgtggcctgcgagatggccaatgtagactgtgtaaagatcctgtgtgataggggagcaaaactgaactgctattccctgagcggacatactgctcttcacttctgcaccacaccaagctccatcctgtgcgccaaacagctcgtctggaggggcgctaacgtcaatatgaagactaataaccaagacgaagagaccccgctgcacaccgccgcacacttcggcttgtccgagctggtggccttctacgtcgagcatggcgctattgtggactccgtgaatgcacacatggagacccctctggccatcgcagcttactgggctttgcgattcaaagaacaggagtatagtacggagcatcacctggtatgtaggatgttgctggattataaggctgaagtcaacgctagggacgatgattttaagtcccctcttcacaaggccgcttggaattgcgatcacgtgctgatgcatatgatgcttgaagcgggagccgaggccaatctgatggacatcaacggctgcgctgctatccagtacgtgttgaaggtaactagcgtgcgccctgcagcccagccagaaatctgctatcaacttctcctcaaccacggggctgcacgtatataccctccacagtttcacaaagttcgcctctgtcccgtcgtaagtcggctgaggaagatccaaatggccgctttgtctgagatttcaaaatag

SEQ ID NO: 214459 - DNA, 3747 bp, synthetic construct
  misc_feature 1..3747: note = Description of Artificial Sequence: Synthetic coding sequence
  source 1..3747: mol_type = other DNA
atgggtaaagatcaagaactgctcgaggccgcaagaaccggtaatgttgcattggtggaaaagttgctgagtggtagaaaaggagggatccttgggggtgggagcggtcccctaccgctgagcaacctgctttcaatctggcggggaccaaacgtcaactgcaccgactcaagcggatacactgccttacaccacgctgccctgaatgggcataaagatattgtgctcaagttactgcaatacgaagctagcaccaacgtggccgacaacaagggatatttccccatacacctcgcagcgtggaagggcgacgtggagattgttaagatactaatccatcacggacctagtcacagccgggtgaacgagcagaataacgagaatgaaaccgccttacattgcgccgctcaatacggtcactcagaagtagtggctgtattgctagaggaactgaccgaccccacaataagaaacagtaagctggagactccgttagatctcgcagccctgtatggcagactccgtgtcgtgaagatgattatttcagctcatccaaacttaatgagctgtaatactaggaagcacacacctctccacttagcagctagaaacggccacaaggccgttgtccaggtcttactggaagcaggaatggatgtgagctgccaaacagagaagggcagcgcactccacgaggctgccctctttggaaaggtcgacgtcgttcgcgtgctgctcgagaccggaatcgatgccaacatcaaagacagcttgggccgtactgtcttggacatcctcaaggaacatccgagccagaaatcattacagattgcaaccctgctccaggaataccttgaaggagtcggcagaagcacagtgttagaagagcctgtacaagaggatgctacccaggaaactcacatctcaagcccagtggagagtccctcgcagaagacaaagagcgaaacagtgacgggcgagttatctaagctcctcgacgagattaagttgtgccaggaaaaggattactcgttcgaagacttgtgtcacacaatctccgaccactacttggacaatctgtcaaaaatcagcgaggaagaactgggaaaaaacggctcacagagcgtgagaacatcaagtactattaatctcagtcctggggaagtggaagaagaagatgatgatgagaacacgtgcgggccttcgggtctgtgggaggctctgacaccctgcaatggatgtcgcaacttggggttccctatgctggctcaggagtcttatcccaagaaacgaaactacaccatggaaatagtcccaagcgcttcgctggacacattcccaagtgagaacgagaatttcctgtgcgatctgatggatacggcagttaccaaaaagccatgctccctcgaaatcgcaagggctccttctcctagaaccgacaatgccagtgaggttgcagtgaccactcctgggaccagcaaccacaggaatagcagtactggcccaacgcccgattgctcaccaccatctccagatacagctctcaagaatatcgtgaaagtgatacgacctcagcctaaacagcgtacttccatcgtgtcgtcactagattttcatagaatgaaccacaaccaggagtactttgagatcaatacctcgacgggttgtacttctttcacagcctcgcctcctgcaagcccaccaacatcgtccgtgggaacaactgaggtgaagaatgaaggcaccaatcatactgatgatctctcccggcaggatgacaacgacccacccaaggaatacgaccctggccagtttgcgggattgcttcacgggtcctccccggcatgtgagtctcctgagaacccttttcatctctacgggaagcgcgagcagtgcgaaaagggacaagatgaggttagcctggccaattcccccctgccctttaagcaaagtcccatagagaacaatagcgagccgctggtaaagaaaattaagcctaaagtggttagccggaccatttttcataaaaagtctaaccaactggaaaaccacaccatcgtgggaactaggagtactaggagtggcagcaggaacggcgatcagtgggtgatgaatgccggaggctttgtagagcgcgcatgcactctggggagaattcggtcactgcccaaagctctcatcgatatgcatttatctaaatcagtgagcaagtccgactcagatctgattgcctatcccagcaatgagaagacatctagagtgaattggagcgaaagttctaccgccgaacattccagcaaggggaactccgagcgaaccccgagcttcacttctgagtgggaggagatcgataaaattatgtcaagcatagatgtcgggattaacaatgagctgaaagagatgaacggggaaacaacccgccctaggtgccctgtgcagacagtgggtcaatggttggaaagcataggactgcctcagtacgaaaaccacctcatggcaaacggattcgataacgtgcagtttatgggctccaacgtcatggaggatcaggatttgcttgagatcggaatcctcaattccggacacaggcagcgcatactacaggcgatacagctgctccccaagatgcgcccaataggccacgatggttaccaccccactagcgtggctgagtggctggactccatcgaactgggggattataccaaggccttcctgattaacggatatacctccatggatctcttgaagaagatatgggaagtagaattaataaacgtactaaaaattaatttaatcgggcatcgcaagcgaattctggcttctctgggtgatcgcctgcacgatgatcctccgcagaaaccgcctcgctccatcacactccgagaaccctctggcaatcacacccctccccaactgagcccgagcttgagccagtccacttacactaccggcggatccctggatgtcccgcacatcatcatgcaaggagatgccagacgtcgacgaaatgagaactatttcgatgatattcccagaagtaagttggagcgtcagatggctcaaacgggggactggggtgagcctagcatcacccttagaccgccaaacgaagccaccgcctctacacctgtgcagtactggcagcaccatccagaaaagttgatctttcagagttgtgattacaaggccttctacttgggaagcatgctcatcaaggagttacggggaaccgaaagcactcaggatgcttgcgcaaaaatgcgggtgatgtgtgtgaagtcgacggagcagatgaaaaaggttccgacaattatcctgtcagtgtcatacaagggggtaaaattcatagatgcaacaaacaagaacatcattgctgaacatgagattcgaaacatttcctgtgccgctcaggatcctgaggacctgagtacatttgcctatatcaccaaggatttgaaaagcaaccaccattattgtcatgtgttcactgcgtttgacgtgaacctggcttacgaaatcatcctcactttggggcaggctttcgaggtggcatatcaactggcccttcaggctagaaagggaggacatagcagcactctgccagaaagctttgagaataaaccttccaagcctattcctaaaccgcgagtctcaatccgaaagtctgtcgacttgctgcacgcgtcccacaccggacaggagccttctgagagacacactgaagaggccttaagaaagttctag

SEQ ID NO: 214460 - DNA, 1353 bp, synthetic construct
  misc_feature 1..1353: note = Description of Artificial Sequence: Synthetic coding sequence
  source 1..1353: mol_type = other DNA
atgatgtggcagtgtcatctgagtgcacaggattatcgctactaccctgtggatggctactcccttttaaagcgtttcccgctgcacccactgaccggcccacgatgtcccgttcagactgtgggacaatggcttgaatctatcggactgccccagtacgaaaaccacctcatggccaacggattcgacaacgtgcagtttatggggtctaacgtcatggaggaccaggatctgctggaaatcggaatcctgaattctggacacaggcagagaattcttcaggccatccagttactaccaaaaatgcggccaattgggcatgacggctaccaccctacctctgtcgccgagtggctagactccatagagctgggagactacacaaaagcattcctgatcaacggatacacatcaatggacctgttaaagaagatttgggaagtggagctgattaacgtgctgaaaataaacctgattggccaccgaaaaaggatcctggccagcttgggagatcgcctgcatgacgacccccctcagaagccccctcggtctatcacacttcgttcaagcgtgtgcgagatctggacaaatcagaacgctggcttcccgttctccgccattcaccaggtccataacacaggtgattggggagaaccctctatcacactgcgccctcccaacgaggctacagcctccactcctgtccagtattggcagcaccatcccgaaaagctcatttttcagtcatgcgactacaaggctttttacctgggcagtatgcttatcaaggaattacggggtactgaaagcacacaagacgcctgtgctaagatgagagcaaatatacagaagtctacagagcaaatgaaaaaggtcccaactataatactgtccgtctcatataaaggggtaaaattcattgacgccactaataagaacatcatagccgagcacgagatccgcaatatcagctgtgccgctcaagaccctgaggacctttccaccttcgcgtacataacgaaagatctgaaatcgaaccaccactattgccatgtgttcaccgcattcgacgtaaatctggcgtacgagatcattctaaccctggggcaggcctttgaagtggcctaccagcttgccctacaggcaagaaagggcggtcactccagtacattgcccgaaagctttgagaataaaccaagtaaacctatccctaaacctagggtgtctattcggaaaagtgtccaaattgacccaagtgaacagaagacattggctaatttgccctggattgttgaacccggacaggaggcgaaacgtgggatcaacacaaaatatgagacaactatcttctag

SEQ ID NO: 214461 - DNA, 765 bp, synthetic construct
  misc_feature 1..765: note = Description of Artificial Sequence: Synthetic coding sequence
  source 1..765: mol_type = other DNA
atgcagggggacgcgaggcggcgtcggaatgagaactatttcgacgacattcccaggtccaagttggagcgtcagatggctcagaccggagactggggcgaacccagcatcacacttaggccgccaaatgaggcgactgcatcgactccggtccaatactggcagcatcatccagaaaagctgatattccaaagttgcgactacaaagccttttacctagggtctatgttgattaaggaactgcggggaactgagtccactcaggacgcctgcgcaaaaatgagggcgaactgccagaaatccactgagcagatgaaaaaagtgccaacgatcattttgagcgtaagctataaaggggttaagtttatcgacgccacaaacaagaatatcattgctgaacatgaaattcgaaacatctcttgcgcagcccaggatcccgaggatctaagtacatttgcctacatcaccaaagacctcaagtcaaaccaccattattgccatgtgtttacagcatttgatgtgaatttggcatacgaaatcatcctgacactcgggcaggcgttcgaggttgcataccaactggccctccaggcacgcaagggtgggcactcttccaccctgcctgaatccttcgaaaataagccttcgaagcctatccctaagcctcgggtcagcatacggaaatcagtagacctgttgcacgcaagtcacactggtcaggagcccagtgaacgacatacagaagaagccctcagaaaattttag

SEQ ID NO: 214462 - DNA, 1053 bp, synthetic construct
  misc_feature 1..1053: note = Description of Artificial Sequence: Synthetic coding sequence
  source 1..1053: mol_type = other DNA
gtcctgtttcagggaagcaacgtgatggaagatcaagacctgctggagataggaatcttgaactcagggcacagacagagaatcctgcaggcaatccagctcctgccaaagatgcggcctataggtcatgacggttatcatcccacaagcgtagccgagtggctggatagtatcgagctcggcgattatactaaagcctttctcatcaacggctataccagtatggacctgctcaaaaagatctgggaggttgagctgatcaaccagagctctgtatgcgaaatttggaccaatcagaacgccggttttcctttttctgcaattcatcaggtgcacaataccggggactggggtgagccaagcattactctacgtccacctaacgaggccaccgcctctacaccggtgcagtactggcaacaccatccagagaaactcatttttcagtcttgtgattacaaagccttttatctcggctccatgttgattaaggaacttcgaggaacagagtccactcaggatgcgtgtgccaagatgagggccaacatccagaagtccactgagcagatgaagaaagtaccaaccatcatcctgagtgtgtcttacaagggcgtgaagtttatcgatgccacgaacaaaaatatcattgccgagcacgaaattcggaatattagctgcgcagcacaggatcctgaagatctgagcacctttgcctacataaccaaggacctcaaaagcaaccaccattactgtcatgtgttcaccgcattcgatgtcaaccttgcttatgagattattctgacgctggggcaagctttcgaagtggcatatcagctggccctgcaggcaaggaagggcggtcatagctccacactcccagaaagttttgagaacaagccatccaaacctatccccaagccgagggtgtcgatccgtaagagcgtaatcgacccttctgagcagaagaccctcgccaatcttccatggatcgtggaacccggacaggaggctaagcgcggaatcaatactaaatatgagacaacgattttctag

SEQ ID NO: 214463 - DNA, 2292 bp, synthetic construct
  misc_feature 1..2292: note = Description of Artificial Sequence: Synthetic coding sequence
  source 1..2292: mol_type = other DNA
tcctttcaagaatcatacccaaagaaaagaaactacacgatggaaatcgtgccctcagccagcctggacacttttccctctgagaacgagaattttctgtgtgatctaatggatactgcagtgaccaagaagccgtgctcactcgagatcgcgcgtgccccaagcccaaggacagacaatgcctctgaggtcgctgttacaacgcctgggacctccaatcacaggaatagctctaccgggcctacccccgactgcagtccaccatctccagacacggccctcaaaaacatcgtgaaggttattagaccacagccaaaacagaggacctccattgtaagcagcttggattttcaccgcatgaaccacaatcaggagtacttcgagataaacactagcacaggctgcaccagtttcacagcctctccacccgcaagccctcctacaagttctgtggggaccaccgaagtgaaaaatgagggaacaaatcacactgacgacctgtctaggcaggatgataacgaccctccaaaggaatacgaccccggtcagttcgccggtctgcttcacggaagctccccagcctgtgaatctcccgagaaccctttccacctctatgggaaaagagagcagtgtgaaaagggacaagatgaggttagcctggccaattccccgctgccctttaagcagagtcccattgaaaataacagtgagccacttgtgaagaaaattaaacctaaggtggttagccgaactatctttcacaagaaaagcaaccagctagaaaaccatacgattgtgggaaccagatccacccgcagtggaagtaggaacggcgaccagtgggtgatgaatgccggtggctttgtggagcgggcttgcacgttaggtcgtatccggtctctccctaaggcccttatcgatatgcacctgagcaaatcagtgagtaagagcgattcggacctgattgcctatccatccaacgagaaaacgtctagggttaattggtccgagtcctctaccgccgagcattcatcaaagggaaactcggaaagaactccgagtttcacaagtgaatgggaagagattgacaagataatgtcctctatcgatgttggcatcaataatgaactaaaagaaatgaacgggccacggtgtcccgttcagacagtgggacagtggcttgagtccattggcctcccccagtacgaaaaccacctgatggccaatggctttgacaatgtgcagtttatgggctctaatgtgatggaggatcaggatcttctggagataggaatcttaaattctggacaccggcagagaatccttcaggccatacagctgctcccgaagatgagacccattggccacgacgggtatcatccaacgagcgtggccgaatggctcgacagcatcgagctgggagactacaccaaagcgtttttaataaatggttatactagtatggatttgttgaagaaaatttgggaagttgaactgattaacgtgttaaagatcaatttgattggccaccgcaagcgaatcttagcgagtttgggcgaccgcctgcacgacgacccaccgcaaaaaccgcctcggtcaataaccctccgcaccggagattggggagaaccaagcatcaccttacgcccacctaatgaggctaccgcgtccacaccagtgcagtattggcaacaccaccctgaaaagctgattttccagtcttgcgactataaagctttctacctgggctcgatgttaattaaggagctgcgaggaacagagtcaactcaggatgcatgcgctaaaatgcgcgtgatgtgtgtcaagtctactgagcagatgaagaaggtgcctaccataatcctgtcggtcagctataaaggcgtcaagttcatagacgcaaccaacaagaatatcatcgcggaacacgaaattagaaatatctcgtgtgccgctcaggatcccgaggacctgtccacctttgcgtacattactaaagacctgaagtctaaccatcattattgccacgtgttcacagctttcgatgtgaatcttgcatatgagatcatactgactctcggacaggccttcgaggtcgcttaccagctcgccctgcaggccagaaagggtggacacagctcaacactcccggagtcattcgaaaacaagccgtcaaagccaatccccaagccgcgtgtgagcatcaggaaatcagtggacttattgcatgcctcacacaccggacaggagccatctgagaggcacactgaagaggcccttcgcaaattttag

SEQ ID NO: 214464 - DNA, 1281 bp, synthetic construct
  misc_feature 1..1281: note = Description of Artificial Sequence: Synthetic coding sequence
  source 1..1281: mol_type = other DNA
atgatgtggcagtgccacctgtctgcacaggattataggtattatcccgtggatggatatagcctcctaaaacgttttcctctgcacccgctgacagggccacgttgtccagtacagaccgtagggcaatggttagagtcgattgggttaccccagtatgagaaccatctgatggccaatgggttcgacaatgtgcagttcatgggctcgaacgtgatggaggaccaggatcttcttgagataggcattttgaattccggccataggcaacgcatactgcaggccatccagttactacccaaaatgaggcctatagggcatgatggataccatcctacctccgttgcggagtggttagacagcattgaactgggagactacacaaaggcctttctgatcaacggttacacctccatggatcttctgaaaaagatctgggaagtggagctgatcaacgtcctgaagatcaacctaatcggtcatcgtaaaaggatcctcgcgagtttgggcgatcgccttcacgacgatccaccacagaagcctccaaggtcgataacccttagaacaggcgattggggcgaaccatctataaccctgcgtcccccaaacgaggcaaccgcatccacacccgtccagtattggcaacaccaccctgagaagcttattttccagtcttgcgactataaggccttttacctggggtctatgctgattaaggaactgaggggcacggagagtacccaggacgcttgcgctaagatgagagccaactgtcagaaatcaacagagcagatgaaaaaggtgcctactataattctgagtgtgtcttataaaggcgtaaaattcatcgatgccacaaacaaaaacattatagccgagcatgagataagaaacatctcttgtgccgcacaggaccccgaggacctcagcacctttgcttacatcaccaaggacctgaaatcgaaccatcactattgccacgtattcaccgcattcgatgtgaatttggcatacgagatcattctcacacttggacaggcatttgaggtcgcctatcaacttgctctgcaggctcgtaagggagggcattcttccacactgcccgagagtttcgagaacaaacctagcaagcctattccgaagcctagagtgagcattcgaaaatctgtgcagattgaccccagcgaacagaaaacactcgccaatctaccttggatcgtcgaaccaggtcaagaggctaaacgtggcatcaacacgaaatacgaaaccacaatcttctag

SEQ ID NO: 214465 - DNA, 1383 bp, synthetic construct
  misc_feature 1..1383: note = Description of Artificial Sequence: Synthetic coding sequence
  source 1..1383: mol_type = other DNA
atgatgtggcagtgccacctttcagcccaggactacagatattatccggtggatggctattctctgcttaagaggtttcctctgcatcctctaaccggaccgagatgcccagtgcagaccgtcggccaatggttagagtccatcggcctgccccagtatgagaatcaccttatggccaacggcttcgataatgtacagtttatgggatccaatgttatggaagaccaagatttgctggaaatcggcattctgaacagcggacaccgccaaaggatcttgcaggctattcagctgcttcctaaaatgcgcccaatcgggcatgacgggtatcatcctacctcggtggctgagtggctggacagtatcgagctgggggattacaccaaggccttccttatcaacggctacacttcgatggatcttttgaaaaaaatatgggaagtagagctcattaacgttttaaagattaatctcatagggcacagaaaacgcatcctcgccagcctgggagatagattgcatgacgacccaccgcaaaagccccctcgttccatcaccttgagagaaccgagtggcaaccacaccccaccacagctgtctccatctctctcacaaagcacatatactactgggggaagcctggacgttccacatattatcatgcaaggcgatgccagacggaggaggaatgagaattactttgacgacatccccagaagtaagctggaacggcaaatggcacaaaccggggactggggtgaacccagtatcaccctccgccctccgaacgaggccactgccagtacgcctgttcagtattggcaacaccatcctgagaaactgatctttcagtcttgcgactataaagccttttacttgggctctatgctgatcaaagaattacgaggcactgagagtacccaggacgcttgtgctaaaatgcgagccaactgccaaaagagcaccgaacagatgaagaaagtgcctaccatcatcctgtccgtctcctataagggcgtaaaattcattgatgcaacaaataaaaacatcattgcagaacacgaaatcaggaatatctcttgtgccgctcaagatcccgaggatctgagcacctttgcatacattaccaaggacctgaagagcaatcatcattattgccacgtgttcactgcattcgatgtcaacttagcctacgaaattatccttacattgggacaggcctttgaggtggcataccaactcgcacttcaggccaggaaggggggacactctagcacactccctgaatccttcgaaaataagcccagtaaaccgataccaaaaccacgggtctcaatccgcaaaagtgtccccttttgtttcaaagcagataggcccatttag

SEQ ID NO: 214466 - DNA, 2295 bp, synthetic construct
  misc_feature 1..2295: note = Description of Artificial Sequence: Synthetic coding sequence
  source 1..2295: mol_type = other DNA
atgctggcccaggaatcgtacccaaaaaagcgcaattatacgatggaaattgtgccgagcgcctctctggatacattccccagcgaaaacgagaacttcctttgcgacctaatggacaccgctgtcaccaaaaaaccttgctcccttgagatcgccagggctccaagcccgagaactgacaacgcctcagaggttgctgtaacaacacccggaacctccaaccaccggaacagttccaccggcccaacccctgactgttcgcctccttctcctgacacagccctcaaaaacatagttaaagtgataaggccgcagcctaaacagcgtacatcaatagtaagttcactcgattttcatagaatgaaccataaccaagagtacttcgagattaatacttccacggggtgtactagttttaccgcatctccacctgcatctccaccaacctccagcgtcgggactacagaagtaaagaacgaaggcaccaatcacacggatgacttgtcaaggcaagacgacaatgaccctccaaaagagtacgatcccggacagtttgcaggtttactgcatggaagctcccccgcttgcgagtcacctgagaatccatttcatctgtacggtaaacgggaacagtgcgagaaggggcaggatgaggtatccctggctaactcgcctttgccctttaaacaaagcccaattgaaaataactctgaacctctggtcaaaaaaataaagcccaaggtggtttccagaacaatcttccacaagaaatctaatcaactcgaaaatcacaccatcgtaggcaccaggagcaccagatcaggatctcgaaatggggaccagtgggttatgaatgccggaggtttcgtggaaagagcctgcactctcggacgaattagaagcttaccaaaagcgctgattgacatgcacctgtccaaatccgtgtcaaagagcgattctgatctgatagcctatccatcaaacgagaaaacgtcccgtgttaattggtccgagtccagtactgcagagcactctagtaaaggaaactcagagcgcacaccatcattcactagtgaatgggaggagatagacaagattatgtcttcaatcgacgttggcatcaataacgaactgaaggagatgaatggcccacgatgcccagttcagaccgttggtcagtggctggagagcatcggactgccacaatatgagaatcacctgatggccaatggtttcgacaacgtccaattcatgggctcaaatgtaatggaggaccaggacttgctggaaattgggatcctcaatagtggccacagacaacgtatactccaggccatccaactcctgccaaagatgagacctatcggtcacgatggctaccatcccacctctgtggcagaatggctggatagtatcgagctgggagactatactaaggcatttcttattaacggctacacctcaatggacctcttgaaaaagatatgggaggtggaattgataaacgtcctgaagatcaatctgatcgggcacagaaagaggatcttagcctctttgggggaccgccttcatgatgacccccctcaaaagcctccacgaagtatcactctccggaccggcgactggggtgaaccctctattactctgcggccaccaaacgaagcaaccgcttccacccctgtccaatactggcagcaccaccccgagaaactgatctttcaatcttgcgactacaaagccttttatctaggctcaatgctgattaaagagctcagggggaccgaatcaactcaagacgcctgtgccaagatgcgcgctaactgccaaaaaagtactgaacaaatgaaaaaagttccaaccataatcctgtctgtgtcttacaagggagttaagttcatcgacgccacaaacaaaaatatcatcgccgagcatgaaattaggaatatatcatgtgctgcccaggacccagaggacttgtctacctttgcgtacattacgaaagacctcaagagcaatcatcactactgtcatgtgttcacagccttcgacgtgaacctagcgtatgagatcattctgacgctcggacaggcttttgaagttgcataccagctcgccctccaggccagaaagggtggccacagttccacactgcccgagagtttcgaaaataaaccctccaagcctattcccaaaccacgtgtgtcaattcgcaagtctgtcgatctgctccacgcctctcatactggccaggagccctccgaaaggcataccgaggaggctttgcgtaaattttag

SEQ ID NO: 214467 - DNA, 3747 bp, synthetic construct
  misc_feature 1..3747: note = Description of Artificial Sequence: Synthetic coding sequence
  source 1..3747: mol_type = other DNA
atgggcaaagaccaggaactgctcgaggccgcaaggaccggaaatgtcgctcttgttgagaagcttctatcagggcgaaaaggcggtattctcgggggaggctccggcccacttccacttagtaaccttctatcaatttggcgaggaccaaacgtgaactgcacagatagttccggatatacagccctccatcatgcagctcttaacgggcacaaagacattgtcctgaaactgttacagtacgaagcctctactaatgttgccgataacaaagggtattttcctatccatctggctgcttggaaaggcgacgtcgagatagtgaaaatcctcatccaccatgggccttcgcattccagagttaatgaacagaataatgaaaacgagacagcactccactgtgctgcccagtacgggcatagtgaggtggtggcggtgttgctagaggaacttacagacccaacaattcggaatagcaaactcgagactcccctcgatctggccgcactctatgggagactaagagtagttaagatgattatctccgcgcatcccaacctgatgtcttgcaacacaagaaagcatacaccattgcatctcgccgcacggaatggacataaagcagtggtgcaggtcctgctggaagctgggatggatgtcagttgtcagacagagaagggtagcgccctgcacgaggcagccctcttcgggaaggtagacgttgtgcgcgtattgcttgagacagggattgacgccaacattaaggatagtctcggtaggaccgtcctcgatattctcaaggagcacccttcacagaagtcacttcaaatagcgacattgctgcaggagtacctggaaggtgtgggccgatccacagtgctggaggagcccgttcaggaagacgcaacccaggaaactcacatctcgtcccctgtcgagtccccctcccagaagaccaaaagcgagaccgtaactggcgagctttccaaactattagacgagattaaactgtgccaggagaaagactatagctttgaagatctttgccacactatctctgaccactacctcgacaacttgtccaagatcagtgaggaggagctgggcaagaacgggtcacagagcgtgaggacgagttccactatcaacctgagtccaggcgaagtggaagaggaagatgatgatgagaacacatgcggacccagcggattgtgggaggcattgacaccttgcaacggctgtcgcaatctcgggttccctatgctagctcaggagtcataccccaaaaagaggaattataccatggagatagtacccagtgcatcactggacacgttcccctctgaaaatgaaaatttcttatgtgatctgatggataccgcggtcaccaagaagccttgcagtctagaaattgcacgggcaccttcacccagaaccgacaatgcttctgaagtggctgtcacaactcctggcacttctaaccaccggaatagtagtactgggccaacccccgattgttccccgccatctcctgatactgctttgaagaacattgtgaaagttattcggccacagcccaaacaacgcacttccatcgtatcctcacttgacttccaccgcatgaatcataatcaggaatatttcgaaataaataccagtaccggctgcactagcttcacagctagccctcctgcatctcccccaaccagtagtgtcggaaccactgaggttaaaaacgagggtactaaccataccgacgatctctctcgtcaggatgacaatgatcctcctaaagagtacgacccaggccagtttgctggtctgctacacggcagctctcccgcttgtgaatctcctgaaaaccccttccacctgtatggtaaaagagagcagtgcgagaaaggtcaagacgaagtttctttggctaattcaccactgccctttaaacagtcccccatagaaaacaactctgagcctttggtgaaaaaaattaagccaaaggtcgtgtcaagaaccatatttcacaagaaaagcaatcaacttgagaatcacacgatcgtaggaaccagatccacaaggtcaggttcacgcaatggcgaccagtgggtcatgaacgctggcggttttgtggagcgagcctgcactttagggagaatcaggtctttacccaaagccctgatagacatgcacttgagcaagagcgtctcaaagagcgatagtgacctgatcgcctatccatctaacgaaaagacaagccgggttaactggtcagagtcgtcaacagctgaacactcttccaaagggaacagtgagcgtacaccctcttttacgagcgaatgggaggagatcgacaagatcatgagcagcattgacgtcggcataaataatgaattgaaagaaatgaacggagagaccaccagacccagatgcccggttcagacagtagggcagtggctggaaagcatcggactgcctcagtacgagaatcacttgatggccaacggttttgataacgtgcagtttatgggtagcaatgtcatggaggatcaggatctgctcgaaatcgggatattgaacagcgggcatagacagagaatccttcaggctatccagcttctgcccaagatgagacctataggccacgacggataccatccaacgtcagtggcggagtggctggacagtattgagttaggagattacactaaggctttcctcattaatggctacacaagtatggacctgcttaagaagatctgggaagtcgagcttatcaatgtgctgaagatcaatctaatcggccacaggaagagaatactggcatcattgggcgaccggctgcacgacgatccaccccagaagccacccaggtccatcactctaagagagccttccggtaatcacacgccccctcagctttcaccttctctgtcgcagtcaacatatactaccggcggaagcctggacgtgccccacattataatgcaaggagatgctcgacgcagacgaaacgagaattattttgacgacatcccaagatcaaagcttgagcggcagatggcccagacaggcgactggggcgagccctccattacattacggccaccaaatgaggctacagcatcgacgccagtgcaatactggcagcaccatccggagaaattgattttccagagctgcgattataaagctttctatctcggaagtatgctgattaaagaactgagagggaccgaatccactcaagatgcgtgtgcgaaaatgagggcgaattgtcaaaaaagtaccgagcagatgaagaaagtgcctacaatcatcctgagtgttagttacaagggggttaagtttatagatgcaactaacaagaacatcatcgcggagcatgagattagaaatatcagctgcgccgcacaggacccggaggatttatccacattcgcatacattacaaaggacttaaagtcaaatcaccattactgccacgtgttcactgcatttgatgtgaatctcgcctacgagattattctgactcttgggcaggcctttgaggtcgcgtatcagctggctttgcaggccagaaaagggggacacagttccaccttgcccgaaagttttgagaataaacctagcaagcctatccctaaacccagagtgtccattagaaaaagcgtcgacctgctacatgcatcacacacaggtcaggaaccctcagaaaggcatacggaggaagccctgaggaaattctag

SEQ ID NO: 214468 - DNA, 1074 bp, synthetic construct
  misc_feature 1..1074: note = Description of Artificial Sequence: Synthetic coding sequence
  source 1..1074: mol_type = other DNA
atggctaatggatttgataacgtccagtttatgggatccaatgtaatggaggaccaggacctactggaaatagggatcttaaacagtggacacaggcagagaatcctccaggccatacagctcttgccgaaaatgaggcctatcgggcatgatggctatcaccccaccagcgtggctgagtggctggactccatcgagctgggtgattacacgaaagcttttctcattaacgggtatactagtatggatctgttaaagaagatttgggaggttgaacttattaaccagtctagcgtgtgcgaaatctggactaatcagaacgccggatttcccttttcagccatacatcaagtacataacacaggagactggggcgaaccctcaataacactgcgccctcctaacgaggccacggcctccactcctgtacagtactggcagcaccatcctgagaagctgatctttcagagttgtgactataaggcattttacttagggagtatgctcattaaagaactccggggtaccgagagtacgcaagatgcgtgtgcaaaaatgagagctaattgtcagaagagcaccgaacaaatgaagaaagtacctaccatcatcctctctgtgtcgtataagggcgtgaaatttatagatgccactaataagaatatcatagcggaacatgaaatcagaaacatttcatgcgccgcacaggatcccgaagacctctctacctttgcttacattaccaaggacttgaagtccaatcaccattattgccacgtttttacagcattcgacgttaacctcgcctacgaaattatccttaccctgggtcaggctttcgaagtggcctaccagctggccctccaagccaggaagggaggtcacagttcaactttacctgaaagctttgaaaacaaacctagcaaacctattccgaagcctcgagtgtcgattagaaagtcggttatcgaccctagtgagcagaagacattggccaaccttccatggattgtagagcccggtcaggaggctaaacggggaatcaatactaagtatgagaccactattttttag

SEQ ID NO: 214469 - DNA, 1533 bp, synthetic construct
  misc_feature 1..1533: note = Description of Artificial Sequence: Synthetic coding sequence
  source 1..1533: mol_type = other DNA
atgatgtggcagtgtcacctgagcgcacaagattatcgctactatcctgttgacggatattcattgctaaagcgctttccactgcacccactgaccggaccaaggtgccctgtgcagactgtgggacagtggctagaatcaattgggctaccccaatatgaaaatcatctgatggccaatggcttcgataacgtccagtttatgggatcaaatgtcatggaagatcaggaccttcttgagattggaattctaaactccgggcaccggcagaggattctgcaagctatccaactcctcccgaaaatgagaccaatcggacacgatggctatcacccaacatccgtagcagagtggctcgatagtatagagttaggcgactatacaaaggctttcctgatcaacgggtatacaagcatggatctgttaaaaaagatctgggaggtcgagttgattaacgtgctaaaaattaatttaatcggccaccgaaaaaggatacttgctagtcttggcgatagactgcatgatgatcctccacaaaaacccccaagatccatcactctaagagaaccgtcaggcaatcacacacctccccaactcagcccatcgttgagccagagtacatatactactggtggatccctggacgtcccccatattattatgcagggagacgctcgcaggcggcgtaacgaaaattattttgacgatataccacggagcaagctagagcgccagatggcccagtcgtccgtgtgtgagatatggactaatcagaatgcgggtttcccattcagcgccatccatcaggtgcacaacacaggcgattggggcgaacccagcattaccctcagaccaccgaatgaagcgactgcgtcgactcccgtccagtactggcaacatcaccccgaaaaactaatttttcaatcctgtgattataaggccttctatctagggtccatgctcataaaggagctcagaggcacagaaagtacgcaggacgcgtgtgccaagatgcgcgcaaattgtcagaagtccactgagcagatgaagaaggtgcccacaatcattctttcagtgagttataagggtgtgaaattcattgacgcaaccaataagaatatcatcgcagaacatgagatccggaatatatcgtgcgccgcacaggaccctgaagacctgtctaccttcgcttacattactaaagacctcaaaagtaatcatcattactgccatgtgttcaccgcctttgatgtcaatcttgcctatgagattattttgacactcggtcaggcgttcgaagttgcttaccagctggcccttcaggccagaaagggagggcattcatcaaccctgccagaatcttttgaaaataaaccatcgaagcctatccctaaaccacgcgtttccatacgcaaaagcgtgcaaatcgacccgtccgaacagaagacactggccaaccttccctggatcgtggagcctggccaggaagcaaagcggggaatcaacacgaaatacgagactactatcttttag

SEQ ID NO: 214470 - DNA, 1245 bp, synthetic construct
  misc_feature 1..1245: note = Description of Artificial Sequence: Synthetic coding sequence
  source 1..1245: mol_type = other DNA
atgatgtggcagtgccacctctcggctcaggattaccggtactaccctgtcgatgggtactctctgctgaagaggtttccactgcacccccttactggaccaagatgtcccgttcagaccgtcggccagtggttggagtcgattggcttaccccaatacgagaatcacctgatggctaatggcttcgataatgtccagtttatgggatcaaacgtcatggaggaccaggacctgctcgaaattggcattctcaattctggtcaccggcaacgcattctgcaggccatccagttattacctaagatgcggcctattggccacgacggctaccacccaacaagcgtggcagagtggctggactcgatcgagctgggagactatacaaaggcctttctgattaatggctacacttcgatggacctactaaaaaagatctgggaagtagagttgattaatgtgctgaaaatcaacctgatcgggcatagaaagcgaattctggccagcctgggcgatagactacatgacgacccgcctcagaagcccccaagatccattacactgcgcacgggcgactggggagagcctagtataaccctgcgcccaccaaacgaagcaacagcgtcaacccctgtccagtattggcagcaccacccagagaagctcatcttccagtcctgtgactacaaggcgttttacttgggatcaatgctgattaaggagctgcggggtactgaatccacacaggacgcctgcgccaagatgcgcgcaaattgtcagaagtcaactgagcagatgaagaaagtgcctacgatcatcttgagcgtaagttataagggggtcaagttcatcgatgctacaaataagaacatcatcgccgagcacgaaattagaaacatcagttgcgcagctcaggatccagaggatctttcaacattcgcttacattactaaggacctgaagagtaatcaccactactgtcacgtctttactgcgttcgacgtgaacctggcttatgagatcatactgacactggggcaggccttcgaggtggcataccaattggcattacaagctcggaagggcggacattcctctaccctgccagagagctttgaaaacaaaccaagcaaacccatacctaagcccagggtctccatccgaaagtccgtggacctgctccacgccagtcatacaggacaggagccctccgaacggcacaccgaggaagccctccggaagttctag

SEQ ID NO: 214471 - DNA, 1353 bp, synthetic construct
  misc_feature 1..1353: note = Description of Artificial Sequence: Synthetic coding sequence
  source 1..1353: mol_type = other DNA
atgatgtggcagtgtcacctaagcgcccaggattatcggtactacccagtagatggatacagtctcctcaagcggttcccgttgcacccattaactgggccaagatgtccagtccagactgtgggacagtggctagagagcatagggttgccacagtacgagaaccacttgatggctaacggcttcgacaacgtgcagtttatgggatcgaatgtgatggaggatcaggacctattagaaatcggtatactcaatagtggtcatagacagcggatactccaggccatacagcttcttcccaagatgcgccctattggccatgacggatatcaccctacctccgtggccgagtggcttgactcaattgagttgggcgactatactaaagctttcctcatcaatgggtacactagtatggacctcctgaagaagatatgggaagtggagctgattaacgttctgaagatcaatctcatcggccatagaaagcgtattcttgcctctctgggagatagactccacgatgaccctccccagaagccacctaggagtatcacattgcggtcttccgtgtgcgagatttggactaaccaaaacgctggtttccctttttctgctatccaccaagtgcataataccggcgattggggagaaccctctatcaccctgagaccaccgaatgaagccacagcttcaactcccgtgcaatactggcagcatcatcccgaaaaactcatttttcagagctgcgattacaaggccttttatctaggatccatgttaatcaaggaactgcgcggaaccgaatctacacaggatgcttgtgctaagatgagggctaactgtcagaagagtaccgagcagatgaagaaggtgccgaccataatactgtcagtcagttacaaaggagtgaagttcatcgatgccaccaataagaacattatagcagagcacgaaattcggaatatttcatgtgcagctcaggatccagaggacctcagcacatttgcctacatcacaaaggacctcaaatcaaatcatcattactgtcatgtctttactgcattcgatgtgaatcttgcctacgagatcattctaactctgggacaggctttcgaggtcgcctatcagttggccctccaggctcgtaaagggggtcattctagcactctgcctgaaagcttcgagaataaacccagcaagcccatcccgaagcctcgcgtgtcaattaggaagagcgtgcagattgatccatctgaacagaaaaccctggctaacctgccctggatcgtcgaacctggtcaggaggctaaaaggggaattaacactaagtacgagacaaccatcttctag

SEQ ID NO: 214472 - DNA, 1185 bp, synthetic construct
  misc_feature 1..1185: note = Description of Artificial Sequence: Synthetic coding sequence
  source 1..1185: mol_type = other DNA
atgggccctagatgccctgtgcagactgtgggccagtggttagagagcattggactgccccagtatgaaaaccatctcatggctaacggttttgataacgtccagtttatgggctcaaacgtaatggaggaccaggatctcttggaaattggcattctgaattctgggcaccggcagagaattcttcaggcaattcagctgctccctaaaatgcggcctattggccacgatggttaccacccaacttccgtagctgagtggttagacagcatcgaactgggtgattacacgaaggcctttctgatcaacggatatacaagcatggatctgcttaaaaaaatttgggaggtagagcttattaacgtgctgaagattaatctgattggccaccggaaacggattctggcttcattaggcgaccgtctgcatgatgatcctccccagaaaccacccaggtctattacgttgcgaacaggagattggggagagccatccattacacttcggccacctaacgaagcgacagcatccacacctgtacagtattggcagcaccaccctgaaaagctgatctttcagtcttgcgattacaaggctttttatctgggtagtatgctcatcaaggaattgcgtgggaccgagtcaacccaggacgcgtgtgccaaaatgcgtgccaattgtcagaagtccacagagcagatgaaaaaagtgccaaccataattcttagcgtcagttataagggcgtcaaatttatcgacgccacaaacaagaacataatcgcagaacatgagattagaaacattagctgcgccgctcaagaccctgaagatttatccacatttgcatatatcaccaaggatcttaaatctaaccaccactactgccacgtcttcacagccttcgatgtgaacctagcttatgagatcatcctcactctggggcaggctttcgaggttgcataccagctggccctccaggccaggaaaggcggacacagctccacactcccggaatcattcgagaataagccctctaagccgatccctaagcccagggtgtccatcaggaagtccgtcatcgaccctagcgagcagaagactttagccaatctcccatggatagtagagccaggtcaggaagctaaacggggtattaatacgaagtacgagaccaccattttttag

SEQ ID NO: 214473 - DNA, 1254 bp, synthetic construct
  misc_feature 1..1254: note = Description of Artificial Sequence: Synthetic coding sequence
  source 1..1254: mol_type = other DNA
atgagcacacgttaccaccaggccgcatccgattcctatctggaactgctgaaagaggctaccaagcgggacctcaacctgtcagatgaggatgggatgacacctactttgctggctgcgtaccacggcaatcttgaagccctcgaaatcatctgcagtcgtggcggtgatcctgaccgatgcgacatctggggcaatacccctttgcacttcgccgcatcaaacgggcacgctcattgcgtaagttttctcgtgaacttcggcgcaaatatatttgcccttgataacgacttgcagacacctctcgatgcagccgcaagtcgggagcagaatgaatgcgtggctctgctcgataaagcagctaccgcccagaatatcatgaacccaaagaaagttacccggcttaaggaacaggcccagaagaatgcccgacggcaaatcaaagaatgcgagagactgcaggaaaaacatcagaacaaaatggcgcatacttacagcaaggaggaatccggaaccctctcgtcttccaagggcacctttagcaggtcctcgcctagcaacgcgtcagctccgggtaccttcgggtcactgagtaaaggaatcaaggatacttttaagataaaatttaagaagaataaggatacagccgagcaagtcggaaaagaaggacggtcaggtcagaggaatgtcatggaggtgttccgggaagaagaggaggattcgttttccggagattttaaggaaaaactgcaattgtccgctgaggaggacggctccgttcatcatgaatcaatcctgaaccgaccaggtttggggtcgattgtgttcaggagaaataggatctccagtccggaagacatctctgattcaaaacgggagtttggctttaagctgccttcagaactcctgcagcggcagggagcctccgaagctgatgagggggcagccgacgaggaaggagaggagaatgggttgaaagatgacctaccttgggacgacgatgaagtcgagtgggaggaagacgtggtcgacgcaaccccactcgaggtgttcctcctctctcaacacctggaagagttcttgccaatctttaaaagggagcagatagatctggaggcgctgctcctttgttcagacgaggacctccagtctatacagatgcagctcggaccccgaaagaaagtcctcaatgcgatcaaccgccgaaagcaggtccttcagcagccagggcaactggtggacacatccttgtag

SEQ ID NO: 214474 - DNA, 7991 bp, synthetic construct
  misc_feature 1..7991: note = Description of Artificial Sequence: Synthetic coding sequence
  source 1..7991: mol_type = other DNA
atgcccaagggtgggtgcccaaaggctcctcagcaggaggagctgcctctaagctccgacatggtggaaaaacagaccggaaagaaagacaaggataaggtctccctgacaaagaccccaaagctcgaaagaggggatggcggaaaagaagtaagagagcgtgcgagtaaaagaaaactcccttttaccgctggcgcaaacggagagcagaaggacagcgacacagaaaagcagggccctgagcgaaagcggattaaaaaggagcctgtgaccaggaaggccggactgctgttcggcatgggtcttagtggcatacgtgctgggtatcccctctcagaacgccaacaagtggctctgctcatgcagatgaccgccgaagagtctgcaaattctcccgtcgacaccacacccaaacatccgagtcagtccacggtgtgccagaaaggcacccccaactccgccagcaaaacaaaggacaaagtcaataagcgtaatgagcggggagaaaccaggttgcaccgggctgccatccggggagacgccagacggatcaaggaactcattagcgagggcgctgatgttaacgtgaaagactttgctggatggaccgccctgcatgaggcatgcaaccgcggatactatgacgtggccaagcagctcttagcggctggggctgaggtgaacactaaagggcttgacgacgatacgccattgcatgacgccgctaacaatggacattataaggttgtgaagcttctgctgaggtacggtggtaacccgcagcagagtaatcgcaagggcgagacacccctaaaggtggcaaattccccaacaatggtgaacctgctcctgggtaaaggtacttacacatcttcagaggaatcaagtactgagtccagcgaagaagaggatgcaccatcctttgccccttcttcctccgtggatgggaataacaccgacagcgagttcgaaaagggactcaagcataaagccaagaacccggagcctcagaaggccaccgccccagtgaaggacgagtatgagtttgatgaagacgatgagcaagatagggtgcccccagtggatgacaaacatttattgaagaaggactatcggaaggaaactaagtccaacagtttcatctcaattcctaaaatggaggttaaatcctatactaaaaataacaccattgccccaaagaaggcatcgcaccgcatcctgtctgatacctccgacgaagaagatgcttctgtcactgtggggacgggcgagaaactcaggctgtctgctcatactatcctaccgggatccaagactagagaaccttccaacgcaaagcaacagaaagaaaagaataaggtcaaaaagaagcggaagaaggagaccaaaggccgtgaagtccgatttggcaagcgaagcgacaagttctgttccagcgagtctgaatcagaatcctccgagagcggagaagacgaccgcgacagtctcggaagtagtgggtgcctgaagggatcccctctcgtgctcaaggacccatcactgttcagcagcttaagcgcctcaagtacgagttcacatggttcttcagccgctcagaagcagaatccctctcacacagaccagcacaccaaacactggcgtacggataattggaagacaatttcaagcccagcctggtctgaggtctctagcctctccgattctactaggactcgattgacttccgagagcgactactcatcggagggaagcagcgtcgagtcccttaaacccgtgcgtaagagacaggaacacagaaagcgggcatcactgtccgagaagaagagcccatttctcagtagtgcagaaggagcagtccccaagttggataaggagggtaaggtcgtgaagaaacacaaaactaagcataaacacaagaacaaggagaaggggcagtgtagcatcagccaggagttgaaactcaagtctttcacttatgagtacgaggacagcaagcagaagagtgataaggccattctgttggagaacgaccttagcacagaaaacaaactgaaagtgttaaaacatgaccgggaccacttcaaaaaggaagagaaactttctaagatgaaactagaggagaaagagtggctcttcaaggatgagaaatctttaaagcggatcaaagatactaataaggacatcagtcggtccttccgcgaagagaaggaccgatctaacaaggctgaaaaggagcgcagcctgaaggagaagtcaccgaaagaagaaaaactgagactgtacaaggaggagcggaagaagaagtccaaagacagaccaagcaaactggaaaagaagaatgacctgaaagaggataaaattagcaaggagaaggagaaaatattcaaggaggataaagaaaagttaaagaaagagaaagtgtaccgagaagactcagctttcgacgagtactgtaacaagaatcagtttcttgagaatgaggacacaaaattcagcttgtctgacgatcagcgagatcgatggtttagtgacctgtcagactcaagcttcgatttcaaaggggaggactcctgggattcgccggttactgattaccgggacatgaagtccgattcagtggccaaattgatcctggaaacggttaaggaagacagcaaggagagaagacgggatagtagagcgagggaaaaacgcgattatcgtgagccttttttccgcaaaaaagacagagattatctggacaaaaattctgagaaacgaaaggagcagaccgagaagcataaatcagtgcccggatatctttctgagaaagataaaaagcgtagagaaagcgcagaggcaggaagagacagaaaggacgcactggagtcatgtaaagaaaggagggatggaagagcaaagccggaggaggcccaccgcgaggagctaaaggaatgcggctgtgagagtggcttcaaggacaagagtgacggtgactttggaaaaggactagagccatgggagcgccaccaccccgctcgcgagaaggagaagaaagatggtccagataaagaacgcaaggagaagaccaaacctgaaagatacaaagaaaagagctctgacaaagacaaatccgaaaagagtatcctggagaagtgccagaaagacaaagaatttgataagtgcttcaaggaaaaaaaggacactaaggaaaaacataaagatactcatggtaaagacaaagaaaggaaagctagcctggatcagggcaaggagaaaaaagaaaaggcgtttcccggaatcatctcggaagatttctcggagaagaaggacgataaaaagggtaaggagaagtcgtggtatatagccgacatattcaccgatgagtcagaggatgacagagatagctgtatgggttctggatttaagatgggagaggcgtcagatctcccacggacggacggcctgcaggagaaagaggagggcagggaagcatatgcctcggataggcaccgaaagtcatctgataagcagcatcctgagagacagaaggataaggagcccagagatagacgcaaagaccggggagccgctgatgcagggagggataaaaaagagaaagtgtttgagaaacacaaagagaaaaaggacaaagagtcaacggagaagtacaaggatagaaaggatcgggcatccgttgactcaacacaggacaaaaaaaacaagcagaaactccctgaaaaggccgagaagaaacacgcagccgaggataaggcaaaatcaaagcacaaagaaaaaagtgacaaggaacactctaaggagcggaagtcatcccgttccgccgatgctgagaagagcctcctggaaaagctagaagaggaggccctccacgaatatagagaggactctaacgataaaataagcgaggtgagcagcgatagttttaccgacagaggccaagagcctggtctcaccgcattcctcgaggtgtccttcaccgagcctcccggagacgacaaacccagggagagcgcctgccttcccgaaaagctaaaggagaaggagcggcaccgccattcttcctcctccagcaagaagtcgcacgatcgtgaacgggcaaagaaggagaaagccgagaagaaggagaaaggagaggattacaaagagggcggaagccgcaaggattctggacaatacgaaaaggactttttggaagcagatgcgtatggcgtgtcgtacaacatgaaggcagacatcgaggacgaactcgacaagacaatcgagctcttcagtacggagaagaaagataagaatgacagcgagagggaaccctccaaaaagatcgagaaggaactgaaaccgtacggaagttctgccattaatatcctgaaagaaaagaaaaaaagagaaaaacatagggagaagtggcgggacgaaaaggagagacacagagatcgtcacgctgacggattgctcagacatcatagggatgagctgctgagacaccacagagatgaacagaagcccgctacccgcgataaagattctcctccaagggtgctgaaagacaagtcgcgtgacgagggccctagacttggggacgcaaagctgaaggaaaagttcaaggatggcgctgaaaaagagaagggggacccagtgaaaatgtcaaatggtaatgataaggtggctccttccaaagaccccggtaagaaggacgcacgccctcgcgaaaagctgttaggcgatggtgacctcatgatgacctctttcgagcggatgttatctcagaaagacctggagatcgaagagagacacaaacgtcataaggaaaggatgaagcagatggaaaagctgagacacagatctggggatcctaagttgaaagagaaagcaaaaccagcagatgacggaaggaaaaaaggactcgacatacccgcaaaaaaaccccctggtctcgaccccccttttaaagataagaaactgaaagagtccacccctatccctcctgcagcagagaacaagctacacccagcatccggggctgatagcaaagattggctggctggaccacacatgaaagaagtgctgccagccagccctcggccagaccagtcccggcctactggcgttccaactcccactagcgttttatcatgtccgagctacgaggaggtcatgcacactcccaggacgccttcctgctccgccgatgattacgccgacctggtttttgactgcgccgacagccagcacagcacccccgtaccaacagcccctacctccgcctgcagccccagcttttttgaccggtttagcgtcgcttcatctggcctgtccgaaaatgcaagccaggctcctgcgcgacccctgagtactaacctgtacagatccgtgtctgtggacataaggcggactcctgaagaggagttcagtgtcggcgataagttgtttcggcaacaatccgtccccgcagcttcctcgtacgactcacctatgcccccaagtatggaggatcgcgctccattgccccctgtgcctgccgaaaagttcgcttgtctgtcacctggatattatagcccagactacggactgcctagcccgaaagttgacgcccttcattgtccccctgccgcagtggtcaccgtgaccccatccccagaaggcgtcttcagcagccttcaggccaaaccaagcccgtcgcctcgcgctgagctgttagtgcctagtctcgaaggcgctctgccccctgatcttgatacttccgaagatcagcaagccaccgccgcaatcatacccccagaaccctcctacttggagccactcgacgagggcccattttcggctgtgattaccgaggaacccgtggagtgggcccacccctctgagcaggcattagcctcttctctgattggcggaactagtgagaacccagtgtcttggcctgttggaagcgatctattattaaaatctccccagcgatttccagaatcaccgaagcggttctgtccagcggaccctctccactctgctgcgccaggaccttttagcgcttcagaggccccatatccagccccacccgcaagtcccgctccctacgccctgccggtagccgagcctggcctggaggatgtcaaggacggcgtggacgccgtcccagctgccatttctacaagtgaggccgctccttacgcccctccttcaggactggagagctttttttcaaactgcaagagtctgcctgaagcccctcttgacgttgcgcctgagcctgcctgcgtggctgctgtggcgcaggtggaggctcttggacccctggagaattctttcctcgacggctcaaggggcctgtcccacctgggacaggttgagccagtcccgtgggcagacgcctttgctgggcctgaagatgatcttgacctcggcccattctccttaccagagcttcccctccagaccaaagatgcggctgatggagaagccgagcccgttgaggaatctctcgcaccccctgaagagatgcctcccggtgcccctggagtgatcaatggcggagacgtgtccacagttgttgctgaagaaccaccagcgctacctcctgaccaggcttccacccgtctgccagcggagcttgagcccgaacctagcggtgaaccaaagctcgacgtcgctctggaagcggcagtggaggccgagactgtgccagaggaaagggccaggggcgaccctgattcttccgtcgaaccagctccggtgcctcctgaacagaggcctctcggatcgggtgaccagggcgcagaggccgaggggcctcctgccgcatccctttgcgctcccgatgggccagcacccaacaccgtggctcaggcacaggccgctgacggcgcaggacccgaagacgatactgaggcctctcgggcagccgcacctgccgaaggtcccccagggggaatacagcctgaggcagccgaaccgaagccaacagcggaagccccaaaggctcccagagtagaagagatccctcagagaatgacaaggaatagggcacagatgcttgccaatcaatcgaaacaaggtccaccccctagcgaaaaagaatgcgccccaacgccggctcccgtgacacgggctaaagctcgcggaagcgaggatgacgatgcacaggcacagcaccccagaaaacgccgattccaacgaagcactcaacagctgcagcagcagcttaatacaagcactcagcagacgcgggaagttatccagcagacgctcgcagcaatagtggacgccatcaaactagatgcaattgagccgtatcacagtgaccgcgcaaatccatactttgagtaccttcaaattcgcaaaaagatcgaggaaaaaaggaaaattctctgctgcatcacaccccaggctccccagtgctatgcggaatacgtcacctataccgggagctatcttctagacgggaaaccactcagcaaactgcatattccggtgatagcgcctccaccttccctggctgaacctttgaaagaactgtttaggcagcaggaggccgtgagaggcaaattacgactgcagcatagtatcgagagggaaaagttaatcgtctcgtgcgaacaggagattctacgagtccattgtagggcagcgaggaccatcgctaaccaagccgttccgttttctgcctgcacaatgcttctagacagcgaagtgtataatatgccactcgaaagccagggagatgagaacaagagtgtcagggaccgcttcaatgccaggcagttcatttcatggctgcaagacgtggacgataagtacgaccgaatgaagacctgcttactcatgcggcaacaacatgaagccgctgccctcaacgcagtgcaacgaatggaatggcagctgaaagtgcaggagttagacccagcgggtcacaagtccctgtgtgtcaacgaggtcccaagcttctatgtgcctatggttgacgtgaacgatgattttgttctcctgccagcata

SEQ ID NO: 214475 - DNA, 1836 bp, synthetic construct
  misc_feature 1..1836: note = Description of Artificial Sequence: Synthetic coding sequence
  source 1..1836: mol_type = other DNA
agtatccccaaaatggaggtaaagagttacacgaagaacaatacgatcgcaccaaaaaaggcgagccaccggatactgagcgacaccagtgacgaggaggacgcttccgtgaccgtaggcactggcgagaagctaaggttgtctgctcacacaatcctgccagggtctaaaacccgggagccatccaatgccaagcagcagaaagagaagaataaagtaaaaaagaaacggaagaaggaaaccaaaggaagagaggttcgttttggtaagcggagcgataaattctgttcttccgagagcgagtctgagtcctcagagtccggcgaggacgaccgtgactcactcggctcatctgggtgtcttaaagggtcacctttggttctgaaggacccctctctattttccagcctctccgcctcctcgactagttctcacggatcatccgcagctcaaaaacagaacccctcccatacagatcaacatactaagcactggcgcacagataattggaagacgatctcttccccggcatggagtgaggtctcaagcttgtccgacagcacgcgcaccagattgacatccgagagtgactactcgtcagaggggtcctctgtagaatccctgaagccagtacggaagaggcaggagcaccgaaagcgggcatccctctcggagaaaaagtccccatttctatcctctgccgagggtgctgttcctaagctcgataaagaggggaaggttgtcaagaaacacaagacgaagcataagcacaagaataaagaaaaggggcagtgtagtattagccaggagctgaagctcaaaagctttacgtacgaatacgaagatagcaagcaaaagagcgataaggccatccttctggagaacgatctgagcactgagaataagctgaaggtgctgaaacacgatagggaccacttcaagaaggaggagaaacttagcaaaatgaaactcgaagaaaaagagtggcttttcaaggatgaaaaaagcttgaaacgtattaaggataccaataaggatatttcccgttccttccgcgaggagaaggaccggtccaataaagctgagaaggaaagaagcttaaaggagaaaagtcccaaagaggaaaaactaagattatacaaagaggaacgcaaaaagaagagcaaagataggcctagcaagctggagaagaaaaatgacttgaaggaagataagatttctaaagaaaaggagaaaatcttcaaggaagataaagaaaagctgaagaaggagaaagtgtaccgagaggattctgcctttgacgagtactgcaataaaaatcagttcctggaaaacgaggatacaaagttttccctcagtgacgaccagcgcgatcgttggttctcagatctaagcgatagctcattcgatttcaaaggggaagattcgtgggatagcccggttacagattacagggatatgaaaagcgatagcgtggccaagctgattcttgagaccgtcaaagaggattctaaagagcggagacgcgattcgagggctcgagagaaacgggattaccgggagcccttttttaggaaaaaggaccgagactatttggataagaactccgagaaacgcaaagaacaaaccgaaaagcacaaatccgtgccgggatatctgagcgagaagcacgagcgcaggagacgtaggatggccccaataagaaaaggtcgccgtcgacagaatcagaaggacactaagagaaacccagtaacacgcacaaaagttcgaaatcagtcctggaaaaatgtgagaaggaccaagaatcttattaatgtcctcaagaggaagaagtag

SEQ ID NO: 214476 - DNA, 7991 bp, synthetic construct
  misc_feature 1..7991: note = Description of Artificial Sequence: Synthetic coding sequence
  source 1..7991: mol_type = other DNA
atgccaaagggcggatgtcctaaagcgccacaacaggaagaacttcccttgtcgagtgacatggtcgaaaaacagactgggaagaaagacaaggataaagtgtctctgactaaaactcctaaattggagaggggagatggaggaaaagaggtgcgggagcgggcttctaaacgcaaactgccattcacagcgggagccaatggcgagcagaaggactccgataccgagaagcagggccctgagagaaagagaattaaaaaggagcccgtgacccgtaaggctggcctactctttggcatggggctcagtggcattcgggcagggtacccactaagtgaaagacagcaggtagcacttcttatgcagatgaccgccgaagagagcgcgaatagccccgtcgatacaaccccgaagcacccgtcacagtccaccgtgtgtcaaaagggaacccctaacagtgcctctaaaacgaaggacaaggtcaacaaacggaacgagcgaggtgaaacccggctacacagggcagctattaggggcgatgctcgtaggatcaaagaattaatcagcgagggcgcagacgtgaacgtgaaagactttgcgggttggactgccctgcatgaggcttgcaatcgtgggtattacgatgtcgccaagcagctgttggccgcaggagctgaagtgaacaccaaaggccttgacgatgataccccccttcatgacgccgcaaataacggccactacaaagtcgtcaaactcctgttgcggtatggtgggaacccccagcagagcaatcggaagggggagacaccccttaaagtggcgaacagcccaactatggtaaatctgctgctgggcaagggtacttatacctcatcagaagagtcctctaccgaatcctcggaggaggaagatgcaccgagttttgccccttcctcttcagttgacggaaacaatacagattccgaattcgagaaaggtttgaagcacaaggctaagaaccccgaacctcagaaggctactgcccctgtgaaggacgagtacgaatttgacgaggacgatgagcaggatagagtgcccccagtcgatgataaacacctgcttaaaaaggactacagaaaggagaccaaatccaactccttcatcagcattcctaagatggaggtgaaaagttatactaaaaacaatacaatcgcccctaaaaaagcgtcccatcggatcctgagcgacacgtccgatgaggaggatgccagcgtgacggtcgggactggggaaaagctcagactgagtgcgcacacaatcctgcccggaagcaagacacgggagcccagcaatgcaaaacagcagaaggagaaaaacaaagttaagaagaaacgcaaaaaagagacaaaggggcgtgaggtcagattcggcaaacggtctgacaagttctgctcttccgagtcagagagcgagagctcagagtccggcgaagacgatcgagattcactcggttcaagtgggtgtttgaaaggctctccattggtgctgaaagatccttctctgttttcctctctgtctgctagttccactagctcacacggatcttctgctgcccaaaagcagaacccatctcacacagatcaacacacgaagcattggcggactgataactggaaaacgatctcttcccccgcttggtctgaagtgagctcactcagcgactcgacaaggactagactaactagcgaatccgattattccagtgagggctcttctgtggagtctcttaagcccgtacggaagaggcaggagcacaggaagagagcctccctgtcggaaaagaagtcgccttttttgagttctgccgagggggcagttccgaaactggataaggaaggcaaagtagtgaagaagcacaagactaaacacaaacacaaaaacaaagagaagggacagtgttctatcagccaagaattaaaacttaaatcttttacttacgagtacgaggatagcaaacagaagtccgacaaggcgatccttctagaaaacgacctgagcaccgagaacaaacttaaggtgctcaagcacgacagggaccattttaagaaagaggagaagttgtccaaaatgaagctagaggagaaagagtggcttttcaaagatgagaagagcctgaagcgaataaaagataccaacaaggacattagtaggagcttcagggaagaaaaagaccgcagcaataaagccgagaaagaaagatctctgaaggagaaaagtcccaaagaggagaaactcaggctgtacaaggaggagaggaaaaaaaagtccaaggaccggccatccaagctcgagaaaaaaaatgatctgaaagaagataagatatcgaaagaaaaagaaaaaatattcaaagaggacaaggagaagttgaagaaagagaaagtttaccgagaggactcggcatttgacgagtattgtaacaagaatcagttcctcgaaaacgaggacactaagttttccctgtccgacgatcagcgggatcggtggttcagcgacctctctgacagctctttcgacttcaagggtgaggactcctgggatagcccagtgacagactatagagatatgaaatcagacagtgtcgccaaactgatcttagaaacagtcaaggaggactctaaagaacgcaggcgcgatagccgcgcacgcgaaaaaagagattatagggaacctttttttagaaaaaaggaccgcgattacttggataagaactcagagaaacggaaagagcagactgagaaacacaagagtgtgcctggctatctgagcgaaaaagataaaaaacgccgagagtcagctgaagcaggacgggatcgcaaggatgcactcgaaagctgtaaagaaaggagggatggcagagcaaaacctgaggaggcacatagggaagaactgaaggagtgcggatgcgagtccggctttaaggataagtccgacggcgatttcggcaaagggctcgagccttgggagcggcatcacccggcaagggagaaggaaaaaaaggatggaccagataaggaacggaaggagaagacaaaaccagagaggtataaagagaaaagctctgacaaagataaaagcgaaaagagcattttggagaaatgccagaaagataaggagtttgacaaatgtttcaaagaaaagaaggacacaaaagagaaacacaaggatactcatggaaaggataaagagaggaaagccagccttgatcagggcaaggagaaaaaggagaaggcatttccgggaatcatctctgaagacttttcagaaaaaaaggatgataaaaaaggaaaggagaagtcatggtacattgctgacatctttacagatgaatctgaagacgacagggatagctgcatgggttctggatttaagatgggcgaggcttctgatctgcccagaaccgacggattgcaagaaaaggaggaaggccgtgaagcatacgctagcgatcgccacaggaagagttcagacaagcaacatccagagcgacagaaggacaaggagcccagggacaggaggaaggatagaggggcagcggacgcaggcagagacaaaaaggagaaagtgtttgagaaacataaggagaagaaggacaaggaatccaccgaaaagtataaggatagaaaagatagggcatcagtagattctacccaggataagaaaaacaaacagaagttacctgaaaaagcagaaaagaaacacgctgcagaagataaagcgaaaagcaagcacaaggaaaaatcagacaaggaacactccaaagagaggaagtctagcaggagtgccgatgcagagaagtcattacttgaaaagctcgaggaagaggctctccatgagtaccgagaggattcaaatgacaaaatcagcgaagtcagttctgactcctttaccgatagggggcaagagcccggattaacagcttttctcgaagtatcctttacagagccccctggggacgataagcctcgcgagagcgcatgtctgcctgaaaaactaaaggagaaggagcgccatcgacactcttcgtccagcagcaagaagagccacgaccgcgagcgcgcaaagaaggagaaggctgaaaagaaagaaaagggggaggattataaggaggggggttcgcgcaaagactctgggcagtatgaaaaagacttcctcgaagccgacgcatatggggtcagctacaacatgaaggctgatattgaggatgagctggacaaaactatagagctattcagcaccgagaagaaagacaagaacgattccgagagggaaccttcaaaaaagattgaaaaggaattgaagccctacggaagctccgcaataaacattttgaaggaaaagaagaagcgggaaaagcatcgggagaagtggcgcgatgagaaagagcggcatcgcgacaggcacgctgatgggttgctcagacatcaccgcgatgagctattgcgccaccacagggatgaacagaagccagccaccagagataaagactcccctcctcgcgttcttaaggacaagtccagggacgagggccctcgccttggcgacgccaagctgaaagagaaatttaaggatggcgcagaaaaggagaaaggagatcccgtgaaaatgagcaacgggaatgataaggtcgctcctagcaaggacccaggcaagaaagatgctcgacccagggagaagcttctaggcgacggcgacctcatgatgacgtccttcgagaggatgctctcccaaaaggacctagagatcgaggaaaggcataaaaggcacaaagagcggatgaaacagatggaaaaactgcgtcaccgcagtggagaccccaaactgaaggagaaagctaaacctgctgatgacggcagaaagaaggggctggacatccctgctaaaaagccccctgggttggatccccctttcaaagataagaagctcaaggagtccacacccattccacctgcggctgagaacaagctccaccctgcaagcggagctgacagcaaggattggctggcgggaccgcacatgaaagaagtactcccggcttccccaagaccggaccagtcgagaccaactggagtgccaacaccgacctcagtgctgtcctgcccatcttatgaagaggtcatgcacacacctaggacccccagctgctcagcagatgactacgcagacttggtgttcgactgtgccgattcacagcattccactcctgtgcctacagcgccaacgtcagcttgttctcctagttttttcgaccgtttttcagttgcaagttccggactgtccgaaaacgctagtcaggcgcctgcaagacctctcagtaccaacctctatcggagcgtctctgtggatatccggagaactcctgaggaagagttttccgtgggagataagctcttccggcaacagtctgtgccagctgcatcctcttacgacagccccatgcccccatcaatggaagatagagcacctttaccaccggtcccagccgagaagttcgcatgccttagcccaggctactactccccggattacggtctgcccagccccaaagtagatgccttgcattgtcctcctgctgctgtggtgaccgttaccccttctccggagggggtgtttagctccctgcaggccaagccttcacctagccctcgggcagaactcctggtcccttcccttgaaggcgctcttccacctgatctggatacgtctgaagaccagcaggcaaccgccgcaatcatccctcctgaaccttcttatctggagcccctcgatgagggccctttctcagccgtcattacggaggaaccggtggagtgggcccacccttcagaacaggcgctcgctagcagccttataggcggtacttcagaaaacccagtgtcctggcccgtgggaagcgacttgcttctcaagagtccccagagattccctgaaagtcccaaaagattctgcccagcagaccctttacacagcgcagcccctggtccattctcggcttcagaagccccatatcccgctcctcctgcctcccctgccccatacgcacttccagttgccgaacccggtcttgaggatgtcaaagacggcgtcgatgccgtcccggctgctatttctacatccgaggccgcaccatatgcacccccatctggtctagaaagtttcttcagcaactgcaagtcactccccgaggcacctttggacgttgctcctgagcctgcatgtgtggccgcagtggctcaggtcgaggccctcggccctctggaaaactccttcttggacggcagccggggtctgagccatctaggccaggtggaacccgtaccatgggctgatgcctttgccggtcctgaggatgacctggaccttgggcctttctctttaccagagctgcctcttcagactaaagacgcggctgacggcgaagcggaacctgttgaagagtccctagcacctcctgaggaaatgcctccaggcgcacctggcgtaatcaacggcggagatgtgagtacggtagtggccgaagaaccccctgcgctgcccccagaccaggctagcactcggcttcctgctgagctagaacccgagccttctggcgagcctaagctagacgtcgctctcgaggccgcagtggaagccgaaacagttcccgaggaaagggcgagaggcgacccagactcatccgtggaacctgctccggtgccgcctgaacagcggccactgggctctggcgatcagggagcagaggcggaggggcctccagccgctagtctgtgcgctccagacgggcctgcaccaaatactgtggcccaggcccaggcggctgatggcgcaggtcccgaagacgataccgaagccagtcgtgccgcagccccagctgaagggccaccgggaggcatacagcctgaagccgctgagcctaagccaaccgccgaggccccaaaggctcctcgcgtggaggaaatccctcaacgaatgaccaggaatagggctcagatgctggctaaccaaagcaagcagggacctcccccaagcgagaaagagtgcgcccctacaccagcaccagtgactagagcgaaggctagaggaagtgaagacgacgacgctcaggcacaacaccccaggaagcgccgttttcagcgatcaacacagcagctgcaacagcagctgaatacttcaacccagcagaccagagaggtcatacagcagacccttgctgccatcgtggacgctatcaaactggatgctatcgagccttaccattcagatagagctaacccttattttgaatacctgcagattagaaagaaaatagaagagaaaagaaagattctgtgttgtatcacgccccaggcccctcagtgctacgcagaatatgtgacatatactggctcgtacttgcttgatggaaagcctctgtcaaaacttcatatacccgtcattgccccaccaccatcattggccgaacccttaaaggagctctttaggcagcaggaggcagtacgagggaagcttagactgcagcatagtatcgaacgagaaaaactgatcgtgtcgtgcgaacaggaaatactgagagtgcactgtagagccgctagaaccattgcaaaccaggctgtgccgttttctgcctgcacaatgttactagattcagaggtttataacatgcctttagagtcacaaggcgacgaaaataaatcggtcagggatcgcttcaatgctcgtcagtttatcagttggctccaggatgttgatgacaagtacgatagaatgaagacttgcttgctcatgcgccagcagcacgaagccgctgccctgaacgccgtgcagcggatggagtggcaactgaaagtccaagaactcgaccctgcaggacataaaagcctgtgtgtgaacgaagtcccttccttctacgtgcctatggtggacgtaaatgacgatttcgttttgctgccagccta

SEQ ID NO: 214477 - DNA, 1317 bp, synthetic construct
  misc_feature 1..1317: note = Description of Artificial Sequence: Synthetic coding sequence
  source 1..1317: mol_type = other DNA
tccgcaggcagggtcaacgaggatcgggtgaggagtcgcaccatgccaaagggtggttgcccgaaagcacctcagcaagaggagctcccactaagcagcgatatggttgaaaagcagacaggcaaaaaagacaaggataaggtctcgctcactaagacacccaagcttgaaaggggagatgggggtaaggaggtaagggagcgggcttctaagaggaagctgccttttaccgccggagcaaacggcgagcagaaagactcagacacagagaaacaaggccctgagcgtaagagaataaaaaaagagccggttacacggaaggcaggattacttttcggcatgggattaagcggcattcgagcgggttaccccctcagcgaacgccagcaggtggctctcctgatgcagatgacagccgaagagagcgctaacagtccagtggatacaacacccaagcatccttcccagtctactgtgtgtcagaaggggacccctaattctgcatccaaaacgaaagataaagtgaacaaacgcaacgagcggggtgagacacgattgcaccgcgcagccattcggggagacgcacgacggattaaggaactgattagtgagggtgcagacgtaaacgtgaaagacttcgcaggatggaccgcactccacgaagcgtgcaaccgcggttactacgacgtcgccaagcagctgcttgctgcaggggcagaggtgaatacgaagggcctggatgatgacaccccccttcacgacgcggcaaataacggacactacaaagtcgtgaaactgctcctgaggtacgggggaaacccacagcagtcaaatagaaagggtgagacaccactcaaggtggcgaattctcccaccatggtcaacttgctgctcggtaaaggaacatatactagttctgaggagtcttcaactgaatcttcggaagaggaagacgctccatcattcgcacccagttcatctgtggacggcaataacactgattccgaattcgagaagggcctcaagcataaagcaaaaaaccctgaaccacagaaggcaacagcccctgtgaaggatgaatatgaatttgacgaggacgacgagcaggaccgtgtaccacctgtcgacgacaagcatctcctgaagaaagactaccggaaggaaaccaagagtaactcattcatcagtatcccaaaaatggaaaaggtcactctcaaaattactcgtctgcaccagagaaagcgccctatcgtaagttgccaaacaaggaggaccagaagaacaagggttagcccgtggggacaagaacgttcatag

SEQ ID NO: 214478 - DNA, 6189 bp, synthetic construct
  misc_feature 1..6189: note = Description of Artificial Sequence: Synthetic coding sequence
  source 1..6189: mol_type = other DNA
atgcctaaatctggtttcactaaaccgatccagtcagagaactcagactctgacagtaacatggtggagaaaccatatgggcgaaagtccaaggataaaatcgctagctactcgaagacccctaaaattgaacgctccgacgtaagcaaagaaatgaaggaaaagtcctccatgaaacgaaagctgcctttcaccatctcgccatctcgaaacgaggagagggacagcgacacagactctgaccctggacacacatcggagaactggggggaacggctgatatcaagctaccgcacgtacagtgaaaaggaggggcctgaaaagaagaagacaaagaaggaggccggaaataaaaaatcgacgcccgttagtattctgttcgggtaccctttatcagagcgcaagcagatggcccttcttatgcagatgactgctcgggataatagccccgattccacccccaatcatccatcacagaccactcccgcacagaaaaaaacgccaagttccagctcgcgccagaaggacaaggtcaacaagaggaacgagcgcggtgagacacccctgcatatggcagctattcggggtgacgtgaaacaggttaaagaacttattagcttaggcgcaaacgttaacgtgaaagactttgctgggtggacccccttacatgaggcatgtaatgtcggctactacgacgtagctaagattttaattgcagctggggcagacgtaaatacccaagggctcgatgacgataccccactgcatgacagtgccagctcaggccatcgggacatagtcaagctcttattgaggcacggcggaaatccgtttcaagccaataaacacggggaaaggccagtggatgtagccgagactgaggagctggagctgcttctcaaacgagaagtacctttgagcgatgacgatgagtcttatacggactctgaggaggcccagagcgtgaacccttcgtccgtagacgagaacatagattctgaaactgagaaggactcactgatctgcgagagcaagcaaatcttaccctccaaaactccattacccagcgctctcgatgagtatgaatttaaagatgatgatgacgaggagatcaataaaatgatcgatgatagacacatccttagaaaagagcagcgaaaagagaatgagcccgaggccgagaagacccacctcttcgccaagcaggaaaaggcgttttaccctaagagcttcaagtctaagaagcagaagccaagcagagtgctatattcgtccactgaatcaagtgacgaggaggcgctgcaaaataaaaaaatctctacatcttgctctgtgatcccagaaacatctaactccgacatgcagacaaagaaggagtatgttgtgagcggtgagcataaacaaaaaggcaaggtaaaaagaaaacttaagaaccagaacaaaaataaagagaatcaggaactaaagcaagaaaaagaggggaaggagaataccaggatcacgaacctgacggtaaacactgggctggattgtagcgagaaaacccgcgaagagggaaattttaggaaaagcttcagccccaaggatgatactagcctgcacctgttccatatctctactggtaagtctcctaagcattcttgtggactgtcagaaaaacagagcactccccttaagcaggagcacactaagacttgcctatccccaggctcttccgagatgagtttgcagcctgacctggttcgctacgacaacacagagagtgagttcctccctgaatccagctcagttaagagttgtaaacacaaagagaaaagtaaacaccagaaggactttcatttggagttcggagagaaatctaacgctaagattaaggatgaggatcactctccaacgttcgagaacagcgattgtacgctcaagaagatggataaagagggcaagaccctcaagaaacacaagttgaagcataaagagcgagagaaagagaaacacaagaaggaaatcgagggcgagaaagagaagtacaaaactaaagattccgctaaggagctgcagcgttctgtagaattcgaccgagagttttggaaggagaacttttttaagagtgacgagacggaggacctgttcctgaatatggaacatgaaagtcttaccctcgagaagaagtctaaactggaaaaaaatataaaggacgacaagtcaacaaaggagaaacacgtgtcaaaggaacggaactttaaggaggaacgggataagattaagaaagagtcagagaaatcgtttcgagaggagaaaatcaaagaccttaaagaggagagagaaaacatacctactgacaaggactctgaatttaccagcctcggaatgtccgctatcgaagaatctatcggactgcatcttgtggagaaggagattgatatcgagaagcaagagaagcacattaaggaatcaaaagaaaagcccgaaaagcgcagccagatcaaagaaaaggacattgagaagatggagagaaagactttcgaaaaggaaaagaaaatcaaacacgaacacaagtctgagaaggacaagcttgacctctcagagtgcgtggataaaatcaaggaaaaggataagctgtacagccatcatactgagaagtgccataaggaaggcgaaaaatctaagaatactgcagcaatcaagaaaaccgacgacagggagaaatcaagggagaagatggaccgcaaacatgacaaagaaaaaccagaaaaagagcgccacctagctgagtcaaaggaaaaacatctgatggaaaaaaagaataagcagagcgacaattccgagtactcaaagagtgagaaaggcaagaacaaagagaaggaccgcgagctggataaaaaggagaaatcgagagataaggaatctattaatattacgaacagcaagcatattcaggaggaaaaaaagagctctattgtggatggcaataaggcccaacacgagaaacccctgtccctgaaagaaaaaactaaggacgaacccctgaagaccccagacgggaaggagaaggataagaaggataaagatatcgaccgctataaagagagagacaagcacaaagacaaaatacagatcaactcactgctcaagctgaaatccgaggcagataagcccaagcctaagtcatctcctgcttctaaggatacgaggccaaaggaaaaacgtctcgtcaacgacgatttgatgcagacaagcttcgaaagaatgctctcccttaaggacctggagattgagcagtggcacaagaagcataaggagaagatcaagcagaaggaaaaggagaggctgcgcaaccgtaactgtttagaactcaaaatcaaagataaagagaagactaaacacacaccaaccgagtctaaaaacaaggagttgacgaggtctaaatcaagtgaagtgactgacgcctataccaaagaaaagcaaccaaaagatgccgttagtaacaggtcacaaagtgtggacactaaaaacgtaatgactttgggaaaaagcagcttcgtcagcgacaattccctaaaccggagcccacgaagcgaaaatgagaagcctggattatcctctcggtctgtgtctatgatctcagttgcgagttcagaggattcctgccacaccaccgttactacccctagaccacctgtagagtacgacagtgacttcatgttagagtcctcggaatcacagatgagcttcagtcagtctccttttttaagtattgcaaagagtccggctctacacgaaagagaattagacagcttggccgacctacctgagcgcatcaagcccccatatgccaatcggctgtcgacctcccatttgagaagctcgagcgtcgaggacgtcaaattgatcatttccgagggaaggcccaccatagaagtgaggagatgttcaatgccttcagtcatttgcgaacacaccaagcagtttcaaactatcagcgaggagtctaaccaggggagccttcttactgtgcctggggacacaagcccaagtcctaagccagaggtgttctccaatgtgccggaaagggacttgagcaacgtttctaacattcatagttcattcgccacttcacccaccggagctagcaactcaaagtacgtcagcgcggaccgaaatctgatcaagaatacagccccagtaaacactgtcatggactctccagtacacctcgagccctcatcgcaggtgggagtaatccagaacaagtcgtgggagatgccagtcgataggctagagacgctgagtactagggactttatctgtcctaattccaatattccggatcaggaaagcagtttacaatccttctgtaattctgaaaacaaggtgttaaaagagaacgcagactttttgagcctgcgccagacggagctgcccggaaactcctgtgcacaagatcccgctagtttcatgcctccgcagcagccgtgctccttcccctcccaatccctttctgatgcagagtccatatccaaacatatgtctcttagctacgtggccaatcaggaaccaggcattttgcagcaaaaaaacgcggtgcagatcatctcttccgcgctggatacagacaatgagagcactaaggataccgaaaacactttcgttttgggagacgtgcagaagactgatgccttcgtccccgtctatagcgacagtaccattcaggaagcgagcccgaactttgagaaggcttacaccctccccgtcttgcctagcgaaaaagattttaacggttcggacgcgtcgacacaattgaatacacactacgcattttctaagctcacttataaaagttcttccggccatgaggttgagaacagtacaacagacacacaggtgatctctcatgaaaaggaaaacaagctggagtccctggtcttgacccacttgagccggtgtgattccgatttgtgcgagatgaatgctggtatgcccaaggggaatctgaacgagcaggaccctaagcactgcccagaaagtgaaaaatgtctcctcagtattgaagacgaagagtctcagcagagcattttgtcttctctggagaaccattcccagcagagcacccagcctgaaatgcacaaatacggtcaacttgtcaaagtcgaattggaagagaacgcggaagatgataaaaccgaaaaccagatcccgcagagaatgacccggaacaaagctaacactatggccaaccagtctaaacagatactcgcctcctgcaccctgctctcagaaaaagactccgagtccagctcacccagaggcagaattcgacttacagaggatgacgacccccagattcatcatccgaggaagcgcaaagtatcacgggtcccccagcctgtgcaggtctccccttcgctattacaggccaaggagaaaacccagcagtctctggcagccatcgttgacagcctgaaacttgatgaaatccaaccatactctagcgagagggccaatccctattttgaataccttcacatccgtaagaagatcgaagaaaaaaggaaactcctatgctccgtgatcccacaagcaccccaatactatgacgaatatgtaacattcaacggtagctatctgttggacggtaaccccctatccaagatctgtattccaacgattactccccctccaagcttaagcgatccactgaaggagcttttcagacagcaggaggtggtgcgcatgaagctgaggttgcagcacagcattgagagggagaagctgatcgtgtctaacgagcaggaagtgctgagagttcactacagggcagcacggacacttgcaaatcaaactctgccctttagtgcctgcaccgtactcctagacgctgaggtctataacgtgcccctcgattctcaaagcgacgactcaaagacctctgtgagggatcggtttaatgctagacagttcatgtcgtggctccaggacgtcgacgacaagttcgacaagctcaagacatgtctgctgatgaggcaacagcacgaggctgccgctttaaacgccgttcaacggctggagtggcagctcaagttacaagaactcgaccctgccacatataaaagcattagcatttatgaaattcaggagttctatgtgccattggtagacgtgaacgatgatttcgaactgactcctatatac

SEQ ID NO: 214479 - DNA, 1317 bp, synthetic construct
  misc_feature 1..1317: note = Description of Artificial Sequence: Synthetic coding sequence
  source 1..1317: mol_type = other DNA
atggtgaatgtgcctgaacttcttctcggacagtctccctctcggaacgacaccaagatcattaatagcgaagaagcccagtccgtcaacccctcctctgtggatgagaatatagattctgaaacagaaaaggattctctgatctgtgagtccaagcagatattgccatcaaaaacacccctgccgagcgctcttgatgagtatgagtttaaagatgacgatgatgaggagataaacaaaatgatagatgatcggcacattcttaggaaggaacagcggaaggagaacgagcctgaagctgagaaaacgcaccttttcgccaaacaggagaaagccttctaccccaaatccttcaaatccaagaagcagaagccatcccgagtcttgtacagttctaccgagagttctgacgaagaagccttgcaaaacaagaagattagtaccagttgtagcgttattccagaaactagcaactccgacatgcagaccaaaaaggagtacgtggtgtcaggagaacacaagcagaaaggaaaagtgaagcggaaactgaagaaccagaataagaacaaggaaaaccaggagctgaaacaggagaaggaagggaaagagaacactaggattaccaacctcaccgttaatacgggtctggactgctctgagaagaccagggaggaaggcaattttaggaagtctttctcaccgaaagacgacacctccctgcacctttttcacatctcaaccgggaaatcaccaaagcatagctgtggacttagcgagaaacagtctacccccttaaagcaagagcacaccaaaacctgtttgtcacccggttcttctgagatgtctctgcagccagacttggtgaggtacgataacaccgagagtgaatttctccctgagtccagcagcgtaaagagctgcaagcataaagagaagtccaagcatcagaaggattttcaccttgagttcggggaaaaaagcaatgccaagatcaaggacgaagatcactctcctactttcgaaaatagcgactgcaccctcaagaaaatggataaggagggcaaaacattaaagaagcataagctgaagcataaggaacgcgagaaggaaaaacataagaaggaaatcgaaggggagaaggaaaaatataagacaaaagatagcgctaaagaactgcagaggtctgtggaattcgacagagagttttggaaggaaaactttttcaagtctgacgaaaccgaagatctgttcctcaatatggagcacgagtcgctgacgttggagaagatcaaaatcggaaagaagcaccagaggtag

SEQ ID NO: 214480 - DNA, 6119 bp, synthetic construct
  misc_feature 1..6119: note = Description of Artificial Sequence: Synthetic coding sequence
  source 1..6119: mol_type = other DNA
atgccgaagtccggttttactaaacctatccagtcggagaacagcgatagcgatagtaacatggtcgaaaagccatacggacgaaaatcaaaagacaagatagcctcttacagcaagaccccaaagatcgagcggagtgatgtgtctaaggagatgaaagaaaaatcttctatgaagcgaaaacttccatttactatatccccatcgcgaaatgaggagcgggattctgacacagagaaggaaggcccagaaaagaaaaaaactaagaaggaggctggaaataaaaagtcgacacccgtgtcaatcctctttgggtaccccctgagtgagcgcaaacagatggctctcctgatgcagatgaccgctcgcgacaattcgccagactccacacccaaccatccttctcaaacgacccccgctcaaaagaagactccctcatctagtagtcgccaaaaggacaaagtaaacaaaagaaacgaaaggggcgagacaccacttcacatggcggctatcagaggcgatgtgaagcaggtcaaggaacttatctcactcggagcaaacgtcaatgttaaggactttgcaggttggaccccccttcacgaggcctgtaatgtgggctattacgatgttgctaaaattctgatagcagcaggcgctgacgtgaatacacaggggctggatgatgacactccattacacgactcagcttcctcggggcaccgagacatcgtgaagctgctcctccgccatggaggtaacccgtttcaggcaaacaagcatggagaacgccctgtcgacgtggcagagacggaggaactggagctactgctaaaaagagaggtacccttatcggatgatgatgagtcatacaccgacagcgaggaggcacaaagcgttaacccgtcttcagtagatgaaaacatcgacagtgagaccgaaaaggatagcctgatatgtgagagcaaacagatcctcccctctaagactcctcttccatcagcgctggatgaatatgagtttaaggatgatgacgacgaagagataaataaaatgattgacgaccggcacatcctgaggaaagagcaacgcaaggaaaacgaacctgaggccgagaagactcatcttttcgctaaacaggagaaggcattctacccgaaatcctttaagtcaaagaaacaaaaaccctctcgagtcttgtactcatcgaccgagtcgtccgacgaggaggctcttcaaaacaaaaaaatatccacctcttgctcggtcattcctgagacatcaaactcagacatgcagacgaaaaaggaatatgtggtatctggagagcataaacagaaaggcaaagtaaagaggaagctgaaaaaccagaacaaaaacaaggagaatcaggaattgaagcaggaaaaagaggggaaagagaacactaggatcaccaacctaacagtgaatacaggtctggactgttccgagaaaacgagggaggaaggaaactttaggaaatcattttccccgaaggatgacacctccctgcacctgtttcatatttcaaccggaaagtctccaaaacacagctgcgggctgagcgagaagcaatcaaccccactgaagcaggaacacaccaaaacctgtttgagtcccggttcctcggaaatgagcctgcagccagatttggtgcgctacgataacacagagtccgagtttctccccgagtccagctcagtgaaatcttgcaagcataaggagaagtcaaaacaccagaaagattttcatctcgaatttggtgagaagtccaatgcgaagatcaaagatgaggaccattctccaacattcgagaattcagattgtacccttaaaaagatggataaggagggtaagacactgaagaagcacaaactcaaacacaaagaacgtgagaaggagaaacacaaaaaagagatagaaggggaaaaggaaaaatataaaacaaaggacagcgccaaggaactgcagcgctctgtggagtttgacagggaattctggaaagagaatttttttaagtccgatgagaccgaggacttatttctgaacatggaacatgaatccctgaccctggagaagaagagtaaactggagaagaacatcaaggacgacaaatcaactaaggagaagcatgtgtccaaggaaaggaacttcaaggaagagcgggataaaatcaagaaggagagtgagaagagctttcgtgaggagaagataaaggacctaaaggaggagagggagaatatccccaccgacaaggatagtgagttcacaagccttggcatgtccgcgatagaggagagcattggactgcacctcgtcgagaaagaaattgacatcgaaaaacaggagaaacatatcaaggagtcaaaggagaaacccgaaaagagaagtcagatcaaagaaaaggacatcgaaaagatggagcgtaagacattcgagaaagagaaaaaaattaagcacgaacataagagtgaaaaagataagctggacctgtccgaatgcgtcgataaaataaaagagaaggacaagctttatagtcaccacaccgaaaaatgccacaaggaaggggaaaaatccaaaaacactgcagctatcaaaaagacagatgatagggaaaaaagtcgggagaagatggacaggaagcacgacaaagaaaaacccgaaaaagagaggcacctggcggagagcaaggagaagcatcttatggaaaagaaaaacaagcagtccgacaacagcgagtacagtaaaagtgagaagggaaaaaataaagaaaaagatcgcgaactcgacaagaaggaaaagtctagagataaggagtccattaatatcaccaattctaagcacatccaggaggagaagaaaagttccatcgttgacgggaacaaggctcagcacgagaagcccctgtccctaaaagagaaaacgaaagatgaacctctgaaaacaccagatggaaaggagaaggacaagaaggacaaggacatcgatcggtacaaggagcgggacaaacacaaggataagatccagattaactcattgctgaagctgaagtccgaagcagacaaacccaaaccaaagtcttctcctgcttctaaggataccaggcctaaggagaaacgactggtgaacgacgatctgatgcagacctccttcgagagaatgctgagcctcaaagacctggagatcgagcaatggcataaaaagcacaaggaaaagataaagcagaaggaaaaggagcggctccggaacaggaattgcctggagctgaaaattaaggataaggaaaaaacaaagcacactcctactgagtcaaaaaataaggaactgactcgctctaaatccagcgaagtcaccgatgcttacacaaaagagaaacagcctaaggacgccgtaagcaatagatcccagtctgtggataccaaaaatgtgatgacactggggaaatcttcctttgtgtctgacaattcactcaacaggtctcctagatccgagaatgaaaagcccggattgtcatcccgatctgtctccatgatatctgtcgcctccagcgaagatagctgccacacaactgttacaacacccaggccgcctgtcgagtacgactcagacttcatgctagaatcttcagagtcccagatgagcttcagccagagcccatttctgagtatcgctaagtcgccagcgctgcatgagcgggagctagactcgctcgccgatctgcctgagcggatcaaacccccatacgcaaacaggctttctactagtcatctgagatcaagtagcgtggaggacgtgaaactgatcatttctgagggcagacctactatcgaggtccgccgttgttccatgccatcagttatctgtgagcatactaagcaattccagactatatccgaggaatctaaccagggatcattgttgacagtgcccggagacacatccccttccccaaagcccgaagttttctctaatgtgcctgaacgagatttgtctaatgtatcgaacatccatagttcgtttgcaacaagccctaccggagcatccaactcaaagtacgtgtctgccgacaggaacctcatcaagaatactgcgccagtaaacacggtgatggatagccctgtgcacctggagccgagctcacaggtgggagtaattcagaacaaatcatgggagatgcctgtggatcgactcgagaccttatccacccgcgattttatttgtcctaatagcaacatcccggatcaggaaagttcgttgcagagcttttgtaacagtgagaataaggttctgaaagagaatgccgactttcttagcctgagacaaacagagcttcctggtaactcctgtgcacaggaccccgcttccttcatgcccccacagcagccatgttcgttccctagccaaagtctgtccgacgccgaatccatttctaagcatatgtctcttagttacgtcgcaaaccaggagcccggaatacttcagcagaagaatgctgtgcagatcatttcgtcagccctggatactgacaatgagtcaacaaaagacaccgaaaacacatttgtgctgggcgatgtgcagaaaaccgacgcttttgtacccgtgtattcagattctactatccaggaggctagccccaacttcgagaaggcatatacactaccagtgctgccctctgagaaagacttcaacggcagtgacgcaagcacccaattgaacactcactatgccttctcaaaactaacttacaagagctctagcggacacgaagtggaaaattctaccacagacacgcaggtcatatcacacgagaaggagaataagctcgaatcccttgtactgacccatttgtctcgctgtgactctgatctgtgtgaaatgaatgctgggatgcctaaagggaatttaaatgaacaggatccaaagcattgtcctgagtccgagaaatgcctgttaagcatcgaggacgaagagtctcagcaatccattctgagtagcttggagaaccacagtcagcagtccactcaacccgagatgcacaaatacgggcagctcgtgaaggttgaactggaggagaatgcagaggatgataaaaccgaaaaccagatcccacagaggatgacgcgtaataaggcaaataccatggccaaccagtcaaagcaaatcctggcttcttgtacattgctgtcagagaaggattctgagtcgagcagcccacgtggcagaatacggctgactgaagatgacgacccacagattcaccatcccagaaaacggaaagtctcccgcgtcccacagcctgtgcaagtgtctccaagtttattacaggccaaggaaaaaacgcagcagagcttggctgctatcgtcgacagcctgaagctcgacgagatccagccttactcctcagagagggccaacccgtatttcgagtatttacacatccggaaaaagattgaggaaaagcgtaagcttttgtgctctgtgattcctcaggccccacagtactacgacgagtatgtgacgtttaacgggtcctatcttcttgatggtaacccactgtcaaagatttgtatcccaaccattacacccccaccatctctctcggacccattgaaagagctttttagacagcaggaagtggttaggatgaagctacgcctccagcactcaatcgaacgtgagaaattgattgtttccaatgagcaggaggtcctacgcgtgcattacagggctgccagaactctcgcgaatcaaacactccctttcagtgcctgtactgttttgctggatgccgaggtgtataacgtacctctcgattcacagagtgacgactctaaaacctccgtccgggatcgcttcaacgctcggcagttcatgagctggctgcaggatgtggatgacaagttcgataagctgaaaacctgcttactaatgaggcagcaacacgaggccgcagctctgaacgccgtgcagaggctggagtggcagctgaagctgcaagagctggaccccgcaacatataagagcatatctatctacgagattcaagagttttatgttccactagtcgacgtcaatgacgactttgaactgacacctatcta

SEQ ID NO: 214481 - DNA, 372 bp, synthetic construct
  misc_feature 1..372: note = Description of Artificial Sequence: Synthetic coding sequence
  source 1..372: mol_type = other DNA
actgaagacttgttcctgaatatggaacatgagtccttgacattggagaaaaaaagcaagctggagaagaatataaaggacgacaaatccactaaggaaaagcacgtcagcaaggagcgaaattttaaagaggaaagggacaaaattaagaaagagtccgagaaatcttttagagaagggatgtctgcaatagaagagagcattgggctacatcttgtcgaaaaagaaatagatatcgagaagcaggaaaagcacattaaagaatctaaagaaaagcctgagaaaagatcacagatcaaggagaaggatattgaaaagatggaacgcaaaacctttgagaaaggaacaagttacatccgcattacacagtag

SEQ ID NO: 214482 - DNA, 993 bp, synthetic construct
  misc_feature 1..993: note = Description of Artificial Sequence: Synthetic coding sequence
  source 1..993: mol_type = other DNA
atgcccaaatcagggttcaccaaaccgattcaaagcgaaaattctgacagtgattccaatatggtggaaaaaccctacgggaggaagagtaaagacaaaatagcatcttattcaaagacaccgaagatagagcgaagcgatgtttcaaaagaaatgaaggagaagtcctctatgaaaaggaagctgccctttacaataagtcctagtagaaatgaagagcgggattctgatactgattcagatcccggacatacctccgagaactggggggagcgattaatctcaagttatcgcacttattcagagaaagaaggtcccgagaagaaaaagaccaaaaaggaggccggaaataaaaagagcacccccgtgagtatcctcttcggataccctctttccgagcgtaaacagatggctttattgatgcaaatgacagcacgggacaatagcccagatagtacccccaaccatccttcccagacgaccccagcccagaagaagactcccagctcctcatctagacagaaagataaagtcaacaaacgtaacgaaaggggtgaaacacctctgcacatggctgctattagaggggatgtcaagcaggtgaaggaattaatctctcttggcgctaacgtgaacgttaaagattttgccggttggacccccttgcacgaagcatgtaatgtcgggtactacgatgtggccaaaatactcattgctgctggtgcagacgtgaatactcaagggctggatgatgacaccccgctccacgattctgcctcctctggccatagggacattgtgaaactcctcttgagacatggtggcaaccctttccaggcgaataagcatggcgaaagaccagttgacgtggctgagactgaggaactcgagctgctgctgaagagagaagtacctctcagtgatgacgatgaatcatacactggaagttcgtaccaatttgccggtaacgcgaagttatcaggagcatcatag

SEQ ID NO: 214483 - DNA, 1116 bp, synthetic construct
  misc_feature 1..1116: note = Description of Artificial Sequence: Synthetic coding sequence
  source 1..1116: mol_type = other DNA
atgcctaaatccggattcaccaagccaatccagtcagagaatagcgactctgacagcaatatggtggagaagccctatggacgcaagtccaaagacaaaatagcctcttatagtaagacgccaaagattgaacgaagtgatgtgtcaaaggaaatgaaagaaaaaagcagtatgaagcggaaactaccgttcacgataagtcctagtaggaacgaagaacgggattccgatacagaaaaggaggggccagagaagaaaaagaccaagaaggaagccggtaacaaaaaaagcacgcctgtatccatactgttcggctaccccctgtcagagcggaagcagatggcattgctaatgcagatgacggccagagataattctccggacagtacccccaaccatccatcacagactacccctgcacagaagaaaacaccctccagttcaagtagacaaaaggataaagtcaacaaacggaatgagcggggagagacccctctgcatatggctgcgatacgcggtgacgttaaacaggtgaaagagctcatcagcttgggcgcaaacgtgaatgtgaaggacttcgctggttggacccctctgcatgaagcatgtaacgtaggttattacgacgttgcaaagatcctgattgcggcaggcgcagacgtgaatacacaggggttggacgacgacactcctttacatgattctgccagcagcggccaccgagatattgttaaactcctgctccggcatggaggcaatcccttccaggctaacaagcacggagagcgcccagtcgatgttgccgaaactgaagagctagagctgcttttgaaacgagaggtcccactcagtgatgacgacgagtcctatactgacagcgaggaagcccaaagtgtaaatccatcaagcgtggatgagaacatcgactctgagacggagaaggactcactgatttgtgaatccaagcaaattctgcctagcaaaacacccttaccttctgcccttgacgaatacgagttcaaggacgacgacgacgaggaaatcaacaagatgatcgacgatcgccacattctcaggaaagaacaacggaagaaaaagcgcaaggagaagaagtag

SEQ ID NO: 214484 - DNA, 984 bp, synthetic construct
  misc_feature 1..984: note = Description of Artificial Sequence: Synthetic coding sequence
  source 1..984: mol_type = other DNA
atggcaaaagcccctagttgggcgggagttggagctctagcatacaaggcccctgaagccctgtggccagccgaagccgtaatggacggcacaatggaggatagcgaggcggtgcagcgggcaaccgcacttatcgagcaaagactggcacaagaggaggagaatgagaaacttcgaggggacgccagacagaagctgcccatggatcttcttgttttggaagacgagaagcatcatggtgcacagagcgcagccctgcagaaggtcaaagggcaggaacgggtccggaagacatcactggacttaagacgggagatcattgatgttggaggcatccaaaatctgatagagctgcggaaaaagcggaaacaaaagaaacgggatgctttggcagctagccatgagccaccacccgaaccggaggagatcactggacccgtagacgaggagacttttcttaaagctgctgtggaaggcaagatgaaggtgattgagaaattcctcgcagacgggggttccgcagatacatgtgatcagttccgacggaccgccctgcacagagccagcctggaaggccacatggaaatcttagaaaaactgcttgacaacggcgcaactgtggactttcaggacaggttggactgcacagccatgcactgggcttgccgcggtggacacctggaagtggtcaaactcctccagagtcatggtgccgataccaatgtgagagacaaggaaggggacactgcactccatgacgccgtcagactgaacagatacaaaatcattaaactactactcctgcacggggctgacatgatgaccaagaacctggctggcaaaacaccaaccgacctggtgcagctgtggcaggctgatacgagacacgctctcgaacaccccgagcctggcgctgaacacaatgggttggaaggcccaaacgattccggaagggagaccccgcagccagtcccagcccaatag

SEQ ID NO: 214485 - DNA, 1083 bp, synthetic construct
  misc_feature 1..1083: note = Description of Artificial Sequence: Synthetic coding sequence
  source 1..1083: mol_type = other DNA
atggccaaggctcctagctgggctggcgtgggggcactggcgtacaaggcccctgaggcattatggccggctgaggcggtgatggatgggactatggaggacagcgaggccgttcaaagagccacagccctaattgagcagcggctagctcaggaagaagagaatgagaagctgaggggcgacgctcgccagaagctaccgatggacttgctggtgttagaggacgagaaacaccatggggctcaatcggccgcactccaaaaggtgaaaggtcaggagcgtgtaagaaagacctccctggacctgagacgagaaatcatcgatgtcggcggtattcagaaccttattgaacttcgcaagaagcgcaaacagaaaaaaagggacgcgcttgcagccagccacgaaccaccgccagagcccgaagaaatcacaggaccggtcgacgaggaaacatttctgaaagcggctgtcgagggaaagatgaaagtcattgaaaaattcctggccgatggaggttccgcagacacttgtgatcagtttcggcgtacggccttgcatagagcatcccttgaaggtcacatggaaatcctggaaaagctgctggacaacggtgcaactgtcgactttcaagatagactggattgcacagcgatgcattgggcttgccggggaggtcacttggaagtcgtcaagctactgcaatcccacggggcagatacaaacgtacgggataaactactgtcaactccactacatgtcgcagtgagaacgggccaggtggagatagtggagcactttctgtccctcggactggagatcaacgctcgggatcgtgagggcgataccgccctgcatgatgcagtccggctgaacaggtacaagatcataaagctgttgctgctccatggggcagacatgatgaccaaaaaccttgcagggaaaacacccacagacctggtgcaactctggcaggcggacacccgccacgcgttagaacatcctgagcccggagcagaacacaacggcttggaggggcctaatgacagtgggagagaaacacctcaacccgtgccagcccaatag

SEQ ID NO: 214486 - DNA, 1002 bp, synthetic construct
  misc_feature 1..1002: note = Description of Artificial Sequence: Synthetic coding sequence
  source 1..1002: mol_type = other DNA
atggatggtaccatggaggactctgaagctgtgcagagagcaactgcactgattgaacagcgcctagcgcaagaggaggagaatgaaaagttacgaggagatgcccgacagaagctcccgatggacctcttagtgctagaggatgagaagcatcacggagcccagagcgccgcactgcagaaggtgaagggtcaggagcgagtacgcaagacgtctctcgatctccggagggagatcattgatgtgggcggaatccagaacttgattgagctccggaaaaagcgaaaacaaaaaaaacgggatgctctcgccgctagccacgagcccccacccgagccggaagaaatcacaggccctgttgacgaggaaaccttcctaaaagcggctgttgagggaaaaatgaaggtgattgaaaaattcctcgctgacggaggttcagcagatacatgtgaccagtttaggcggacggcccttcacagagctagcctggaagggcacatggagatcctggaaaagctgctcgacaacggcgctactgttgatttccaagatagactcgactgtactgccatgcattgggcctgtagagggggacatttggaagtcgtgaagctgttgcagagtcatggggctgatacaaacgttcgggacaaactgctttccacgcccctgcatgtggccgtaaggactggacaggttgagatcgttgaacactttctctcccttgggctggagatcaacgccagggatcgggaaggcgatacagcactgcacgatgctgttcgactgaaccgttacaagattataaagttactactcctgcatggagctgacatgatgacgaagaatttagcaggtaaaacccccacagatttggtccaactttggcaggccgacacgcgccacgctctggagcaccctgaacctggtgcagagcacaatgggctcgaaggacccaatgacagcggacgcgagacacctcagccagtaccggcacagtag

SEQ ID NO: 214487 - DNA, 903 bp, synthetic construct
  misc_feature 1..903: note = Description of Artificial Sequence: Synthetic coding sequence
  source 1..903: mol_type = other DNA
atggacggtacgatggaagattccgaggctgtccagcgagccacggctttaatcgaacagcgtctggcacaggaagaagagaatgagaagctcagaggggatgccaggcaaaagctcccgatggaccttttagttttggaagacgagaagcaccacggggcacagagcgcggctttgcagaaagtgaaagggcaggaaagagtgcgcaagacaagtctggatctgcggagggagattatagatgttggcggaattcagaatctgattgagttgcgtaagaagagaaagcagaaaaagagagatgccctggctgccagtcatgagcccccaccagaacctgaagagattactgggccagtggacgaggagaccttcctaaaagcagccgttgaagggaaaatgaaggttattgaaaaattcctggccgacggaggcagcgctgacacctgtgatcagtttagaagaactgcgctacacagggcctccctagaaggccacatggaaattttggaaaagctcctggacaacggggctaccgtggatttccaagaccgtcttgactgcaccgcgatgcactgggcctgtcggggaggtcatttggaggtggttaagctgcttcagtcccacggagcagacactaatgtgcgcgacaaagagggggataccgccttacacgacgctgtgaggctgaacagatataaaataataaaattgctcttactccacggggcagatatgatgactaaaaacctggccggtaagaccccgacagacctcgtgcagctgtggcaggcagacaccagacatgctctagagcaccctgagcccggtgccgaacataacggactggagggtccaaatgactctggaagagaaactccccagcctgtgccagcacagtag

SEQ ID NO: 214488 - DNA, 918 bp, synthetic construct
  misc_feature 1..918: note = Description of Artificial Sequence: Synthetic coding sequence
  source 1..918: mol_type = other DNA
atggacttcatctctattcagcaattagtttcgggcgagagggtcgaggggaaggtcctgggattcgggcacggcgtgccggatccaggcgcatggccaagtgattggaggcggggacctcaggaggcagtggcaagggaaaaactgaagctggaggaggagaagaagaaaaaattagagaggttcaactcgacaagattcaacctggacaatcttgccgacttggagaaccttgtgcagcgtcggaagaagagactgagacacagggtgccccctaggaaacctgagcctcttgtgaaacctcagagtcaggcacaggtggagccggttgggttagaaatgttcctgaaagctgcggcagaaaatcaggaatacctgattgacaagtacttaaccgatggcggtgatcctaacgcccacgataagttgcaccggacagcactccactgggcctgtctcaaagggcactctcagctggtcaataaactgctggttgccggagccactgtggatgcacgggacttactagatagaaccccggtcttttgggcttgtcggggtggacatctggtcatactgaagcagcttctgaatcagggcgctagagttaacgccagggacaaaatcgggtctacaccactccacgtggctgtccgcactcggcacccagattgccttgaacatctgatagagtgcggggcacatttaaacgcccaggataaggagggggatacagctctgcacgaagcagtccgtcatgggagctataaggccatgaaactactgctgctgtatggggcagagttgggggtgcggaatgctgccagtgtgactccagtgcagcttgccagagattggcagcggggtatccgagaggctctgcaagcccatgtggcccaccccagaacacggtgctag

SEQ ID NO: 214489 - DNA, 792 bp, synthetic construct
  misc_feature 1..792: note = Description of Artificial Sequence: Synthetic coding sequence
  source 1..792: mol_type = other DNA
atggattttatttcaatccaacagctggtgagtggagaaagagtggaaggaaaggtgctcggattcggccacggagtcccggacccaggtgcctggccctctgactggaggaggggaccccaggaagctgtggccagagaaaagctgaagctggaggaggaaaagaagaagaaactggagcgattcaacagcacgagatttaaccttgacaacctcgctgatttagagaacttggtacagcggcgtaagaaacgtcttcgccatcgcgtgccaccaaggaagcccgagccgctcgtaaagctacaccgcacagctctgcactgggcttgcctgaaaggtcatagccagctggttaataaactgctcgttgctggcgcaaccgtggatgcacgtgatcttctggataggacacctgtgttttgggcttgccggggaggtcatttagttatcttgaagcagcttttaaatcagggggctagggttaatgccagagataaaatcggaagtacacctctgcacgttgccgtgagaaccaggcatccagactgccttgagcacctgattgagtgcggagcacatctgaatgctcaagataaagaaggcgacacggccttacatgaggcagtgagacacgggtcttataaggctatgaaattgttgttgctgtacggcgctgagcttggcgtgagaaacgccgcaagcgtcacccctgtgcagctggcccgagactggcaacgcggtatccgggaggcgctgcaggcacatgtcgctcatcccaggaccaggtgctag

SEQ ID NO: 214490 - DNA, 918 bp, synthetic construct
  misc_feature 1..918: note = Description of Artificial Sequence: Synthetic coding sequence
  source 1..918: mol_type = other DNA
atggactttatctctatccagcaactggtgagcggagagagagtcgaggggaaagtactcggcttcggtcatggcgttcctgaccccggtgcttggccttcggactggcggaggggaccacaggaagctgtggccagagagaagctcaagctggaagaagagaaaaaaaagaagctggagagatttaacagcacacggtttaacctggacaacctggctgatctggagaatcttgtgcaacggagaaagaaacgccttcgccatcgggttccccctaggaagcctgaacctcttgtaaagccccagtctcaggcccaggtcgagcccgtgggactcgaaatgttcctgaaggctgccgcagaaaaccaggagtaccttatcgataagtacttaacagatggtggtgaccctaatgcccacgacaaattgcaccggaccgctttgcactgggcctgtctgaaaggccattcgcagctggtgaataaacttctcgttgcaggggctacggtggatgcaagagatctcctggacagaaccccagtgttctgggcatgccggggaggccatctggtgatcctcaagcagcttctgaaccagggcgcaagagtgaacgcacgggataagatcggaagtacgccactgcatgtggctgtaaggacccggcatcctgactgtttggagcacctcatagagtgtggcgctcacctgaacgctcaagacaaggagggagacactgcactgcatgaggctgtgcggcacgggtcttacaaggcaatgaaactgctgctgctgtacggtgcagagctgggcgtgaggaacgccgcttccgtcacgcccgtacaattggctagggattggcagcgcggaatccgggaggccctccaggcccacgtggctcatcctcgtacccggtgctag

SEQ ID NO: 214491 - DNA, 3804 bp, synthetic construct
  misc_feature 1..3804: note = Description of Artificial Sequence: Synthetic coding sequence
  source 1..3804: mol_type = other DNA
atgaaccatatgtttcacatcaaaagacacagtatctctgcaggcactgacgcatataaaaagaccaagccgatacagaatctctttcagaaacccctctacgatcactgcagcgctaataactacaaaagcatggagccggagctggagaacgtgcggtccagcccccctaggggcgacaggacaagtaaggtctcactgaaggaggaactgcagcaggacatgcagaggtttaagaatgaaatcgggatgttaaaggtcgaatttcaagcgctcgagaaggaaaaagtgcagctgcagaaagaggttgaggaggagaggaagaaacacaggaacaacgaaatggaggtttccgccaatatccacgatggcgctaccgatgacgctgaggatgatgacgatgatgacggcctgatacaaaagcggaagtcaggagaaacagatcaccagcagtttcctaggaaagaaaacaaggaatacgcatcgagcggacctgctttgcaaatgaaggaggtcaagagtactgagaaagaaaagcggacctccaaagagtcagtgaactcgcccgtgttcgggaaggccagcctccttacaggcggacttctgcaggttgacgacgacagctctctatcagaaatcgatgaggatgaggggagacccactaaaaagaccagtaacgagaaaaataaggttaagaatcagatacaaagcatggatgatgttgatgacttgacacaatcctctgaaacggcttcagaggattgtgaattgcctcacagctcttacaagaactttatgctcctcatcgaacagcttgggatggagtgcaaagactccgttagtctgctaaaaatccaggacgccgcactgtcttgtgagcgattactggaacttaaaaaaaaccactgtgagctcctgaccgtcaaaatcaaaaagatggaagacaaagtcaatgtcctgcaaagggagctgagcgagactaaagagataaaatctcagctggaacaccagaaggttgagtgggagcgggaactgtgttcattgcggtttagtctcaatcaggaagaagagaagcggagaaatgccgacacactctacgagaaaatccgtgagcagttgaggcggaaagaagagcaatatcgaaaggaagtcgaggtgaagcagcagctggagctgtccctgcaaaccctggaaatggagctgcgaacagtgaagagcaacctgaatcaggtggtccaggagagaaatgacgcacaacgacagttgtcccgagaacaaaacgctaggatgctgcaggatggcatcctgacaaatcacttgtcaaagcaaaaggaaatcgagatggcccagaaaaaaatgaactctgaaaactcacacagccatgaagaagaaaaggatctcagtcacaagaatagcatgctccaggaggagattgctatgctgcgattggagattgacaccattaagaaccagaatcaggagaaggaaaaaaagtgcttcgaggatctgaagatagtgaaggagaagaatgaagatctccagaagaccattaagcaaaacgaggagaccctgacccagacaatttctcagtacaatggtaggctctcagtgttgactgccgagaacgcaatgctcaattcaaaactggagaacgaaaaacagtctaaggagagactggaagcagaagtggagagttaccattcccgcctagcagctgctattcacgacagggaccagagtgaaacctcgaagagggagttggagctggcattccagcgagccagagatgagtgcagccgtctccaagataagatgaatttcgatgttagcaacctgaaggacaacaacgagatcctatctcagcagctgttcaaaacagagagtaagcttaatagcttagaaatcgaattccatcataccagggacgccttaagggagaagactctgggactggagagggtccaaaaagacctgtcccaaactcagtgccagatgaaggagatggaacagaaatatcagaacgaacaggtcaaagtgaacaaatatattggtaagcaggaaagcgtggaagagcggctttcgcagctacagagcgagaacatgttgctgcgccaacagctggatgatgctcacaataaggctgacaacaaagagaaaacggtgataaatatccaagatcagtttcatgcgatcgttcaaaagctgcaggctgagtctgaaaaacaatctctgctgttggaagagagaaacaaggaacttatctccgagtgcaatcacttaaaggaacgacaataccaatacgaaaatgaaaaggcagagagggaggtcgtggttagacagctgcagcaggaattagctgacaccctgaagaaacaatcaatgtccgaggcgtctctcgaggttacaagcaggtaccgcattaacctcgaagatgaaacccaggatctgaagaagaaactaggccaaatccgaaaccagctccaagaagcccaggacagacacacagaggcagtgaggtgtgcagaaaagatgcaggaccacaagcagaaattagagaaagataacgcaaagttgaaggtcacggtgaaaaagcagatggataagatagaggaattgcaaaagaacctcctgaacgctaatctaagcgaggacgagaaagagcaactcaaaaaactcatggagctgaaacagagcctggaatgcaatttggaccaggagatgaaaaagaatgtggaactcgagcgtgagattaccggctttaagaacctgctcaagatgacgcgcaagaagctgaatgaatacgagaacggggagttctctttccatggcgacttgaagacgtctcagttcgagatggatatccagattaataagttgaagcacaagatcgacgatctgactgctgagctggaaactgccggatctaaatgccttcatcttgacacaaaaaaccagatcttacaggaagaactgctctcgatgaagaccgtccagaagaaatgcgaaaaactgcagaaaaataaaaagaagttggaacaggaagtcatcaacctccgatctcacattgagagaaacatggtggaattggggcaggtgaagcaatataaacaggagatcgaagaacgagctaggcaagagatagccgaaaagctaaaggaggttaatctttttttgcaggcgcaggcagcgagccaagagaatctggagcagtttagagagaataacttcgcgtcaatgaaatctcaaatggagctccggataaaagacctggaaagcgaattgagtaagatcaagactagccaggaggattttaacaaaacggaactggagaagtacaaacagctatacctggaggaactgaaggtgagaaaatctctctctagcaaactcaccaaaacaaacgagaggctggcagaggtgaataccaaactactcgtggaaaagcagcagagtcggtcattgtttacgactttgacgaccaggcccgtcatggaacccccttgtgtcggtaaccttaacaactctctcgatttaaatcgtaaacttatcccgcgagagaacctggtgattagtacgtctaacccgagagcatctaataactccatggagaactacctgagcaagatgcagcaggagttagagaaaaatattacccgggaacttaaggaggccgctgccgagttagaatcaggcagcatcgcgtctcctttgggaagcactgatgagtcgaaccttaatcaggatctggtgtggaaagcttccagagagtacgttcaggtcctgaaaaagaattatatgatttag

SEQ ID NO: 214492 - DNA, 5132 bp, synthetic construct
  misc_feature 1..5132: note = Description of Artificial Sequence: Synthetic coding sequence
  source 1..5132: mol_type = other DNA
atgaagaaaatattcagcaaaaagggtgagagccctcttggcagttttgcccgaagacagcggtcctccgctggagggggtggcgagccaggcgagggggcatatagtcagcccggttatcacgtgcgcgaccgagacctggggaaaatccataaggccgcttccgccggaaacgtagctaaggtccagcagatcttactccttcggaagaatggcctcaacgatcgagacaagatgaatcgaacggccctccatctagcttgcgccaacgggcacccggaggtagttactttgttggttgaccgtaagtgccagctgaacgtctgtgataatgagaatcgcaccgcgttgatgaaagccgtgcagtgtcaggaagagaagtgtgcgactatactgttggaacatggggctgaccccaacctggccgatgtgcacggcaataccgcattgcactacgcggtctacaacgaagatatatccgttgcaactaaacttctcttgtacgacgccaatatcgaggctaagaataaggacgaccttaccccgctcttgctggcagtctcgggtaagaagcagcagatggtggagttcctgatcaagaaaaaagcaaatgtaaacgccgtcgataaacttgaaagcagccaccagctgataagtgaatacaaagaggaacgcataccaaaacactcaagtcaaaattctaacagcgtggacgaatccagtgaagattctctatcccgcctctcaggcaaacctggcgttgacgacagttggcctacttcagatgacgaggatctgaactttgacacgaaaaacgtgcccaagccttctctggcgaagttaatgacagcctcccagcagtctcggaagaacctggaggctacctatggaacagttcgaaccggaaaccggaccctctttgaggatagagattctgatagccaagacgaagtggtggtagagagcttaccaaccacctccattaaggtgcagtgttttagtcatcccacgtatcagtctccagatctgcttcctaaacccagccacaagtccctggccaacccaggattgatgaaggaagagccaaccaagcccggaattgctaaaaaggaaaatggaatcgatattatagaaagcgcgccattagaacagacaaataatgacaatctgacatacgttgacgaggtccataaaaataacagatctgatatgatgtccgcgctgggacttggacaagaggaggatatcgaaagcccatgggactctgaatcaattagtgaaaacttccctcaaaaatatgtggatcccttagccggagccgcagatggtaaagagaaaaatattggcaacgagcaggcggaggacgtgttctatatcccttcctgcatgagcgggtccaggaattttaagatggccaaactggaagacacaaggaacgtgggaatgcccgttgcacatatggagtccccggagaggtacctgcacctgaagccgactatcgagatgaaggactcggtgcctaataaggctgggggaatgaaagatgtgcagacttccaaagcagccgaacatgacctggaggtggcttcagaggaagagcaagagcgcgaggggtctgagaacaaccagccacaggtggaggaagaaaggaagaaacatcggaacaacgagatggaagtgagcgctaacatccacgacggggctacagacgacgccgaggacgacgacgatgacgatggcctcatccagaaacggaagtctggagaaaccgaccatcagcagttcccgagaaaggagaacaaagaatatgccagctcgggccctgccctccagatgaaggaagtgaagtcaactgagaaagagaaacggacctctaaggaaagcgtgaattcgcctgtgttcggcaaggcctccctgctcacgggaggactgctgcaggtagacgatgattcctcactgtccgaaatcgatgaagacgagggcaggccaactaagaagacgagcaacgagaagaataaggttaaaaaccagatccagagtatggacgacgtcgatgatctaacacagagctctgaaacagcctccgaagattgcgaactcccccactctagttataagaatttcatgcttcttatagagcagttggggatggaatgcaaggactccgtgagcctcctgaaaatccaagacgctgccctctcatgtgagcgcctcctcgaactaaagaagaaccactgtgagctactgacagtcaagatcaaaaagatggaagataaagtgaatgtgctccaacgcgagctgagcgagaccaaagagataaagtctcagctggaacaccagaaagtggaatgggagcgagagctttgtagcttgcgttttagccttaaccaggaggaagagaagaggaggaacgcagacactctctatgagaagattcgtgagcagctgcgacggaaggaggaacagtataggaaggaggtcgaggtaaaacagcagctggaattatccctgcagaccctggaaatggaactgcgcaccgtgaagagtaacctaaatcaggttgtgcaggagcgaaatgacgcccagcgccagctcagccgggagcagaacgctagaatgctgcaggacggtatactcaccaatcatctgtcaaagcagaaagagattgagatggcccagaaaaagatgaactccgagaacagtcactcccacgaggaagaaaaggatctctctcataaaaactccatgctccaagaagaaatagctatgttacggctggaaatcgatactatcaaaaatcagaatcaggagaaggagaaaaaatgcttcgaggacctgaaaatcgttaaggagaagaacgaagacttgcagaaaaccatcaaacagaacgaagagacactgactcagaccattagccagtacaatggcagactcagtgtgttgacggccgagaacgctatgctgaatagtaagctagaaaacgaaaaacagagtaaagagcgcctggaggctgaggtggagagttaccatagcaggctggcggctgcaatccatgatcgcgatcagtcagaaacatccaagagggagctcgaactggccttccagcgcgctagagacgagtgctcaaggctgcaggataagatgaatttcgatgtgtccaatctgaaggataataacgagattctatctcagcagctgttcaagaccgagtccaagctcaacagtctggagatcgagttccaccacacacgcgacgcacttagagagaagaccctgggactcgagcgtgttcagaaggacctgagccagacacagtgtcagatgaaggaaatggaacagaaataccaaaatgagcaggtcaaagtcaacaaatacattgggaagcaagagtccgttgaggagcgcctgtcccagctgcagtccgagaatatgctcttaaggcagcaattggatgatgcacacaacaaggctgataataaggagaaaaccgtcataaacatacaggaccaatttcatgctatcgtacagaagttacaagccgaaagcgagaaacagtccctgctgcttgaggagcgcaataaggagctcatctcagagtgcaaccacctgaaggaacggcagtaccagtatgaaaacgagaaggccgaacgcgaagtagttgtgcggcagctccagcaggagctcgccgacaccctgaagaagcaatcaatgagcgaggcctccctggaggtaacatctcggtacagaataaatctggaggacgagactcaggacctaaagaagaagctggggcagattagaaaccagctacaggaggcgcaggaccgccatacagaagctgtccgctgcgccgaaaaaatgcaagaccacaagcagaaattagaaaaggataatgccaagttaaaagtaacggtaaagaagcagatggataagatagaggaactgcagaaaaacctgctcaacgccaatctgtccgaggatgaaaaagaacaattgaaaaaactgatggaactgaagcagtccctggagtgtaatttggatcaagagatgaagaagaacgtggaacttgagagagagatcaccggctttaagaacctattaaagatgaccagaaagaaattgaatgagtatgaaaatggcgagttcagctttcatggcgatctcaaaacttcccagtttgagatggacatccagatcaataaattgaagcataaaattgatgacctgaccgccgagcttgagaccgcagggtccaagtgcctgcatctggacaccaaaaaccagattttgcaggaggagctgttgtctatgaagacagtccagaagaagtgcgaaaaacttcaaaagaataagaaaaaattggagcaggaagtcattaatctgagaagccacatcgagcgcaatatggtggagctagggcaggtgaagcagtataaacaagaaattgaggaacgggctcgccaggagattgctgaaaagcttaaggaagtaaaccttttcctgcaggcccaggctgcctcccaggagaatctggagcagtttcgcgaaaacaatttcgcatccatgaagtcccagatggagttgcgcattaaggacttagagtcagagttgagcaagataaaaacatcccaggaggacttcaacaagaccgagctcgaaaaatataagcagttgtacctggaagagctgaaggtccggaaaagcttgagctctaaactcacaaagaccaacgagcggctggccgaagtgaacacaaagttattggtcgagaagcagcagtcaaggagcctcttcaccacactgaccacccgacccgtgatggagcccccatgcgtggggaacctgaacaattcgttggacctgaaccgtaagctgattcctcgagagaatctggtgatcagcacgtctaatcctcgggcatcgaataacagtatggagaattatctttccaagatgcagcaagagctagaaaagaatattactcgtgagctgaaagaagccgcagcagagctcgagagcgggagcattgccagtccactcggcagcaccgacgaaagcaacctgaaccaggatctggtgtggaaagccagccgggaatatgtgcaggtactcaagaagaactacatgatcta

SEQ ID NO: 214493 - DNA, 5180 bp, synthetic construct
  misc_feature 1..5180: note = Description of Artificial Sequence: Synthetic coding sequence
  source 1..5180: mol_type = other DNA
atgaaaaaaattttttctaaaaaaggtgaatcgccactaggctctttcgctaggcggcagaggtcctctgccggtggcggtggggagcctggtgaaggtgcctatagccaacctggataccacgtaagggaccgcgatctgggtaaaattcacaaggccgcttccgcaggcaatgtggcaaaggtccagcagattctcctgctccggaaaaacggattgaacgatagagataagatgaatagaaccgcactgcacctcgcgtgtgctaacggacatcctgaggtcgttacattgctcgtggaccgcaaatgccaattgaacgtctgcgataacgagaaccgcacagctctgatgaaagcagtccaatgtcaggaggaaaagtgtgccaccatcctgctggagcacggagcagatccaaatttagctgatgttcacggtaataccgcgctccactatgcggtgtataatgaagacatctcagttgctactaagcttctcctttacgatgctaatatcgaggcaaagaataaagacgacctgacgccactcctcctggcagtttctggaaagaaacagcaaatggtcgagttcttgatcaagaagaaagcaaatgtaaatgcggtggacaagctggaatctagccaccagttgatcagcgagtacaaagaggagcggatcccgaagcacagctctcagaattccaactctgtcgacgaaagctctgaagactctctgtcgtccctgttctactttattttctttgaaactaaatcttgcaccgtggctcaagctggagtgctgcagcatgacctgagcagtctgcagtcactgttaccgggttttactcagttcttttgtttgcacctgccaagcagttgggatcacagactgtctgggaaacccggagtggacgattcttggcctacatcggacgatgaggatcttaattttgacactaaaaatgtacctaaacccagcctggcaaaactcatgaccgctagccagcaatctcgcaagaatctagaagcgacctatggaacagtgcgaaccgggaatcgcactctcttcgaagatcgggacagtgattcccaggatgaagttgttgtcgagtcactgccaaccacctcaatcaaggttcagtgcttctctcacccaacttaccaaagcccagacttgctgccaaagccctcacacaaaagccttgcaaatccaggcctcatgaaagaagaacccaccaagcccggaattgccaaaaaggagaacggcatcgatataatcgagtctgccccattggagcagaccaataatgacaatcttacctatgttgatgaggtgcacaagaacaacaggtcagacatgatgagcgccttaggccttggccaggaggaggatatcgaatcgccctgggatagtgagagcatcagcgagaacttccctcagaagtacgtcgaccctctcgccggagctgcagacggcaaagagaaaaacattggaaacgaacaagctgaagaatcgccggaacgctatctacacctgaagcccaccattgaaatgaaggatagcgtccccaacaaagcagggggaatgaaggacgtccaaactagcaaggccgctgagcacgatctggaagtcgcctcagaggaagaacaggagcgcgaggggtccgaaaacaatcagcctcaggtggaggaggaacgaaagaagcacagaaataatgagatggaggtctctgccaacatccatgacggagccacagatgatgcagaagatgacgatgatgatgacggactgatccagaagcggaaatctggcgaaacagatcaccagcagtttccgcgaaaagagaataaagagtacgcgagttccggcccagctctacagatgaaagaggtgaagtccacagaaaaggagaagcgtacaagcaaagagagcgtgaactcacccgttttcggcaaagccagcctcctgactggcggattgttacaggtggacgatgacagctctctgtcagagatcgacgaggatgaaggaagaccaaccaagaaaacaagcaatgagaaaaacaaggtaaagaaccagatccagagcatggacgacgttgatgacctgactcaatcctccgaaactgcatcagaggactgtgagctgccacacagttcatacaagaacttcatgcttctgattgaacaattaggcatggagtgtaaggattccgtcagtttacttaaaatacaggacgccgctctcagttgtgaacgtctgctggagctcaagaagaatcactgcgaactcttgaccgttaagataaagaaaatggaagacaaagttaatgtcttacagcgggaattatccgagaccaaagagatcaagtcgcaactggagcatcagaaggtggaatgggagcgcgagctgtgctccctgcgtttctcgttgaaccaagaggaggagaagaggaggaatgctgacaccctttacgagaagataagggaacagctaagacgtaaggaagaacagtaccggaaggaggttgaggtgaaacagcaactggaacttagcttgcaaacactcgagatggaactgcgtaccgtcaagagcaatctgaatcaagttgttcaggagcgcaatgacgctcagaggcagttgtcccgcgagcagaacgctagaatgttgcaggatggaattctgacaaaccacttgtcaaaacagaaggaaatagagatggcccagaaaaagatgaattctgagaactcccactctcatgaagaagaaaaggatttatctcacaaaaattcaatgcttcaggaggagatagccatgctcaggctggagatcgacactataaagaatcaaaaccaggaaaaagagaaaaagtgctttgaagatctcaagatcgtgaaggagaagaacgaggatttgcaaaagactattaaacaaaatgaagagactcttacccagaccatatcccagtacaacggcaggctaagtgtcttgactgccgaaaatgctatgttgaacagcaaactcgagaatgaaaaacaatcaaaggagagattagaagctgaggtcgagtcataccatagtcgactggctgcagctatccacgatcgggatcagtctgaaacctccaagcgggagctggagttggctttccaaagggcccgagatgagtgttcaagattgcaggacaaaatgaatttcgacgtatccaatcttaaagacaataacgagattctgagccagcagctctttaagaccgagtccaaactcaacagtctcgaaatcgaattccatcatacccgcgacgccctgcgtgagaagaccctcggcttggaaagagtacagaaggatctgtcccagacgcagtgccagatgaaagagatggagcaaaagtaccagaacgaacaggtcaaagtgaataagtatataggcaagcaggagagcgtggaagagcgattgtctcagctgcaatctgaaaacatgttgttgaggcagcaattggatgacgctcacaacaaagcagataataaagagaagaccgtgataaatatccaggatcagttccatgcaattgttcagaaactgcaggccgagtctgaaaagcaatcactcttattggaggagcggaacaaagaactcatttccgagtgcaaccacctgaaggagagacagtaccagtacgaaaatgaaaaagccgaaagggaggtcgtggtcagacaactccaacaggaactggctgacaccctgaagaagcagtcgatgagtgaagcatcactcgaggtgacttcccgttacagaataaacctagaggacgagacccaggacctgaagaagaaactcggccagattagaaaccagcttcaggaagctcaggatagacacacagaggccgtccggtgcgctgagaagatgcaggaccataaacaaaaactcgagaaggataatgctaaattgaaggttaccgtaaaaaaacaaatggacaagatcgaagagctacaaaaaaatctgctgaacgccaatctgagtgaggacgagaaagagcagctcaaaaaacttatggaactcaagcagagcctggaatgcaatctggatcaggagatgaagaagaatgtggaactggaaagagagatcaccggtttcaaaaacctgctcaagatgactcgcaaaaagcttaatgagtatgagaacggcgagttctcatttcatggcgatctcaaaaccagccagttcgagatggatatacagatcaataagctgaagcacaagatcgatgacctgacggccgaattggaaactgccggaagtaagtgtctccacctcgacaccaaaaatcagatattgcaggaggaattgctgtccatgaagacggtccaaaagaaatgcgagaagctgcagaagaataaaaagaaactcgagcaagaggtgattaatctacggagtcacattgagaggaatatggtggagctgggtcaggtcaagcagtataagcaggaaatcgaggaacgggctcgacaagaaatagctgaaaagcttaaggaggtaaatttgttccttcaagcacaggcagcttcacaagagaacctagaacagttcagagaaaataatttcgcctcaatgaagagccagatggagcttcgaatcaaagatctggagtctgaactcagcaagattaagacgagccaggaggatttcaacaaaaccgagttagagaaatacaagcaactgtacctggaggagctgaaggtccggaaaagcttgtcatccaagctgacaaaaacaaatgaacgactggccgaggtgaatactaaactgctggtcgagaaacagcagtctcgttccttatttaccaccttgaccacccgaccagtgatggagcctccctgtgttggcaatttaaataactcactggatctcaaccgcaaattaatcccaagggaaaacctcgtgattagcacttcgaaccctagagccagcaataattccatggagaactatctgagcaaaatgcagcaggagctggaaaagaacattacccgagaacttaaagaagcagccgctgagctagaatcaggatcgatagcatctcccctgggttctaccgatgagtcaaacctgaatcaagacttggtatggaaagcctcacgggagtatgtgcaggtgctgaaaaaaaattatatgatcta

SEQ ID NO: 214494 - DNA, 642 bp, synthetic construct
  misc_feature 1..642: note = Description of Artificial Sequence: Synthetic coding sequence
  source 1..642: mol_type = other DNA
tgatttagggagaataacttcgcatccatgaagtctcaaatggagctgcggataaaggatcttgagtccgaactgtcaaagataaaaactagccaggaggattttaacaagactgaacttgagaaatacaaacagttgtatttggaggaactgaaggtcaggaagtccctctcatccaagcttacaaaaaccaatgaaagactggccgaggtcaacaccaaactcctcgtagagaagcagcagtcgcgcagcctcttcaccaccttgacgactaggcccgtaatggagccaccttgcgttgggaatctgaacaacagtctggatctgaaccgtaagttgattccccgagaaaacctcgtgatatccacttcaaatcctagggcatccaacaatagcatggaaaactacctcagtaagatgcagcaggagctcgaaaaaaacataaccagggaactcaaggaagctgctgcagagttggaaagtggcagtatagccagtccacttggttcaacagatgaaagtaacctgaatcaagaccttgtctggaaagctagtcgcgaatacggaccttccgatgagacaccccatgattatgtgctgatgacagaccaatgtttgacttcccgcacagatctgcagtag

SEQ ID NO: 214495 - DNA, 3261 bp, synthetic construct
  misc_feature 1..3261: note = Description of Artificial Sequence: Synthetic coding sequence
  source 1..3261: mol_type = other DNA
atgagcagagtctgcatcgtcgtgctggaggaagttgaggatgaatcaccagcctttattagcaaactgccccaggagaacaaaagcctccattcaccaccttccggtaacgtcctcgttcgttacccctcccttgtccaggcgatctttaacggcgaccctgacgaggtgcgggcattgatcttcaagaaagaggatgtcaactttcaggacaacgagaaacgcacaccactccacgctgcagcatacctcggcgatgctgaaatcatagagttgcttatcctgagtggggcaagagtgaatgccaaggacagcaaatggttaactccgctccacagagcagttgcatcttgcagcgaagaggcggttcaggttctgctgaagcatagcgccgacgttaatgctcgggataaaaactggcaaacaccacttcatatcgctgcagctaataaggctgtaaaatgcgctgaagccttagtaccccttctgagcaacgttaatgtgagcgacagagctggtcgtactgccctgcaccatgctgccttctctggccatggcgagatggttaaactgttgctcagccgaggcgctaacattaacgccttcgacaaaaaagatcgcagggccatacactgggccgcatatatggggcatatagaagtggtgaaattgctggtgtcccacggggctgaagtcacctgtaaagacaaaaaaagctatacacctctgcacgctgcagcctcttccggcatgatctctgtagtgaaatatctgctagacctcggcgtagatatgaacgagcccaacgcatatggcaacactccattacacgttgcttgctataacggccaagatgtggtggtgaatgaactgatcgactgcggggctatcgttaaccagaaaaacgaaaagggattcactccgttacacttcgccgcagccagtacccatggggctctatgtctggagcttttggtcgggaacggagctgacgtgaacatgaagtcgaaagacggtaaaacacctctgcacatgactgctctgcatgggcgtttctcccggagccagactatcatccagagtggcgcagtcatcgattgtgaggacaagaacggaaacaccccactgcatatcgcagcacggtacggacacgagctcctgattaacacacttatcacctctggtgccgataccgcaaagcgtgggatccatgggatgtttcctctccacctggccgctctgagtggtttttcagattgttgtcggaagctgctcagttcaggtttcgacatcgacaccccagatgattttgggcgaacctgtttgcacgccgctgcagccggtgggaaccttgagtgcctgaacctactgttgaatactggcgcagattttaacaagaaggacaagtttggcagaagtcccctgcactatgctgcagctaactgcaactatcagtgcctgtttgcattggtgggatcaggcgcaagtgtaaatgacctggacgagcggggttgcactccattgcattacgctgcaacatccgacactgatggaaagtgtcttgaatatctgctgcgcaatgacgcaaatccgggaattagggacaagcaaggctataacgccgttcattactccgctgcatacggacaccgactgtgcctccagttgattgcttcagaaacgcctctcgatgtgctgatggaaacctcaggcacagatatgctgagtgattcagacaatagagccaccatctcacccctgcatctcgcagcttaccatggccaccaccaggctttagaagtattggtgcagtcgcttttagacttggacgtgcgaaacagctcggggaggaccccactcgatttggcagcttttaaggggcatgtcgagtgcgtggatgtgctgattaaccagggcgctagcatactggttaaggactacattctaaaacggacaccaattcatgctgcagcgactaacgggcacagcgagtgtctgcgactgctaataggcaacgctgagcctcagaacgccgtggacattcaagatgggaacggccagaccccgcttatgctctccgtgctgaacggccacacagactgcgtgtactccctgcttaacaagggtgctaacgtggatgcaaaagacaaatggggaagaactgctctgcatcggggagccgtgaccggacacgaggagtgtgtcgacgcactcctgcaacatggggctaagtgcttactaagggacagccggggtcggaccccaatccacctgtcagcagcttgcggccatattggggtattgggggcattacttcagtctgccgcaagtatggacgctaatcctgccaccgccgataatcacggttatactgcactccattgggcttgttacaatggccacgagacttgtgtggagctgctgcttgagcaggaggtatttcaaaagacagaaggtaacgctttctccccactgcattgcgcagttattaacgataatgaaggggcagcggagatgttgatcgacaccctgggggcaagcatcgtcaacgcaactgactcgaaaggtagaacccctctccatgcagctgcatttaccgaccacgtcgaatgcctacagctcctgctgagtcacaacgcccaggtgaactctgtagacagtacaggcaagactcccctcatgatggcagcagaaaacggtcaaaccaacaccgtcgaaatgttagtgagcagtgcctctgccgaactgacactgcaggataacagcaagaacaccgcccttcacctagcttgttcaaagggtcatgaaacgtccgccttactcatcctagagaagatcacagatcggaaccttatcaacgctaccaatgcagccttgcagactcctctccacgtggctgccagaaacgggctcactatggtggtacaagagttgctcggcaaaggtgcatctgtattggcagttgacgagaacggttatacgccagccctcgcatgcgcaccaaataaagacgttgcagattgcctggctctaattttggcaaccatgatgccagtctcttcctcctccccgctgagctctctgacatttaacgccattaatcggtacaccaacacaagcaagaccgtctcatttgaagctctcccaatcatgcgtaacgagccctcatcgtattgcagcttcaacaatattggcggagagcaagagtatctgtacacggatgtcgacgaattgaatgactcggatagcgagacttattag

SEQ ID NO: 214496 - DNA, 3162 bp, synthetic construct
  misc_feature 1..3162: note = Description of Artificial Sequence: Synthetic coding sequence
  source 1..3162: mol_type = other DNA
atggccttcttaaagctccgagatcagcccagcttggtgcaggccattttcaacggggatcccgacgaggtaagggcgctaatcttcaagaaggaagatgtcaacttccaggacaacgagaaacggacacctctgcatgccgctgcctatttgggagatgctgaaatcattgagctccttattttatccggcgcaagagtgaatgccaaagatagcaaatggttgactcctctgcatcgggctgtggcctcttgcagcgaagaagctgtgcaggtactgttaaaacatagcgcagacgtaaatgcaagggataagaattggcagaccccgctgcacatcgcagcagccaataaggcagtgaagtgtgccgaggcattagtccccctcctgagtaacgtgaatgtctccgaccgggcaggccgtaccgccttacaccacgcagccttctccggacatggggaaatggtcaaactcctgctgagtaggggcgctaacatcaacgcttttgataaaaaggaccgccgtgctatccactgggcagcatatatgggacacattgaagttgtaaagcttcttgttagtcacggggctgaggtaacatgcaaggacaagaaatcttatactcctctccatgcagccgcaagctcagggatgatttctgttgtgaaatatttgctggatcttggtgtggatatgaatgaaccgaatgcttatggtaacacaccattgcacgtggcttgttacaacggccaggatgtggtggtcaatgagctgatagactgtggcgcaatagtgaaccagaagaacgagaaaggcttcacacccctgcacttcgcggctgcgtccacgcatggggctttatgtctagagcttcttgtgggtaatggagctgacgtgaatatgaagtcgaaagacggaaagacccccctgcacatgaccgcccttcatggtcggttctctaggtctcagacaatcattcagagtggggcagtgattgactgcgaagataagaatggcaacacccccctgcacatcgccgctcggtacgggcacgagctcctcatcaacaccctgatcaccagcggtgccgacaccgccaaacggggaatccatgggatgtttcctctgcatctggctgcgctgtccggtttcagcgattgctgccgcaaactgctgagttccggttttgacatcgataccccggacgactttggacggacatgcctgcacgctgctgctgcgggtggtaacttggagtgtctgaacttacttctcaacaccggagctgacttcaacaagaaagataagttcgggaggtctccccttcactacgccgctgccaattgtaactaccagtgcctgttcgcccttgtgggtagtggcgcatccgtcaacgaccttgatgagcggggttgtacaccactccactacgctgccacaagcgacacagacgggaaatgtcttgagtatctgctaagaaacgatgctaatcccggtatccgcgataagcagggttacaatgctgtacactacagtgcagcatatgggcatagactgtgcctccagttgattgctagcgagaccccgcttgatgtgctgatggaaacaagcggcaccgacatgctgtccgacagtgataatagagccaccatctcgcctcttcatttagccgcatatcacgggcatcatcaagctcttgaggtgctcgtgcagtccctgttggatctagatgtccggaatagttcgggacggacccctctggatctggctgccttcaagggacatgtggagtgcgttgacgtacttattaatcagggagcaagtatactggttaaggactatattctgaagaggaccccaatccacgccgctgcaactaatggccattcagaatgtttacggctcctgataggaaatgccgaaccgcaaaacgctgttgatatacaggatgggaacggacaaacgccactaatgctgagcgtcctgaatggccacacggattgtgtgtactccttactgaacaagggcgctaacgttgatgcaaaggacaagtggggtagaactgctcttcacaggggcgctgtgacaggccacgaagagtgcgtggatgccctgctgcagcacggggctaagtgtttactgagagatagccggggtcggacccccatccacttgagcgctgcttgcggccatatcggagtcctcggtgcccttttgcagtcagccgcatcaatggatgccaacccagctacagctgataatcacggatacaccgcactccactgggcctgctataatgggcatgagacatgcgttgagctgctgttggagcaggaggtgtttcagaagactgagggcaatgctttcagcccactccattgtgccgtgataaacgataatgagggcgctgccgaaatgcttattgatacgttaggagcatctattgttaatgctaccgattctaagggacgaaccccgctgcacgccgctgccttcacagaccacgtagagtgcctccagctcctgctctcccacaacgcccaagtcaattcagtcgacagtacaggcaagacccctcttatgatggcagcagagaacgggcaaacgaataccgtcgaaatgttagtgtcatccgcgagcgcagaactcacactgcaggataattccaaaaataccgctctgcacttggcttgctcaaagggacacgaaacatccgctctcctgatattggaaaagatcactgaccggaatctgataaatgcaacgaatgccgctctgcagactcccctgcatgtagcggctaggaatggactcacaatggtagtgcaggagcttctgggcaagggtgctagcgtgctcgccgtcgatgaaaacggttacacgccggctctcgcttgtgcaccaaacaaagacgtcgcagactgtctggctctgatcctggctacaatgatgcctgttagcagcagttctcccctttcctctctaacttttaatgctatcaacagatacactaatacatctaaaacagtcagctttgaggcactgcctattatgagaaacgagccaagctcatattgcagcttcaacaacattggcggtgagcaggagtacctatatacagacgtagatgagctcaacgattctgactccgaaacatattag

SEQ ID NO: 214497 - DNA, 3162 bp, synthetic construct
  misc_feature 1..3162: note = Description of Artificial Sequence: Synthetic coding sequence
  source 1..3162: mol_type = other DNA
atggcctttctgaagctgcgagaccagcccagcctggtacaggcgatattcaatggagatccagacgaggttagggctctcatattcaagaaggaggacgtgaactttcaggacaatgaaaagaggactccattgcacgccgcagcctacctcggcgatgcagagattattgagctgttgattctgagcggtgccagagtgaacgctaaggactctaaatggctgacccccttacatcgcgcagtggcaagctgttctgaggaggcggtgcaagtgcttctgaaacactccgcagacgtcaacgcacgcgataaaaactggcaaactcccctgcatattgcggcagcaaacaaagccgttaagtgcgcagaagccctcgtgcccctgctgtccaacgtgaacgtgagcgatcgggctggtagaaccgccttacaccacgccgctttttctggccatggggaaatggtgaagctccttctcagccggggagcgaacatcaatgcttttgataagaaggaccggagggctatccattgggctgcctacatggggcacattgaagttgtgaagcttttagtcagccacggcgcagaggtgacctgtaaggacaaaaagagttacacccccctgcatgcagctgcgagctcaggcatgataagcgtagtgaagtacctccttgatttgggcgtcgacatgaacgaacctaacgcttacggaaacaccccactccatgtcgcctgctataatggccaggacgtggttgtcaacgagctcatagactgtggggctatcgtgaaccagaaaaatgaaaagggttttacccctctacattttgccgcagcctccactcacggcgctctgtgtctggaactgctcgtgggcaatggggcagatgttaacatgaagagtaaagacggtaaaacgccattgcatatgactgcgctccatggcaggttctccagatcacagaccatcatccaatcaggcgctgttattgattgcgaggataagaatggcaatacgcccctgcacatcgccgcacggtatggacacgaactcctgataaatactctgattacatctggcgcagacaccgccaagaggggaattcatggaatgtttccgctccacctcgcagctctgtcggggtttagtgattgctgtaggaaattgctgagcagcggtttcgacattgacacccctgacgatttcggcagaacctgcttgcatgcggcagcggcaggaggaaacctggagtgccttaacctgctattgaatacaggcgcagacttcaataagaaggataaattcggcaggtccccactgcactatgctgctgcaaattgtaactatcagtgtctgttcgccttagtaggctcaggcgcatcggtcaacgatcttgacgaaagaggctgcacgcccctccactacgccgcaacctccgacactgatggcaaatgcttggagtatctgctgcgtaacgacgccaaccctggaataagagataagcagggctacaatgcggtgcattactccgccgcatatgggcacaggctttgcctgcagcttatcgcctctgaaactcctctggatgtgctcatggaaacatccgggaccgatatgctgtctgatagcgacaaccgtgccaccattagccctttgcatctcgcagcttaccatggacaccatcaggccctggaagtgctggtccaatcactgctggacctggatgtgcgaaacagctccggaaggacgccactggacttagcggcatttaaaggacacgtggaatgtgttgatgtgctcattaaccaaggcgcaagcattctcgtcaaagactatatactgaagcgaaccccgatccacgctgctgccactaacgggcatagcgagtgtcttagattgctcattggtaacgccgagccacaaaatgccgtggatatccaggatgggaacggtcaaacaccattgatgcttagtgttttgaacggccatacggattgtgtgtattcactgttgaataaaggggctaacgtcgacgcaaaagacaaatgggggaggacggccctccaccgtggagccgtgaccggccatgaagagtgcgtcgatgccttattacagcatggggctaagtgtctcctcagagattccagggggagaacccctattcacttgtctgctgcatgcggccatatcggcgtgctgggcgctctactgcagtctgccgcttcaatggacgcaaatcccgctactgccgacaaccacgggtacactgctttgcactgggcttgttacaatggccacgaaacctgtgtggagctgctgttagaacaggaagtgtttcagaagaccgagggaaatgcttttagccccctccattgcgctgtgattaacgataatgaaggagcggctgagatgcttattgacaccctgggcgcaagcatcgtgaacgccacggatagtaaagggaggacgcccctacacgcagccgcattcactgaccacgtcgagtgtcttcagctcctgctgtcccacaacgcccaggttaacagtgtggattcaactggcaagactccgctaatgatggctgcagagaatggacagactaacacagtggagatgctggtgagttccgcttcagcagaactgaccctgcaagacaactctaagaacacggctttgcatctcgcttgctcaaagggtcacgaaactagtgctctgctgattctggaaaagatcaccgatcgcaaccttatcaatgcaacaaatgccgctttgcaaactcctcttcacgtagcggctcggaatgggcttaccatggtggtgcaagaactgctggggaagggcgcttcagtgctggcagtcgacgagaacggctatacaccggcactcgcatgtgctccaaataaggacgtggctgactgcctggctctgatactggctacgatgatgcctgtcagcagcagtagccctctcagttcattaacctttaatgctatcaatcgatacaccaatacaagcaagactgtgtctttcgaggcccttcccataatgcgtaacgagcccagcagttactgttcattcaataacatcggcggagagcaagagtacttatacacagatgtggatgagttaaacgacagtgattccgagacctactag

SEQ ID NO: 214498 - DNA, 4026 bp, synthetic construct
  misc_feature 1..4026: note = Description of Artificial Sequence: Synthetic coding sequence
  source 1..4026: mol_type = other DNA
atgactaagcggaagaagacgattaatttgaacattcaggacgcccaaaagcggacagccctgcattgggcatgcgtcaatggacatgaggaagttgtgacatttttagtcgacaggaaatgtcaactcgacgtcctggatggcgagcaccgcacccccttaatgaaagcccttcagtgccatcaagaagcgtgtgccaatatccttatcgacagtggggcagatatcaacctggtggatgtctacgggaatacagcactgcactatgccgtttattctgaaatccttagtgtggtggctaagctgctgtctcatggggcagtgattgaggtgcataacaaggcttctctcacaccgctcctcctgagcataacaaaacggtcagagcaaattgtggaattcctcttaatcaagaatgcaaatgccaatgctgtcaacaaatataagtgcacagcactgatgctggccgtctgtcatggctcatcagagattgtgggcatgcttctgcaacagaacgtggatgtttttgctgccgatatctgcggcgtaaccgcagagcactatgccgtgacttgtggtttccatcatattcacgaacagattatggaatatatacgcaaactgtctaaaaaccatcagaatacaaacccagagggaacctcagctggtacccccgatgaagcggctcccttagccgaacgcactccggataccgctgagtcgctggttgagaaaacccccgacgaagcagcgcctctggtggaacgtacgcccgatacggcagaaagcctcgtggagaaaacacctgatgaggcagcgagcctcgtggaagggacatctgacaaaatccaatgcctggagaaggctaccagcggcaaattcgaacagtcagcagaggagactcccagagagattaccagtccagcaaaggagacctcggagaaattcacctggcctgccaagggcagaccccgtaagatagcatgggaaaagaaggaggacaccccacgcgaaatcatgagtccagccaaggagacttcggagaagtttacctgggcagccaaaggcagacccagaaaaatcgcatgggaaaaaaaggaaaccccggtgaaaacagggtgtgtggcaagagtgaccagtaataagacaaaggtgctggagaaggggagatcaaagatgatagcttgccccactaaagagtcaagcacaaaagcttcagccaacgatcagcggttcccgagcgaatcgaagcaggaagaggacgaggagtacagctgtgattcccggagtctgtttgaaagctctgccaagattcaggtgtgcatccctgaatcaatctatcaaaaggtgatggagattaaccgtgaggtggaagagccacctaagaagccctccgcttttaagcccgcaatagagatgcaaaactcagtacctaacaaagcgttcgaactgaagaacgaacagactctgcgtgctgatccaatgttcccacccgaatctaagcagaaggattatgaggaaaatagctgggattccgagagcctgtgcgagaccgtatcacagaaagatgtctgcctgcccaaggccacacaccagaaagaaatcgacaaaattaatggtaagttggaagagtcaccaaataaggacggcctgttaaaggctacatgcggtatgaaagtgagtattccaacaaaggcactcgaactcaaggatatgcagacattcaaagccgagccaccgggaaaaccctccgcttttgagcccgcaactgagatgcagaagtctgtacctaacaaggccctggaactgaaaaatgaacagacactgcgggctgacgagattctcccttcagagagcaagcagaaggattacgaagaaaattcttgggacacagagtccctgtgtgaaaccgtgagccagaaggacgtctgcctccctaaggcggcacaccaaaaagaaatcgataagataaacggtaagctggaggggtcccccgtaaaggatgggttgctgaaggccaattgtggcatgaaggtgagcatccctacaaaggccctggagctcatggacatgcagacattcaaggcagagcctcctgagaaaccgtccgccttcgaacctgctatcgaaatgcagaaatccgtgccaaacaaagccctcgaactgaagaacgaacaaaccctgcgagcagacgagattctgccttctgaaagcaagcagaaagactatgaggagtcctcgtgggactcagagtccctttgcgagaccgtctctcagaaggacgtctgcctgccaaaggccacccaccaaaaagagatcgacaaaattaacgggaagctcgaggaatctcccgataacgacgggtttctaaaggctccctgtaggatgaaagtgtctatacccacgaaagcccttgagctcatggacatgcagacatttaaggctgagcctcctgaaaaacccagcgctttcgaaccggctatcgaaatgcagaagagcgttccaaacaaggccctggagctaaaaaatgaacagactctgagggccgatcaaatgtttccctccgaatccaagcagaaaaaggtggaggaaaattcttgggatagcgagtccctgcgtgagacggtcagccagaaagatgtatgcgttcccaaggctacacatcagaaggagatggacaaaatatccggaaagctggaggacagtacctctctgagcaaaatcctagatacagtgcacagttgtgaaagggccagagagctccagaaagaccattgtgagcaaagaacagggaaaatggaacaaatgaaaaaaaaattttgtgttttaaaaaagaagctcagcgaggcaaaagagatcaagagtcagcttgaaaatcagaaggtcaagtgggagcaggaactctgttcggtcaggcttaccctcaatcaggaagaggagaaaagaagaaacgctgacattttgaacgagaagatcagagaagagcttggcaggattgaggagcagcatcggaaagagctggaggtcaagcagcaattagagcaggctctccgcatccaggatatcgagctcaagagcgtcgaatctaatttaaaccaggtgagccatactcatgagaacgagaattatctcctacatgagaattgcatgctcaaaaaagagattgccatgctgaaactggaaatagctactttgaaacaccagtaccaagaaaaagagaataagtacttcgaggacattaagatcctcaaagaaaagaacgccgagttgcaaatgactctaaaactgaaagaggaatctttgacgaagcgggcatcccagtacagcggccagctgaaggtcttgatcgccgagaacactatgttaacctctaaactcaaggagaaacaagacaaggaaattctggaagccgagatcgaatcccaccacccaaggctggcatctgcggtacaagaccacgaccagatcgtcacctcccgtaagagtcaggagcctgcgttccatatcgccggagacgcgtgcttacagagaaagatgaacgttgacgtgtcatcaaccatctacaacaacgaggtgctgcatcagcctctgagcgaggcccagcgcaagtctaagagtctcaaaattaacctgaattatgcaggcgatgcactgcgtgaaaacacactcgtcagcgagcacgcacagcgtgaccagcgcgaaacccagtgccagatgaaagaggccgagcacatgtaccagaacgagcaggacaatgtgaacaagcatactgagcagcaggagtcactggaccagaaactgttccagcttcagtccaaaaatatgtggctgcaacaacaactcgttcacgcgcacaaaaaagccgacaacaagtccaaaattacaattgacatccatttcctggaaagaaaaatgcagcatcacctgctgaaggagaaaaatgaggagatttttaactacaacaaccacttaaaaaaccgaatctaccagtacgagaaagagaaggcagagactgaaaactcatag

SEQ ID NO: 214499 - DNA, 360 bp, synthetic construct
  misc_feature 1..360: note = Description of Artificial Sequence: Synthetic coding sequence
  source 1..360: mol_type = other DNA
atggggacccgcaccttacaatttgaaatctccgatagtcacgagaaggaggaggacctgctgcacaaaaaccatctcatgcaggacgaaattgcccgtctacgtctggaaatccatactataaagaatcagatcttagagaaaaaatatttaaaagacatagagattattaagcgtaaacacgaggaccttcagaaggccttgaagcaaaacggcgagaaaagtacaaaaaccatcgctcactactcaggccagctgacagcccttaccgacgaaaataccatgctaagaagcaagctggaaaaggagaaacaatctaggcagagactaactaagtggaaccacaccatcgtggactag

SEQ ID NO: 214500 - DNA, 759 bp, synthetic construct
  misc_feature 1..759: note = Description of Artificial Sequence: Synthetic coding sequence
  source 1..759: mol_type = other DNA
atgtcccaggcagccaaggcatccgcctctgcaacggtggcggtgaatccgggacctgacaccaaaggaaaaggggctccacctgccggaacgtccccttcaccgggtaccacactcgcacccaccacagtccctataacaagtgccaaagccgctgagctcccacctgggaattacaggctggtcgtgtttgagcttgagaatttccagggacgacgcgctgagtttagcggagaatgttcgaacctggctgatagaggcttcgaccgggtcaggtccattatcgtgtcagcaggaccatgggtagccttcgaacagtctaatttcaggggggagatgttcattttggaaaaaggcgaataccccagatggaatacttggagcagcagttacagatctgatagactgatgtcttttcgccctatcaaaatggacgctcaggagcacaaaattagcctcttcgagggcgcaaactttaaggggaacacaatcgagatccagggagatgacgcacccagtctttgggtgtacggcttttccgatcgggtgggcagcgtcaaggtgtcttctggtacttgggttgggtaccagtatcccggttaccggggataccagtatctgctggagccgggtgactttcgtcattggaacgaatggggggcattccagccccaaatgcagtcccttcggcgtcttcgggacaagcagtggcacctcgaaggcagctttcccgtgctagccaccgagccacctaaatag

SEQ ID NO: 214501 - DNA, 627 bp, synthetic construct
  misc_feature 1..627: note = Description of Artificial Sequence: Synthetic coding sequence
  source 1..627: mol_type = other DNA
tagagagatgagttgagatgcaagattccagccggacggctgcggagagcagccagaccccatcgaagactggggcctactggcaaggaagtgcatgccctaaagcggcttagagattcagccaacgcaaacgatgtggaaactgtacagcagctactggaggatggggctgacccatgcgctgccgatgacaagggtcggacggctctgcacttcgccagttgtaatggtaacgatcaaattgtgcagctccttctggatcacggagccgacccaaatcaaagggacggccttgggaacactccgctgcacttagaatgttcccctcagctagttcccgctggcgcacgtgtggatgcgctggatcgtgccggtcgaaccccactgcacctggccaaatcaaagctcaatatccttcaagagggacatgcacagtgcctggaagccgttagactcgaagtcaaacagattattcacatgctgagggaatacctagaaagacttgggcaacacgagcagcgggaacgcctcgacgacctgtgcacaagactccaaatgaccagcaccaaggaacaagtggacgaggtgaccgacctgctggcttcttttacttccttgtccctatag

SEQ ID NO: 214502 - DNA, 2184 bp, synthetic construct
  misc_feature 1..2184: note = Description of Artificial Sequence: Synthetic coding sequence
  source 1..2184: mol_type = other DNA
atgtcacagcaggatgcagttgctgccttaagcgagcgcttgctcgtggctgcatacaagggccagacggagaatgtggtgcagctcatcaataagggcgctagagtagccgtgacaaagcacggccgaacgcctttacacctggccgctaataaaggtcacctccccgtggttcagattttgcttaaagctggctgtgacttagacgtgcaggatgatggggatcagacagctctgcacagagccaccgtggtaggcaacactgaaatcatagccgctttgattcacgagggctgtgcactggatagacaggataaggatggcaatactgctcttcatgaggcttcttggcatggtttctcccagtccgcaaagttactcataaaggccggagccaacgtcttagctaagaacaaagccggtaacaccgcgctccacctggcatgccaaaattctcatagccagtctactagagttctcctgctggcagggtcccgcgctgacctgaagaacaatgcaggcgacacgtgccttcacgttgctgcccgatataaccatttatctataatccggctattattgaccgcgttctgctccgttcatgagaaaaatcaagccggagataccgcactccacgtggctgccgctttgaatcacaaaaaggtagcgaaaattctgttggaagccggtgctgacaccaccatcgtgaataacgcgggacagacgcccctcgagaccgcacgctatcacaataaccccgaggtggccctcctgcttactaaggcaccacaggtgttacgcttctcccgtggacggtctctgcgcaagaaacgagagcggttaaaggaggagcgtagggcgcagtctgtgccacgagacgaagtcgcccagtccaagggcagtgtatctgcgggtgatacacctagcagcgagcaggccgtggcccgaaaagaagaggcccgagaagagtttttgagtgcttctccagagccccgtgcaaaggacgatcggagaagaaaaagtcgtccaaaggtgagcgccttttccgaccccaccccgccagctgaccagcagcccggtcatcagaaaaatttgcacgcgcacaaccatcccaagaagaggaaccgccaccgctgttcctccccccctccccctcacgaattcagggcttaccagttgtacaccctgtataggggcaaggacgggaaggttatgcaagccccaatcaatggttgcagatgcgaacccctgattaacaagctagagaaccagctcgaggccacggtcgaagagatcaaagcagagctggggtccgtacaggacaagatgaatactaaactggggcagatggagaataagacccaacaccagatgagggtcctcgacaaactgatggtggaacgtttgtctgccgaacgcacagaatgtttaaaccgcctccaacagcatagtgacacggaaaaacatgagggggaaaagaggcagatcagcctggtggatgaactaaagacttggtgcatgctgaaaattcagaatttagaacaaaaactgtctggagacagtcgagcctgccgcgctaagtcaacccccagtacctgcgagtccagtaccggagttgatcagctcgtggttaccgccggacctgctgcagcctcggatagttccccccctgtggtcagacccaaagaaaaggccttgaactctactgctactcaacggttgcagcaggaactctcttccagtgactgcacaggatctagactgaggaacgtgaaggttcaaacagcactgctcccaatgaatgaggccgctcgcagtgatcagcaggccggaccgtgcgtgaaccggggaactcaaacgaaaaaaagcggaaaatccggccctacccgccatcgagcccaacagcctgcggcatcctccacatgcgggcagccccctcccgctaccgggtctgagcaaaccggccctcatatcagagacactagccaggccctcgagctgactcagtactttttcgaggcagtctctactcaaatggagaagtggtatgagcgaaaaatcgaggaggccagaagccaagcaaaccagaaagcgcagcaggacaaagccactctcaaggaacacataaagtccctcgaggaggagcttgctaaactgcgaacaagggtgcaaaaggagaattag

SEQ ID NO: 214503 - DNA, 2079 bp, synthetic construct
  misc_feature 1..2079: note = Description of Artificial Sequence: Synthetic coding sequence
  source 1..2079: mol_type = other DNA
atgagtcagcaagatgccgtggccgctcttagcgagaggcttctggtcgcagcctacaagggccagacagagaatgtcgtgcagctgataaataaaggtgctagggtggcagttacgaagcatggcaggacaccacttcatctcgccgctaataaagggcacttacctgtggtacaaattttgctgaaggcaggctgtgacctggatgtacaagatgacggcgaccagactgctctgcatcgagccaccgtagttggtaacaccgagatcattgctgcgctcatccacgagggatgtgcattggatcggcaggataaagatggtaacacagcattgcatgaagcatcatggcacgggttttcccaatcagcaaagttgttaatcaaggccggagccaacgtgctggccaagaacaaagcgggtaatacagccttgcatttggcgtgtcaaaacagccattctcaatcaacccgggtacttctgctggccggttcccgcgcagatctcaagaacaatgccggtgacacctgcctgcacgtggccgcaagatataatcacctctccatcatccggctgctgctcaccgcattttgctcagtacatgaaaagaaccaagcaggtgatacggcccttcatgtggccgctgcgctgaaccacaagaaggttgcaaagatcttgctagaagctggagccgacacgaccatcgtgaacaacgcgggacagacaccattggagactgccaggtaccacaacaaccccgaagtggctctgttattaaccaaggctccccagggctccgtatcagccggagacactccaagcagcgaacaggctgtggctagaaaggaggaagcaagagaggaatttctgtccgctagtccggaaccacgcgctaaggatgaccgacgcaggaaatcaagaccgaaagtctccgcattcagcgaccccactccccctgctgatcaacagccagggcaccagaagaaccttcacgcccacaaccaccccaagaaaagaaatcgccaccggtgctcatccccgccacccccacatgagttcagggcttatcaactgtatacactctatcggggaaaggacggaaaggtgatgcaggccccaattaatggatgtaggtgcgaacctcttataaataaactggagaaccagctggaggctaccgtcgaagaaattaaagctgagctcggatccgtgcaggataagatgaacacaaaattgggtcagatggaaaacaaaacccagcaccagatgagagtcctcgacaaactaatggtggaaaggctgagcgctgaaagaactgagtgtctgaaccgcctgcaacagcatagcgataccgaaaagcacgagggcgagaaaagacagataagtttggtcgatgagcttaagacttggtgcatgcttaaaattcagaatctggagcaaaaactctctggggactctagagcctgtcgagcaaaatccacgccctccacgtgtgaaagctctacaggcgtcgatcagctcgtggtcaccgcaggaccagcggcagcctccgacagctcacccccagtggtgcggccaaaagagaaggcactgaactccaccgccacgcagcgcttgcaacaagagttaagctcctcagattgcaccggctcacgactccgtaatgtgaaggtacagactgcgctactacctatgaacgaagctgctaggtccgatcagcaggccggtccttgcgtgaatagaggaacccagacaaaaaagtctggtaagtcgggacctacgaggcaccgggctcagcagcccgcagcgagtagcacgtgcggccagcctccccctgctactggatcagagcagactgggccacatatacgcgatacctcacaggcgctggagctgactcagtactttttcgaggctgtctccacccaaatggagaagtggtacgaaaggaaaatagaggaggcacgatctcaggcaaaccagaaggcacagcaggacaaggccactctgaaagagcatatcaagagccttgaggaggagctggcaaaactgaggacaagagtacaaaaagagaattag

SEQ ID NO: 214504 - DNA, 2169 bp, synthetic construct
  misc_feature 1..2169: note = Description of Artificial Sequence: Synthetic coding sequence
  source 1..2169: mol_type = other DNA
atgtctcaacaggacgccgtcgctgcactctcagagcgcctacttgtcgccgcatacaagggccaaaccgaaaacgttgtacagttaatcaataaaggggctagggtcgcagtgaccaaacacgggaggacccctctccatcttgctgctaataaagggcacctacccgtggtccagatcttactcaaggctgggtgtgacctcgacgtgcaggacgacggagatcagactgctcttcaccgcgctactgtggtcgggaataccgagataatcgcagcgctcatccacgaagggtgcgccctggacaggcaggacaaggatgggaatacagcgctgcacgaggcatcttggcacggcttctcccagagtgccaaacttctgataaaagccggagccaacgtcctagcaaagaataaggcaggaaacacggcgctgcacctggcatgccaaaattcccacagccagagcacaagagtcttgttgctcgcgggttcacgcgcagatctcaagaacaacgctggggatacgtgcctgcacgtcgctgcgagatacaaccacctctctattatccggctcctactgactgccttttgtagcgtgcacgagaagaatcaggccggagacaccgccctccacgtcgcggcagcacttaatcataaaaaagtggccaaaatcctcttggaggcaggcgcagatactaccattgtgaataacgctggacaaacccctctcgagaccgccagataccataataaccctgaggtagcgttgctcctgactaaggctccacaagttttacggttctcacgcggaagatccctgcgaaaaaaacgcgaaagactaaaggaagagagaagggctcagtctgtgcctagggatgaggtggcgcagagcaagggaagcgttagcgcgggagacaccccaagcagcgaacaggcggtcgcccgtaaggaggaggcccgagaagagttcttgagcgcatccccagagccaagggctaaggatgacagaagacgcaagtcacgccctaaagtcagcgcctttagtgaccccaccccaccggcagaccagcagccaggacaccaaaaaaacctgcacgcacataatcacccaaagaagcgtaatcgccaccgctgctcttctccaccacccccacatgaattcagagcttatcaactctacaccctgtaccggggtaaggatggaaaagtgatgcaagccccaatcaatggatgtcgatgtgagcctctcatcaacaaactggagaaccagctcgaggctaccgtggaggagataaaggcggaactgggtagcgtccaggacaaaatgaatactaagctgggtcagatggaaaataaaacccagcaccaaatgagagtactggacaagttgatggtcgagcgattgtccgccgagcgaaccgagtgtcttaatagactccagcagcactcagacactgagaagcacgagggggaaaaaagacagatctccttggtcgacgagctcaagacctggtgtatgctgaagattcagaatctggagcagaagctctctggcgactctcgagcttgccgagcaaaatccacaccttctacgtgcgtggaccagctggtagtgaccgcgggtcccgctgcagctagtgacagctctcctccagttgttcgtcctaaggaaaaagcactcaacagcaccgctactcagcggcttcaacaggagctgtccagctccgactgtaccggctctaggctccggaacgtgaaagtccagaccgcgctactccccatgaatgaagcagcccgatcggatcaacaagctggaccctgcgtcaacagaggtacccagacaaaaaagtccggtaaatctggaccaactagacatagagcccagcaacctgcagcttcatcaacatgcggacagccacccccagctacagggtccgagcagactgggccacacatccgggatacctcacaggctcttgaactcacgcagtacttcttcgaagccgtgtccacgcagatggagaagtggtatgagcgaaagatagaggaggccaggagtcaagccaatcagaaggcccagcaggacaaggcaactctgaaagaacatattaagagccttgaggaggaactcgctaagctgcgcaccagagtgcagaaggaaaattag

SEQ ID NO: 214505 - DNA, 528 bp, synthetic construct
  misc_feature 1..528: note = Description of Artificial Sequence: Synthetic coding sequence
  source 1..528: mol_type = other DNA
atgtctcagcaagacgccgtggccgctctgagcgagcgcttgctggttgccgcttacaaagggcagactgaaaacgttgtgcaacttatcaacaaaggcgctcgtgtggcagttacgaagcacgggaggacccctcttcacctagctgcgaacaagggtcatctgcccgtggtgcagatcctcctcaaagccggatgtgatctcgatgttcaggatgacggagatcagactgcccttcatcgcgcaaccgtggttggaaacaccgagattatcgctgcactgatccacgagggatgcgcactggataggcaggataaagatggcaatactgctctgcatgaagccagttggcacgggttctctcagtctgcaaaactccttattaaagccggagccaacgtgctggccaagaacaaagcaggaaatacggcattgcatctcgcatgtcagaacagccactctcagtccacccgagtgttgctactggcagggtcaagagccgacctcaaaaataacgccggagattag

SEQ ID NO: 214506 - DNA, 243 bp, synthetic construct
  misc_feature 1..243: note = Description of Artificial Sequence: Synthetic coding sequence
  source 1..243: mol_type = other DNA
atgagtcaacaggatgctgtcgcagctttgtctgagcggctgctggtcgcagcgtataagggtcagaccgaaaacgtggttcagctcatcaacaagggcgctcgcgtcgcagtaacaaaacacgggcgtacacccctgcatttggccgctaacaagggacatcttccggtcgttcagatcctgctgaaggcaggatgcgatctggacgtgcaggatgacggcgaccagactgcgctgcattag

SEQ ID NO: 214507 - DNA, 2184 bp, synthetic construct
  misc_feature 1..2184: note = Description of Artificial Sequence: Synthetic coding sequence
  source 1..2184: mol_type = other DNA
atgtcccaacaggatgcagtggctgctctgtccgagaggctcctcgtagccgcatacaaggggcagacagagaacgtcgttcagctgatcaacaagggtgccagggtggccgtgaccaaacatggtcggaccccactccacctggccgctaacaagggacatttgcctgtagtccaaattttattgaaggccggatgcgatttagatgtgcaggatgacggcgatcagacagctctccacagagccacggtggtgggcaacaccgagatcattgcggctttaatccatgagggttgtgcactggacagacaagacaaagacgggaatacggcgttgcacgaggcctcatggcacggcttttcccaatctgccaagctcctgatcaaggcgggagctaatgtgctcgccaagaataaggcgggaaatactgccttgcatttagcctgccagaatagtcactctcaaagcacgagagttttacttcttgctggctctagggctgatttgaagaacaatgccggtgatacatgcctgcatgtagctgccaggtataaccacctgtccattattagactgctactaaccgccttctgttccgtgcacgagaaaaatcaggcaggtgatacagccttacacgtggccgcagctctgaatcacaaaaaggtggcaaagatcctcctcgaggccggtgctgatactaccattgtgaataatgccggacagactccactggagacagctaggtatcacaacaatcctgaagttgcacttctgctcactaaggctccgcaggtgttgcgcttttcccggggtaggtctcttagaaagaagagggagcggttaaaggaggagagacgagctcagagcgtgccaagagatgaggtggcccagagcaaaggcagtgtgtccgccggtgatacccccagtagcgagcaggccgttgccaggaaggaagaagcacgagaggaattcttgagtgctagccccgaaccccgtgcaaaggacgaccgacgcaggaaaagcagaccgaaggtgagcgcgttttctgacccgacgccacccgctgatcaacagcccggtcaccagaagaatctgcacgcccataatcacccaaagaaacgaaataggcataggtgctcttcacctcccccaccacacgaatttagggcttaccaattatacacgctgtaccggggaaaagacgggaaggtgatgcaggccccaataaacggctgtaggtgcgaaccgcttataaacaaattggaaaatcagctggaagctacggtggaggaaatcaaggcggagctgggaagcgtacaggacaaaatgaatacaaaactgggccagatggagaacaaaacacaacaccagatgcgcgtattagacaagctgatggttgaaagactgtctgctgaacgaaccgaatgtctcaatcgtctgcagcagcattccgataccgagaagcatgagggcgagaaaagacagattagccttgtcgatgagctcaagacctggtgcatgctcaaaattcaaaatctagagcaaaagttgtccggggattcccgggcatgccgggcaaagtcaaccccgagtacatgcgagtcctccaccggggttgatcagctggtggtgaccgccggacccgctgctgctagtgacagctcgcccccagtggtccgcccaaaggaaaaagcactaaacagtacagcaacgcaacgtctgcaacaagagctctcatccagtgattgtacagggtcaagactcaggaatgtgaaggtgcaaaccgcactcctccctatgaacgaagcggcaaggtccgaccagcaagcaggcccttgtgtaaatcgaggcacacagactaagaaatctggcaagtctggtccaacaaggcaccgcgctcagcagcccgctgcatcttccacttgcggacagccacccccagccaccggtagcgaacagaccggaccccacattcgagatacgtcacaggcactggagctgacccaatatttctttgaagctgtgagcacccagatggaaaaatggtacgagcggaaaatcgaagaggctcgatcccaggccaaccaaaaagcccagcaggacaaggctaccctcaaagagcacattaagtcccttgaagaggaactggctaaactcaggacccgggtccagaaggagaactag

SEQ ID NO: 214508 - DNA, 357 bp, synthetic construct
  misc_feature 1..357: note = Description of Artificial Sequence: Synthetic coding sequence
  source 1..357: mol_type = other DNA
atgagccagcaggatgctgtcgcggctctgtccgagcggctgctggtggcggcttataagggccagacagagaatgtcgtccagcttattaacaaaggcgctcgggtggccgtaaccaaacatgggaggacgccccttcacctggccgcaaacaaagggcatctcccagtggttcagatcctcttgaaagccggatgtgatctcgacgtgcaagatgacggtgaccagacagcacttcatagggccaccgtggtgggcaacactgagataatagctgctcttattcacgaagggtgtgctctggaccgccaggacaaggatgggaacactgccctccacgaggccagctggcactag

SEQ ID NO: 214509 - DNA, 309 bp, synthetic construct
  misc_feature 1..309: note = Description of Artificial Sequence: Synthetic coding sequence
  source 1..309: mol_type = other DNA
atgagccaacaagacgctgtagccgcactcagcgaacgtttactggttgctgcctacaagggccagacagaaaatgttgtacaactaatcaataagggggctagagtggccgttactaagcacgggagaacacccctccatctggcagctaataagggccacctgcctgtagtccagatcctgctgaaagctggttgcgaccttgacgtgcaggatgatggagaccagactgccttgcaccgcgcaacagtggtagggaatacagagatcatcgctgcgttgattcacgaaggatgcgcactcgactag

SEQ ID NO: 214510 - DNA, 1992 bp, synthetic construct
  misc_feature 1..1992: note = Description of Artificial Sequence: Synthetic coding sequence
  source 1..1992: mol_type = other DNA
atgtcgcaacaggacgccgttgctgccctctccgagcggctgctcgtcgctgcttacaaagggcaaacggaaaatgtggtgcagctgatcaacaaaggggctagggtggcagtaaccaaacacggccgtactcctttacacttagccgctaacaagggccatctgcctgtggtgcagatccttctcaaggccggttgtgatcttgatgttcaggacgacggggatcaaaccgcacttcatagagctaccgtggtggggaataccgagattattgccgcactaatccatgagggctgcgccctcgacagacaagacaaggccggtaatactgcactgcacctggcatgtcagaattctcactcacaaagcactcgtgtcttgctactcgctggctccagagcagacttgaaaaacaatgctggtgacacctgcctgcatgtggccgcaagatataaccacctgagcataattcggctgctgctgaccgcattctgctctgtgcacgagaagaaccaggccggagacaccgctctccatgtggccgcagcccttaatcacaaaaaggtggctaagatcctgctggaggcgggtgctgacacgaccatcgttaacaacgtgctcagattctcccggggtcgatccctcagaaagaagcgggagagattgaaggaagagagacgcgctcagtccgttcctcgggacgaggttgcacaatctaaaggctcagtcagcgccggagataccccgagcagcgaacaggccgttgctaggaaggaggaagccagggaagaattcctcagtgcaagccctgagccccgagcgaaagatgataggagacgcaagtctcggccaaaagtcagcgctttctctgacccaaccccgccagccgatcaacagccagggcaccagaagaacctccatgcccacaaccatccaaaaaagcgcaatcgccacaggtgctctagtcctcccccaccgcacgagttccgtgcctaccagctgtacacgctgtaccggggaaaggacgggaaggtgatgcaagcccctatcaatggctgtagatgtgagccacttatcaacaagctggagaaccaattagaggctaccgtcgaggaaattaaggccgagctgggctccgtgcaggataagatgaacactaagctgggccagatggagaacaagacacagcaccagatgcgggtgctggataaactcatggttgagcgcctcagcgccgagaggacagagtgtttgaaccgacttcagcagcacagcgacaccgaaaagcatgagggcgagaaaaggcagatcagcctcgtagacgaacttaaaacatggtgtatgctcaagattcagaatttggagcagaaattgagtggggattctagggcttgtcgagctaaatctactccctcaacttgtgttgatcagttggtggttaccgcgggtcctgccgctgcctcagactcaagcccaccagtggtgcgacccaaggagaaggcactgaatagcacggctacccagcgcctgcagcaagagttatcatctagcgattgcaccgggtcaagactgcggaatgtgaaagtgcaaactgccctactgcctatgaacgaggcagcgagatcggatcaacaggcgggtccatgcgttaataggggcacacagacgaagaagagcggaaagtctggtccaacacgtcatagggctcagcagcccgctgcatcctctacatgcgggcagccaccacccgctactggcagcgagcagactggtcctcatattcgtgataccagtcaagccttagaacttacccagtacttttttgaggcagtcagtacgcagatggaaaaatggtacgagaggaagatcgaggaagcaagaagccaggcaaatcaaaaggcccagcaggacaaagccaccttgaaggagcacattaaaagtttggaggaggaactcgcgaaactcagaaccagagttcagaaggaaaattag

SEQ ID NO: 214511 - DNA, 765 bp, synthetic construct
  misc_feature 1..765: note = Description of Artificial Sequence: Synthetic coding sequence
  source 1..765: mol_type = other DNA
atgaataagctcttttccttctggaaaaggaagaacgagactcggagccagggatataacctgagggagaaggacctgaaaaagcttcaccgggcagctagtgtgggtgaccttaagaaactaaaagaatatctccagattaagaagtacgatgtgaatatgcaggacaagaagtacagaaccccactgcatttggcttgcgctaatggccacacagacgtggtcctttttctgatcgagcaacagtgcaaaatcaatgtgcgcgatagcgaaaacaagagtcccctgatcaaggccgtgcagtgccaaaacgaggactgtgcaactattctcctgaattttggcgcagatcctgacctccgcgatattcgatataacaccgtgctccactacgcagtttgcggtcagtctttatcgctggtggagaaactgctcgaatatgaagctgacctagaggcgaagaacaaggacggttataccccgctcctggtggcagtgattaataacaatcctaagatggtgaagtttctgctggaaaaaggcgcagacgtcaatgctagcgataattatcaacgtaccgcgctgatcctagctgttagtggtgaacctccttgcctggtaaagttgttgctgcagcagggcgtggagctgtgttatgaaggtatcgtagactctcagctgagaaatatgttcatcagcatggtcctgctgcacaggtaccctcagttcacggcctcacacggtaagaaaaagcatgccaagtag

SEQ ID NO: 214512 - DNA, 825 bp, synthetic construct
  misc_feature 1..825: note = Description of Artificial Sequence: Synthetic coding sequence
  source 1..825: mol_type = other DNA
atgaataaactcttctctttctggaaacgcaaaaacgagacacggtcccagggatataatctccgcgagaaggacctgaaaaaactccatagagccgcatctgtgggcgacttgaagaagcttaaagagtatctgcagattaaaaaatatgatgttaacatgcaagacaaaaaatactctgtggtacagtcttcccggtggttgctctcttacacaacacccttgaacgattttattcggactcctctacatcttgcgtgtgcaaacgggcatactgatgttgtgttgtttctgatagaacagcagtgcaagatcaacgtccgggactctgaaaacaaaagcccactcatcaaagccgttcaatgtcagaacgaggattgtgctactatcctgctcaacttcggcgctgatcctgacctgcgtgacattcgctataataccgttctgcattacgccgtctgtggccagagcctgtctctggttgaaaagcttctcgaatacgaagcagatctggaagccaagaacaaggatggatacacgccattgctggtggccgtgattaacaacaacccaaagatggttaaatttctgcttgagaaaggagcagacgtcaatgctagcgacaactaccagcgcactgccctaattttggccgtatctggcgagcccccttgcctagtgaagttactgcttcagcagggtgtggagctttgttacgaaggcatcgtggacagccagctgcgaaacatgttcatttcaatggtgttgctccaccgctacccgcaatttactgcatctcacggaaaaaaaaagcacgccaaatag

SEQ ID NO: 214513 - DNA, 606 bp, synthetic construct
  misc_feature 1..606: note = Description of Artificial Sequence: Synthetic coding sequence
  source 1..606: mol_type = other DNA
atgcaagacaaaaagtaccggactcccctacacttagcttgcgctaatgggcacactgacgtcgtgctgtttcttatcgaacagcagtgtaagattaacgtacgggacagcgagaacaagtccccacttatcaaggccgtccaatgccagaacgaggattgcgccactattctgttgaatttcggcgcagatcccgatctgagggatattcgctataatacagtacttcattatgcagtgtgcggccagagtctgtccctggttgaaaagctcttggagtatgaggccgaccttgaggccaagaacaaggacgggtacaccccgttgcttgtggcagtcatcaacaataatcccaaaatggtgaaatttctgttggaaaaaggggctgacgtaaacgccagcgataattaccaacggacagctctgattctggcagtcagcggcgagcctccatgcctcgttaagctgcttcttcagcagggagtggagttatgttatgaaggtattgttgactcacagcttaggaacatgtttatctctatggttctgcttcatagataccctcagtttacggcaagccacgggaaaaagaaacatgccaaatag

SEQ ID NO: 214514 - DNA, 942 bp, synthetic construct
  misc_feature 1..942: note = Description of Artificial Sequence: Synthetic coding sequence
  source 1..942: mol_type = other DNA
atggacacgagtacaaatcttgacatcggggcacagctgatcgtagaggagtgtccctccacatattctctcaccggaatgcctgacatcaagattgaacacccactggaccctaatagcgaagaagggtcggcacaaggcgtggcaatggggatgaaattcatcctgcccaaccgattcgatatgaatgtgtgttccaggttcgtaaaatctctgaacgaagaggattccaagaatattcaggaccaggtgaacagtgacctggaggttgcctccgtgttatttaaggccgagtgtaatattcacaccagtccttccccagggatccaggtgcggcacgtgtacacaccatcaaccaccaaacacttctcccccattaagcagtccactacgttgaccaacaaacatcgcggaaatgaagtgagcactacccctctgctcgcaaacagcctctccgtccatcagctggctgctcagggagaaatgctgtatctcgccactaggattgaacaggagaacgtaattaaccacacggatgaagaagggttcacacccctaatgtgggccgcagctcacggacagatcgcagttgtggaatttctgttacagaacggtgctgacccacagctcttaggaaaggggcgagagagcgcactaagtctggcctgctccaaaggctatacagacattgttaaaatgctgctcgattgcggggtcgacgtgaacgaatacgactggaacggaggaactccactactgtacgccgtgcacggtaaccatgtgaagtgcgtgaaaatgctgctcgagtcgggagctgatccgacaattgaaacggacagtggttacaatagtatggacctggcggtcgccttaggctaccgcagtgtccagcaggtgatcgaatcacacctgttaaagcttctgcaaaacatcaaagagtag

SEQ ID NO: 214515 - DNA, 1428 bp, synthetic construct
  misc_feature 1..1428: note = Description of Artificial Sequence: Synthetic coding sequence
  source 1..1428: mol_type = other DNA
atggctgcttccgcccttcgaggtcttccagtggcgggaggaggagagtctagcgagtcagaagatgatggatgggagatcggatacttggacaggacatctcagaaacttaagcggttgctgccaattgaagaaaagaaggagaagttcaaaaaagccatgaccatcggcgacgtctctctagtgcaggagctgctggattcggggatcagcgtggatagcaactttcagtacggttggactcctctgatgtatgcagcaagtgtggctaatgcagagctcgtgagggtccttctggaccgaggcgctaacgcctcatttgaaaaagacaaacagtcgattctgattactgcatgttcagcgcatggctccgaggaacagattttgaagtgtgtggaacttcttctttctaggaacgctgacccaaatgtggcctgccggaggcttatgactccaatcatgtatgcagcccgagacggccatacacaggttgtcgccctgctggtggctcatggtgctgaggtgaacacccaggatgagaacgggtacacggccctgacttgggcagcgaggcagggtcacaaaaatattgttttaaaactcctggagttgggagctaataagatgctgcagactaaagatggaaagatgccgtctgagatagccaaaaggaacaaacaccacgagatatttaacttgctgtccttcacgctcaatccattggagggcaagctgcagcaactgacaaaagaagatacgatctgcaaaatccttacaacggacagcgacagggagaaggatcacattttttctagttatactgcattcggggatctggaagtcttcttgcacggcctggggctggagcatatgacagatctcctcaaggagcgagatatcaccctccgccatctgctgactatgcgcgaggacgaattcactaagaacggcatcacgtctaaggaccagcagaaaatccttgcagctctgaaggagctgcaagtggaggaaatacagttcggcgagctgtcggaagagaccaaactggaaatctctggcgatgagttcctgaactttctgcttaagctcaacaaacagtgcggtcacctgataacagcggttcagaacgtaatcactgagctcccggtgaactcccagaagatcactctggaatgggcttctccgcagaatttcacctctgtgtgcgaggaactcgtgaacaacgtcgaagacctgagcgagaaggtgtgcaagctgaaggaccttattcaaaaactgcaaaatgagcgggagaacgaccccacccatatccaattgcgggaggaagtgagcacttggaactcccgcatcctgaagcgcactgctatcactatttgtggattcggatttttgctcttcatatgcaagttgactttccaacgtaagtag

SEQ ID NO: 214516 - DNA, 1041 bp, synthetic construct
  misc_feature 1..1041: note = Description of Artificial Sequence: Synthetic coding sequence
  source 1..1041: mol_type = other DNA
atggctatggttagcgaatttctgaagcaggcctggttcatagaaaacgaggaacaggaatacgtgcagaccgtaaaatcctctaaaggcggtccgggttctgcagtcagtccttatccaacatttaatccctcttccgatgtggccgcactgcataaggctattatggtaaagggtgtcgacgaggctactataatcgacatccttaccaaacgcaacaatgctcagcgtcagcagatcaaggccgcttaccttcaggagactggtaagcccctggacgagactttaaagaaagctctgactgggcacctggaagaggttgtgttggcactcctgaaaactcctgcccaattcgacgcagacgagctccgcgcagcaatgaagggactcggcactgacgaagacacactcattgaaatcctcgctagcagaaccaacaaagaaatccgtgacatcaatcgcgtatatcgggaggagctgaaacgagacctcgccaaagacattactagcgacactagcggcgattttaggaatgctctactgagtctggccaagggtgatagatccgaggattttggtgttaacgaggatctggcagacagcgacgcccgagccctctacgaagctggggagagaagaaagggcaccgacgtgaacgtgttcaatacgattctgactacccgtagctacccccagttacggagagtctttcagaagtacacaaaatactcaaaacacgacatgaataaggtgcttgacctggagctgaagggggatatcgagaagtgtctaactgccattgtgaagtgcgccacatcaaagccagcattctttgcagaaaaactgcatcaggcaatgaaaggagtaggtacgagacataaagctcttatccgcatcatggtgagcagaagcgaaattgatatgaacgatatcaaggccttctaccagaaaatgtacggtatttcactgtgtcaggctattctcgatgagacaaagggtgactatgagaagatcctggtcgctctgtgtggcggaaattag

SEQ ID NO: 214517 - DNA, 1041 bp, synthetic construct
  misc_feature 1..1041: note = Description of Artificial Sequence: Synthetic coding sequence
  source 1..1041: mol_type = other DNA
atggccatggtgtctgagtttcttaagcaagcttggtttatagagaacgaagagcaggagtacgtccagacagtgaagagctctaagggcggacccggttctgcggttagcccgtacccaacctttaacccctcctccgatgtggccgctctccacaaagccataatggtcaagggggtggatgaagctacgatcattgacattctgaccaagcgaaacaacgcccaacgacagcagatcaaggcagcctatctgcaggagactgggaagccactggatgagaccctgaaaaaggcgctgacagggcatctggaggaggttgttcttgccctcctaaagacaccggcacaattcgacgcagatgagctcagggccgcaatgaaaggcctcggcaccgacgaggacacgctgatcgaaatcttagcaagccgtactaataaagagatcagagacatcaaccgcgtgtacagagaagagctcaagcgcgaccttgctaaagatatcacttcagacacatccggagacttccgcaatgccctgctatccctggcaaagggtgacagatccgaagactttggtgtgaatgaagacttggcagatagcgacgcccgtgcgctgtacgaggcaggcgagaggcgcaagggcacagacgtgaatgttttcaacactattctgacaacaagaagttacccccagctcagacgagtgtttcagaaatacaccaaatacagtaaacacgacatgaacaaagtgctcgacctagagcttaagggcgatattgagaagtgtctaacggcgattgttaaatgcgcgaccagcaaaccagcattctttgccgaaaaattacaccaggcaatgaaaggcgtcggaactagacacaaggcactcatcaggatcatggtttctaggtctgagatcgatatgaatgatatcaaggcgttctatcagaaaatgtacggcatttccctttgccaagctattctggatgaaactaagggggattacgagaagattctagtggcactctgcggtggtaactag

SEQ ID NO: 214518 - DNA, 348 bp, synthetic construct
  misc_feature 1..348: note = Description of Artificial Sequence: Synthetic coding sequence
  source 1..348: mol_type = other DNA
atggccatggtgtcagagtttctcaagcaagcatggtttatagagaacgaggagcaagagtatgtacaaactgtcaaatccagcaagggaggacccggtagtgcggttagtccctatccgacattcaacccctcatctgatgtggccgcactccataaggcaattatggtaaagggggtagatgaagcgactataattgatattctcacaaagcgcaataacgcccagagacagcagattaaagcggcatatctgcaggagacaggaaagcccctggacgagacacttaaaaaggcacttaccggccacctcgaagaggttgttctggccctgttaaagacaccatag

SEQ ID NO: 214519 - DNA, 615 bp, synthetic construct
  misc_feature 1..615: note = Description of Artificial Sequence: Synthetic coding sequence
  source 1..615: mol_type = other DNA
atgaacctgatactgcggtacacgttcagcaaaatggccatggtgagtgagttcctgaaacaggcttggttcatcgaaaatgaggaacaggaatacgtccagacagtaaaaagcagcaaaggcggtcccggatctgcagttagtccttaccccaccttcaaccctagctccgacgtcgcagctttgcacaaggcgataatggtaaagggggtcgatgaagctaccataattgatattctgacaaagagaaataatgctcagagacagcaaattaaggccgcttaccttcaagaaaccgggaagcccttagacgagaccctgaagaaggccctaacaggccacttagaggaggtcgtgctagctcttctcaaaacacccgctcaattcgacgcagatgaactgcgggctgcgatgaagggcttaggaactgacgaagatacactaattgagatcctggcaagtagaacaaacaaagagattcgagatattaacagagtctatcgtgaagagctgaaacgggatctcgcaaaggatattacttcagatacatctggcgactttcgaaatgccttactgtctttggctaaaggcgatagatctgaagattttggctag

SEQ ID NO: 214520 - DNA, 975 bp, synthetic construct
  misc_feature 1..975: note = Description of Artificial Sequence: Synthetic coding sequence
  source 1..975: mol_type = other DNA
atgttctgtggagactacgtgcagggcacaatttttccggcacctaatttcaatcctatcatggatgcgcagatgttgggaggagctctccagggctttgattgcgacaaggatatgcttatcaacatactgacacagcgctgcaatgctcagcggatgatgattgccgaggcatatcagtccatgtatggacgcgacctaataggggatatgcgcgagcagttaagcgaccatttcaaagacgtgatggctgggttaatgtacccccctcccctttatgacgcccacgagctgtggcacgctatgaagggggtgggaactgatgagaattgcctgatagaaattctcgcttccagaaccaatggtgaaatattccagatgcgagaagcttattgtctacaatatagcaacaacctccaggaagatatatattccgaaacgagcggtcattttagagacacgctgatgaaccttgtgcaggggactcgcgaagaaggttatactgaccctgcaatggccgctcaggatgcaatggtgctttgggaggcatgccagcagaaaaccggggagcataaaacgatgttacagatgatactctgtaacaaaagttatcagcaactacggctggtttttcaagaatttcagaatatctccggccaggacatggtagatgcaattaatgagtgctacgatgggtactttcaggagctgcttgtcgccattgtgctgtgcgtgcgcgataagcccgcatacttcgcctatagactctattcagccatacatgattttggatttcataataaaactgtgatccggatcctcattgccaggagcgagatcgacctattgaccatccggaaacgctacaaagaacgatacggcaaatctttgtttcatgacattcgaaactttgcaagcgggcactacaagaaagccctcctcgcaatatgtgctggggatgctgaggattactag

SEQ ID NO: 214521 - DNA, 975 bp, synthetic construct
  misc_feature 1..975: note = Description of Artificial Sequence: Synthetic coding sequence
  source 1..975: mol_type = other DNA
atgttttgcagcaatctcgtacaaggcaccatattccctgcacccaattttaacccaattatggatgcacagatgctgggcggagcactacaggggttcgattgcgacaaggacatgttaatcaatatcctgactcagcgttgcaatgcgcagagaatgatgatagccgaagcctatcaatccatgtacgggagagatttaataggagacatgcgtgaacagctctccgatcactttaaggacgtgatggcgggtctaatgtatcccccacccctgtacgacgcccatgaactgtggcatgccatgaagggtgtggggaccgacgaaaattgccttatcgaaatcctggcgtcgagaaccaatggcgagatctttcaaatgagagaagcctattgtttacagtacagcaacaatctgcaggaagacatatactctgagacaagtggtcacttccgggacaccctgatgaatctggtacagggcacaagggaggaagggtacactgatcctgcgatggctgctcaggatgctatggtcctgtgggaagcgtgccagcagaaaacaggcgaacacaaaactatgctgcagatgatcctgtgcaacaagtcttaccaacaattgaggttggtgtttcaagagttccagaacatttcgggacaagacatggtagacgccatcaatgaatgctacgacggatacttccaggaattactcgtcgccatcgtactgtgcgtgcgcgacaaaccagcttacttcgcatatcgtctgtatagtgcgatacacgactttggatttcataataagacagtcattcgaattctgatcgctcggtcagaaatcgacctgctaaccattcggaaaaggtacaaagagcgatacggcaagagcctgttccacgatattcgcaacttcgcctcaggccattataagaaggcccttcttgcgatttgcgctggcgacgctgaggactactag

SEQ ID NO: 214522 - DNA, 1518 bp, synthetic construct
  misc_feature 1..1518: note = Description of Artificial Sequence: Synthetic coding sequence
  source 1..1518: mol_type = other DNA
atgtcatatcctgggtacccgcctccaccaggcggttacccccctgcagcccctggaggaggtccctgggggggtgccgcttatccaccccctccctcaatgccaccaatcggtctagacaatgtcgccacctatgctgggcaattcaatcaggattatttatccggcatggctgctaacatgagcggcacttttgggggtgccaatatgcctaatctctacccaggtgcccctggggctggctacccaccagtcccaccgggaggtttcggacagcctccaagcgcccagcaacccgtaccaccctacggaatgtatccccctcctggcggtaacccccctagtagaatgccgagttaccctccctatcctggggctcctgtgcctggtcaacccatgcctccacctggacaacagccccctggggcttaccctggacagccgcctgtgacgtacccaggccaacccccagtcccgttgccaggccaacagcagcccgtgccttcctatccaggctatcctggctcaggaaccgttacccccgctgtcccgccaacccagttcggctccaggggcactataacagacgctcccggatttgacccattgagggacgctgaagtactcaggaaggccatgaaaggttttggcaccgacgagcaagccatcatcgactgtctgggttctcgtagtaacaaacagcggcaacagatactgctttcttttaaaaccgcctacgggaaggatctgatcaaagaccttaaaagtgaactcagcggaaactttgagaaaaccattctggccttgatgaagacgcctgtgttgttcgatatctacgaaatcaaggaagccatcaagggagtgggcactgacgaagcatgtctgatcgagatactcgcttcccgctcaaatgagcatatccgggagctgaatagggcctataaagcggagtttaagaaaaccttggaggaggctatcagatcagatacatctggccattttcagaggctcctcatctccctctcccagggaaatagggacgagtccaccaatgtagacatgagtctggcccagagagacgctcaagaactttacgcagctggggagaaccggctcggtacagacgagtccaagttcaacgctgtcctgtgttccagaagcagggcccatctagtagctgtatttaatgagtaccagcggatgacaggcagagatatcgaaaaatcgatttgtagagaaatgagtggtgatctagaggagggcatgctggccgtcgtgaaatgcttgaaaaacacgcctgccttctttgccgagagactcaataaggctatgcggggagctgggactaaggacagaaccttgatacggattatggtaagtcggtccgagacagatctcctcgatattagatctgagtacaagaggatgtacggcaagtcactgtatcacgacatctctggagacacttcaggcgactaccggaagatcctcctgaaaatatgcggtgggaatgattag

SEQ ID NO: 214523 - DNA, 1518 bp, synthetic construct
  misc_feature 1..1518: note = Description of Artificial Sequence: Synthetic coding sequence
  source 1..1518: mol_type = other DNA
atgtcgtacccaggataccccccacctcctggcggttacccccctgccgctcccggaggcggaccatggggtggggctgcctatcctccacccccaagtatgccgcctatcggcctcgataacgtcgccacctacgctggtcagttcaaccaggattacttgtctggaatggccgctaatatgagcggaacttttgggggagccaatatgcccaacttatacccaggggcacctggcgctggatacccacccgtccctcctggcggattcggacagcccccttcagcacagcagccagtccccccatatggcatgtaccctccgccaggaggaaatccgcctagtcgcatgccttcctacccaccctatccgggagccccagtccccggacagcccatgcccccaccgggtcagcaacctcccggagcatatcctgggcagcctccggtaacctaccctgggcagccccctgttcccctgccagggcagcaacagcccgtgccgtcatatcccggatacccaggaagcggtaccgtcacccctgccgtgcctccaacccagtttggatctcgtggcactattactgacgccccaggatttgatccgctgcgcgatgctgaggtcctccgaaaggcaatgaaggggttcgggacagatgagcaggcaattattgattgtctgggaagtcgctccaataagcaaaggcagcagatcctgctctccttcaagaccgcctacggaaaggaccttattaaagatcttaaatccgagctcagtgggaatttcgaaaaaacgatcttggcactaatgaaaacaccagtcctgttcgacatctacgagatcaaggaagccatcaagggggtgggtaccgatgaggcttgtcttatcgagattcttgcctctaggtctaatgaacacatccgggaactcaacagagcatataaagccgaattcaaaaaaaccctggaagaggctattaggagcgacacaagcggtcatttccagaggttgttaatttccttgagccaagggaatagagacgaatcaacgaatgtggacatgtccctagcccaacgagacgcccaggagctgtacgccgcaggagaaaatagactcgggacggatgagtctaagttcaacgcagtactgtgctcacgaagcagggcgcatcttgtggctgtgttcaatgagtaccagcgcatgaccggaagggatatcgaaaaatcaatttgccgagaaatgagtggagatctggaggagggaatgctggcagtcgtgaaatgtctgaaaaatacccccgcattcttcgccgagcgtctgaacaaggcaatgagaggcgcaggcaccaaggatcgaacccttattcgcatcatggtgagtaggtcagaaaccgacctgctggatattaggtccgaatacaaacgaatgtatgggaagtctctgtaccatgatatcagcggtgacaccagtggcgactacaggaaaatcctgcttaagatttgcggaggtaacgattag

SEQ ID NO: 214524 - DNA, 489 bp, synthetic construct
  misc_feature 1..489: note = Description of Artificial Sequence: Synthetic coding sequence
  source 1..489: mol_type = other DNA
atgtcacttgcgcaacgtgacgcacaagaactctacgcggcaggggaaaaccgcctgggtaccgatgaatccaagttcaacgcggttctctgctctcggagccgcgcacacctcgtcgcagtatttaacgaatatcaaagaatgaccggacgggatatcgagaagagcatatgccgcgagatgtccggggacctggaagaaggaatgctggccgttgtcaaatgcctaaaaaacacgcccgcattctttgccgaaagactgaacaaggccatgcggggtgctgggaccaaggatcgcactctgataaggattatggtgtcccgctctgaaacggacctgcttgacatccgctctgagtacaaacggatgtatgggaaatcactgtaccatgacatcagctcaatctcgtgtatgccagcctcatatggacatctggaggaggccacctgtctggcactcaagttgctcagagtcgaaggcaatgactag

SEQ ID NO: 214525 - DNA, 1518 bp, synthetic construct
  misc_feature 1..1518: note = Description of Artificial Sequence: Synthetic coding sequence
  source 1..1518: mol_type = other DNA
atgagctatcctgggtaccctcctcccccaggcggatatcctccagcggctcctgggggtggcccatgggggggagcagcatacccccctccacccagtatgccacctatcggtctggacaacgtggctacctatgctggccagtttaatcaggactatctgagcggcatggccgctaacatgagtggcaccttcggtggcgcaaatatgccaaatctgtatcccggagcacccggtgccggttacccacccgttcctcctggcggttttggacagccaccaagcgcacagcagcccgtgcccccttatggaatgtatcctcctcctggcggaaaccccccaagccgtatgcctagctaccctccctatcccggtgctcccgtgccgggacaacctatgcctccccctggccagcagccgccaggcgcttaccctggccagcccccagtaacttaccccggacagccaccagtgccattacctggccagcagcaacccgtgccgtcctatccaggatacccgggtagcggaacagtgaccccagcggttcctcccactcagttcggttcccggggtacaatcacagacgcacccggtttcgatccccttcgggacgctgaggtgctgcggaaggcgatgaaggggttcgggactgatgagcaggcaatcatcgattgcctcggtagccgttcaaacaaacagagacagcagatattgttatcttttaaaacagcatacggaaaggacctcattaaagatttaaaatctgagctgtctggcaactttgaaaaaactattcttgcacttatgaagacccctgtgctgtttgatatctatgaaataaaagaagcgatcaagggcgtaggcacagacgaagcttgcctcatcgaaatcctcgcttccagatccaacgaacatatcagggaactcaacagggcatacaaagctgagtttaaaaagacgctagaggaggccattaggtccgacactagtggtcatttccagagacttctaatttccctctcccagggcaaccgagacgagtcaactaacgtggatatgtcactcgcacagagggacgcccaagagctatacgcggctggcgaaaatcggctcgggaccgacgagtctaagttcaatgccgtcctctgctctcggtctagggcacacttggtggcagtctttaacgagtatcagcggatgaccggaagagacattgaaaaaagtatatgccgcgaaatgtcaggggatctcgaagagggcatgctggcagtggtgaagtgtctcaaaaatacaccggctttctttgccgagagactaaacaaggcaatgcggggagccggaactaaggaccgtaccttgatcagaattatggtgagccgatcagaaaccgatttactcgacattcgatccgaatacaagaggatgtacggaaagtccctgtaccatgacatcagcggagacacttcaggcgactatcgcaagatcctgctgaaaatctgcgggggaaacgactag

SEQ ID NO: 214526 - DNA, 1518 bp, synthetic construct
  misc_feature 1..1518: note = Description of Artificial Sequence: Synthetic coding sequence
  source 1..1518: mol_type = other DNA
atgagctacccaggataccccccacctcctgggggatatcccccagcagcccctggcggtggcccttggggaggtgctgcctacccaccgcctccaagtatgccaccaatcggcctcgacaatgtggccacgtatgcgggtcagttcaaccaggattatctgagcggaatggctgccaacatgagcggcacctttggaggagccaatatgcctaatctataccccggagcccctggcgcaggctatccaccagtgcctcctggcggattcggacagccaccatcagcccagcagccagtaccaccctatggtatgtacccgccacctggcggtaatcccccatccagaatgccaagttaccctccctacccgggagctcctgtgcctggtcagccaatgcctccacccggtcagcagccgccaggcgcttaccccggtcagccccctgtgacctatcctggtcaaccccctgtaccccttcccggacagcagcagcccgtgccctcttaccctggctaccctggaagtgggaccgtgacccccgctgttccaccgactcagtttggtagtcgcggtacaatcacggatgctccagggtttgatccactgagagatgcagaagtgctgcgcaaagctatgaagggattcggcacagacgagcaggctattatagactgtctcggcagtcgctcaaacaagcaaagacaacaaattctgctgagcttcaaaaccgcctatggtaaggacctaattaaagacctgaagtcagagctcagcggcaactttgagaaaactattcttgcactgatgaaaactccagtgcttttcgatatctacgaaataaaagaagcaattaaaggagtggggacagacgaagcttgcttaattgagatattagctagccgctcaaatgagcatattagagagcttaaccgagcttataaagctgaatttaaaaaaacacttgaggaagctatccgctcagatacctccggccatttccagagactccttatcagtctcagtcaaggcaacagagacgaatcgactaacgtcgacatgagcctcgcacaacgcgatgcccaagagctgtatgccgctggcgagaatagactggggacggacgagtcaaagtttaacgctgtcctttgtagcagaagtcgtgcccatttggtcgccgttttcaacgaataccagaggatgaccggccgagacatcgagaaatccatctgccgggaaatgtccggcgacctggaggaaggaatgctcgcagttgtcaagtgtctcaaaaatactccggctttctttgctgagcgactgaacaaggcaatgcgtggagcgggtaccaaggacagaacactgattcgtattatggtgagtcggtctgagactgatctgcttgatattcgtagcgagtataaacggatgtatggcaaatcattgtatcacgatattagcggagacacaagcggagattatagaaaaatactgctgaagatttgtggagggaacgattag

SEQ ID NO: 214527 - DNA, 1518 bp, synthetic construct
  misc_feature 1..1518: note = Description of Artificial Sequence: Synthetic coding sequence
  source 1..1518: mol_type = other DNA
atgagttacccaggttatcccccaccacctggcggttatccacccgctgcacctggtgggggtccatggggaggcgctgcctatcctccaccaccgtccatgcccccaatcgggcttgataatgtggccacctacgcgggacagtttaaccaggactatctttcaggcatggcagccaacatgagcggcacttttgggggagcaaatatgccaaacctgtatccgggtgcccctggagctgggtatccccctgtgcctcccggaggtttcggacagccccctagcgcgcaacaacccgtccccccttatggaatgtacccccctccgggtggcaatcccccttcacggatgccctcctacccaccatatcccggagcaccagtgcccggtcagccgatgccgccacctggtcagcaacccccaggagcttaccctgggcagcctcccgttacctacccgggacaaccacctgtgcctctgccaggacagcagcagcccgtgccctcttatcctggctaccctggctctgggaccgtgactcctgccgtgcctcctactcagtttggcagccgtggtactattaccgatgctccaggcttcgatcccctgcgagacgcggaagtgcttcgcaaggccatgaagggattcgggaccgatgagcaggctattatagattgcctgggtagcaggagcaacaaacagaggcagcaaattctcttaagcttcaaaacagcatacggtaaagatctcatcaaggatctcaagtccgaactatccggaaactttgaaaagacaatcctggctttaatgaaaactcccgtgctttttgatatctacgaaataaaagaagcaatcaaaggagtgggaacagatgaagcctgcctgatcgaaattttagcctcaagatccaacgagcatatcagggaactgaacagagcctataaggccgagttcaagaaaaccttggaggaggcgattaggtcggatacctctggacactttcagaggctgctgatctccttgagccagggtaaccgtgacgagtctacaaatgtggacatgtctctcgcacagcgcgatgcccaggaactgtacgcagcaggtgaaaatagactcggcaccgacgaaagcaagttcaacgccgttctctgttcacgctctcgagcacacttggtcgctgtctttaatgaataccagagaatgacaggcagggacatcgagaagagcatttgtagggaaatgagcggggacctcgaagaaggcatgctcgctgtcgtgaaatgcctaaagaacactcccgcattttttgccgagcggctgaacaaggcgatgcgaggggctggtaccaaggaccgaaccttaatcagaattatggtctctagaagtgagactgatctccttgatataagatcggaatacaaacgtatgtatggcaagagtttataccatgacatctctggggacacgtcgggagactatcggaagatcttgcttaagatttgcggaggcaatgactag

SEQ ID NO: 214528 - DNA, 1239 bp, synthetic construct
  misc_feature 1..1239: note = Description of Artificial Sequence: Synthetic coding sequence
  source 1..1239: mol_type = other DNA
atgagaggcagcagcactcggacaatctcccgcgagtgctggcggctctgggccgctcccttatgtcctgcagcatgtagctccctgtgggatgtcagcacacccagaagaaagccaacactacaggacgcattgatctccgctattccatatccagggcaaccccctgtaacctaccccggacagccaccagttccccttccaggccagcagcagcccgtccctagttatccgggatacccagggtcaggaacggtcacaccagctgtgccgcctactcagtttgggtctcgtggtacaataacagatgccccaggattcgaccctttacgggatgctgaggtgttacggaaggcaatgaaaggcttcggtaccgacgaacaggctattattgactgcttaggatcgcgatccaataaacagcgacaacagattctgctgagtttcaagaccgcatatggaaaggatctaatcaaggatcttaaatctgaacttagcggaaatttcgaaaagactatcttagcactaatgaaaacacccgtgttgtttgatatctatgaaattaaagaagccatcaaaggggtgggcaccgacgaggcatgtctgatcgaaatcttagcaagccgcagtaacgaacatattcgagaattgaatagagcttataaggccgagtttaaaaagacattggaggaagctatccggagtgatacaagtgggcattttcaacgcctactcatctctctgagccaggggaacagagacgaatccacaaatgtggacatgtctttagcgcagcgcgatgctcaggaactatacgctgctggagagaatagactgggcaccgatgaatcgaagttcaatgctgtcctgtgttctcgcagtagggcccacctggtggcggtgtttaatgagtaccaacgaatgacgggaagggacatcgaaaaatccatctgtcgggaaatgtcgggcgatctagaagagggaatgctggcggtggtgaagtgtctgaagaatactcccgctttttttgctgagcgcctcaataaagccatgcggggtgccggtaccaaggatcgcaccctgatcagaattatggtttcgaggagcgaaaccgatttactggatatacgttcggaatacaaaagaatgtatggaaagagcctctaccacgatatctcaggagataccagcggagattatcgtaagatactccttaagatctgcggaggcaatgattag

SEQ ID NO: 214529 - DNA, 453 bp, synthetic construct
  misc_feature 1..453: note = Description of Artificial Sequence: Synthetic coding sequence
  source 1..453: mol_type = other DNA
atgtcttaccctggatatccacccccaccaggcggatatccaccagccgcaccaggaggaggcccttggggaggagccgcttaccctccgccaccaagtatgccgccaatcgggctagacaatgtggctacatacgcaggccagttcaatcaagactatctgtctgggatggccgcaaatatgtcaggtaccttcgggggagcgaacatgcctaacctgtatccgggagccccaggcgctggatatcctcccgtgccacccggaggctttggccagccacccagcgctcagcagcctgtacctccttacggaatgtaccctcctcccggtggtaatccaccttcaagaatgccttcctatcctccctatcccggagcgccagtgccagggcagcccatgccccctccgggacaacaaccacccggtgcctaccctggacagccacccgtgtag

SEQ ID NO: 214530 - DNA, 1518 bp, synthetic construct
  misc_feature 1..1518: note = Description of Artificial Sequence: Synthetic coding sequence
  source 1..1518: mol_type = other DNA
atgtcctaccctggctaccctcctccgcctgggggttatccacccgcagctccagggggaggaccctgggggggtgccgcttaccctccacctccgagtatgccaccaattggactagacaatgtggctacctacgcagggcaatttaatcaggattacctgagcggcatggcagctaacatgtctggaacatttgggggtgctaacatgcctaatctgtatccaggagctccaggcgcaggctatccccctgtgccaccagggggttttggtcagcctcctagtgcacagcagccggtgcccccttacggcatgtacccccctccaggcggtaatccaccatcaaggatgccatcctacccaccgtatcctggggctccagtccccggtcagccaatgcctccacctggccaacagccgccaggagcctacccaggccagccccctgtgacgtatcctggacaacccccagtgccactgcccggtcaacagcagcccgtaccttcgtatccagggtaccctgggagtgggaccgtcaccccagccgtgccccctacgcaattcggtagcagaggcacaatcaccgacgctccaggcttcgatccactccgcgacgccgaggttctgaggaaagcaatgaaaggattcggcacagatgagcaggccataatcgactgcctggggtccaggagcaacaagcagcgccaacagatactgctgtcattcaagactgcctacgggaaggatctcattaaggacctaaagtctgagctaagcgggaatttcgagaaaactattctggctctgatgaagacacccgtattattcgacatttatgaaatcaaggaagcaatcaaaggcgtcggtactgatgaggcttgcctcattgagatcctggcctccagatccaatgagcacatccgcgagctcaaccgagcatacaaagccgaatttaagaaaaccttggaggaggccatccgatccgataccagtggtcactttcagaggcttttgatttccctgtcccagggaaacagagacgaaagtacaaatgtcgatatgagtcttgcccagcgcgatgcccaggagttatacgcggcaggcgagaacagactgggtacggatgagagcaaattcaatgccgttctatgcagccgttcaagggcccacctggtggcagttttcaatgagtaccaaaggatgacggggcgtgatatagagaaaagcatttgcagagaaatgtcgggtgacctggaggagggcatgctcgccgtggtgaaatgcctgaagaacaccccagcatttttcgcagaacgtctcaacaaggcgatgcgtggggctggtaccaaagaccgtaccctgatacgtattatggtgagtaggtctgagactgaccttttagacatccgaagtgaatacaagagaatgtatggaaaaagcctctaccatgatatcagcggcgacacttctggtgactacagaaagattctgctcaagatctgcggcggaaacgactag

SEQ ID NO: 214531 - DNA, 615 bp, synthetic construct
  misc_feature 1..615: note = Description of Artificial Sequence: Synthetic coding sequence
  source 1..615: mol_type = other DNA
atgagttatccgggttaccccccacccccaggagggtacccacctgcggcaccaggaggaggaccttgggggggagctgcttaccctccacccccatctatgccaccaatcgggttggacaacgttgccacttacgctggccaattcaatcaggattatctgagcggaatggccgctaacatgagcgggacttttggtggtgccaatatgcccaatctctaccccggtgcgccaggggctgggtacccgccagtgccacccggtgggttcgggcagccgccaagcgcgcaacagccggtgccaccatacggaatgtaccccccaccaggcggaaatccaccttccagaatgcctagttaccccccttacccaggtgccccagtccctggccagccgatgccgcctccgggacaacagcccccaggagcatatcctgggcagcctcctgtaacctatcctgggcagccccctgtcccgctgcctggtcagcagcagcccgtgcctagctaccctggatacccaggttccggtactgttacccctgccgtcccacctacacagtttggttctcgtggaaccatcacagacgcccctggatttgatccgttgcggtag

SEQ ID NO: 214532 - DNA, 447 bp, synthetic construct
  misc_feature 1..447: note = Description of Artificial Sequence: Synthetic coding sequence
  source 1..447: mol_type = other DNA
taagagaaccgcctcggcaccgacgagagcaaatttaacgccgtgctctgttcacgatcccgcgctcacctggtggccgtctttaatgaatatcagcggatgaccggccgagacatcgaaaagtctatttgtagagaaatgtccggagacctggaagagggaatgttggccgtggttaagtgcctgaaaaacacaccagctttctttgccgagcggctgaacaaagcaatgaggggggctgggacaaaggacagaaccctgatccgcattatggtctctaggagcgagacggatttattggacatcagaagcgagtacaaacgaatgtacggtaagagtctgtatcacgatatttcatctatctcatgcatgcccgcatcgtatgggcacctcgaggaagccacctgtcttgcacttaaactcctccgagtcgagggaaacgactag

SEQ ID NO: 214533 - DNA, 1518 bp, synthetic construct
  misc_feature 1..1518: note = Description of Artificial Sequence: Synthetic coding sequence
  source 1..1518: mol_type = other DNA
atgtcctatccaggatacccaccgccacctggtggatacccacccgctgcacccggtggaggaccctggggcggagcagcgtacccaccacctccgtcaatgccccctatcggccttgataacgttgccacctacgctggacaattcaatcaggactacttatcaggaatggctgccaatatgtcagggacattcggtggagctaatatgcccaatctgtatccgggtgccccaggagccggttaccctccggtcccacccggaggatttggccagccccctagcgctcagcaacccgttcccccatacggaatgtatccgcctcctggtgggaatccccctagccgtatgccgtcatatcccccttatcctggagcaccagtaccaggccagcctatgccaccacccggtcagcaaccaccaggtgcctaccccggacagccccctgtgacatatccagggcagccccctgtccccctgcccggacagcagcagcccgtaccatcctacccagggtaccccggttctggaactgttaccccagcggtgccacccacacaattcggctccagaggaactatcaccgacgccccaggatttgaccccctgcgggatgctgaagttctccgaaaggcaatgaaggggtttggcactgatgagcaggctataatcgattgtctggggtcacggtcaaataagcagcgccagcagattctcctgagcttcaagactgcctatgggaaggacctgattaaggatctcaagagtgagctctcgggcaactttgagaagaccatactcgctctcatgaagacccctgtcttgttcgatatctacgaaataaaagaggccattaaaggtgtcggcacagacgaagcttgtctgattgagattctggcatctcggtcaaatgagcatatccgcgagctgaaccgtgcgtacaaagctgaatttaaaaagacactcgaagaggcaatcagaagcgataccagcgggcattttcaacgattgctaatttctctgagccaggggaatcgcgatgaatccaccaatgtcgacatgtctctagcccagagagacgcgcaagaactgtatgccgctggcgagaacaggctgggaactgatgagtccaaattcaacgcagtgttatgttcacggtctagggcacacctagtggcggtttttaacgagtaccagcgcatgacggggcgtgatatcgagaaatctatttgccgagaaatgtccggcgacctagaggaagggatgctggccgtggttaagtgtctgaagaatacacccgcatttttcgcggaaagactgaacaaggctatgaggggcgctgggactaaggataggactctcattcggataatggtcagtcgatcagagacagatctgctcgacataagatctgagtacaagagaatgtatggcaagagcttgtatcatgatattagcggcgacacctcaggggattacaggaaaattttgctgaagatatgtggaggcaatgactag

SEQ ID NO: 214534 - DNA, 1419 bp, synthetic construct
  misc_feature 1..1419: note = Description of Artificial Sequence: Synthetic coding sequence
  source 1..1419: mol_type = other DNA
atgcctccaatagggttggacaacgtcgccacttacgctggtcaattcaaccaggattacttaagcggcatggccgctaacatgtcaggcacgttcgggggtgctaatatgcctaacctctaccctggcgctccaggagcaggctacccccctgtcccgcctgggggattcggacaaccacccagcgcgcagcagcctgttcccccatatggtatgtacccaccacctggcggtaaccctcctagccgtatgccatcatatcctccatacccgggagctccggtccccggacagccgatgccgccacctggacaacagcccccaggtgcctaccctggacagccccctgtgacctaccccggacaacctccagtccctctgcctggacagcagcagccagtgccgtcataccctggataccccggatccggtactgtcacccccgctgtgccccctacccagttcggttccagaggaactataacggatgccccaggattcgacccattaagggacgccgaggtgctccgcaaagccatgaagggcttcgggacagacgagcaggccatcatagattgtcttgggagcaggtccaacaagcagcgtcagcagatcttgctgtcttttaagactgcctatggaaaggatcttatcaaagaccttaaatccgagttgtctggaaattttgagaagaccattctcgccttgatgaagacccctgtcctctttgatatttacgaaattaaggaagctatcaagggagtgggtacggacgaagcttgcctgatagagattctggcatcccgctctaacgaacacatcagagagttgaacagggcctataaagcagagttcaagaagaccctcgaggaggccatcagatctgatacaagcgggcacttccagaggctcctgatttccttaagtcagggaaacagggacgagagtaccaacgttgacatgtctctagcacagagggacgcccaggagttgtatgctgctggggagaatagactcgggaccgatgagagcaaatttaatgccgtgctttgcagccgtagtcgggctcatctagtggcagtctttaacgaataccagcgtatgaccgggcgagatattgaaaagagcatctgcagggagatgtctggtgacctcgaagagggcatgctcgcagttgtcaaatgtctaaaaaacacgcctgcgttttttgctgagcggttgaacaaagccatgcggggagccggaacaaaggatcggacacttattagaattatggttagtcgcagtgaaacggacttactggatattcgctctgaatacaaacggatgtacgggaaatctctctatcacgatattagcggtgacacctcaggcgattatcggaagatcctgctgaaaatctgtggcggaaacgactag

SEQ ID NO: 214535 - DNA, 1074 bp, synthetic construct
  misc_feature 1..1074: note = Description of Artificial Sequence: Synthetic coding sequence
  source 1..1074: mol_type = other DNA
atgggaagacaactggccggttgcggagacgctgggaagaaagctagcttcaagatgtccactgttcacgaaatcctttgcaaactgtcactggagggcgatcattctaccccaccatcagcctacgggagtgtgaaagcctatacaaatttcgatgctgagagggacgcactcaatatagaaaccgccattaagaccaagggcgtggacgaagtcaccatagtgaatattctgactaatagatccaatgctcaaaggcaggacatcgcattcgcctaccagagacgcactaagaaagagctggcaagcgctctgaaatctgctctgagtggacacttggaaaccgtcattttggggctcctgaagacacctgcgcagtacgacgcttcggagctgaaggccagcatgaaaggactgggcaccgatgaggactcacttatcgaaattatctgctccagaacgaatcaagagttgcaggaaatcaatcgtgtttataaggagatgtacaagactgacttggaaaaggatataatctccgataccagtggcgacttccgcaagctaatggtagctctcgcaaagggcaggcgtgcagaagatggctcagtgatcgactatgagctaatagaccaggacgcacgcgacctgtacgatgccggagtgaagaggaagggaacggatgtgcccaagtggatcagtattatgacggaaaggagcgttccgcacctccagaaggtttttgataggtataaatcatacagtccttatgatatgcttgagagtatcaggaaggaagtgaagggagatctcgagaacgcatttttgaatttggtacaatgcatacagaataagcccctctattttgctgaccggctatacgatagtatgaaaggaaaagggaccagggacaaagttctcatcaggatcatggtgagccgatcagaagtagatatgctcaagatccgttctgagtttaagagaaagtatgggaagtccctgtactattatattcagcaagataccaaaggggactaccaaaaggctctcctttacctatgcggaggcgacgattag

SEQ ID NO: 214536 - DNA, 1020 bp, synthetic construct
  misc_feature 1..1020: note = Description of Artificial Sequence: Synthetic coding sequence
  source 1..1020: mol_type = other DNA
atgagcacggtgcacgagatactgtgcaagttgagcctcgagggagatcactcgacccctccttccgcctacggaagcgtcaaggcatatactaacttcgacgccgagagagatgctctgaatatcgaaaccgccatcaagacaaaaggagtcgatgaagtaaccattgtgaacattctgacaaaccgttctaatgctcagcgccaagacattgcgttcgcctatcaaagacggacgaagaaggagctggcctctgccctgaagagcgcattaagcgggcatctcgaaacggtcatcctgggcctattgaaaactcccgctcagtacgacgcgtccgaattgaaggcttcgatgaagggcctcggtacagacgaagattccctcatcgaaatcatctgcagtcgcaccaatcaggaattgcaggaaattaaccgcgtgtacaaggagatgtataaaaccgacctcgagaaggacatcattagcgacacttcaggcgactttaggaagctcatggtggccctggcaaaggggaggcgagccgaagatgggtccgttatcgactatgagcttattgaccaggatgcccgagacctgtacgatgcaggcgtgaagagaaagggcacggatgttcccaagtggatttcaatcatgaccgagcgttccgtgcctcacctgcagaaagtgttcgacagatataagtcttactctccatatgacatgctcgagtccatccgtaaggaggtgaagggggatctcgagaatgcatttctgaacctggtgcagtgcattcagaacaaacccttatacttcgccgacagactgtacgacagcatgaaaggaaagggaacaagggacaaggttctaatccggattatggtgagtcgatctgaggtggatatgttgaaaataaggagtgaattcaagagaaagtacggtaaatcgttatattattatattcagcaggataccaaaggggactaccaaaaagcacttctctacctctgcggcggtgatgattag

SEQ ID NO: 214537 - DNA, 1020 bp, synthetic construct
  misc_feature 1..1020: note = Description of Artificial Sequence: Synthetic coding sequence
  source 1..1020: mol_type = other DNA
atgtcaacagtgcacgagattctgtgcaagctctccctggagggagaccacagtacaccaccatcagcgtatggcagcgttaaggcctataccaattttgacgcagagcgcgacgccctgaacatagaaaccgcaatcaaaaccaaaggagtggacgaagtgacgattgtaaatatcctgacgaacaggtctaatgcccaacgccaggacatcgccttcgcttaccagagacgcactaaaaaggaacttgctagcgccctcaaatcagctctgtcagggcacctggagaccgtaatactgggtcttcttaagacacccgctcagtatgatgccagcgaactcaaggcctccatgaaggggctcgggactgatgaggactcactcattgagattatctgctcgcgtactaaccaggaactacaggagatcaatagggtgtacaaggagatgtataagacggacctcgagaaagacatcattagtgatacgtctggggacttcagaaaacttatggtcgcactggctaagggcaggcgagccgaagatgggagcgtcatcgactacgagctgattgaccaggatgccagggacttgtacgatgctggggtaaaaagaaagggcaccgacgtgccaaagtggatatctatcatgaccgagaggtcagtgccacacctgcagaaagtgttcgatcgttataagagctatagtccatatgacatgttggagtctattcgcaaggaagttaaaggcgatttagagaacgccttcctaaatctcgtgcagtgtatacaaaacaagcctctctatttcgcggacaggctttatgatagcatgaaaggaaagggcacccgggataaggtgctgatccgcataatggtgtctcgttccgaagtcgacatgctcaagatacggtctgagtttaagcgtaagtatggcaagtccctgtactactacatacagcaggacactaaaggagactatcaaaaagccctgttgtatctgtgtggcggagatgattag

SEQ ID NO: 214538 - DNA, 1020 bp, synthetic construct
  misc_feature 1..1020: note = Description of Artificial Sequence: Synthetic coding sequence
  source 1..1020: mol_type = other DNA
atgtcgactgtgcacgagattctctgtaagcttagcctggagggcgaccactcaacgccacctagcgcatatgggagcgttaaggcctatacaaacttcgacgctgaaagggacgccctaaacatcgaaactgcaataaaaacaaaaggggtcgacgaggtcacaatagtgaacatcctgacgaaccggagcaacgcccagcgtcaggatatcgcctttgcataccagcggaggacaaagaaggaactcgcaagcgctttaaaatcagccttgagtggccatctggagactgtcattttgggtcttctcaagacccctgcacagtatgacgcatccgagttgaaagcctctatgaagggattgggaaccgatgaagacagtctcatcgaaataatctgcagccgcacaaatcaggagctccaagagattaatcgcgtctataaagagatgtacaagactgatttggaaaaggatattatcagcgatacctccggagacttcaggaagctgatggttgccctggccaagggaagaagagccgaggatggaagcgtcatcgattatgaattaatcgatcaggacgccagggacctgtatgacgcgggagttaagaggaagggaactgatgtgccaaagtggattagtattatgaccgagcgcagcgttccgcatcttcagaaggtcttcgatagatacaagagctattcaccatacgacatgttggagagcatacgcaaagaagtcaaaggagacttggagaatgcatttctcaatctagtgcagtgtattcagaataagccactgtatttcgctgaccggttatacgatagcatgaaggggaagggtacaagggacaaagtgctcattagaatcatggtgagcaggtccgaggtggacatgctaaagatccggtccgaattcaagcggaagtatggcaagtcactatattactatattcagcaagatactaaaggggactatcagaaagcattgttgtatctctgcggtggagatgactag

SEQ ID NO: 214539 - DNA, 246 bp, synthetic construct
  misc_feature 1..246: note = Description of Artificial Sequence: Synthetic coding sequence
  source 1..246: mol_type = other DNA
atgtctactgtgcacgagatcctttgcaagctgtccttggagggggatcattccactccaccttcagcctacggttccgtgaaagcgtacactaactttgacgccgaacgggatgccctcaatattgaaactgccataaaaaccaagggcgtggatgaggtgaccattgtaaacatcctgacaaacaggtccaacgcccagagacaggatatcgccttcgcatatcagaggcggaccaaaaaatag

SEQ ID NO: 214540 - DNA, 531 bp, synthetic construct
  misc_feature 1..531: note = Description of Artificial Sequence: Synthetic coding sequence
  source 1..531: mol_type = other DNA
atgtcaactgtccacgaaatcctgtgcaaactaagtctcgagggcgaccactctacccctccttccgcttatggatctgttaaggcctatacaaacttcgacgccgaacgggacgcactcaacattgagaccgcgatcaagacaaaaggagtggacgaggtaaccatcgtcaacatcctgacaaatcgcagcaacgcacaacgccaagatattgcttttgcataccagagacgcaccaagaaagagctcgcctccgccctgaaaagtgccctcagtggtcatcttgaaacagtgattctcggactcctgaaaacaccagctcagtatgacgcatctgagctgaaagcctctatgaagggtctgggaaccgacgaagattcccttatagaaatcatctgttcacggacgaaccaggagttgcaggaaatcaaccgagtatacaaagagatgtataaaacagacctagaaaaggatatcattagtgatactagcggagactttcggaaacttatggtggctctcgccaaatag

SEQ ID NO: 214541 - DNA, 144 bp, synthetic construct
  misc_feature 1..144: note = Description of Artificial Sequence: Synthetic coding sequence
  source 1..144: mol_type = other DNA
atgagcactgtccatgagatcttgtgtaaattgtccctggagggggatcacagcaccccaccatcagcctacggcagtgttaaagcttatacaaacttcgacgcagaaagggatgccttaaatatcgagactgctatcaaatag

SEQ ID NO: 214542 - DNA, 405 bp, synthetic construct
  misc_feature 1..405: note = Description of Artificial Sequence: Synthetic coding sequence
  source 1..405: mol_type = other DNA
atgagcaccgtgcatgagatactttgtaagctgtctcttgagggagatcatagtacccctccaagtgcatatggctcggtaaaggcatacactaattttgatgccgagcgggatgctttgaatatagagacagcaatcaaaaccaaaggcgtggacgaagtgactatcgtcaacatactgaccaatagaagcaatgcacagaggcaggacatcgcttttgcttatcagcgcaggacaaagaaagaactcgctagcgctctcaagtctgccctgtcgggccacctcgagaccgtcatcctggggctgctcaagactcctgcacagtatgacgcttcagaactcaaggccagtatgaaagggctgggaaccgacgaagactcactgatagagatcatttgttcttag

SEQ ID NO: 214543 - DNA, 402 bp, synthetic construct
  misc_feature 1..402: note = Description of Artificial Sequence: Synthetic coding sequence
  source 1..402: mol_type = other DNA
atgagcacagtgcacgaaatactctgtaagttgtctctcgaaggcgaccacagcacccctccgtcagcatacggatcagtcaaggcatataccaacttcgacgcagagagggacgccttaaacatcgagaccgcaatcaagactaagggcgtagatgaggtgaccattgtgaatatactgaccaaccgatccaatgcgcaaaggcaggatatagctttcgcctaccaacggaggactaagaaagaactggccagcgccctgaaatctgccctaagtggccacctcgagacggttattctcggtctcctgaagacacctgcacaatatgatgcgagtgagttgaaggccagcatgaaggggctgggaactgatgaggactcacttatcgagataatttgttag

SEQ ID NO: 214544 - DNA, 450 bp, synthetic construct
  misc_feature 1..450: note = Description of Artificial Sequence: Synthetic coding sequence
  source 1..450: mol_type = other DNA
atgagtaccgtccacgagatcctgtgcaaactgtcacttgagggtgatcactcgacccccccttcggcctacgggagtgtcaaggcctatacaaactttgacgccgagagggacgcgttgaatatagagactgccattaagaccaaaggcgtcgacgaagttacaatcgtgaacattcttaccaacaggagcaatgctcagaggcaggatatcgcttttgcctaccagaggaggaccaaaaaagagttggctagtgccctgaaatctgctctgtcagggcatctggaaaccgtcattctcggtctcttaaagacccccgcacagtacgatgctagcgagctcaaggctagtatgaagggcctggggacagacgaagatagcctaattgaaataatttgttctagaacgaaccaagagttacaggagattaatcgtgtgtacaaggaatag

SEQ ID NO: 214545 - DNA, 198 bp, synthetic construct
  misc_feature 1..198: note = Description of Artificial Sequence: Synthetic coding sequence
  source 1..198: mol_type = other DNA
atgagtacagtccatgagatactgtgtaagcttagcctcgagggggaccatagcacgcctccctctgcatatggctccgtgaaggcctataccaactttgacgcagaaagagacgcgctgaacattgagacagctatcaaaaccaagggcgtcgatgaggtcactatcgtgaatatccttaccaaccgcagcaactag

SEQ ID NO: 214546 - DNA, 360 bp, synthetic construct
  misc_feature 1..360: note = Description of Artificial Sequence: Synthetic coding sequence
  source 1..360: mol_type = other DNA
atgagcactgtgcacgagatactctgtaaactctcactggaaggggaccactccacccccccatcagcgtacgggagcgtgaaagcctacacaaacttcgacgccgaaagagacgccttaaacatcgaaaccgctatcaaaactaaaggtgtggacgaggtgaccatcgtgaacatcctgactaaccgctccaatgctcagcgacaggatatagccttcgcatatcagaggcgtactaaaaaagagctggcgagcgccctaaagtctgctctctctgggcacctggagaccgtaattctcggcctgcttaagactcctgcacagtacgacgccagcgaactgaaggccagcatgaaatag

SEQ ID NO: 214547 - DNA, 771 bp, synthetic construct
  misc_feature 1..771: note = Description of Artificial Sequence: Synthetic coding sequence
  source 1..771: mol_type = other DNA
atgagcaccgtccatgagatcttatgcaaactgagtctggaaggtgatcatagcacacctccctcggcctatggcagcgttaaagcttacacgaattttgacgcagagagggatgctctgaatatagagacagctataaaaaccaaaggagtggatgaggtgacaattgtcaacatccttacaaaccgctccaatgcccagagacaggatatcgctttcgcctaccaaaggaggactaaaaaagagttggcttccgcactcaagtcagcactgagcggccatctcgaaaccgtaatcctggggctccttaaaactcctgctcagtacgacgcctcagaacttaaggccagcatgaaaggactgggtacagacgaagactccctgatcgagattatctgctcccggaccaaccaagagctgcaggaaatcaatagagtctataaagaaatgtataaaacagatctggagaaggatatcataagcgacacttcaggcgattttagaaaactcatggttgctctcgcgaagggccgacgggctgaggatggcagcgttatcgattacgagctcatagaccaggacgcacgagacctgtacgatgcgggagtgaaacgaaaggggaccgacgtgcctaaatggatttctattatgaccgagagaagtgtccctcatttgcagaaagtgttcgatcggtacaaatcatactctccttacgacatgttggaaagcattagaaaggaagttaaaggtgaccttgagaacgctttctag

SEQ ID NO: 214548 - DNA, 360 bp, synthetic construct
  misc_feature 1..360: note = Description of Artificial Sequence: Synthetic coding sequence
  source 1..360: mol_type = other DNA
atgagcaccgtacacgaaatcctgtgcaagctctctctagagggagatcacagcacaccaccctccgcatatgggagtgtgaaagcttacacaaatttcgacgcagagcgggatgccctaaatatcgagactgcaatcaaaaccaaaggtgttgacgaagtgacaatcgtcaatatcctgactaatcgcagtaatgcgcagcggcaggacattgcatttgcatatcagcggaggacgaagaaggagctcgcctctgctctgaagtctgcccttagtggccacctggagacagtgatactgggtcttcttaagactcccgctcagtacgacgcaagcgaattgaaggcctccatgaaatag

SEQ ID NO: 214549 - DNA, 531 bp, synthetic construct
  misc_feature 1..531: note = Description of Artificial Sequence: Synthetic coding sequence
  source 1..531: mol_type = other DNA
atgagcacagtgcacgaaattctgtgcaagctgtccctggagggcgaccactccactcccccttccgcgtatggctcagtaaaagcttacacaaacttcgatgccgagagggatgctctcaatatcgagactgctattaaaaccaaaggtgtggatgaggtgaccattgttaatatccttaccaaccgttctaacgcacaaagacaggatatagcgttcgcgtatcagaggcgtacgaaaaaggaactcgcttccgccctcaaaagcgccttgtccggacacctagagaccgtcatcctcgggttgctgaaaactcccgctcagtacgacgcgtctgagctcaaggccagtatgaaggggctggggaccgacgaggactctctgattgaaataatctgcagccgcacgaatcaggagcttcaggaaatcaatagggtgtataaggaaatgtataagaccgaccttgaaaaagacatcatttctgacaccagtggtgattttcgcaaactgatggtggcgctagccaagtag

SEQ ID NO: 214550 - DNA, 684 bp, synthetic construct
  misc_feature 1..684: note = Description of Artificial Sequence: Synthetic coding sequence
  source 1..684: mol_type = other DNA
atgtccaccgtgcacgaaatcctgtgcaaactaagtctcgagggagatcatagcaccccaccaagtgcctacggatctgtgaaggcctataccaatttcgacgccgagagggacgccttaaacatcgagaccgccattaaaactaaaggcgttgatgaagttacaatagtgaatatcctgacgaacaggtctaacgctcagcggcaggacatcgctttcgcctatcagaggcgcacaaagaaggagctcgcttccgccttaaaatccgcactaagtggacacttagaaaccgtaattcttggcctgctgaagactccagcacaatatgatgccagcgagctgaaggcgtctatgaaaggcctggggaccgatgaagactcgctaattgaaatcatttgctccagaacaaaccaggagctccaggaaattaaccgcgtttacaaggaaatgtataagaccgatctcgaaaaggatatcatctcggataccagtggggattttcggaaactcatggtggctctcgccaaggggcgaagggcagaggacggctccgtcatcgactacgaactgattgaccaggatgctcgcgacctatacgatgccggtgtgaaacgtaagggcacagacgtgccaaagtggatttcgataatgaccgagaggtccgtcccccaccttcagaaatag

SEQ ID NO: 214551 - DNA, 531 bp, synthetic construct
  misc_feature 1..531: note = Description of Artificial Sequence: Synthetic coding sequence
  source 1..531: mol_type = other DNA
atgtcgactgtgcacgagattctgtgtaagttgtctctggagggcgaccatagcactccaccatcggcatacggaagcgtgaaagcctacactaacttcgacgcggagagagacgctctgaacatcgagaccgccatcaagacaaagggcgtcgacgaagtgacaattgtcaatatcctgaccaacagaagcaatgcacagaggcaagatattgccttcgcctatcaaaggcgaacgaagaaggaattggcttctgccttaaaatccgcactgagcggccacctggagacggtgattctgggacttctaaagaccccagctcagtatgacgcctctgaattaaaagccagtatgaaagggctcgggacggatgaggattctctcatcgagatcatttgcagtcgtacaaaccaagaactgcaggagataaacagagtttataaagaaatgtacaagacggatttggagaaggacataatctcagacacgagcggagacttccgaaaattgatggttgcattagctaaatag

SEQ ID NO: 214552 - DNA, 333 bp, synthetic construct
  misc_feature 1..333: note = Description of Artificial Sequence: Synthetic coding sequence
  source 1..333: mol_type = other DNA
atgagcacagtgcatgagatcttatgcaagttgtccctggagggggaccatagcacccctcccagtgcctatgggagcgtgaaagcgtacaccaatttcgacgctgagcgggatgcgctgaacatcgaaactgccatcaagaccaagggtgtggatgaggttaccatcgtgaacatcctgaccaacagaagcaacgcccagagacaagatatagctttcgcatatcaaaggcggactaagaaggagctcgcctccgctttaaagagcgccctctcggggcatcttgaaactgtgattctaggtctgctgaagaccccagctcagtacgactag

SEQ ID NO: 214553 - DNA, 972 bp, synthetic construct
  misc_feature 1..972: note = Description of Artificial Sequence: Synthetic coding sequence
  source 1..972: mol_type = other DNA
atggcaagcatctgggtggggcatcgcggaactgtccgtgactatcctgacttctcaccgtccgtggatgccgaggcaattcagaaggctattcgtgggatcggcaccgacgagaagatgctgatttctatcctcaccgagcgatctaatgctcagcgacagctgatcgtgaaggagtatcaagccgcttacggtaaggaactgaaagatgatctgaaaggggatctgtccgggcattttgagcacttgatggtggcactcgtgactccgccagcagtctttgatgcgaagcagctgaagaagtccatgaagggggcaggcaccaatgaggacgcactcattgagatcctcaccactagaacaagtagacaaatgaaggatatttcccaagcctactacacggtttacaaaaagtctctcggagacgacatcagctccgaaaccagtggagattttagaaaagctctccttacgctggctgacggcaggcgtgacgagagtcttaaggtggacgagcacctggccaagcaggatgcacaaatactgtataaggccggtgagaaccggtgggggacagatgaggacaagtttaccgagattctttgcctcagatcatttccccaacttaaacttacgttcgatgagtaccggaatatcagccagaaggacatagttgatagcatcaagggagagttgtcagggcacttcgaggacttattgctggctatcgtcaattgtgttagaaatactccagcttttttggcggagaggctccacagggcactcaaggggatagggaccgatgagtttaccctgaatcgcatcatggtctctcgttccgagatcgatctgttggacatacgaaccgagttcaaaaagcactatggctattccctctattccgcaattaagtccgacactagcggcgattacgagattaccctgttgaagatctgcggaggtgatgactag

SEQ ID NO: 214554 - DNA, 405 bp, synthetic construct
  misc_feature 1..405: note = Description of Artificial Sequence: Synthetic coding sequence
  source 1..405: mol_type = other DNA
atggcctccatttgggtgggccataggggtactgtgcgtgactaccctgactttagcccttctgtggatgccgaggccatccagaaagccatcaggggcatcggtactgatgagaagatgctcatcagcatcttaactgagcgctccaacgctcagcgacaactaattgtgaaagagtaccaggctgcttacggaaaggagctgaaggacgacttgaaaggcgacttatccggacactttgagcatctgatggttgcactggtcactccaccagccgtcttcgatgccaagcaactgaagaagtctatgaaaggcgctggaaccaacgaggatgccctgatcgagattttgacgactcgcactagcagacagatgaaagacatcagccaagcatactatacttag

SEQ ID NO: 214555 - DNA, 315 bp, synthetic construct
  misc_feature 1..315: note = Description of Artificial Sequence: Synthetic coding sequence
  source 1..315: mol_type = other DNA
atggcgtccatttgggtcgggcacaggggtacggttcgcgattatcccgattttagtccttccgtggatgccgaggctatacaaaaggccattcggggaatcggcacggacgagaagatgctgatatcaattctgactgaacgaagcaacgcacagcgacagctcattgtaaaggaataccaggcggcatacggaaaagaacttaaggatgatttgaagggcgatttgagtgggcatttcgaacatctgatggtggctttagtgactcccccagcggtttttgacgctaaacagcttaagaagagcatgaagtag

SEQ ID NO: 214556 - DNA, 465 bp, synthetic construct
  misc_feature 1..465: note = Description of Artificial Sequence: Synthetic coding sequence
  source 1..465: mol_type = other DNA
atggcttccatatgggtgggacatagggggactgtgcgggactatccagacttttccccttctgtggatgccgaggctattcaaaaggccattagagggatagggacggacgagaagatgctaattagcatcctgacagaaaggtccaatgcccaacgccagcttatagtcaaggagtaccaagctgcctacggaaaagagttaaaagatgatctcaaaggtgacctgagcggacattttgagcacctaatggtagccctggtgaccccccctgccgtgtttgacgctaagcagctgaagaaatccatgaagggcgctggtacaaacgaggacgcactaatcgaaatcctgactacaaggacttctaggcagatgaaagacattagtcaggcctactacaccgtttataagaaatcccttggagatgacatttccagtgagactagcggagatttccgcaagtag

SEQ ID NO: 214557 - DNA, 966 bp, synthetic construct
  misc_feature 1..966: note = Description of Artificial Sequence: Synthetic coding sequence
  source 1..966: mol_type = other DNA
atggccatggcgacgaagggaggcacagttaaggctgcgtccgggttcaacgcaatggaggacgcacaaacgttgagaaaagctatgaaggggctgggaacggatgaagacgctatcatctctgtgctggcttatcggaacacagcacagcgacaggagataagaaccgcttacaagtcaacgattggtagagacctcattgacgacctcaaaagcgagctgagcggcaacttcgagcaggtgatagtcggcatgatgacccccaccgtgttgtatgatgtgcaagagcttcggagggctatgaagggggcagggacagatgaaggctgcctgattgagattctggcttcacgcacccccgaggagatccgtcggatcagtcaaacatatcagcagcagtatgggagatcacttgaggatgacatcagatccgatacgtcgttcatgtttcaaagggtgttggtttctctgagcgccggaggaagagatgaagggaactacctggacgacgcgctggtgcgacaagacgctcaggacttatacgaggctggggagaagaaatggggcacggacgaagtgaagtttttaactgtgctctgttctcgaaacagaaatcatctcctgcacgtgtttgatgaatacaaaaggatatcccagaaagacatagaacagtccatcaagagcgagaccagtggctccttcgaagatgcactccttgctatcgttaagtgtatgcggaacaaatctgcctacttcgcggagaagctgtacaaatctatgaaaggacttggtacggacgacaatacgctgatcagggtgatggtcagtcgtgccgaaattgatatgcttgacatcagggcccactttaagcggctgtacggcaagagcctatactctttcatcaaaggcgataccagtggggactacagaaaagtcctgttagtgttgtgcggcggagatgattag

SEQ ID NO: 214558 - DNA, 900 bp, synthetic construct
  misc_feature 1..900: note = Description of Artificial Sequence: Synthetic coding sequence
  source 1..900: mol_type = other DNA
atggcaatggccaccaagggtggcaccgtaaaggcggctagcggtttcaacgcaatggaggacgcccagacactgcgtaaggccatgaaaggactgggaaccgacgaggatgcaatcatttccgtcctcgcctaccgaaacacagcccagagacaggagatcaggacagcttataagtccactatcggaagggatttgatcgatgacctcaagagcgagctgtcagggaattttgaacaaggtgcaggtaccgatgagggctgtttgatcgaaatactggcatctcggacaccggaggaaatccgcagaatttcccagacataccagcagcagtacggtcgtagcctcgaggatgacattcggagcgacacatcattcatgttccaaagggtattggtcagcctatccgccggtggaagggatgagggcaactatcttgatgacgccctcgtccgccaggatgcccaggatctttacgaggctggcgagaaaaagtggggcaccgacgaggtcaaatttctaactgtgttgtgttcaaggaacaggaaccacttgctgcacgtgttcgatgagtacaagagaatttcacaaaaagacattgagcagtctatcaaatccgagactagcgggtccttcgaggatgcgctactggcaattgtgaagtgcatgagaaacaagtcggcatacttcgcggaaaaactgtacaagtctatgaaagggctaggcaccgacgataacacacttattagagtgatggtcagccgagccgaaattgatatgctggacatcagggcacatttcaagcgattatacgggaagtctctgtactctttcattaagggagacacctccggagattatcggaaggtgctactggtcctttgtggcggagacgattag

SEQ ID NO: 214559 - DNA, 714 bp, synthetic construct
  misc_feature 1..714: note = Description of Artificial Sequence: Synthetic coding sequence
  source 1..714: mol_type = other DNA
atgatgacccccactgtcctttacgacgtgcaagaactccgcagagcaatgaagggggctggaactgacgaaggatgccttattgaaatattggcctcgaggaccccagaggaaatacggaggatttctcagacctatcaacagcagtacggacggtcactcgaggacgatatccgaagcgacacaagctttatgttccaaagggtcttagtgtcactgagtgccggtggcagagacgaaggcaattatctggacgatgcgctcgttcggcaggacgcacaagacctatacgaagctggtgagaagaaatggggcaccgatgaagtgaagttcctgactgtgctttgtagccggaataggaaccatcttctccatgtgtttgacgaatataagcgaatctctcagaaggatattgagcagagcatcaaatccgagacatcaggatcatttgaggatgccctgttagcaatcgtcaaatgtatgaggaataaatccgcgtacttcgcagagaagttatacaagtctatgaaaggactcggcactgatgataatactctgatcagagtaatggtgagtagagccgaaatcgatatgcttgatatccgagcgcacttcaagcgcctgtatggtaaatcattgtatagtttcataaaaggcgacacatcaggggactacaggaaggtcttgctggtcctgtgcggcggagacgattag

SEQ ID NO: 214560 - DNA, 963 bp, synthetic construct
  misc_feature 1..963: note = Description of Artificial Sequence: Synthetic coding sequence
  source 1..963: mol_type = other DNA
atggcgcaggtcctacggggaaccgttaccgactttcccggatttgacgagagagcagatgccgaaaccttgcggaaggccatgaaagggctcggaacggatgaagagtctatcctcactctacttacgtcgagatctaatgctcagaggcaggagatcagcgctgcattcaaaactctgtttgggagagacctcctggacgacctgaaatcagaacttaccgggaagtttgaaaaacttatcgtggcactaatgaaacccagcagactgtatgatgcttacgaactgaaacacgcgcttaaaggcgctggcactaacgagaaggttttgaccgagatcatcgcctcacggactcctgaagagctgcgtgcaataaaacaggtgtacgaggaggagtatgggagctcactggaagatgatgtggtgggggataccagcggttactaccagcggatgcttgtggtgctattacaggcaaatcgagaccctgacgctggcattgacgaggcgcaagtggaacaagatgcacaggccctgttccaggctggtgaacttaaatggggcaccgacgaggagaaatttatcactatctttggcacccggtctgtgagccacctgcgcaaggtcttcgacaagtacatgaccattagcggtttccagattgaggagaccatcgatagggaaacctccggcaatctagaacagctgctgctggccgtggtgaaaagtattcgtagcataccagcatacctagcagaaactctgtattacgctatgaaaggtgcgggaaccgacgatcacacacttatccgggttatggtttccaggtctgagattgacctgtttaatatccgtaaggaatttcggaagaatttcgcaacctccctgtattccatgatcaagggagacacctcaggcgattataaaaaggccctgctactgctctgcggtgaggatgattag

SEQ ID NO: 214561 - DNA, 2022 bp, synthetic construct
  misc_feature 1..2022: note = Description of Artificial Sequence: Synthetic coding sequence
  source 1..2022: mol_type = other DNA
atggcaaaaccagcacagggggcaaagtataggggcagcatccatgactttcccggatttgaccctaatcaggatgcagaagctctctatactgcgatgaaaggcttcgggtctgacaaggaagcaatactggacattattacaagccgatccaaccggcaacggcaggaagtgtgtcaatcatataaatctctgtacggtaaagacctgatcgccgatctcaagtatgaattaacaggaaagttcgagaggctgattgtgggactgatgagacctcccgcatattgtgatgccaaggaaatcaaagacgcaatctctggaatcgggacagatgagaagtgccttattgaaattctcgcctctcgcacaaatgaacaaatgcaccagcttgtcgcagcatacaaggatgcctacgagagggaccttgaagctgatattattggcgatactagcggacattttcagaaaatgcttgttgtgctgctacaaggcaccagagaggaagatgacgtcgtaagcgaagatcttgttcagcaggacgtgcaggacctctacgaagcaggggagctgaagtggggtactgacgaagcacagttcatttacattctgggcaaccggtctaagcaacacctaagacttgtgttcgatgaatacctgaaaaccactggaaagccaatagaagccagtattcgtggggagttgtccggagacttcgagaaacttatgctggctgttgtcaagtgtattagaagcacccctgaatacttcgcagagcgattgtttaaggctatgaaaggcctcggcacccgcgacaacacattgatcagaatcatggtcagccgttctgagctggacatgttagacatcagagagatttttcgcactaagtacgagaagtccctgtactctatgatcaagaacgacacctccggagagtataagaagacattgttgaaactcagcggaggcgatgacgacgcagcaggtcagtttttcccagaagccgcacaggtggcatatcagatgtgggagctgagtgcagtggctagagtcgagctcaagggcaccgtccgccctgccaacgatttcaatccagacgcagatgccaaagcactccggaaggccatgaagggcctgggtactgacgaggacacaatcatcgatatcattacgcataggtctaacgtccagcggcagcaaattcgacagacctttaagtctcacttcgggagagaccttatgactgacctgaaatcggagataagcggagacctggctcgccttatactcgggttgatgatgcctcctgcacactatgatgccaagcagctgaagaaagctatggaaggagccggtacggacgagaaggctttgattgagattctggccaccagaaccaatgctgagattcgtgctattaatgaagcttacaaggaagactaccacaaatctctggaggacgctctgtcctccgatacatcagggcactttcgcaggattctgatctctctcgccacgggacatcgcgaagaggggggtgagaatctggatcaggcccgtgaggatgcccaagtagccgcagagatactcgaaatcgccgatactccgtccggcgataaaaccagtttggagactagattcatgacaatactgtgcacaaggtcctacccccacctgcggagagttttccaggagttcataaagatgacgaattatgatgtcgagcatactataaaaaaggagatgtccggggacgtgcgggacgcattcgtggctattgtgcaatctgtgaagaacaaacctctgttcttcgccgacaagctatataaatccatgaagggcgctggtaccgatgagaaaaccttgacccggatcatggtttcccggtccgagatcgacctactcaacatacgaagagaatttatagaaaaatatgataagagcctccaccaggctatcgaaggagatacaagtggcgatttcctaaaggctttactggccctctgcggaggcgaggactag

SEQ ID NO: 214562 - DNA, 2004 bp, synthetic construct
  misc_feature 1..2004: note = Description of Artificial Sequence: Synthetic coding sequence
  source 1..2004: mol_type = other DNA
atggccaagccagcgcagggagccaagtacaggggaagtatacacgacttccccggattcgacccgaaccaggacgccgaagcgctgtatacagctatgaagggtttcggctctgacaaggaagctatcctggatatcatcaccagcaggtcgaaccgccagagacaagaggtgtgtcagtcctacaagagtctctatggaaaggatctgatcgccgatctcaagtacgagcttacgggaaagttcgagcgtctgatagtgggattgatgcgcccacctgcttactgcgacgcaaaggagattaaggatgccatcagcggtataggaactgatgagaaatgtttgatagagattctcgccagtcgaaccaacgagcagatgcaccagcttgtggctgcctacaaggacgcatatgaacgggacctcgaagcagacattattggcgacacctcaggtcatttccagaaaatgcttgtggtactcctgcagggcacccgggaggaggatgacgttgtctctgaggaccttgtgcagcaggatgtgcaggacctgtatgaggccggagagcttaagtggggcacagacgaggcccagttcatttacatattgggaaacaggtcaaaacaacacttacgccttgtgtttgatgaatatttgaaaaccaccggaaagcccattgaggctagtattcggggagagctcagcggggatttcgagaagctgatgctggccgtcgtgaaatgtatccggtccacacccgaatattttgcagaaagacttttcaaggccatgaagggcctgggtacaagagacaacacactcatcagaatcatggtcagcaggagtgaactcgacatgttggacattcgggaaatattccggaccaagtacgagaaatcactgtatagtatgatcaaaaatgatacgagcggcgaatacaaaaaaacgttactcaagctctccgggggtgatgacgacgctgctggtcaattcttcccagaagcagcgcaagtcgcgtatcaaatgtgggaactttcagcagtagcgcgagtcgagcttaagggaacagtacgacctgccaatgacttcaacccagatgcggacgcgaaggccctgcgtaaggctatgaaaggcctcggcacagatgaagacactatcatcgatataatcacacacagatccaacgtgcaacgccagcaaatacggcagactttcaaatcgcactttggcagagaccttatgactgacttgaagtctgaaatctctggggatctcgcccgtctaatccttggcctgatgatgccgcctgcccactatgatgcaaaacagctgaagaaagccatggagggagccggtaccgatgagaaagctctcattgaaattttagcgacaagaaccaacgcagagatccgcgctattaacgaggcttacaaggaggattaccacaaaagtctcgaagatgcacttagcagcgatacatcgggtcatttccgaagaattctgatcagtctcgcaactgggcaccgtgaggagggcggagagaatcttgaccaagccagggaggatgcacaggagattgccgacacccccagtggggacaaaacatctcttgagactcgttttatgactatcctgtgcactcgctcttacccccatctcagacgtgtttttcaagaatttattaagatgaccaattacgacgtcgagcacactattaaaaaggagatgtccggtgacgttagagacgcatttgtggctattgtacagtccgttaaaaacaagccactctttttcgctgataagctgtacaaaagtatgaaaggcgcaggtactgacgagaaaactcttacaagaatcatggtttctaggagcgagattgatttactgaacatccgcagagaattcatcgagaaatatgataagagtctacaccaggccattgagggtgatacctcaggggactttcttaaagctctactggcactctgcggaggagaagattag

SEQ ID NO: 214563 - DNA, 333 bp, synthetic construct
  misc_feature 1..333: note = Description of Artificial Sequence: Synthetic coding sequence
  source 1..333: mol_type = other DNA
atggccaaaccagcccaaggcgcaaagtaccggggttccattcacgactttcctgggtttgatccgaaccaggacgcagaagcgttgtataccgccatgaagggcttcggttcagacaaagaggctattctggatatcatcacaagccgaagcaatcgacagagacaagaagtatgtcaatcttacaagtccctttatggcaaagatctgatcgccgatctcaaatatgagctgactgggaaatttgagcggctgattgtcgggctgatgcgccctcctgcatattgtgacgccaaagaaataaaggatgctatctctggaatcggcacttag

SEQ ID NO: 214564 - DNA, 1926 bp, synthetic construct
  misc_feature 1..1926: note = Description of Artificial Sequence: Synthetic coding sequence
  source 1..1926: mol_type = other DNA
atgaaaggcttcggctccgacaaggaagcaattctggatatcatcaccagcaggtcgaataggcagaggcaggaagtatgtcagtcctacaagtctctgtacgggaaagatctgatagctgatctaaagtatgagttaacaggaaaattcgaaagattgatagtggggttgatgcggcctccagcatactgcgacgccaaggaaataaaggacgctatctccgggatcggcacggatgaaaagtgcctgatcgaaatactcgccagtagaacaaacgagcagatgcaccagctggtggccgcttataaagacgcctatgagcgggacctggaggcagacattattggcgacacttcaggacactttcaaaagatgttggtcgtcctgttgcaagggacaagagaagaagatgatgttgtttccgaggatttggtacagcaggatgtccaggacctctacgaagctggggaactcaagtggggcactgacgaagctcagttcatctacatcctaggaaaccgctcaaagcaacatctacggctggtgttcgatgagtaccttaaaaccaccgggaagccgatcgaagcttccattagaggggagctgagtggggactttgagaagctcatgctcgcagtcgtgaagtgtatccgctctacaccggagtattttgctgaacgtttgttcaaggcaatgaaagggctcggcacccgggataatacactgattcggataatggtttcgagatctgaattagacatgctggacatccgcgagatcttccgaactaagtacgaaaaaagcctgtacagcatgattaagaatgacactagcggcgagtacaagaaaacgctgttgaagcttagcggcggagacgacgacgccgcaggccagttctttcctgaggctgcccaagttgcgtatcagatgtgggagctgtccgccgtggctagagttgagctgaaaggcaccgtgcgtcctgcaaatgatttcaatccggacgcggacgccaaggctttgaggaaggcaatgaaggggcttggaacagatgaggatactattatcgatattattactcacagaagcaacgtgcagcgccagcagatacgccagactttcaagagccattttgggagggatctcatgactgatctgaagtcagagatcagtggagacctggcacggctgatcctagggctgatgatgcctccggcacattatgacgccaaacagctgaaaaaggctatggagggggctggaacagatgaaaaggccctcatagaaatcctggctacgcgaactaacgccgagatcagagcaataaatgaagcctacaaagaggactaccataagagcctggaggatgcgctttcgagcgataccagcggccattttcgtcggatcttaatctccttagcaacaggtcacagggaagaggggggagagaatttggaccaggcccgtgaggacgcgcaggtagcggctgaaatcctcgagatcgcagacacaccttccggagataagacttctctagagactcgctttatgaccatcctgtgcacgcggagctacccacacttgcggagggtttttcaggagttcatcaaaatgaccaactacgacgtcgaacatacaattaagaaggagatgtcaggagacgttagggacgcatttgtggcgattgtacaatctgttaaaaataaaccgctgttcttcgcagacaagctatacaagagcatgaagggcgcagggaccgatgagaagaccctgacacggatcatggtgtctagatccgagattgacctgttaaatattagacgggaattcatcgagaagtacgataagtcactccaccaagctattgagggtgatacaagcggggattttctgaaggccttactggcactgtgtggcggagaggactag

SEQ ID NO: 214565 - DNA, 1644 bp, synthetic construct
  misc_feature 1..1644: note = Description of Artificial Sequence: Synthetic coding sequence
  source 1..1644: mol_type = other DNA
atgcatcagctggtggcggcatataaagacgcatatgagcgcgacctcgaggcagatatcatcggggataccagcggccattttcagaagatgctggttgttctcctacaggggacacgggaagaggatgacgtcgtatcggaggatcttgtccaacaagacgtacaagatctctacgaggccggagagctgaagtgggggaccgacgaagctcaattcatttatatcttgggcaataggagcaaacagcacctgagactcgtatttgatgagtatttgaagaccactgggaaacctattgaagcctcaatccgcggagaacttagtggcgactttgaaaagcttatgttagccgtggttaagtgcataagatctacccccgagtatttcgcggagagactattcaaggcgatgaaaggccttggcacccgggacaacacactgattcgaattatggtatcaaggagcgagttagatatgctcgacattagagagatcttccgtaccaagtatgaaaaatcactgtattcaatgatcaagaacgacaccagcggcgagtacaagaaaacccttctgaaattatccggaggcgatgacgatgcggctggtcaattttttccagaggctgcccaggtggcctaccagatgtgggagcttagcgccgtggcacgcgtggagctcaaaggaacagtgcggccagccaatgatttcaatcctgatgctgacgccaaagctctgcgaaaggctatgaaagggctcgggaccgacgaagatacgataatcgatattatcacacacagaagtaacgtacagaggcagcaaattcgtcaaactttcaaatctcattttggcagggatctcatgacagatttaaagagtgagatttcaggagacctggcccgacttatcctcggccttatgatgccgcctgctcattacgatgctaaacagttaaaaaaggctatggaaggcgcaggcaccgacgaaaaggctctgattgagatcttggcgacacgcaccaatgctgaaatacgcgcaataaatgaggcttataaggaagattaccacaaaagcctggaagacgctctgagttccgacacatctggccacttcagaaggattctaatctctctcgcaaccggacacagggaggagggtggcgagaatcttgaccaggctagggaagacgcccaggtggcagccgagatcctggaaattgctgacacaccttcgggggacaaaaccagcctggagaccaggttcatgacgatcttgtgcacaagatcatacccacacctgcgccgtgtgttccaggagtttattaaaatgactaactacgatgtcgaacataccatcaaaaaggaaatgtcgggcgatgtccgagacgctttcgtagccatcgtccagagtgtcaaaaacaagccattgttttttgccgacaaactgtacaagtccatgaaaggcgcaggaacagacgagaagaccctgactagaatcatggtcagccgttctgaaatcgatctgctcaatattcggcgagaattcatcgagaagtacgacaaaagcttgcaccaggcaatcgaaggcgatacctctggagacttcctgaaggccctgctggccttatgtggaggggaagattag

SEQ ID NO: 214566 - DNA, 1467 bp, synthetic construct
  misc_feature 1..1467: note = Description of Artificial Sequence: Synthetic coding sequence
  source 1..1467: mol_type = other DNA
atgagttaccctgggtacccaccaaccggataccccccatttccgggttatccacccgctggccaggagagttcctttccaccctccggtcagtacccatatcctagtggattccctccaatgggagggggagcctatccacaagtgccctcctccgggtacccaggagccggaggctaccctgcaccagggggatacccagctccgggaggctacccgggagcacctcagccaggcggtgcacctagctatcctggagttcccccaggacagggattcggggtgccaccgggtggcgctggattctcagggtatccccagcccccatctcagagctatggcggtgggccagctcaggtgcctctgccaggaggcttccctggtggccagatgccatctcaatatccaggtggccagccgacctatccttcccagatcaacaccgattcttttagttcttacccagtgttcagtccggtgtctctggattatagcagcgagccagccaccgttactcaggttacacaaggaactattcggcctgcagccaatttcgatgccatccgggatgccgaaattctgcggaaggccatgaaggggtttggtacggatgaacaagccatcgttgacgtggtggccaaccggtccaacgaccagcgccaaaaaattaaagcggcatttaagacgtcgtatgggaaagacctcataaaggacctgaagagtgaattgagcggcaacatggaggagctgatcctggcactgtttatgcccccaacctattatgacgcctggtccctgaggaaagctatgcagggcgcaggcactcaggagagagtgctcatcgagatcttatgcacaagaacaaaccaggaaatccgtgagattgtaaggtgttaccagagcgagttcggccgtgaccttgagaaggacataaggtctgacacatctggtcacttcgagagactgctcgttagtatgtgccaggggaatcgggacgaaaaccaaagcataaatcaccagatggctcaagaggacgctcagcgcctgtatcaggctggtgagggaaggctcggcactgatgagagctgtttcaacatgattctggccaccaggtcatttccccagctcagggcaacgatggaagcttactctcggatggccaaccgggatttgctgtcaagtgttagcagggaattctcaggttacgtcgaatcgggccttaagacaattttgcagtgcgcgctgaacagacctgcgtttttcgcagaaagactctactacgccatgaagggtgcaggaacagatgactccactctggtgcgcattgttgtgacccggtctgagatcgacctggtgcaaatcaagcagatgttcgcacagatgtaccagaagacactgggcaccatgattgccggagacacaagcggcgactacaggcgccttcttttagcaatcgtggggcagtag

SEQ ID NO: 214567 - DNA, 1401 bp, synthetic construct
  misc_feature 1..1401: note = Description of Artificial Sequence: Synthetic coding sequence
  source 1..1401: mol_type = other DNA
atgtcctacccaggctaccctccaacaggctatcctccatttcccggttatccaccagccggacaggaaagcagctttccacctagcgggcagtatccttacccatcagggttcccaccgatgggagggggagcctatccacaggttccttctagtgggtacccaggagcagggggataccccgcacccggtgggtatccggcaccaggcggatatccaggggcaccccagcccggaggtgctcccagctaccccggtgttcctccagggcaagggttcggagtcccgcctggtggtgcgggtttcagtgggtacccccagcctccttctcaaagctatgggggtggcccagcccaagtacccctccctgggggatttcctggtggtcaaatgcccagccagtatccaggtggccagccaacctatcccagtcagccagcaacagtcactcaagttacccaggggactatccggccagccgcaaacttcgacgccatccgggacgccgagatcctgagaaaggcaatgaaaggattcgggactgatgagcaggccatcgtggacgtagtggctaaccgctctaacgatcagcggcagaagataaaggcagccttcaagacaagctacggtaaggacttgattaaagacctcaaaagcgagttgagtggcaacatggaagagctgattcttgcactctttatgccacctacatattatgatgcatggagcctgcgaaaagctatgcagggcgcaggtactcaggaaagggtgctgatcgagattctttgtacaaggacgaaccaggaaataagagagatcgttcgttgttaccaatctgaatttggcagagacttggagaaggatatcaggagcgataccagtgggcatttcgagcgcctgctcgtctcgatgtgtcagggcaacagagacgagaaccagtccataaaccaccagatggcccaggaagacgcccagcgattataccaagccggtgaaggccgactgggcaccgatgaaagctgtttcaatatgattctggccaccagaagtttccctcagttaagagccaccatggaggcatattctcgaatggcaaatcgtgacctgttgagcagtgtgagtcgggagttcagcggctatgttgagtccgggctcaaaactatcctccaatgcgcgctgaatcggcctgctttctttgccgagaggctgtactacgcaatgaagggggctggcacagatgatagtacgctggtgcgtatcgtggtcacccgcagtgagattgatttggttcagattaaacaaatgtttgctcaaatgtaccagaagacactcggtacaatgatcgcaggtgatactagtggggattaccgaagactgctgcttgccatagtgggtcagtag

SEQ ID NO: 214568 - DNA, 435 bp, synthetic construct
  misc_feature 1..435: note = Description of Artificial Sequence: Synthetic coding sequence
  source 1..435: mol_type = other DNA
atgtcgtaccctggctaccccccaacagggtacccaccttttcctggatacccaccagcaggacaagagtctagtttcccccctagtggacagtacccatatccgagtggatttccacccatgggaggaggcgcttatccccaagtgcctagtagtggctatcctggagctggcggatatcccgcacccggaggctatccagcccctggcggatatcccggtgccccacagcccggtggtgctccaagctaccccggtgtgcctcctggccagggtttcggcgttcctcctggtggcgctggttttagcggatatccacagcctccatctcaatcttatgggggaggtcctgcccaggtccctcttcctggcggatttcctgggggtcagatgccgtcacagtatccaggaggacagccaacgtacccaagctag

SEQ ID NO: 214569 - DNA, 1011 bp, synthetic construct
  misc_feature 1..1011: note = Description of Artificial Sequence: Synthetic coding sequence
  source 1..1011: mol_type = other DNA
atgccctctcagtatccagggggacagcctacttacccaagccaacctgccacggtgacccaagtcacccaaggtaccatccggccagccgctaactttgacgccataagggatgcagagatactgcgtaaagcaatgaagggattcgggactgacgagcaggctatcgtcgacgtggttgctaacagatctaatgaccagcgccaaaaaatcaaagccgcattcaaaaccagctatggcaaggatctcattaaggacctgaagtcagaattatccggcaatatggaggagttaattctcgctctttttatgccaccaacgtattatgacgcttggagtttgcggaaagcaatgcaaggagccggaacgcaagagcgcgtcctcatcgaaatcctctgtactcgcaccaaccaggagatccgcgaaattgtgcgctgctaccagtctgaattcggtcgcgatctcgagaaagatatccgctcggacacaagcggtcactttgagcgcctgcttgtctctatgtgccagggcaatagagatgagaaccaatctattaaccatcagatggcccaagaggatgcccagcgcctttaccaagcaggcgaaggcagacttggcacggatgagagttgcttcaacatgattctggccactagatcatttcctcagcttagagccactatggaggcgtacagtcgcatggccaaccgtgatctgctctcttccgtgagtcgcgaattctccggatatgtcgagtcagggctgaagacaatcctgcagtgtgccctgaaccgaccggcattctttgccgagagactgtactacgctatgaagggcgcagggacagacgactccacgctggtacgtattgtggtcactcgttcagagattgacctggtgcagatcaagcagatgtttgcacagatgtaccaaaagactctgggaacaatgattgctggcgatacttcgggtgattaccgcagactcctactggcaattgtgggacagtag

SEQ ID NO: 214570 - DNA, 984 bp, synthetic construct
  misc_feature 1..984: note = Description of Artificial Sequence: Synthetic coding sequence
  source 1..984: mol_type = other DNA
atggcatggtggaagtcatggattgaacaggaaggggtgacagtgaagtcctctagccacttcaaccctgacccagacgcagagaccctttataaggctatgaagggaattgggacaaatgaacaggccataatcgacgtgttaactaaacgctctaacacccagaggcagcaaatcgcaaagtcctttaaggcccaattcgggaaggacctgaccgagactctcaagagtgaactgtccggcaagtttgagcgcctgattgtggccctgatgtatccaccctatcggtacgaggcgaaagagctccatgatgccatgaaagggctgggaactaaagagggggtgattatcgaaattctggctagccgaaccaagaatcaactccgcgagataatgaaagcctatgaagaagactatggctcctcgcttgaagaggacatacaggcggacacttctggctatttggagaggattttggtgtgtctgttacagggtagccgagatgacgtgagtagctttgttgacccgggactagcactccaggacgctcaagacctgtatgcagccggagagaagatccgtggcacggacgaaatgaaattcatcacaattctgtgtactcggagtgccacccatctgctgagggtctttgaggagtacgaaaagatcgcaaacaagtcaattgaggacagcataaagtctgagacccacggctccctggaagaggccatgttgaccgtcgtgaaatgtacccaaaacctgcattcctatttcgcagagcggctgtattacgcgatgaagggagctggaacacgcgatggtaccttgatcaggaatattgtgtctcggtccgagatcgaccttaatctgattaaatgccactttaagaagatgtacggaaaaaccctgagttcaatgatcatggaggatacaagcggcgactataaaaacgcattgttatcactcgtagggtcagacccttag

SEQ ID NO: 214571 - DNA, 831 bp, synthetic construct
  misc_feature 1..831: note = Description of Artificial Sequence: Synthetic coding sequence
  source 1..831: mol_type = other DNA
atggcctggtggaagtcttggatcgaacaagaaggcgtgacagttaagtcatcgtctcattttaacccggatccagacgctgagacactgtataaggcgatgaagggaatcggggttggctctcaactcctctcccaccaggctgctgccttcgcatttcccagcagcgctctgaccagcgtgtctccatggggacagcagggccacctttgctgcaatcctgccggtaccaatgagcaggcgataatcgatgtgctgacaaagcgatccaacactcagaggcaacagatcgcgaaaagctttaaggcgcagtttggtaaggacctgacggaaaccctcaagagcgagttgtccggcaaattcgaaagactgattgttgcactcatgtaccccccatacaggtacgaagccaaggaactccacgacgcgatgaagggaagcagagatgacgtcagctctttcgtagacccagggctggccctccaagatgcccaggatttatatgctgcgggagaaaaaataaggggaaccgatgagatgaagttcatcacaatcctgtgcaccagaagtgcaacccatcttctccgcgtgaagtgcacacagaatctgcatagctatttcgctgaacgtctctactacgcaatgaagggtgctgggactagggatgggaccctgattcgcaatatcgtgtctagaagcgagatcgacctcaacttgatcaaatgtcactttaagaagatgtacggaaagacactcagctcaatgattatggaagacacgtctggggactacaagaacgctcttctttctttggtggggagtgatccatag

SEQ ID NO: 214572 - DNA, 798 bp, synthetic construct
  misc_feature 1..798: note = Description of Artificial Sequence: Synthetic coding sequence
  source 1..798: mol_type = other DNA
atggcctggtggaaaagctgggacctgactgagactctgaaaagcgaactctccgggaaatttgaaagactaatcgtagcgctgatgtatcctccatacagatacgaagctaaggagctacatgatgctatgaaaggtcttggtactaaggagggagtcatcattgaaatcttggcaagcagaaccaagaatcagctcagggagatcatgaaggcgtatgaagaggactacggtagcagccttgaggaggatatacaggctgacacctccgggtacctggaacgtatcttagtttgtctgctgcaagggagccgcgacgatgtctcttcgttcgtggatccagggctggccctgcaagacgcccaagatctctacgcagctggtgaaaaaatacggggtacagacgagatgaagttcatcactattctttgcaccaggtcggctacacacctgctaagggttttcgaggagtacgagaaaatcgcaaataaatcgatagaagatagcatcaaaagtgagacccatgggagtctggaagaggccatgctgaccgttgtgaagtgcacccagaacttgcatagctactttgcagagcgactgtattatgctatgaaaggagcgggaacccgcgatggcacacttatcagaaatatcgtctcacgcagcgagattgacctgaatttgataaagtgccatttcaagaaaatgtatgggaagacactgtcttccatgatcatggaggatacttcgggcgattataaaaacgcactcctgagcctggtggggtccgatccatag

SEQ ID NO: 214573 - DNA, 426 bp, synthetic construct
  misc_feature 1..426: note = Description of Artificial Sequence: Synthetic coding sequence
  source 1..426: mol_type = other DNA
atggcctggtggaaaagttggatcgaacaggaaggcgtcacagtaaagtcgagcagccactttaacccagatcccgatgccgaaaccttgtataaggccatgaagggcatcggcactaatgaacaggcaatcattgatgtcctgacgaagcgcagtaacacccagcggcagcagatcgcgaaatccttcaaagcccagtttggcaaggacttgaccgagacgctcaaatccgagctgagcgggaagtttgagcgtctgattgtcgccttgatgtatccaccctaccggtacgaagccaaagaacttcatgacgcgatgaaaggactgggaaccaaggagggcgttataatcgagatcctcgccagtaggaccaagaatcagctccgggagattatgaaagcttacgaggaggggcagcaggggtag

SEQ ID NO: 214574 - DNA, 1038 bp, synthetic construct
  misc_feature 1..1038: note = Description of Artificial Sequence: Synthetic coding sequence
  source 1..1038: mol_type = other DNA
atgtcagtcaccgggggtaagatggcccctagtcttacccaggaaattctgagccacctaggtctggcgagcaaaacagccgcttgggggactttagggaccctgagaaccttcctgaatttttccgtcgataaggatgcacagcgcttgctgagggcaatcacaggacaaggggtcgatcgttccgccattgtggacgtcctgactaaccggtcacgggaacagcgtcaactgatttcccggaattttcaggaaagaactcagcaagacttaatgaagtcattgcaggcggctctgtctggaaatctggaacgtattgtgatggcattgcttcaacccactgcccagttcgatgctcaagagctacgcaccgccctgaaagcttccgattccgcggtggatgtggctattgagatcttggcaactagaacccctcctcagctgcaggagtgtctcgccgtgtacaagcataatttccaggtagaggccgttgacgacataacctcagagaccagcggtattcttcaggatctgctgctagctctcgctaaaggcggtcgggatagttatagtggtatcatcgattataatctggcagagcaggacgtccaggccttgcaaagggccgaagggcctagtcgggaggaaacctgggttccagtgttcacccagagaaaccccgagcatctaatccgcgtgtttgaccagtaccagaggtcaacagggcaagagctcgaggaggccgtccagaacagatttcacggggacgcacaggtagcattactgggattggctagtgttatcaaaaacacacctttatattttgccgacaaactccaccaggccctgcaggaaacggagcctaattaccaggtcctgatccgaattctgattagcagatgcgagactgatttgctgtccattagagcagaatttcgcaaaaaattcgggaagtcactctacagttccctgcaggatgcagtgaaaggggattgtcagtctgccctactggccctctgtagagctgaggacatgtag

SEQ ID NO: 214575 - DNA, 1929 bp, synthetic construct
  misc_feature 1..1929: note = Description of Artificial Sequence: Synthetic coding sequence
  source 1..1929: mol_type = other DNA
atgctgacacgcccttcccaggtgctattgaactcgctgtccgtggatcccgacgccgagtgtaagtatggtttgtactttagagatgggaggaggaaggtcgattatattcttgtgtatcaccacaaaaggccctctgggaatcgcacgctcgtgcgcagggtgcaacactctgacactccatctggggcacgcagcgttaagcaggatcaccccttaccgggtaagggtgcctcactggacgctgggtctggagagccgccaatggattatcacgaggacgataaacggttccgcagggaggaatatgagggcaaccttctcgaggctggtttggagcttgagagggatgaggacactaaaatccacggcgtcggctttgtcaaaatccatgcgccttggaatgtgttgtgtcgggaggctgagttcctaaaactgaaaatgccgaccaagaagatgtatcacatcaacgagacacgtggactgctgaaaaagattaattctgtcctgcagaaaattactgaccctattcagccaaaggtggctgaacaccgcccacaaactatgaagagactgtcttacccattttcccgcgaaaagcagcacttgtttgacttgtctgacaaggattcattctttgattccaaaacgagatccacgatcgtgtacgaaatcctgaaacgaactacctgtacgaaagccaaatattctatggggatcacaagcttactcgctaacggcgtgtatgcagccgcatacccactgcacgatggagattacaacggggagaatgtggaatttaacgataggaagttgctctacgaggaatgggcccgatacggagtgttctacaaatatcagccaattgatctggtccgcaaatactttggtgagaagatcggattgtacttcgcatggttgggagtatacactcagatgcttattcccgcatccattgtaggcataatcgtgtttctctacggatgcgcgaccatggatgagaacattccttccatggagatgtgcgaccaacgccataatatcaccatgtgtcctctgtgcgacaaaacatgctcctactggaaaatgtcgagtgcctgtgccactgcgagggcttcccacttattcgacaacccggcaactgtcttcttcagcgtgttcatggccctgtgggcagccacatttatggaacactggaaacgcaaacagatgagactaaattaccgatgggacttgaccggtttcgaggaagaggaggatcaccctcgtgcagagtatgaagctagagttctggaaaaaagcctcaagaaggaaagccgcaataaagagactgacaaggtgaagctgacatggcgcgatagatttccagcatatctgactaacctggtctccatcatcttcatgatcgccgtgacttttgccatagtattgggcgtcatcatctacagaatctcgatggctgcagccctggccatgaacagctctccttcagtgcggtcaaacatccgtgttacagtgacagcgacagctgtgatcattaatctagtcgtcataatcctgctcgacgaagtgtacgggtgcatagccaggtggctgaccaagattgaggtgcccaaaaccgaaaaaagcttcgaggaacgcctgatcttcaaagccttccttcttaagtttgtcaattcttatacccctattttctatgtggcgtttttcaaaggccgattcgttggaagacccggagactacgtctacatattccgcagctttaggatggaggaagtgacagagatccttttcattagtgggagccctttctgtttagcctacgacttatccactccatgcacgtgggaaaaacagttgcagcatatctgttccgcgaagtcttcaagatttttgagcttcctcctcgagacttttctgtttccctag

SEQ ID NO: 214576 - DNA, 2961 bp, synthetic construct
  misc_feature 1..2961: note = Description of Artificial Sequence: Synthetic coding sequence
  source 1..2961: mol_type = other DNA
atgcgggtaaacgagaagtatagcacccttcctgccgaagaccggtcagtccacataatcaatatttgtgccatcgaggacatcggctacctcccctctgagggtaccctgttaaacagtttgtcggtggaccccgatgcggagtgcaaatacggactttactttcgagacggcagacgaaaagtcgattatatactggtgtatcatcacaaacgccctagcggcaaccgtacattagtcaggagggtgcagcactctgacacgccttctggggcacgctccgtcaaacaggaccatccattgccagggaagggcgctagccttgatgccggatccggggaacccccaatggactatcacgaggacgacaagaggttcaggcgggaggaatacgaggggaatctgttggaggccggacttgaactcgagcgggatgaagatacgaaaatccatggagtgggatttgtcaaaatccatgcaccttggaacgtgctgtgtagagaggctgagttcctcaaactcaagatgccaacaaaaaaaatgtaccacatcaacgagacacggggtctgctcaaaaagattaatagtgtgcttcagaaaattactgaccccatccagccgaaagtagccgagcatcggcctcagactatgaaaagactgtcctatccattctcaagggagaaacagcacttgttcgacctgagtgacaaagacagcttcttcgacagtaagaccagatccacaatcgtgtacgagatactcaagcgaaccacatgcacaaaggcaaagtattccatggggataacttctttgttagccaatggcgtttatgccgcagcctacccgctgcacgatggcgactacaacggtgagaacgtggagttcaacgatcggaagctgctctatgaggaatgggccaggtatggcgtgttttataagtatcagcctattgacctagtcagaaagtattttggggagaaaatcggtctgtactttgcttggcttggtgtgtacacacagatgcttatccctgcaagcatcgtaggcataatcgtttttctgtacggatgcgcaaccatggatgagaatatcccgagcatggaaatgtgtgatcagcgccataacatcacaatgtgtcctctctgtgataagacctgtagttattggaaaatgtcatccgcctgcgctactgcccgtgcctctcacctattcgacaatccagcaaccgtgtttttctctgtattcatggcactgtgggccgctacctttatggagcattggaaaagaaagcagatgagactgaactataggtgggacctaaccggctttgaggaagaggaggaggctgtgaaagatcatccacgcgctgagtatgaagcgagagttctcgagaagtcacttaaaaaggagtcaagaaataaggagaagcgtcgccacatcccagaggagagcactaataagtggaaacagagggtgaagactgccatggcaggagttaaattgaccgataaggttaagttgacttggcgtgacaggttccccgcatacctgaccaatctcgtgtcaattattttcatgattgccgtaaccttcgccatagtccttggtgtgatcatttacagaatctccatggccgctgctcttgcaatgaactccagtcctagcgttagatccaacatccgggtgaccgtgaccgctaccgccgtgattattaacttggtggtgattattttgctggacgaggtgtacggctgcatcgcccgttggctgaccaagattgaggtcccaaagacagagaagagcttcgaggagcgcctcattttcaaagccttcctgctgaagttcgttaactcgtacacacctatcttctacgttgcgttcttcaaaggaaggttcgtaggacgaccaggcgattacgtttatatctttaggtcttttaggatggaagagtgcgccccagggggatgcctgatggaactttgcattcagttgtcgattatcatgcttggtaagcaacttatccagaacaacttgttcgagatcggaataccgaaaatgaagaaactcatccgctatctgaagttgaaacagcagtctccacccgaccacgaggaatgtgtcaagcggaaacagaggtatgaagtggactataatttggagccattcgcaggcctgacacccgagtacatggagatgatcatccagttcggctttgtgacccttttcgtcgcatcctttcctctggcgcctctgtttgccttgttgaacaacattatcgaaatacggttagacgcgaagaagttcgttacagagctccgcagacccgttgctgttcgcgctaaagacatcggcatctggtacaacattctgcgtggtattggcaaactagcagtaataataaacgccttcgtgattagctttaccagcgacttcataccgaggctggtttacttgtacatgtattccaagaatggtaccatgcatggtttcgtcaaccatacactgtctagttttaacgtgagcgattttcagaacggaaccgcccctaacgaccctctcgatcttggctacgaggtccagatttgtaggtataaggattacagagagccaccctggtcagaaaataaatatgacatctcgaaggacttttgggctgtcttggcagcccgtcttgctttcgtgatcgtgttccagaaccttgtaatgttcatgtccgacttcgtcgactgggttattcctgatataccgaaggatataagccaacagatccacaaagaaaaggttctcatggtcgaactgttcatgcgagaggaacaagacaaacagcagctgttggagacatggatggagaaggagcggcaaaaagatgaacctccatgcaatcatcataacacaaaagcctgccctgacagccttgggtccccagctccttcacatgcttatcatggaggagtgctatag

SEQ ID NO: 214577 - DNA, 2523 bp, synthetic construct
  misc_feature 1..2523: note = Description of Artificial Sequence: Synthetic coding sequence
  source 1..2523: mol_type = other DNA
atggattatcacgaagacgataagaggtttcggcgagaggagtacgaggggaacctactggaggcaggactcgaattagagcgtgatgaggacactaagatacatggcgtgggcttcgtcaaaatccatgcaccatggaacgtactatgcagagaagccgagttcttgaagttaaagatgccaactaaaaaaatgtaccacataaacgaaactcggggtttattaaaaaaaattaattccgttctccagaagatcaccgaccctatccagcccaaagttgccgagcacagaccacagactatgaaacgcttgtcttaccccttttctagagagaagcagcatctgtttgatttgtctgataaagattcttttttcgactcgaaaacaaggtctacaattgtgtatgagatactcaaacgcaccacttgcactaaggctaaatactctatgggtattacatccctgctcgcaaatggcgtgtatgctgctgcctacccactccatgatggggactacaatggcgagaacgtggagttcaacgaccgcaagcttctttatgaggaatgggcgagatacggagtgttttacaagtaccagccaatcgacctcgtgagaaaatactttggggagaagattgggttgtacttcgcctggctgggtgtatacacacagatgctgatccctgcgtcgatagtggggatcatcgtctttttgtacggatgtgccactatggatgaaaacattcccagtatggagatgtgcgaccaaagacacaacatcactatgtgcccactctgtgataagacctgtagctactggaaaatgtcaagcgcctgcgccacggccagggctagccatctgttcgacaatcccgcaactgtatttttctctgtatttatggctctgtgggcggctaccttcatggaacattggaaaagaaagcaaatgcgcttgaattatcggtgggacctgacaggattcgaggaggaggaagatcaccccagggctgagtatgaggcccgtgtgttagaaaaaagcctaaagaaggaatctaggaacaaagaaaccgacaaagtgaagttgacatggcgtgaccgcttccccgcatacctgactaaccttgtgtcaatcatttttatgatcgccgtgacattcgcaattgtactcggcgtgatcatttacaggatctctatggctgctgctctcgccatgaattctagccccagtgtgcgatccaacatcagagtgaccgtgacagcaacggcagtcattattaacctggtagtcatcatactactcgacgaggtatacggatgcattgctcgttggctcactaaaatagaagtacccaagactgagaagagtttcgaggagaggcttatcttcaaggcttttctgctcaaattcgtgaactcctatacgccgattttctatgtcgcattttttaaggggcgattcgtgggccgtccgggtgactacgtgtatattttccgcagctttcggatggaggaatgcgccccagggggatgtcttatggagctctgcatccagctcagcataatcatgctcggaaaacagctaatccagaataacctatttgaaatcggaataccaaaaatgaaaaagctgatcagatatttaaaacttaagcaacagtcgcctcctgatcatgaagagtgtgttaaaaggaaacagagatacgaagtggactacaatttagagcccttcgccggactgacgccagagtacatggaaatgatcattcaattcggttttgtgaccctattcgtcgcttccttccccctggccccactgtttgccctgcttaacaatataatcgagattaggttggatgcaaaaaaattcgtcacggaactcaggaggccagtggccgtgcgggctaaggatattggcatttggtacaacattctgcgtggcatcggcaagctcgccgtgatcataaacgcatttgttatcagcttcacatctgattttatcccaaggctcgtctatttgtacatgtattctaaaaacggaaccatgcatgggttcgtaaaccacaccctgagcagcttcaacgtgagtgactttcaaaacggtacggctccaaacgaccctctcgatttgggatatgaggtgcagatctgcagatataaagactaccgggaacccccatggtctgagaataaatatgatatcagcaaggacttttgggctgtactggcagctcgcctcgcatttgtcatagtgttccagaatctggtcatgtttatgtctgatttcgttgattgggtgatcccggacatccctaaggatatctcacagcagatccacaaagagaaagtgttaatggtggaactgttcatgcgggaggagcaggataaacagcagctgctcgaaacctggatggagaaggagcgccagaaggacgagcccccatgcaaccaccataatacaaaggcatgtccggactcgctaggctcccccgctcccagtcacgcgtaccatggcggtgtgctttag

SEQ ID NO: 214578 - DNA, 2523 bp, synthetic construct
  misc_feature 1..2523: note = Description of Artificial Sequence: Synthetic coding sequence
  source 1..2523: mol_type = other DNA
atggactaccacgaagatgacaaaaggtttagaagggaggagtatgagggcaatctcctagaagccggtctcgaactggagcgcgacgaggatacgaagattcatggcgttggatttgttaaaattcacgcgccatggaacgtattatgtcgagaggcggaatttctgaaactcaagatgcctaccaaaaaaatgtaccatataaatgaaacccgtggccttctgaaaaaaatcaattctgtgctacagaaaataaccgatccgattcagcccaaagtggctgaacaccggccacagaccatgaagaggctttcttatcctttctcaagagaaaaacaacacctcttcgatctctcagacaaggatagcttctttgattctaagactaggtcaactatcgtctacgagatccttaagcggaccacctgcaccaaggcaaagtatagcatgggaatcaccagcctattggccaacggagtctacgcagcagcatatcctctacatgatggcgactataacggtgaaaacgtggagttcaatgacaggaagctcctgtacgaggagtgggccagatatggggtcttttataaataccagcctattgatctcgttagaaagtacttcggcgagaagatagggctgtacttcgcatggctgggcgtgtacacacagatgctgatccctgccagcatcgtgggaatcatcgtcttcctgtacggctgcgcgaccatggacgaaaacatcccttcaatggaaatgtgtgaccaacggcataacatcacaatgtgtcctctgtgtgataagacatgttcatattggaagatgtcctctgcctgcgccaccgccagagccagccatctttttgataatcccgcaaccgtgtttttcagtgtgtttatggccctgtgggcagcaacttttatggaacactggaaaaggaaacagatgaggctgaattatcgctgggatctcaccggcttcgaagaggaggaagatcacccccgtgccgagtatgaagctcgcgtcctggaaaaatccctgaagaaggaaagtagaaacaaggagaccgataaggtgaaactgacctggagggatcgatttcctgcatatcttaccaatttggtgtcaatcatattcatgattgccgttactttcgccattgtcctcggtgttattatctacagaattagcatggccgctgccttggccatgaattctagtccttcagtccgatccaatattcgtgtcacggtcactgcgacggcggttatcattaatctggtggtgattatactcctagacgaagtgtacgggtgtatagccaggtggctgacaaagatcgaggttcccaagaccgaaaaatcattcgaagagagactgatcttcaaagcttttctcttaaaattcgtcaacagctatactcccatattttatgtggcctttttcaagggcaggttcgtcggccgtcccggtgactatgtgtacatcttcagaagctttcgtatggaggaatgcgctccaggcggatgtctgatggagctgtgtattcagctttcgattataatgcttggaaaacagcttatccaaaataacctgttcgagatcggtattcccaagatgaagaaactgatcaggtacctcaaacttaagcagcagtctcctcccgatcacgaggaatgcgtaaagagaaagcaaaggtatgaagtcgactataatctggaacctttcgctggcctcaccccagaatacatggagatgatcatacagttcggattcgtcactctgtttgtggcctcatttccgttggcgccactgtttgcccttcttaacaatattatcgagatcagactggatgctaagaagttcgtaacagaactgcggcgaccagtggccgttcgcgcaaaagacatcgggatttggtacaatatactgcgtggcattgggaagttggccgttatcatcaacgctttcgttatttcttttacttcagactttatcccccgtcttgtctacctgtatatgtattcaaaaaacggcaccatgcacggttttgtcaaccatacgctctcctcattcaacgtgtcagatttccaaaatggaacagctcccaatgacccactagacctaggatatgaggtgcaaatctgtaggtacaaggactatagagagcccccatggtcggaaaataagtacgacatcagcaaggatttctgggccgtgctggctgccagactcgccttcgtgatcgtctttcaaaaccttgtgatgttcatgtctgattttgtggactgggtcatccctgatattcctaaggatatttcacagcagattcacaaggaaaaagtgctgatggttgagctgttcatgagggaagagcaagacaagcaacaactgttggaaacgtggatggaaaaggagagacagaaggacgagcccccatgcaatcaccacaacacaaaggcctgtccagactcactgggctctcctgccccatcgcacgcctatcatggaggcgtactgtag

SEQ ID NO: 214579 - DNA, 2961 bp, synthetic construct
  misc_feature 1..2961: note = Description of Artificial Sequence: Synthetic coding sequence
  source 1..2961: mol_type = other DNA
atgagagttaacgaaaagtattctaccctgcccgcagaagataggtctgtgcatatcattaacatctgcgccatagaggatattggctacctcccctcagaagggaccttgctcaactctttgtcggtggacccagatgcagagtgtaagtacggcctgtattttagggacgggagacggaaagtcgactatatacttgtctaccatcataaaagaccttccgggaaccggaccctggtcaggcgggtgcaacactccgatacacccagcggagcgagaagtgtaaaacaggaccaccctctgcccggaaagggggcttcccttgatgccggatccggcgagccccctatggattaccacgaggatgacaaaaggtttcggagggaagagtacgaaggaaatctgctcgaagccggtcttgaactggaaagagatgaagacactaagatacacggggtgggtttcgtcaagattcatgccccatggaacgtcctgtgccgcgaagcagaattcctcaaattaaagatgccgacaaagaagatgtaccacattaatgaaaccagaggactgttgaagaagattaattccgtgttgcagaagatcacagaccccatccaacccaaagtggcagaacaccggccacagaccatgaagcgcttatcttaccccttttctagggaaaagcagcatctcttcgacttgagtgataaggattccttctttgactcaaaaacccggtcgaccatagtttacgagatactgaagcggacaacttgcacaaaggctaagtatagcatgggcatcacaagcttactcgccaatggagtttacgccgctgcctacccattgcacgatggcgactataacggagaaaacgttgagttcaatgacaggaagctgctgtacgaggaatgggccagatacggagtgttctacaaataccagccgattgatctggtgcggaagtatttcggagaaaagatcggactttatttcgcctggctgggtgtgtacacgcagatgctgataccagcttctatcgttggtattatcgtcttcctgtatggctgcgcaactatggacgaaaacatcccgtccatggagatgtgcgaccaacgacataatattacaatgtgccctctatgcgacaagacctgctcgtactggaagatgagctccgcttgtgccactgccagggcctcccatttgtttgataacccagccacggtatttttttcggtgtttatggccctctgggctgcaacttttatggaacactggaagagaaagcaaatgcgcctgaattaccgatgggacctgacagggttcgaggaagaggaaaaggccctcttggaccaccccagagccgagtatgaagccagggtcctggagaaaagcttgaaaaaggagagccgaaataaggaaaagagacggcacatcccagaagaatccacaaataagtggaagcagagagttaagaccgccatggcaggggtgaaactcacagataaagtgaaattgacttggcgtgacaggtttcctgcctacctaaccaatctggtctccatcatttttatgatcgctgtgacatttgcaatagttctgggggtcataatctaccggataagtatggcggcagccttagctatgaattcctcaccatctgttaggagtaacatcagagtgacagtcaccgccactgctgtcattattaacctcgtggtgataatcctgctcgatgaggtctatggctgtatcgccagatggttgacgaagatcgaggtccccaagacggagaagagtttcgaagagcggctgattttcaaagcattcctactgaagttcgtcaatagttacactcccatcttctacgtcgcctttttcaaaggacggttcgtggggagaccgggagattacgtatatatttttagatcattccgcatggaagagtgtgctccaggaggatgcttgatggaactgtgtatccagttatccatcataatgctggggaagcagcttattcaaaacaatctattcgagatagggatcccgaaaatgaagaagcttatcagatatctgaaactgaagcagcagtctccccctgatcatgaagagtgcgtgaaaagaaaacagaggtatgaagtcgactacaacctggaaccattcgccggactaactcccgaatatatggagatgataattcagttcggcttcgtgaccctctttgtcgcttccttcccactcgccccactgttcgctcttttgaacaatattatcgagattagacttgacgccaagaagttcgtaacagagctgcgcaggcccgtcgccgtgagggccaaagatattggcatctggtataacatcctcagaggaattggcaagctggccgtcatcattaacgccttcgttatcagtttcacgtccgattttatccccagactggtctacttgtacatgtatagcaagaatggtacaatgcacggatttgttaatcacaccctcagctcgtttaacgtcagcgacttccagaacgggaccgcacctaatgatcccctggacctaggttacgaggttcagatctgccggtacaaagactatagagaacccccatggtctgagaacaaatacgatatctccaaagacttctgggcggtgctcgcagccaggctagctttcgttatcgtgttccaaaatttggtaatgttcatgtctgatttcgtcgattgggtcatcccggatatcccaaaagacatttctcaacagattcacaaggagaaagttcttatggttgagctctttatgagagaggagcaggataaacagcagctactcgagacatggatggaaaaggaacgacagaaagatgagcctccatgcaatcaccacaataccaaggcttgtccagattccctgggaagcccagccccttcccacgcgtatcatggaggagtgctttag

SEQ ID NO: 214580 - DNA, 942 bp, synthetic construct
  misc_feature 1..942: note = Description of Artificial Sequence: Synthetic coding sequence
  source 1..942: mol_type = other DNA
atgctagatgccgcaagtaaagcacgggaggctcccgaggccgctcctggctgggatgacccccagggcgagggtcgtcggggacggggagaaggtttgagttgggctgttggtcctcatcctgatcctggggtgttgatgcagggagaggtgtggagtggacggtttagtcatgccgtgatccagttcgggtttgtcacgctgttcgtggcctccttcccactcgctccacttttcgctctcctgaacaatattatagagatccggctcgacgcaaaaaagtttgtgaccgagcttagacgccctgtagctgtccgggctaaggacattggtatctggtacaatattcttcggggaattggcaagctggccgtgatcattaacgcttttgtcatctcctttacttctgactttatacctcggctggtctacctctatatgtattccaagaacgggacaatgcacggcttcgtgaatcacaccctatcaagtttcaacgtgtccgacttccaaaatggaacagcccctaacgatccattggacctggggtatgaggtccaaatctgtagatacaaggactaccgggagcccccatggtcggagaacaaatacgatataagcaaagacttttgggccgtcttagcagcccgactggcatttgtaattgtttttcagaatctggtaatgttcatgtcagattttgtagattgggtgatcccagacataccaaaagatattagtcagcagatccacaaggaaaaggtgttgatggtggagctattcatgcgcgaggagcaggacaaacagcagctgctcgaaacatggatggagaaagagagacaaaaagacgagccaccttgcaatcaccacaacactaaggcttgccctgacagcctgggctcccctgccccaagccatgcctaccacggtggtgtgttatag

SEQ ID NO: 214581 - DNA, 2235 bp, synthetic construct
  misc_feature 1..2235: note = Description of Artificial Sequence: Synthetic coding sequence
  source 1..2235: mol_type = other DNA
atgaagcgcctttcgtacccattttctcgtgaaaagcaacacctcttcgacctgagcgataaggattcgttcttcgattcaaagacaagaagtaccattgtgtacgagatactgaagcggactacatgcaccaaggccaagtacagcatgggtatcacatccctcttagccaacggggtgtatgctgcagcttacccacttcatgatggcgattataatggcgagaatgtagagttcaacgacagaaaactgctttacgaggagtgggcccgatatggcgtattctacaaataccagcccatcgacctcgtaagaaaatatttcggcgagaagattgggctgtattttgcttggttaggagtttacacccagatgttaatacctgccagtatagttggcatcatcgtcttcctgtatggatgcgccaccatggatgagaatataccctccatggaaatgtgcgaccagcgacacaacatcactatgtgtccactatgtgataaaacgtgttcctactggaagatgtcatcagcctgcgccaccgcacgggcaagccatttgttcgataatccagcaacagtatttttttcggtttttatggccctctgggctgccacttttatggaacactggaaacggaaacagatgcggctgaattataggtgggacctcaccgggttcgaagaggaggaaaaagctctcctggaccaccccagagcagaatacgaggctagagtgctggagaaatcattgaagaaggaaagtcggaacaaggagacggacaaagtcaagcttacttggcgcgaccgtttccctgcatacttaaccaatctggtttctattatctttatgatagctgtgacttttgccattgtcctgggagtcattatttacagaattagtatggctgcagccttggctatgaacagcagcccaagtgtgagatccaatattagagttacagtcaccgctacagcagtgatcatcaatctcgtggtcatcatactgcttgatgaagtctacggctgcatcgcacggtggctgaccaagatagaggtgcccaagactgagaagagttttgaggagagactgatttttaaggctttcttgctgaagttcgttaattcctacacgccgatcttttacgtggcttttttcaagggaaggttcgttgggaggcctggagattacgtctacatatttaggtcttttcggatggaggagtgtgctccaggcggatgccttatggagctgtgcatccagctgtcaattatcatgcttggcaagcagctgatccagaacaatctgtttgaaattggcattcctaagatgaaaaagctgataaggtacctgaagttgaagcagcagagcccccctgatcatgaagaatgtgtgaaacgaaagcagaggtatgaggtggactataaccttgaaccattcgctggcctgacacctgagtacatggaaatgatcatccagttcggcttcgtaacccttttcgttgcaagttttcctctcgctccacttttcgctttgctaaacaacattatagagattcggctggacgctaaaaagttcgtgacagaactgaggagacctgttgcggtacgagccaaagacatcggaatatggtacaacattcttaggggtattgggaagctggctgtgatcatcaacgcatttgttattagcttcacctctgattttatacccagactggtgtacctctacatgtactcaaaaaatggaacaatgcacgggtttgtgaatcacaccctgagctcgttcaatgtgagcgactttcagaacggtacggccccaaacgatcctttagatcttggatacgaagtgcaaatttgtcgctataaagactatcgggagcccccatggtccgagaataaatacgatatatccaaagacttctgggctgtgctggctgctagactggcattcgtgatcgtgtttcagaacctggtgatgttcatgagtgactttgtagactgggtaattcccgacatacccaaggacatatcacagcagatccacaaggaaaaggttctgatggtcgaactcttcatgcgcgaggagcaagataagcaacagctgttggagacctggatggaaaaagagcggcagaaagatgaacccccatgcaaccaccacaataccaaagcctgtcccgatagcttaggtagccctgcgccaagccacgcctaccacggaggcgtcctgtag

SEQ ID NO: 214582 - DNA, 1983 bp, synthetic construct
  misc_feature 1..1983: note = Description of Artificial Sequence: Synthetic coding sequence
  source 1..1983: mol_type = other DNA
atgaaggttaccctcagcgccctggatacgagcgaaagctccttcacccccttggtagtgatcgagctggcacaagatgttaaagaggagaccaaagaatggcttaaaaaccgaatcatagccaaaaagaaggatgggggagcccagttactttttaggcccctgctcaataaatatgaacaggagactttggagaaccagaacttgtaccttgtcggagcctccaagataaggatgttgttgggcgctgaggctgtagggctggttaaggaatgcaatgacaatacaatgagagcgttcacatacaggactagacaaaactttaagggtttcgatgataataatgacgatttcctcaccatggctgaatgccaatttattattaaacacgaattggaaaatttaagagccaaggacgagaaaatgataccgggatatccacaggccaagctgtacccaggaaagagcctcctgaggcgactgttgactagcggaatcgtgatccaggtgttccctctccacgactcggaggcgctgaaaaagcttgaagacacctggtacacgcgattcgcattgaaataccagccaatcgactctatccggggttactttggagaaactatcgctctgtactttgggttcctggagtacttcacctttgcgctcatacctatggcggtgatcggactgccatattatctcttcgtctgggaggactacgacaaatatgttattttcgccagcttcaacctcatttggagtaccgtaattctcgaattatggaagaggggctgcgccaatatgacttaccgttggggaactctgctgatgaagcggaaattcgaagagcctagacccggatttcacggagtccttggtattaacagcataaccggtaaggaagagcctctgtacccttcctataaacgccagctaaggatttacctggtctctcttcctttcgtgtgtttgtgcctgtacttttctctttatgtcatgatgatttactttgatatggaggtttgggccctcgggctacacgagaactctggttctgagtggacatccgttctcctgtatgtgccctccattatttacgctatagtgatcgagattatgaaccgcctgtacagatacgccgctgaatttttaacctcttgggagaatcacaggctggagtcagcttaccagaaccatctgatcctaaaagttttggttttcaattttctgaactgtttcgcttccttgttctatattgctttcgtgcttaaggatatgaagctgcttcgacagtctctggccacacttcttatcacctctcaaattctgaatcaaatcatggagagcttcctaccttattggctgcaacgcaagcacggtgtgagagtgaaacggaaggtgcaagccctcaaagccgatatcgatgcgaccctatacgagcaagttatattggaaaaggagatgggaacgtacttagggactttcgacgactacctggagctgtttttgcagtttggctacgtcagtttattcagctgcgtgtacccattagctgctgcattcgcagtgctgaataactttacagaagttaattccgatgcactgaagatgtgcagagtctttaagaggccattctccgagccatcggccaacattggcgtgtggcagctcgcttttgaaactatgtctgtgattagtgtcgtgacaaactgcgctctgatcgggatgtcgccacaggtaaacgctgtcttccccgaaagtaaagccgatcttatcctcatagtagtggcagttgaacatgctcttctggcccttaaatttatcctggccttcgcgatccccgacaagcccagacacatccagatgaagctggcaaggctcgagttcgagtctttggaggcgctgaagcagcagcagatgaagctcgtcaccgaaaatctgaaggaagaaccaatggaatcaggaaaagagaaagctacttag

SEQ ID NO: 214583 - DNA, 1413 bp, synthetic construct
  misc_feature 1..1413: note = Description of Artificial Sequence: Synthetic coding sequence
  source 1..1413: mol_type = other DNA
atgaaagtaaccctgtcagcccttgacactagcgaaagttcatttactccattagtcgtaattgaacttgcccaagatgtaaaggaagagacaaaagagtggctcaagaacagaatcattgccaagaagaaggacggcggagcccaattattgtttcggcctcttcttaacaagtatgaacaggagaccctcgagaaccaaaatctgtaccttgtgggggcatctaagatccggatgctgctgggggctgaggccgtcggcctggtaaaagagtgtaatgataacacgatgcgcgcttttacttacaggacccgccagaactttaagggcttcgacgacaacaatgacgatttcctcacaatggccgaatgccaatttattattaagcacgaactagagaacttgcgtgcaaaggatgaaaagatgattccgggttacccacaggccaagctgtaccccggaaaatcgctccttcggaggctcttgactagtggcatagtgattcaagtcttccctctgcatgatagcgaagccttaaaaaagcttgaggatacctggtatacaaggttcgcgctgaaataccagcccatcgagaaccaccgactggagagcgcttaccaaaatcacctcattctgaaggtgctcgtcttcaactttcttaactgtttcgcaagcctgttctacattgcgttcgttttaaaagatatgaagctgttaagacagagccttgcgaccctacttattactagccagatactgaaccagattatggagtctttcctgccctattggttacagcgaaaacacggagtcagagtcaaacggaaggtccaggcgctgaaagcagacatcgatgctacactatatgagcaggtcattctggagaaagagatgggcacctacctcggcactttcgacgactatttggaactgtttctccagttcggctacgtgtcccttttcagttgcgtgtaccctctagccgcagccttcgcagtgctaaataactttacggaggtgaactccgatgcactgaaaatgtgtagggttttcaaacgccctttttccgaacccagcgccaacattggggtgtggcaattagcctttgagaccatgtcagtcataagcgtggtgacgaattgtgcactaataggaatgagtccccaggtgaacgccgtgttcccggagtccaaagcagacctgatcttgattgtggttgcagtcgagcacgcattactggcgctcaagttcatcctcgccttcgctattccagataaaccacggcacatacagatgaagctcgctaggctggagttcgaaagtctcgaagcgctgaagcaacagcagatgaaattggtgacagagaacctgaaagaagaacccatggagtccggcaaagagaaggcaacctag

SEQ ID NO: 214584 - DNA, 423 bp, synthetic construct
  misc_feature 1..423: note = Description of Artificial Sequence: Synthetic coding sequence
  source 1..423: mol_type = other DNA
atgaaagtgactctgtccgccttggatactagtgagagtagcttcactcccctcgtggtgatcgagctagcccaggacgtaaaggaagagacaaaggaatggctgaaaaatcgcatcatcgctaaaaagaaagatgggggagcccagctactctttagaccactgctgaataaatacgaacaggaaacgcttgagaaccagaacctgtacctcgtcggcgctagtaaaatccgaatgttgctgggtgcggaagctgtgggcctcgttaaagaatgtaatgacaacaccatgagagccttcacgtatagaaccagacaaaattttaaagggtttgacgataacaatgacgacttcttaacaatggccgagtgccaattcatcatcaagcacgagctcgagaatttgagagccaaggacgagtag

SEQ ID NO: 214585 - DNA, 339 bp, synthetic construct
  misc_feature 1..339: note = Description of Artificial Sequence: Synthetic coding sequence
  source 1..339: mol_type = other DNA
atgaaagttacactatccgctctggatacttcagaatcgtcattcacccctctggtggttattgaactggctcaggatgtgaaggaagagacgaaggagtggctgaagaatagaattattgcgaagaagaaggatggaggcgctcaactgttgtttcgaccccttcttaacaagtacgaacaggagactttggagaaccagaacctgtatctggtgggagcaagcaaaattagaatgctcctgggggctgaagccgtcgggcttgtgaaggagtgcaatgataacacaatgcgggctttcacctatagaacaagacagaacttcaagggctttgactag

SEQ ID NO: 214586 - DNA, 117 bp, synthetic construct
  misc_feature 1..117: note = Description of Artificial Sequence: Synthetic coding sequence
  source 1..117: mol_type = other DNA
atgaaagtcacgctaagcgctctcgatacaagcgagtcatcctttaccccacttgtggttatcgaactcgcacaagatgtgaaggaggagaccaaagagtggttaaagaatcgttag

SEQ ID NO: 214587 - DNA, 405 bp, synthetic construct
  misc_feature 1..405: note = Description of Artificial Sequence: Synthetic coding sequence
  source 1..405: mol_type = other DNA
atgaaggtaacactgtctgccctggacacaagcgaatccagcttcacccctttagtggtgatcgaactggcacaggatgtcaaggaagagaccaaggagtggctcaaaaacagaatcatagccaagaaaaaagatggtggcgctcaattgctgttcaggcccctgctgaacaaatatgaacaagaaactctggaaaaccagaatttatacctagtcggtgcctcgaaaattcgcatgcttcttggtgctgaggccgtaggtctggtgaaagaatgtaacgataacacaatgcgggcatttacataccggacaagacaaaactttaagggattcgatgataataacgacgactttctgaccatggcggaatgtcaatttatcatcaagcatgaactggaaaattag

SEQ ID NO: 214588 - DNA, 441 bp, synthetic construct
  misc_feature 1..441: note = Description of Artificial Sequence: Synthetic coding sequence
  source 1..441: mol_type = other DNA
atgaaggtcactttatctgccctggacaccagcgagtccagcttcacaccgctagtggtaatcgaattggcccaggacgtgaaggaggagaccaaagaatggctgaagaatcgcataatcgccaaaaagaaggacggaggagcccaactgctgttcaggccattgcttaacaaatacgaacaggagaccctcgaaaaccagaatctctatctagtgggcgcatctaagatccggatgctcctgggagcagaggcggtaggactggtcaaggagtgtaacgacaatacaatgagggccttcacgtacagaacacggcagaacttcaagggattcgatgacaataacgacgatttcctgactatggccgagtgtcagttcatcatcaagcacgagctggagaacttgagagctaaggacgaaaagatgatccctggctactag

SEQ ID NO: 214589 - DNA, 426 bp, synthetic construct
  misc_feature 1..426: note = Description of Artificial Sequence: Synthetic coding sequence
  source 1..426: mol_type = other DNA
atgaaagttaccctctccgccctggatacctccgagagttcatttacccccctggtggtgattgaactggcgcaggacgtcaaggaagagactaaggagtggttgaaaaatcgaatcattgctaagaaaaaagacgggggagcccagctcctttttagacccctgctgaataaatacgagcaagagacactcgagaatcagaacctgtatctcgtgggcgcaagtaagattaggatgctgttgggtgccgaagcagtcggtctcgttaaggagtgtaacgataacactatgcgtgccttcacatacagaacccgccagaattttaaggggtttgacgacaataacgacgacttcttaactatggccgaatgccagttcatcataaagcacgagctcgaaaaccttagagccaaggatgagaaatag

SEQ ID NO: 214590 - DNA, 1785 bp, synthetic construct
  misc_feature 1..1785: note = Description of Artificial Sequence: Synthetic coding sequence
  source 1..1785: mol_type = other DNA
atgaaggttacactatccgcactcgatacaagtgagtcctcatttacacctttggtcgtcatcgaactcgcccaggacgttaaagaagagacgaaagagtggttgaagaatcgcatcatagccaagaaaaaagacggagataataatgacgactttctcacgatggctgaatgccagttcataatcaagcacgaactagaaaacctgcgcgctaaggacgagaagatgattcccggttatcctcaggccaagctatacccaggcaagtctctcttgagaagactcctcacctccggtattgtgatccaggtgtttcctctgcacgatagtgaagcactgaagaagttggaagatacttggtatactcgctttgctctgaagtatcagcccattgatagcatcaggggctactttggggaaaccattgcattgtactttggattcctcgaatatttcacattcgccttgattcctatggccgtcatcggtctcccttactacttgttcgtatgggaagattatgataagtacgtgatcttcgccagcttcaaccttatctggtctacagttatccttgagctctggaaacgaggctgtgccaacatgacttacaggtgggggacacttctcatgaaaaggaagtttgaggagcctcgcccaggatttcacggagtcctggggattaattccattactggtaaggaggagcctctgtacccttcatataagcggcagctgcggatttaccttgtctccctgccctttgtctgtctctgtctctacttttccctctatgttatgatgatatatttcgatatggaagtgtgggctcttggtttgcacgagaacagcgggtccgaatggacctccgtgctgctgtatgtaccgtccataatatatgccattgttatcgagataatgaataggttgtaccgctacgccgctgagtttctaacttcatgggagaatcaccggctggaaagtgcgtaccagaaccatttgattctgaaggtgctggtgttcaacttccttaattgttttgcctcgttattttatatcgcttttgtgctcaaagatatgaagctgctaaggcagtcccttgcaactttgcttattactagccagatactgaaccagatcatggagtcttttcttccatactggctgcagcggaagcacggagtcagagtgaaacgaaaagtgcaggctctgaaagcagatatcgacgccactctgtacgaacaggtaatacttgaaaaggagatgggcacttacctgggaacattcgatgattatttagagctgtttcttcaattcggttatgttagcctctttagctgcgtctaccctttagccgctgcattcgctgttctaaataacttcacggaagtaaattccgacgccttaaaaatgtgtagagtgttcaaacgaccgttctctgagccctccgcgaatatcggggtctggcagctagccttcgagactatgtccgttatctctgtcgtgaccaattgtgccctgattggaatgtccccccaggtgaacgctgtgtttccagagtctaaggcagatctgattttgatcgtggtggcagtggagcacgctcttctggctctgaagtttatcctggcatttgccatacctgacaagccccgtcatatacaaatgaagcttgctcgtctagaatttgagagcctggaagctctcaaacagcaacagatgaaactagttaccgaaaatttgaaggaggagcctatggagtccgggaaggaaaaagccacttag

SEQ ID NO: 214591 - DNA, 1884 bp, synthetic construct
  misc_feature 1..1884: note = Description of Artificial Sequence: Synthetic coding sequence
  source 1..1884: mol_type = other DNA
atgaaagttactttgtccgctcttgacaccagtgagtccagcttcacccctctggtggttatcgaactggcccaggatgtgaaagaagaaactaaagaatggctgaaaaaccgcattattgccaagaagaaggatgggggtgctcagctcctgttccgacctctgttgaataagtatgagcaggagacactggaaaatcaaaacctgtacctcgttggagctagtaaaattcggatgcttctgggcgctgaggcagttggactggtgaaagagtgcaacgacaacacaatgcgggctttcacgtataggaccagacagaattttaagggtttcgacgacaataacgacgactttttgaccatggcagagtgccagtttatcattaagcacgagctcgagaacctgagggcaaaagatgaaaagatgataccaggatacccgcaggccaagctgtatcctgggaaaagtttactgagaagactgctgacatcaggtatagtgattcaggtatttcccttgcacgattccgaagccctgaaaaagctggaagatacatggtatactaggtttgccttgaagtatcagcccatcgatagcataaggggctactttggcgagacaatcgctctgtattttggatttttggagtattttacttttgccttaatacccatggcagtcataggactaccctattatctgtttgtgtgggaggattatgacaaatatgttatctttgcttcatttaacttgatctggtcaaccgtaattctggagctatggaaacggggatgcgctaatatgacttacagatggggcaccctgttgatgaaacggaaatttgaggagccgcgaccaggttttcacggggttttgggaatcaatagcataacgggcaaggaggaaccgctgtatccatcctataagagacagctaaggatttacttggttagcctgcccttcgtgtgtctgtgtctctacttctcactctatgtcatgatgatatacttcgacatggaagtttgggccttaggactgcacgaaaattctggttctgagtggacatctgtgctgctgtatgtccccagtattatttatgccattgtgatagaaatcatgaaccgactgtaccgatatgccgcagaattcctgacttcgtgggagaatcatagactggaatcagcgtaccagaatcacctgatcttgaaagtgttggtgtttaattttcttaactgttttgcttcgctgttttacattgccttcgtgctgaaggatatgaagctgcttcggcagagcctcgccaccctgctgataaccagtcagattttgaatcaaattatggagtccttccttccgtactggcttcagcggaaacatggtgttcgcgtgaagcggaaagttcaggctctgaaagcggatatcgatgccaccctgtatgagcaggtaattttggagaaagaaatggggacttacctggggactttcgacgactacctggaacttttcctccagttcggatatgtgagccttttttcctgtgtttaccccctggctgccgcttttgccgtcctcaataattttacagaagttaattccgatgctctgaaaatgtgccgcgtctttaagaggcctttcagtgagccctcggctaacattggcgtttggcagctcgctttcgaaactatgagtgtcattagtgtcgtgacaaattgtgccctcattggcatgtcccctcaggtgaatgccgtcttccccgagtccaaagccgacttgattcttattgtagtcgcggtggaagccgctagctgcaaactggtttcactgcctcggtatagctggtctacgaattctgtgcctggtacggtgattggtccaggcgtgtag

SEQ ID NO: 214592 - DNA, 1650 bp, synthetic construct
  misc_feature 1..1650: note = Description of Artificial Sequence: Synthetic coding sequence
  source 1..1650: mol_type = other DNA
atgaaggtgaccctaagcgccctggatacttctgagtcgtccttcaccccactggttgtgatcgaattagcgcaagatgtcaaggaagagaccaaggagtggctgaaaaaccgtatcattgcaaaaaaaaaagacggagttaggcggctgttgacttccgggattgtcatacaggtgttccctctgcatgattccgaggctctgaaaaaattagaggacacgtggtatacgcggtttgcccttaagtaccagcctatagattccatcagagggtactttggggaaactatagccctgtacttcggctttctggagtacttcacattcgccctcataccaatggctgtgataggcctcccatattacctgttcgtgtgggaagactacgataaatacgttatattcgcctcattcaacctgatctggagcacagtcattctagaattatggaaacgaggctgtgccaacatgacctatcggtggggtacactgctgatgaaaagaaaatttgaggagccaagacctggattccatggggtactcggtataaattcgatcacgggtaaggaagaacctctgtaccctagctacaagaggcagctacgaatctacttggtcagccttccttttgtctgcctctgtctttacttttccctgtacgtgatgatgatctactttgatatggaagtgtgggccctgggccttcatgagaactcaggtagcgagtggacttcagtcctactttacgtgccatccatcatttatgctatagtgatcgaaatcatgaataggctttataggtacgcggctgaattcctaactagttgggagaaccaccggcttgaatccgcctaccagaaccatctgattttgaaggtgctcgtgttcaatttcttgaactgtttcgcctcactgttttatatcgcctttgttctgaaggacatgaagctcctgagacagagtctcgcaacgctgctcattactagtcagatcttgaaccagattatggagtcattcttaccatactggctgcagaggaaacacggcgtgagggtcaaacggaaggtccaggcactcaaagctgacattgatgcaacactctatgagcaagtcatcctggagaaggagatggggacctatctcggtacctttgatgactacctagagctgtttctgcagtttggttatgtgagcctcttttcgtgtgtctaccccctcgccgctgcatttgccgtgttaaacaattttacagaagttaactcagacgcattgaagatgtgtcgagtcttcaagaggcctttttccgaacccagtgctaacatcggagtgtggcagttggccttcgaaactatgtccgtcataagcgttgtgacaaattgcgccttgatcgggatgtctcctcaggtgaacgcggtatttcctgaatccaaagcggacttgatcttaattgtggttgccgtggaacatgcactccttgcacttaaattcatactcgccttcgcaatccctgacaaaccacgccatattcagatgaagttagcgagactggagttcgaatcccttgaggcgctgaagcagcagcagatgaaactggttacggagaacttaaaggaagagcctatggaaagcggaaaagagaaggcaacgtag

SEQ ID NO: 214593 - DNA, 2997 bp, synthetic construct
  misc_feature 1..2997: note = Description of Artificial Sequence: Synthetic coding sequence
  source 1..2997: mol_type = other DNA
atgcctgaagatatccccctactgcccggttccccacgaagactcagtccgcaggcaggctcaaggggcggacaggggccaaagcacggacagcagtgtttaaaaatgcctggacccagagcaccaggcttgcagggcggaagcaatagagaccctggacaaccttgtggcggtgaaagcactagaagcagttccgtgatcaataactatttagatgccaatgagcccgtgagcctagaggccaggttatcaaggatgcatttccacgattctcagcgcaaagtggactatgtcctggcctaccactaccgaaaacgaggggtacacctcgcccaaggctttccgggtcactcactggctatcgtgtccaacggggaaactggaaaagaacctcatgctggcggaccgggagacatcgagctcggccctctggacgcgctagaagaagaaaggaaggaacagcgagaggaattcgagcacaacctgatggaagctggtctggaattagagaaggacctggaaaataaaagccagggttcaatttttgtgcgaattcacgccccttggcaggtcctggcccgtgaagctgagttcttgaaaataaaggtgccaacaaagaagatgtacgagattaaggctggaggtagtatcgccaagaagttcagtgcagccctccagaagctctcatctcacctgcaaccccgagtacccgaacatagtaataacaaaatgaagaacttgtcctatcccttcagcagagagaaaatgtacctttacaacatacaggagaaggacaccttctttgacaacgctactaggtcgaggattgtccacgaaattctaaagcgaactgcttgctcgagggcgaataatactatggggataaattctcttatcgcgaataatatatatgaagctgcctacccactccacgacggcgaatatgattcacccgaagacgacatgaacgatcgtaagctcctctaccaggagtgggcacgctacggcgtgttctataagtttcagccgattgacctgattcgcaaatattttggggagaaaattgggttatatttcgcctggctgggcctttacacttctttccttatcccctcctctgtaatcggcgtgatcgttttcttatatggctgtgctaccatcgaggaagatatcccatcacgggaaatgtgcgatcaacagaatgccttcacaatgtgtcctctctgcgataaatcctgcgattactggaacctgagctctgcctgcggtactgcccaggcctcccacctgtttgacaatcctgccactgtattcttcagtatattcatggctttgtgggccaccatgttcctggagaattggaaaaggctgcagatgaggctcggttacttttgggatttaaccggcatcgaagaagaagaggagcgcgcacaggagcacagcaggcccgaatatgaaacaaaagttagagaaaagatgctcaaggaatccaatcaaagtgcagtccagaaattagaaacaaacactacggagtgtggagacgaagacgacgaggacaagctcacctggaaggacaggttcccaggctatctgatgaactttgcatcgatcttgttcatgatcgctcttacgtttagtatcgtattcggtgttattgtctacaggattaccaccgccgcagcactgtctctgaataaagcaacccgtagcaacgtgcgggtcaccgtgactgcaaccgcagtgatcatcaacctggtggttatcctaattctcgacgaaatctacggcgctgtggccaaatggcttaccaagattgaagttcctaaaacagaacagacctttgaggagcgtctgattctgaaggcgttcttacttaagtttgtcaatgcttattcccccattttctacgtcgctttctttaaaggtcgtttcgtgggaaggcctggtagttacgtgtatgtctttgatggatacaggatggaggagtgcgcccctggaggatgcctaatggaactgtgtattcagcttagcattataatgctaggaaaacagctcattcagaacaatattttcgaaatcggcgtccctaagctcaaaaagctctttcggaagctgaaagatgagaccgaggccggagaaacggactcggcgcacagcaagcaccccgaacagtgggacctggactattctctggagccatacactggactgaccccggagtacatggagatgatcattcaattcggtttcgtgaccctctttgtcgcatctttccctctggcaccagtgttcgcacttcttaacaatgtcattgaagtgaggttggacgcaaagaagtttgtaacagaactgcggaggccggacgctgtgcgtaccaaggacatcggcatctggtttgatattctttccggcatcggcaaattttcagtgatttcaaacgcgtttgtgatagctattacaagtgattttattcccagactggtgtatcaatattcctattctcacaacggcaccctgcacggctttgtcaatcataccctctcctttttcaatgtctctcagctcaaggaagggacccaaccagagaattctcagtttgatcaagaggtgcaattctgtaggttcaaagactaccgcgaacctccatgggctcccaatccctacgagttctcaaaacaatattggtttatcctgagcgcacggctggccttcgttatcatctttcagaacctcgtaatgtttcttagcgtgctcgtcgattggatgatcccagacatccctaccgacattagcgatcaaattaagaaagagaaaagtcttctggtggatttttttctgaaagaggaacacgaaaagctgaagctcatggacgagccagctctgaggtcaccaggaggaggggacagaagtcgatccagggcggcatcatctgccccatctggccagagccagctcgggtctatgatgagttcgggatcccaacacactaatgtctag

SEQ ID NO: 214594 - DNA, 3000 bp, synthetic construct
  misc_feature 1..3000: note = Description of Artificial Sequence: Synthetic coding sequence
  source 1..3000: mol_type = other DNA
atgcctgaggacattccactgctgccgggtagccctagacggctcagccctcaggcaggctcaagaggtggtcagggccctaagcatgggcagcaatgccttaaaatgcccggtcccagggctcccggactccagggcggttccaacagggatcccggtcagccatgcggcggagaaagcacaagatcatcaagcgtcataaacaactacttggacgcgaacgaacccgtgtctctggaagcacgactgagcagaatgcatttccacgatagccaaagaaaggtggattacgtgctggcctaccattaccgaaagcgaggtgttcatctcgcccaaggattcccaggccactctttggctattgtgtctaatggggagaccggtaaagaaccacacgccggtggtccaggcgatatagaactgggccctttggacgctctagaggaggagagaaaagagcaacgtgaggaattcgaacacaacttgatggaagcaggcctggaactagagaaagatctggagaacaagagccagggaagcatcttcgtaaggatccacgccccatggcaggtgctggctcgagaggcggagttcctcaaaatcaaagtccctactaaaaaagaaatgtatgaaataaaggctggaggcagcattgctaagaagtttagcgcagccctgcaaaaactgagctcccatttgcagccacgggtgccagaacattccaataataagatgaagaatctgagctatcccttctctagggagaagatgtacttgtacaacatccaggaaaaagatacattcttcgacaatgcaactaggtccaggatcgtgcatgagatcctcaagaggaccgcatgctcgagggctaacaatactatgggaattaactctctgattgctaacaatatttacgaagccgcatacccactgcacgatggcgagtacgactccccggaggacgacatgaatgataggaagctgttgtatcaagagtgggccagatatggggttttctataagttccaacccatcgatcttattcgcaagtacttcggggagaaaatcggattatacttcgcttggctcgggctctacacctctttccttattccctcttctgtcatcggtgtcatcgtttttctgtatggctgtgccactatagaagaggacatcccatcacgagagatgtgcgatcagcagaacgcattcactatgtgcccactctgcgacaaatcttgcgactactggaacctgtctagcgcctgcggaaccgcccaggctagccacctgtttgacaaccctgccacggtgtttttctccattttcatggctctgtgggcaacaatgtttctcgagaattggaaaagactccagatgagactgggctatttttgggatctgacaggaatcgaggaggaagaggaacgagcccaggagcacagccgtcccgaatacgagaccaaagtccgcgaaaaaatgctgaaggaaagcaatcagtccgccgtgcagaagttggagactaataccacggagtgcggagacgaagatgatgaggataaattgacatggaaggatagattcccaggatatctgatgaactttgcctcaatcctattcatgatcgcgttgacattctcaatagtgttcggcgtcatcgtttaccggattaccaccgccgctgcgttgagtttaaataaggcgacccgatctaacgtcagagtgacggtgacagcaaccgctgtaatcatcaacctagtagtgatcctgattctcgacgagatctatggcgcagtagcgaagtggttgaccaagattgaggtccctaagacagagcagaccttcgaggagcgtttgatcctgaaagcttttttgctgaagttcgtcaatgcttattcgcctatcttctacgtcgcgttctttaaggggaggtttgttggtaggcccggtagctatgtgtatgtgtttgatggataccggatggaggagtgtgctcccggtggctgtttgatggagctgtgtatacaactttccataataatgctcggcaaacaactgattcagaataatatcttcgagatcggcgtaccaaagctaaaaaagctgtttcgcaaattgaaagacgagacagaagccggtgagaccgattctgctcattccaagcacccggaacagtgggacctggactattctctcgaaccttacacagggctgacgccggagtacatggaaatgattatccagttcggcttcgtaaccctgtttgtggcatcattccccttggcacctgtcttcgcactgctcaacaatgtcatagaagtgcggttggacgccaagaaatttgtaactgaactgagaaggcccgatgctgtccgaactaaggacatcggtatctggttcgacattctttccggcataggcaaattcagtgtaatttccaacgcttttgtgatcgccatcacatcagactttattccacgcctggtctaccagtatagttacagccacaacggaactttacacggctttgtgaatcacaccctctcattctttaacgtttcccagctcaaggagggcacgcagcccgagaatagccaatttgatcaggaggtgcagttttgtagattcaaagattaccgggaacctccctgggcgcctaacccttatgagttttccaaacagtactggttcatcctctctgcccgactagcattcgttataatctttcaaaatttggtaatgttcctaagcgtattggtggattggatgatccctgacatcccaacagacataagcgaccaaattaagaaggaaaaaagcctgctcgtagatttctttctcaaagaagaacacgagaaacttaagttgatggatgagcccgctctgaggtccccagggggaggagaccggtcccgaagtagagcggcatcctccgctccatcaggacagagccagttaggcagcatgatgagttccggatcccagcacacaaatgtgtag

SEQ ID NO: 214595 - DNA, 3012 bp, synthetic construct
  misc_feature 1..3012: note = Description of Artificial Sequence: Synthetic coding sequence
  source 1..3012: mol_type = other DNA
atggctacgcccggacctcgggatatcccactgcttcccggatcccctagaagactcagtcctcaggcagggtccaggggcggtcaaggacctaagcatggccagcagtgtttaaagatgccagggccacgggcacccggtttacagggtgggtcaaaccgagatccgggacagccgtgcggtggggaaagtacccgatcatcctctgtgattaataattaccttgacgccaacgagccagtgagcctggaggccagactgagtcgcatgcatttccatgacagccaaagaaaggttgattatgtgctggcctatcactatcgtaaaagaggtgtccacctggcccagggcttcccaggtcattcactcgctatcgtctctaacggcgagaccgggaaagagcctcatgccggagggccaggggacatcgagttggggccactggatgcactcgaggaggagcggaaagagcagcgggaggagttcgagcataacctgatggaggctgggcttgaactggaaaaggatctggaaaataaaagtcaaggttccatctttgtcagaatccacgcaccctggcaggtcttggcaagggaagcagagttcctcaagatcaaggtccccactaaaaaggagatgtatgagattaaagctggcggtagcattgctaagaagttctccgctgccttgcaaaagttaagcagtcacttgcagccacgggtacccgaacattccaacaataagatgaaaaatctcagctatccatttagtcgagagaaaatgtacctctataacattcaggaaaaggacacattcttcgataacgccacgcgcagtcgaattgtgcacgagattttgaagagaaccgcatgttctcgggctaataacaccatgggcatcaactctttaattgctaacaacatatatgaggccgcttatcccctgcacgatggggagtatgactctcctgaggatgacatgaatgacaggaagcttctctaccaggagtgggccagatacggtgtattctacaagtttcagcccatcgacctgatccgcaagtacttcggggagaagattgggttatattttgcctggcttggattgtatacatcattcttgattccctctagcgttataggtgtgattgttttcctgtatggatgcgccacgatcgaggaggatattccttcacgggagatgtgcgatcagcagaacgccttcaccatgtgtcctttatgtgataaatcttgcgactactggaacctcagctctgcatgcggcactgcccaagcctctcacttatttgacaacccagccactgtattctttagcatctttatggctctttgggccacaatgtttctagaaaactggaagagattacaaatgaggctgggatatttctgggaccttacagggattgaagaggaggaagagcgtgcacaggaacacagtcgacctgaatatgaaaccaaggttagagaaaaaatgctgaaggaaagcaaccagtccgccgtccaaaagctggagaccaacacgacagaatgtggggacgaggatgacgaagataagttaacgtggaaagacagatttcctggataccttatgaatttcgcctccattctttttatgatcgccctcaccttttccatcgtgttcggcgttatcgtgtatagaatcaccaccgctgccgcactgagtctgaacaaagctacacgcagtaacgtgagagtcacagtcactgcaaccgcagtgattatcaatctggttgtcattttgattctcgacgaaatctatggagccgtggcaaagtggcttaccaaaatcgaggtccccaagacagagcaaacgtttgaggagagacttatactcaaggctttcctgctgaagtttgtgaatgcatatagcccaatattctatgtcgcgtttttcaagggccgttttgttggcaggcctgggagctatgtctacgtcttcgacggatatcgaatggaagagtgtgctcctggcggttgtctgatggagttgtgtattcaactgagtattatcatgttaggtaaacagcttatccagaacaacatttttgaaatcggagtccccaaactcaaaaagctcttcagaaagctaaaggatgaaacggaagccggagaaacagattcagcccattccaagcatcccgagcaatgggatctcgactattcacttgagccatataccggactcaccccagaatatatggagatgattatccagtttggctttgttacactgtttgtggccagtttccccttagctccagtcttcgccctgctgaacaacgtgatagaggtgcgcctagatgctaagaagttcgtcaccgagctgaggaggcccgatgctgtcaggactaaggacatcggaatctggttcgatatcctgtctggaatcggaaagttctctgtgatcagtaatgcctttgtaatcgccattacatctgacttcattcccagactcgtgtaccagtactcatattcccataatggaacactgcacgggtttgtcaatcacaccctcagcttcttcaatgtgtctcaactaaaggaaggcacacagcccgagaatagccagttcgaccaggaggtccagttttgcaggtttaaggattaccgcgagcccccttgggcaccaaacccatacgagttctctaaacaatactggttcatcttatctgcgcgactggcgttcgtcatcatcttccaaaaccttgttatgttcctgtcggtgttggtggattggatgatccccgacatcccaaccgacatctccgatcagatcaagaaggaaaaaagcctcctggtagacttttttctcaaggaggaacacgaaaagctgaagctgatggatgagcctgctctccgcagcccaggcggaggtgataggtcacggtcaagggcagcctcatcggcgccatctggtcagtcccagctcggtagcatgatgtcttctggctctcagcatactaacgtatag

SEQ ID NO: 214596 - DNA, 261 bp, synthetic construct
  misc_feature 1..261: note = Description of Artificial Sequence: Synthetic coding sequence
  source 1..261: mol_type = other DNA
atgtttctgtccgttctggtagactggatgatacctgatatacctaccgacatctcagatcagatcaagaaagaaaaaagtcttctcgttgactttttcttgaaagaagaacacgaaaagctgaaactgatggatgaaccagcattacgcagccccggagggggagatcgaagtaggtcgcgcgcagcctcaagcgccccttcaggccagagccagctcgggtcgatgatgtcttccggttcccagcacacaaacgtgtag

SEQ ID NO: 214597 - DNA, 3000 bp, synthetic construct
  misc_feature 1..3000: note = Description of Artificial Sequence: Synthetic coding sequence
  source 1..3000: mol_type = other DNA
atgcccgaggatataccactcctgcctggcagccccaggaggctgtctcctcaggctggcagtagaggcggtcagggaccaaaacatgggcagcagtgtctgaaaatgccaggcccaagggcccctggcctgcaaggcggatcaaatagggacccgggacagccttgtgggggagaatccacccggtctagttcggtaatcaataactacttggacgcgaatgaaccagtttcgcttgaagctagactgtcccgcatgcatttccatgattcacagcgcaaagttgattacgtgctggcatatcactatcgaaagcgaggggtccacctggcccagggattccccggtcacagcttggccattgtaagtaatggcgaaaccggaaaggaaccgcacgccggaggtcccggagatattgagctaggccctctggacgccttagaagaagagagaaaagagcaacgagaggagtttgagcacaacctaatggaagctgggctggagctggagaaggacctggagaacaagagtcagggatcaatcttcgtgcgcattcacgctccctggcaagtccttgccagggaggcagaatttctcaagatcaaggttcctactaagaaagagatgtatgagatcaaggctgggggatctatcgccaaaaagtttagtgcagccttgcagaagttatcatctcacctgcagcctcgcgttccggagcactccaacaataagatgaaaaatctcagctacccgttttcacgagagaagatgtacttatacaatattcaggaaaaagatacttttttcgacaacgccacaaggtcacgtatcgtgcacgaaattttaaaacggacagcttgtagccgcgctaataatacaatggggattaatagccttatcgccaacaatatttacgaggccgcatatccactgcatgatggagagtacgattctccagaagacgatatgaatgaccgtaagcttctgtatcaggaatgggccagatatggcgtgttttataaatttcagccaattgatctgattcgcaagtattttggcgagaaaattggtctttatttcgcctggcttggcctgtacacttccttccttatccccagctcagtgatcggagtcatagtgttcttatacgggtgcgccaccatcgaagaggacatcccctcacgggagatgtgcgaccagcagaatgcctttaccatgtgccccctttgtgataaatcctgcgactattggaatttgagtagtgcctgcgggaccgcccaagccagccatctctttgacaatcccgcaacagtgttttttagcatcttcatggcactgtgggctactatgttcttggagaactggaagagattgcaaatgcgcttgggatatttttgggatttgaccgggatcgaagaggaggaaccgagggtgcaggagcactctagacctgagtatgagaccaaggttagggaaaaaatgctgaaagaaagcaaccaatcagccgtccagaagctggagactaatacaaccgaatgcggcgatgaagatgatgaagacaagctcacctggaaggatagatttccaggttatctgatgaactttgcctctatcctctttatgattgcccttacattctcaattgtctttggcgtgattgtataccgaatcacaacagcagccgcactctctctgaataaagcaacgagatctaatgtgcgggtgactgtgaccgcaaccgccgttattatcaacttagtggtgatacttatcctcgacgaaatttatggagctgtggctaaatggctgacaaaaatagaagtccccaagacagagcaaacttttgaagagcgactcattctcaaagcctttttgctgaagttcgttaacgcctattcccctattttctacgtagctttcttcaagggtcgatttgtagggagacctggatcctatgtctatgtgttcgacggctatagaatggaggagtgtgcccctggcggttgccttatggagttatgtatccagctgtcaatcattatgcttggcaaacagctgattcagaataacatattcgaaataggtgtgcctaaactcaaaaaactgtttcgtaagttgaaggacgagactgaagccggtgagactgatagtgcacattcaaaacatccagaacagtgggatttggattattcactcgagccgtacacaggccttacgccagaatacatggagatgataatccagttcggattcgtcacattgtttgtggcttcattcccactcgcacccgtgttcgccctcctcaataacgttattgaggtaagactggatgccaagaagttcgtcacggaactgagaaggccagacgctgtgcgaaccaaggacatcggcatttggttcgatatcctgtcaggaatcggtaaattctcagtgataagtaacgcattcgtgatcgctataacgagcgactttattccgcgtctggtctaccagtattcctacagccataatggcacgttgcatggattcgttaaccataccctgagcttcttcaacgtttcgcaactaaaagagggcacccagcccgagaattcccaatttgatcaagaagttcagttctgccggttcaaagactatcgagagcctccttgggccccaaacccgtatgagttcagtaaacagtactggttcatcctgagtgccaggttggctttcgtgattattttccaaaatttagtgatgttcctctcggtgctcgtggattggatgatccccgatataccaacagacatcagcgatcaaatcaaaaaagagaagagcttgctcgtggacttttttctcaaagaagaacacgagaagcttaaattgatggatgaaccagcactgcggtcgccgggagggggagatcggtcccgcagcagggcagcttcctccgctccctctgggcagagccagctcggatctatgatgtcaagcggctcccaacacaccaatgtctag

SEQ ID NO: 214598 - DNA, 2742 bp, synthetic construct
  misc_feature 1..2742: note = Description of Artificial Sequence: Synthetic coding sequence
  source 1..2742: mol_type = other DNA
atgggggaccccgatcttctggaggtactcgccgaggagggtgagaaggtgaataaacatatcgactacagcttccaaatgtccgagcagtctctgagctcccgtgaaacatcttttctgataaatgaggagacaatgcccgcaaagaggtttaatcttttcctgagacgtcgccttatgttccagaagaaccaacagtcgaaggactcaattttcttccgggatgggattagacagatcgacttcgtcctgtcctatgtcgatgatgtgaagaaggatgcagaactgaaggcagaaaggcgaaaagagtttgagaccaatctccggaagacaggccttgaactggaaattgaagacaagagggatagcgaggacggacgaacctatttcgtaaaaatacacgcaccgtgggaggtcttagtgacctatgcggaagttttaggaattaagatgcctatcaaagaaagtgacattcctagaccaaaacacactccaataagttatgtccttggcccagtcaggctccccttatccgtgaagtaccctcatcccgagtactttaccgctcagtttagtcgacaccgccaagaactctttctgattgaggaccaggctacattcttcccctcctcatcaaggaaccgcatcgtttactacatcctctctaggtgtcctttcggcatcgaagatggaaagaaaagatttggtatagagcgacttttgaattccaacacatactccagtgcatatccactgcacgatgggcagtattggaagccctcagaaccgccaaaccccacaaacgaacggtatactcttcaccagaattgggcaagattcagttacttttacaaggagcagcctctagatctgatcaagaactattatggcgagaagatcggaatctactttgttttcttgggattctacacggagatgctattttttgctgcagtggtgggactggcctgtttcatttacgggctgctgagcatggaacacaacacgtccagcaccgaaatttgcgatcctgaaatcggtggccagatgataatgtgtcccttatgtgaccaggtttgcgactactggcgcctgaactctacttgtttagcttccaagttcagccacctgttcgacaatgaatcgaccgtattctttgctatcttcatgggaatatgggttaccctatttttggaattctggaaacagcggcaagccagattggagtacgaatgggacctggtagacttcgaggaggagcagcagcagctgcagcttcgcccagaatttgaagccatgtgtaaacaccgaaaacttaacgctgtgaccaaggagatggaaccctacatgcccctgtatacacggattccttggtactttctgtctggtgccacagtgactttgtggatgtctctggttgtgacgtctatggtcgctgtaatagtatataggctctcagtttttgccactttcgcctctttcatggaaagcgatgcatcattaaaacaggtcaaatccttcctgacacctcagatcacaacaagcctcactggatcctgtttgaacttcatcgtgatactcattttaaactttttttacgagaagataagcgcttggatcactaagatggagattcctcggacataccaggaatacgagagctccttgacccttaaaatgtttttgtttcagttcgtgaacttctattcaagctgtttctatgtggctttttttaaagggaagtttgtgggctacccaggtaaatacacatatttgtttaatgagtggcgctccgaggagtgtgatcctggcggatgtctgattgagctcactactcagctaactatcatcatgaccggaaaacagatcttcggcaatatcaaagaagctatttacccacttgccttaaattggtggcgccgaagaaaagcccgtacaaactccgaaaagctatattccaggtgggagcaggatcatgatctggagagttttggccctcttgggttattctacgaatacctggaaacagtcacccaattcgggttcgtcacactgtttgtggctagttttccacttgctcctctgctggcactgatcaacaacattgtggagatacgcgtggatgcctggaagctgaccacccaatatcgaagaaccgtcgcctcaaaggcccacagcatcggcgtgtggcaggacatcttatatggaatggctgtcctcagcgttgctactaatgcatttatcgtggctttcacctccgacatcattccaaggctggtgtactactatgcttattcaacaaatgctacccagcccatgacaggttacgtcaacaatagcctctccgtgtttttaattgctgattttccaaatcacacagcccctagtgagaagagagactttattacctgtagataccgagactacaggtacccacccgacgatgaaaataaatatttccataatatgcaattttggcacgtcctggccgctaagatgactttcataatcgtaatggaacacgtcgtgtttctagtgaaattcctgcttgcctggatgatcccggatgtccctaaggatgtggtcgaaagaattaaacgggagaagctcatgactattaaaatactgcatgacttcgagctcaataagctgaaagagaatctggggatcaactctaacgagttcgccaagcacgtaatgattgaagagaacaaagctcaattagcaaagtccaccctttag

SEQ ID NO: 214599 - DNA, 2733 bp, synthetic construct
  misc_feature 1..2733: note = Description of Artificial Sequence: Synthetic coding sequence
  source 1..2733: mol_type = other DNA
atgaagaaaatgagcaggaacgtcctgctacaaatggaagaggaagaagacgatgacgacggcgatatcgtgctggaaaatctgggtcagactattgtgcctgacctcggttcactagaatctcaacacgatttcaggactccagagttcgaggaattcaatgggaaaccggacagtctgttttttaatgacggccagagaagaatcgactttgtgctggtatacgaggacgagagtcggaaagagaccaacaagaaaggcactaatgagaagcagcggcgaaaacgacaggcgtatgagtctaatctgatttgccacggtctgcagctcgaggctacacgtagtgtactggacgataaactggtgttcgtgaaggtgcacgccccttgggaggttctatgcacctatgctgagattatgcacatcaaactaccgctcaagcccaatgatctgaaaaaccgttcctcggcctttggtaccctgaattggttcactaaggtccttagcgttgatgaatccatcattaagcccgagcaagagttttttacggcaccattcgaaaagaaccggatgaatgacttctacatcgtcgatcgggatgctttcttcaaccccgctactaggtctcgcatagtctattttattctttcgcgggtgaagtatcaggttatcaataacgtatcgaaattcggcattaacaggctggtgaacagtgggatttataaggctgcctttcctctccacgattgcaaatttagaagacagtccgaggatccaagttgcccaaacgaaaggtatctgttgtaccgggaatgggcacaccccagaagcatctacaagaaacagcccctcgatctgataagaaagtactatggcgaaaagatcggtatctattttgcctggcttgggtactacacacaaatgctcttgctcgctgccgtcgttggcgtagcgtgcttcctatacggctatcttaaccaggacaattgtacatggtcaaaggaggtttgtcaccccgacatcggaggaaagatcatcatgtgccctcaatgcgatcggctctgccccttctggaagctgaatattacatgtgagagttcgaagaaactgtgcattttcgattcctttggcacactggtgtttgcagtgtttatgggagtttgggtgactctgtttctcgagttctggaaacggaggcaggctgaactggagtacgagtgggatacggttgaactgcagcaggaggaacaggctagaccagaatatgaagctcggtgtacacatgtggtcatcaacgagattacgcaggaagaagaaaggataccctttacggcctggggcaaatgtattagaattaccctttgtgcctctgcagtgttcttttggattcttttaatcattgcctcggtgatcggtatcatcgtgtacagactctctgtctttatagtgttctcagccaagcttcctaagaatataaatggcacggatcctatccagaaatatctgaccccccagaccgccacgtcgataacagcgagcattataagcttcatcattattatgatcttgaacaccatttacgagaaggttgcaattatgatcaccaactttgagctgcctagaactcagactgactacgaaaattctttgaccatgaagatgtttctgtttcagtttgtcaactactatagttcatgcttttacatcgcttttttcaaaggaaaattcgtgggataccccggagaccctgtgtattggcttgggaagtacaggaacgaagaatgtgacccaggaggatgcctgttagaacttactacccagctgacaattataatggggggtaaagcgatctggaacaatatccaggaggttttattgccgtggatcatgaatctcatcggccgttttcacagagtgagcggctccgagaagatcaccccacgttgggagcaagattaccacctgcagccaatgggcaaactcgggctcttctacgagtacctcgaaatgattatacagtttggtttcgtcactttatttgtggcctccttccctctcgccccactcctcgccctggtgaacaatattctggagatccgcgtcgatgcctggaaactcacaacccagtttaggagactggtgccagagaaggctcaggacatcggagcatggcagccaatcatgcagggaatcgccatactggctgtcgtgactaacgctatgattattgcattcacttccgatatgattcccaggctcgtttactactggtccttctcagtgcccccatacggagatcatacctcttacaccatggaggggtacattaataataccttgtccatattcaaagtggccgacttcaagaataaatctaagggaaacccatactcggacctgggaaatcataccacctgccgctacagagattttaggtatcccccaggccatccccaggagtataagcacaatatctactactggcatgtgattgctgccaaactcgccttcattattgtgatggagcacgtgatctactcagtcaaattctttatcagctacgccatcccggacgtgagcaaacgtaccaaatcaaagattcagagggagaagtatctgactcagaaattgcttcacgagaaccacctcaaggacatgacgaagaacatgggagtgatcgcagaaagaatgatcgaagccgttgacaacaatctccgcccaaaatccgaatag

SEQ ID NO: 214600 - DNA, 2790 bp, synthetic construct
  misc_feature 1..2790: note = Description of Artificial Sequence: Synthetic coding sequence
  source 1..2790: mol_type = other DNA
atgaagaaaatgtctcgcaacgtcctgctgcagatggaagaagaagaagatgacgacgacggcgacattgtgctggagaacctggggcagactatcgttcccgacctggggtcgctggagtctcagcatgactttagaactcctgagtttgaggaatttaatggcaagcccgacagcctgttcttcaatgacggccagagacgaattgacttcgttctcgtctacgaagacgaatcacgaaaagaaaccaataagaagggcaccaatgagaagcagagaagaaagcgtcaggcgtacgaaagcaacctgatctgccacggactccagctggaggccacccgctctgttttagatgataagctcgttttcgtcaaggtgcatgccccttgggaggtgttgtgcacatacgcagagattatgcatataaagctgcccttgaagccaaacgatttgaagaaccgctcgtcggcgtttgggaccctgaattggtttaccaaggtactctccgtcgatgagtcgatcatcaagcccgagcaggaatttttcacggcccctttcgagaaaaacaggatgaacgatttctacattgtggaccgggacgcgttttttaaccccgctaccagatctcgaattgtctatttcatcttgtcaagggtgaaataccaagttataaacaacgtgtccaagtttggcatcaataggcttgtgaattctgggatctacaaggccgcatttcccttgcatgactgcaaattcaggagacaaagcgaggacccatcctgcccgaatgagagatatttgttgtatcgcgagtgggcccaccccaggtccatctacaaaaagcaaccattggatctgatccgcaaatactacggtgagaagatcggcatctactttgcctggctgggttattatacgcagatgctgctgctggctgccgttgttggcgtcgcgtgtttcttgtatggctacctcaatcaggacaactgcacctggagtaaagaggtgtgccatcccgacatcggagggaaaattatcatgtgcccccagtgcgatcgtctgtgccccttttggaaattgaacatcacctgcgagtctagcaaaaagctatgtatctttgactcattcgggacgttggtgttcgccgtttttatgggagtttgggtgaccctttttctcgaattctggaagcgtcgtcaggctgaacttgagtatgagtgggataccgtggaactccagcaggaggaacaagcgagacccgagtacgaagctcggtgtactcacgtagtgatcaacgaaattacacaagaagaggaaagaataccctttaccgcctggggcaaatgcattaggattaccctgtgcgcttcagccgtttttttttggattctgcttatcatcgcatctgttatcggaatcatcgtctacaggctcagtgtgtttatcgttttctcagcaaagctgcccaagaacattaacggcacagatcccatacagaaatacctgacgcctcagacggcgacatctatcacagctagtattatttcattcataataatcatgattttaaacacaatttatgaaaaagtggccatcatgattactaatttcgagctgccgcgaactcaaacggattatgagaattccttgactatgaagatgttccttttccaatttgtgaattactattcctcctgtttctatatcgctttctttaagggcaagttcgtggggtatcccggtgatcctgtttactggctgggtaaatatcgtaatgaggaatgcgaccccggaggttgccttctcgagttgactactcaactcactataatcatggggggtaaagcaatttggaacaatattcaagaggtcctcttaccctggatcatgaatctgattgggaggttccaccgagtgtccgggtcggagaagattaccccgagatgggagcaagattaccatcttcaaccaatgggaaaattaggccttttctacgagtatttagagatgataatacaatttgggtttgttactctctttgtggccagcttcccgctggcccctttgctggcactggtcaacaacattctggaaatccgggtggatgcttggaaactcacgactcaattcaggagacttgtgcccgaaaaggctcaagacattggggcttggcaaccaattatgcaaggcatcgcaatactagcagtggttacaaacgccatgatcatcgccttcacaagtgacatgatcccaaggctggtgtactattggtcttttagtgtgcccccatatggagaccacacaagctacacaatggaggggtatatcaacaacactttgtctatctttaaggtggccgactttaaaaataagagcaaaggaaatccctactcagacctgggcaatcataccacatgtcggtatagggatttcaggtatccccctggccatccccaggagtacaagcacaacatctattattggcacgtcatcgctgctaagctggcattcataatcgtgatggaatatctggcgctgctgccaaggttggggcactcaggaatgattctcgcgcattgtaacctgaggctacccgtggattgctgtatgtgttaccgatttgtcgatgagatccgtctgcttgagcagctgaccagcgacttcatagattccctatactacatcttctcgatatcgatcatctcaatcttttttagtgtcaccttcttttttctcctactgtccctaggccctacgccttgtttttccgtatcaaattttttgtcttag

SEQ ID NO: 214601 - DNA, 2790 bp, synthetic construct
  misc_feature 1..2790: note = Description of Artificial Sequence: Synthetic coding sequence
  source 1..2790: mol_type = other DNA
atgaaaaagatgtcccggaacgtgctgttacagatggaggaagaggaagatgacgacgatggtgatattgtcctagagaacctcgggcagacaatcgttccggacttggggagtcttgaaagccagcatgactttcgcactcccgaatttgaggagttcaacggtaagcccgattcactcttttttaacgacggccaaaggcgtatcgattttgtgttagtgtatgaagacgaatcacgcaaagaaactaataaaaaggggaccaacgaaaagcagcggagaaaacggcaagcctacgagtccaatctaatttgccacgggctccagctcgaggctacccgatccgtcctggacgacaagcttgtcttcgtcaaggtacacgctccttgggaggtgctgtgcacatatgccgagattatgcacatcaaattacccctgaagcccaacgacctcaagaatagatcttcagccttcgggacacttaattggttcacaaaggtcttgtccgttgatgaatcgatcattaagcccgagcaagagttctttacggctcctttcgaaaaaaatcgcatgaacgatttctatatcgtggatagggatgcgttctttaatcctgcgacccgttccaggatcgtatacttcattctgtcacgggtgaagtaccaagtgataaacaatgtctccaaatttggaattaaccgcctggtcaactccggaatctacaaagcggcattccctctgcacgattgtaaatttaggaggcagagcgaggatccttcttgtccaaatgaacggtacttgttataccgcgaatgggctcatcccagaagtatttataagaaacagcctctcgatttgatacggaagtactacggggaaaagataggtatttacttcgcatggttaggctattatacacagatgttacttcttgccgctgttgttggcgttgcatgcttcctttatggttacctgaatcaagataattgcacttggtctaaagaagtgtgtcacccagacattggaggtaaaattataatgtgcccccagtgtgacagactctgtccgttctggaagctgaatattacgtgtgagagctcaaaaaagttatgtatctttgactcattcggcactttagtcttcgcggtgttcatgggcgtgtgggtcaccctgttcttagaattttggaagcgccgtcaagcagagctggagtacgagtgggataccgttgaattgcaacaagaggaacaggcacgcccagaatatgaggccagatgtacacatgtagtgataaatgaaatcacccaggaagaagagcggatccccttcactgcgtggggaaagtgtattcggattaccctgtgtgcttctgctgtctttttttggattctcctaatcattgcttcagtgatcggcataattgtgtaccggctgtcagtgttcattgtatttagtgccaagcttcccaaaaatatcaatggtaccgaccccatccaaaagtatcttacgccccagacagctacgagcatcaccgctagcatcatctctttcatcatcatcatgatactcaatactatttatgagaaggtcgcaataatgattactaacttcgaactgcctcgcacacaaactgactacgaaaattccctgactatgaagatgtttttgttccagtttgtaaattactatagttcatgtttttacattgccttctttaagggaaagtttgtcggatacccaggcgaccctgtttattggttggggaagtatcgtaatgaagagtgcgatcctggcggttgcctgctggagttgacaactcagctgacgattattatggggggtaaggctatctggaacaatatacaggaggtactgctgccttggattatgaatctgattggacgatttcatagggtttctggctcagagaagattactcccagatgggagcaagattatcatctgcaacctatgggcaagctgggcctgttctatgaatatctggagatgattattcagtttggcttcgtgacgctcttcgtcgctagcttccctctcgctcccctgctggcactggtcaacaatattctcgagatacgcgtagatgcttggaagctgactacccagtttaggcgtttggtacctgagaaggcccaggatatcggggcttggcagcccatcatgcagggaattgcaattctggctgttgtcactaatgcgatgatcatcgccttcacctccgacatgattccacggctggtgtactattggtcttttagcgttccgccttatggagatcacaccagctatactatggaaggctacatcaataacaccctgagtatatttaaggttgcagattttaaaaataagagtaagggtaatccctattctgacttgggcaaccatacaacgtgccggtatcgcgatttccgttaccctcctggacacccacaggaatataaacacaacatctattactggcatgtgatcgcagccaagttggctttcataatcgtgatggagtacctggctttactccccaggctaggacactccgggatgattctagcccattgcaatctgagactgcccgtggactgttgcatgtgctacagatttgtggatgagatccggctcctggagcaacttacatcagatttcatcgacagtctgtattatatattctcgatttctatcatttcaattttcttcagcgtgacatttttcttcttgctgcttagcctgggacctaccccttgcttctccgtgtcgaatttcctgagttag

SEQ ID NO: 214602 - DNA, 2679 bp, synthetic construct
  misc_feature 1..2679: note = Description of Artificial Sequence: Synthetic coding sequence
  source 1..2679: mol_type = other DNA
atgttttgcgccgcagttctcgagaacctgggtcagaccattgtcccggaccttgggagcctggagagccagcatgatttccggaccccggagttcgaggagttcaacggcaaacctgatagcctctttttcaacgatgggcagagacgaatcgactttgtcctggtctacgaagacgagtctaggaaggaaactaacaaaaagggcacgaacgagaaacaacgccgtaagagacaggcctatgaatcaaatttgatttgtcacggcctgcagctcgaggcaacacgttccgtactggacgacaagctcgtgtttgtgaaggtccacgcgccttgggaggtcttgtgtacttatgcagagatcatgcatattaaactacctttgaaacccaacgacctgaaaaatcgcagctctgcattcggaacgctgaattggttcaccaaggtgctcagcgtggatgagagtattattaaaccagaacaagagttcttcacggctccttttgaaaagaaccgtatgaacgatttctatattgtcgacagagatgcgttcttcaatccagccacccggagccgaattgtatatttcattctgagccgtgtgaagtatcaggtaatcaataacgtgtctaaattcgggatcaataggcttgttaattccggcatttacaaagccgcttttccgctgcacgactgcaaatttcgcaggcagagcgaagacccatcctgcccgaatgaacgctatctgctttacagggaatgggcacatccccgatcaatctacaaaaagcagcccctggacctgattcggaagtactatggagagaaaatcggcatttactttgcatggctcgggtattacacgcagatgctccttctcgccgcagtcgtgggggtggcctgctttttatatggctatctgaaccaggataattgcacatggagcaaagaggtgtgccaccccgacatcggaggcaaaatcataatgtgtccccagtgtgatcgcctctgccccttctggaaactcaatattacttgtgaatcctccaagaagctgtgtatatttgattcgttcggaacgttggtcttcgcagtgtttatgggtgtctgggtcaccctgtttctcgagttctggaagcggaggcaggctgaactggaatacgagtgggacacagtggaacttcagcaggaggaacaggcacggcctgaatatgaagccaggtgtacccacgtcgtgataaatgagatcactcaagaagaggagcggatcccctttacagcatggggcaaatgcatacgcatcacattgtgtgcaagtgcagtgttcttctggattttgctgattattgccagcgtgattgggatcatcgtgtaccgactgagcgtatttattgtcttctctgctaagctgcctaagaacatcaacgggacggaccctattcagaagtaccttactccccagactgccacaagtattactgcctccattatcagttttattattattatgattctaaatactatctatgaaaaggttgctattatgataacgaacttcgagctcccacgcacacaaactgattacgaaaactcactgaccatgaagatgtttctcttccagttcgtcaactactatagcagctgtttttacatcgccttttttaaaggtaagtttgtggggtaccccggagatcctgtttattggctgggaaagtataggaatgaggagtgtgatcctggaggctgtctgctggagcttacaacacagttgacgatcattatggggggtaaagcaatctggaataatatccaggaggtattactgccctggattatgaatctaattgggcgtttccatagggtgtccggttctgagaagatcacacctagatgggagcaggactaccacctgcagccaatggggaaactaggactattctatgagtatctagaaatgattatccagttcgggtttgtgacgctctttgttgcctcgttccctcttgcccctctcctggcgctcgttaataacatccttgagatcagagtcgacgcttggaagttgacaacccagttccgcaggttagtgccggaaaaagcgcaggatatcggcgcttggcagccaattatgcaagggatagccattctggcagtggtcaccaacgctatgataatcgcctttacctccgacatgataccccgtctggtgtattactggagcttcagcgtgcccccatacggagaccacacttcttatacaatggaaggctacatcaacaatacactgtctatctttaaagtggcagacttcaagaacaagagcaagggtaacccctacagcgatcttggcaatcatacaacctgcagatacagagactttcgatacccacccggtcacccacaggagtacaagcataatatctactattggcatgtgatcgctgctaaactcgcattcatcatcgtgatggagcacgtgatctattccgtgaaattctttatctcttatgcaattcctgacgtttcgaagcgtacaaaatcaaagatacagagggagaagtacctaacccaaaagctcctgcatgagaatcacctgaaggacatgacaaagaacatgggcgttatcgcagagcggatgatcgaggccgtggataataacttacgtccgaagtccgagtag

SEQ ID NO: 214603 - DNA, 2796 bp, synthetic construct
  misc_feature 1..2796: note = Description of Artificial Sequence: Synthetic coding sequence
  source 1..2796: mol_type = other DNA
atgaaaaagatgagtcgtaacgtgctcctgcaaatggaggaggaggaagacgatgacgacggagatattggagatgttcctgccagcagacggccattccttacgcctcacactcacttgccaagcagtctggtccttgagaatctaggccagactatcgtgcctgacctagggtctctggaaagccagcatgattttcgtacccctgaattcgaggaattcaatggaaagcccgacagcttgtttttcaacgatgggcagaggagaatcgacttcgtgctggtgtatgaggacgagagtcggaaggaaactaacaaaaaaggcaccaacgagaaacaaaggcggaagcgtcaggcttatgagagtaacctgatctgtcacggattgcagctggaagccacacggagtgttctcgacgacaagttggttttcgtcaaggtgcacgcgccatgggaagtcctgtgcacctacgccgaaatcatgcacattaagcttccactgaagcctaatgatctcaaaaaccgtagtagtgcttttggcaccctgaactggttcaccaaagtactgagtgtagacgagagcatcattaagcctgagcaggagttcttcactgccccattcgaaaaaaacaggatgaacgacttttacatcgtggatcgagatgccttttttaatcctgccacaagatcgcggattgtgtattttatcttaagcagagttaagtatcaggtaataaacaacgtatcaaagtttggaattaatcgtctggtcaacagtggaatctataaagcggctttcccattgcacgattgcaagttcagaaggcaatccgaagatccaagttgccctaacgagcggtacctactgtacagagagtgggcacacccacggagcatttacaaaaagcaaccactggacctgattagaaaatactacggggagaagatcggcatttattttgcatggctaggctattatacccaaatgttgcttctcgctgccgttgtcggcgtggcatgtttcctgtatggttatcttaatcaggacaactgcacttggtctaaggaggtgtgtcatccagatataggaggcaagattattatgtgccctcaatgcgaccgcctgtgcccattctggaagctaaacatcacttgtgagtcctccaaaaagctgtgtatctttgattcgttcggcacgcttgttttcgctgtgttcatgggggtctgggtgaccctgttcctagaattctggaaaaggcgccaggcagaactggagtatgagtgggacaccgtggagctccagcaggaggaacaggcccgtcctgagtatgaggccaggtgtacacacgtcgttatcaacgaaatcactcaagaagaagaaagaatccctttcactgcgtgggggaagtgcatccgcatcaccctgtgcgcgagtgctgtgtttttctggattttgctgatcatcgcctcagtgatcggaatcatagtgtatcggctgagcgtttttatcgtgttttctgccaaactgcctaagaacataaacgggactgacccgatccagaaatatttaaccccacagacagccacctcgattacagcctccattatcagttttatcattatcatgattctgaacacgatatatgaaaaggtggcaatcatgattacaaattttgagctgcctaggacccagaccgattacgagaacagcttaaccatgaagatgttcttatttcaattcgttaactactatagcagctgcttctacattgcatttttcaaaggtaaatttgtgggatatccaggggatcctgtatattggctgggaaagtaccggaacgaagaatgcgatccgggaggatgtttgttagaattgaccacacaattgactataattatgggcggtaaggcaatttggaacaatatccaggaggtactgctaccctggattatgaatctgattggcagattccacagggtgagtgggagcgagaaaattacaccccgttgggaacaggattatcacttgcagccaatgggcaaactggggcttttctatgaatatctggagatgattattcaatttggcttcgttactctgtttgttgcctctttcccactggcgccactgttggctttagtgaacaacattctggagattagagtggacgcctggaagctcaccacccagtttcggaggctcgtaccggagaaagcccaggacataggtgcttggcagccaataatgcagggcatcgctattctggctgtggtgaccaacgcaatgattattgccttcacatctgacatgattcccaggttggtgtactactggtctttctccgtgccgccatacggagatcacaccagctataccatggagggctatattaacaatactttgtctatcttcaaggtcgctgattttaagaataaatccaagggcaacccatactctgatcttggtaatcatacgacgtgcaggtatagagattttcggtatcctcctggccacccacaagaatacaagcataatatctactattggcacgttatagctgccaagttggccttcataatcgttatggaacatgtgatctatagtgtgaagttctttatcagctacgccatcccagatgtgagtaagagaacgaaatccaaaatacagcgcgaaaagtatttgacacagaaactcctacatgagaatcacctcaaggatatgacgaaaaacatgggggtcatcgccgagaggatgatcgaggctgtagataataacctaagacccaagtccgagtag

SEQ ID NO: 214604 - DNA, 501 bp, synthetic construct
  misc_feature 1..501: note = Description of Artificial Sequence: Synthetic coding sequence
  source 1..501: mol_type = other DNA
atgatgctccactcagccctggggctgtgtctgttgctggtgacggtgtcttcgaacttagcaattgccataaagaaggaaaagaggcccccacagacactaagtcgcggatggggcgacgatatcacatgggtccagacttatgaggaaggccttttctacgcacaaaaatctaaaaagccactcatggtaatccaccatctggaggattgccaatattcccaggctctgaagaaggtgttcgcacaaaatgaggagattcaagagatggcccaaaacaagttcataatgctgaatctgatgcatgagaccacagacaagaacctgtccccagatggccagtacgttccacgcattatgtttgtggaccctagtcttactgttcgggctgatattgccggaagatattctaatcggttatatacttatgagccgagggatctcccgctgctgattgagaatatgaaaaaagctcttcggttaatacagtcagagttatag

SEQ ID NO: 214605 - DNA, 453 bp, synthetic construct
  misc_feature 1..453: note = Description of Artificial Sequence: Synthetic coding sequence
  source 1..453: mol_type = other DNA
atgggtgccgcagtgttttttggctgtaccttcgttgccttcgggcctgcctttgccttgttcctgatcactgtggctggcgacccattgcgggtcattattttggtcgcaggcaaggccgacgaagggctggcctctctgtccgaggatggtcggtctccaatttcaatcagacagatggcctacgtctcagggctgtcctttggaatcatcagtggtgtgttctccgttattaacatactggctgacgccctgggtccaggagtggtggggatacacggagactcaccatattactttctgaccagcgctttccttactgccgctatcatacttctccacactttttggggggttgtgttcttcgacgcctgtgagcgtcgaaggtactgggcacttggtctggtggtcggcagtcatctgctgacatccggcctgacttttctgaattag

SEQ ID NO: 214606 - DNA, 744 bp, synthetic construct
  misc_feature 1..744: note = Description of Artificial Sequence: Synthetic coding sequence
  source 1..744: mol_type = other DNA
atgggggctgcagtgttttttggttgcacctttgtcgccttcggccctgcttttgccttgttcctcattacagtggctggcgaccctcttagagtgataattctggtcgccggagcgttcttctggcttgtctcactgctgttggcatcggtcgtttggtttatcctggtgcacgtcaccgaccgaagcgatgctcgccttcaatacggtctgctcatattcggggctgcagtaagcgtgctcctgcaggaggtcttcaggtttgcctactataagctgctgaagaaggccgatgagggcctcgcctccctcagtgaagatgggagatcaccaatcagtattcggcagatggcctatgtatccggcctgagcttcggcatcatcagcggtgtcttcagcgtgattaatattctggctgatgctctcggacctggggttgtcggtatccatggggactctccttactactttttgacctccgctttcctcacagccgctatcatcctcttgcacacgttctggggtgtggtcttcttcgatgcgtgcgaacgcaggaggtattgggcgctgggcctggtggtgggatctcacctcctgactagcggtctgaccttcctcaatccctggtatgaagcatctttgctgcccatctacgcggtgactgtatctatgggcttatgggcatttataactgcagggggaagcttgagaagcatccaaagatcactgctttgcaaagattag

SEQ ID NO: 214607 - DNA, 798 bp, synthetic construct
  misc_feature 1..798: note = Description of Artificial Sequence: Synthetic coding sequence
  source 1..798: mol_type = other DNA
atgggcgctgccgtattttttggatgcactttcgtagccttcgggccagcgtttgcattgtttctgattacagtggcaggcgatcccctgcgagtgatcattctggtcgcaggcgctttcttttggttggtaagtctccttctcgctagtgtagtctggtttatcctcgtgcacgtgaccgaccgatcggatgcccgacttcagtacggactactgatcttcggtgccgctgtgtccgtgctgctgcaggaagtttttcgcttcgcctactataagttgctcaaaaaagccgatgagggtctcgcgtccctgtccgaagacggtaggtctccaatctccatcaggcagatggcttatgtgtctggcctatctttcggcatcataagcggggtattcagcgtgattaacatactggctgatgcactgggacccggagtcgttgggatacatggagattcgccttactactttctaacctccgcctttctgaccgccgctatcattctgttgcacacgttctggggcgtagtgttcttcgacgcatgtgagcgtagacggtactgggctctgggactggttgtgggcagtcatctcctgaccagtggattgacattcctgaacccctggtatgaagcctcccttctgcccatctatgccgtgacggtgtctatgggattgtgggccttcatcacggctggcggttccctaaggtcaatccaacgctcattgctttgccgaagacaagaggattcacgggtcatggtgtatagcgctctgcgaatccctcctgaagattag

SEQ ID NO: 214608 - DNA, 588 bp, synthetic construct
  misc_feature 1..588: note = Description of Artificial Sequence: Synthetic coding sequence
  source 1..588: mol_type = other DNA
atgggtgccgcagtcttcttcggttgcacttttgtggcctttggtcccgctttcgccctgtttctgattactgtcgcaggcgatccacttagggttatcatcctggtggcgggtcggtgcagtgccctgccaaccaccagttgtctgattagtgggctctctttcggaataatttctggcgtcttcagcgtcattaacatcctggccgacgccttaggacccggagttgtaggtattcacggggatagcccctattattttcttacatccgcttttctcaccgctgctatcatattactgcacaccttctggggagttgtgtttttcgacgcgtgcgagcgccgacgttactgggctctgggcttggtggttggttcgcacctgctgacctccggtctgactttcctaaatccgtggtacgaagctagtctgttgccaatttatgctgtcacagtttccatggggctgtgggccttcattacagcaggaggcagcctccgcagtattcagaggagtctactatgcagaagacaggaggattcacgcgttatggtctacagcgccctgcggatcccaccagaggattag

SEQ ID NO: 214609 - DNA, 774 bp, synthetic construct
  misc_feature 1..774: note = Description of Artificial Sequence: Synthetic coding sequence
  source 1..774: mol_type = other DNA
atgacagccgcagtgttcttcggatgcgcctttattgcttttggccctgccttggcactctatgtctttacaattgcaacagagcctctcaggatcattttcctgatcgccggagcttttttttggctggtgtctcttttaatcagttccctggtgtggtttatggccagggtaatcatcgataataaagacggccctacgcagaagtacctgctgatattcggcgcattcgtttctgtgtacattcaggaaatgttcagattcgcctattacaagctgctgaagaaagcctcagaggggctgaaatctatcaaccccggagagacagccccatcaatgcgcttgttggcttacgtgagcggactgggcttcgggataatgagtggagtgttctcttttgtgaataccctctcggactccctgggtcccggtaccgtcggcattcacggcgactcaccacaattctttctgtatagtgcctttatgactctggttatcatactgctgcatgtcttttggggcatagtgttctttgatggatgcgaaaaaaaaaagtggggaatcctgctcatagtcctgcttacacacttgcttgtctctgcccagactttcatcagtagctactatggcattaatcttgctagcgcatttatcatccttgtacttatggggacatgggccttcctggctgcgggtggatcttgcagatcattgaaactctgcctcttgtgccaagacaagaatttcttgctgtacaatcagcgcagtcgatag

SEQ ID NO: 214610 - DNA, 246 bp, synthetic construct
  misc_feature 1..246: note = Description of Artificial Sequence: Synthetic coding sequence
  source 1..246: mol_type = other DNA
atgaccgcggcagtgttcttcggctgcgcttttattgcatttggcccagccctggccttatatgtcttcacaatcgccacagagcctctgcgaattatcttccttatcgcaggcaggcgtgttgaaacttgcaaaaatacagaggccccagactgcgcttccccatctggcagtctcagcttcctcttggttggcgtctctactgacttcgttccctgtctagtacatggcaagtctcattattag

SEQ ID NO: 214611 - DNA, 651 bp, synthetic construct
  misc_feature 1..651: note = Description of Artificial Sequence: Synthetic coding sequence
  source 1..651: mol_type = other DNA
atgacagccgctgtgttttttggctgtgcatttatcgccttcggccctgctctggctctgtatgtcttcaccatcgccacagagcccctcagaattattttcttgatcgccggagccttcttctggctggtgtcactgcttatttccagccttgtctggttcatggccagagtgattatagataacaaagatgggcctacacagaagtatttgctgatattcggcgcattcgtgtccgtttacattcaggagatgtttagattcgcttattacaagttattgaaaaaggccagtgaaggtttgaaaagcattaacccaggagaaacggctccatcgatgcggttactcgcttacgccttcatgacattggttataatcttactccacgtgttctggggcatcgtgttctttgacggctgcgaaaagaaaaagtggggcatattgttgatcgtgttactaacacacctcttagtgtctgcgcagacctttatttcctcctactacgggattaatctcgcttctgcatttatcatcctggttttaatgggaacttgggcgtttctggccgctggcggatcctgcaggtcactgaagctgtgtctgttgtgtcaggataaaaactttttgttgtacaaccagcggagccgctag

SEQ ID NO: 214612 - DNA, 1695 bp, synthetic construct
  misc_feature 1..1695: note = Description of Artificial Sequence: Synthetic coding sequence
  source 1..1695: mol_type = other DNA
atggccacagccgagaggcgcgctctcggtatcggttttcagtggctttccctggcaaccctcgtgcttatatgtgccggtcagggcggacgacgggaagacgggggacccgcatgctacggagggttcgacctttactttatccttgataaatcaggaagtgtgctacaccattggaatgagatttattacttcgtggagcagctggcacataagttcatctcacctcagttgcggatgtccttcatcgtgttctcaacacggggtaccactctgatgaaactgaccgaggaccgagagcagatcaggcagggactcgaggagcttcagaaggttctgcccggtggcgacacctacatgcacgaaggattcgaaagagcatcagaacagatctactatgaaaaccggcagggataccgtacagcatctgtgattattgcgcttaccgacggcgaattacacgaagatctttttttctactctgaacgggaagcaaaccgtagtagggacctgggtgctatcgtgtattgcgtgggggtgaaggactttaatgagacacaactagcacgcattgcagatagcaaagatcacgttttccccgtgaacgatggtttccaggccctccagggcatcatacattcaatactcaaaaagtcatgcattgagatcctggcggctgagccatctactatttgcgcaggagagagttttcaagtcgtcgtgcgtgggaacggattccgacacgccaggaatgtagaccgggttctttgttcattcaagatcaatgatagcgttacactgaatgagaaacccttcagcgtcgaggatacatacctgctatgccctgccccaatccttaaggaggtgggcatgaaggcagccctgcaggtgtctatgaatgatggcctgtcttttattagcagctccgttattattactaccacacattgcagtgacggcagtatactggcaattgcacttttaattctgtttctgttattggcactggcactgctctggtggttctggccactgtgttgcaccgttattatcaaagaggtgccaccgccacctgcagaagagtctgaagaagaggacgacgatgggctccccaagaagaaatggcctaccgtcgatgcgtcttactatggcggaaggggggtgggcggaataaagcgtatggaagtgcggtggggggaaaagggaagcaccgaggaaggcgctaaactagagaaggccaaaaatgcccgtgtcaagatgccggagcaagagtatgagttcccagagccaagaaatctaaacaacaacatgaggcggccatcaagccccagaaagtggtacagccccattaaaggaaaactcgatgcactgtgggtgctcctgagaaaaggctacgatcgggtgtcagttatgagaccacaacccggagatacaggccgttgcatcaatttcacacgcgttaagaacaaccaaccagccaaataccccctgaataatgcttaccatacttcctcaccccctcccgctcctatctacaccccgcctcctcccgcaccacactgtccccctccccctccctcagctccaactccacccatcccaagtccaccctccacactgccccctccaccccaagcaccacccccaaatcgtgctccccctccaagccgacccccacccaggccatctgtatag

SEQ ID NO: 214613 - DNA, 1107 bp, synthetic construct
  misc_feature 1..1107: note = Description of Artificial Sequence: Synthetic coding sequence
  source 1..1107: mol_type = other DNA
atggctacggcagaaagaagggcgttaggaattggctttcagtggctgagtctagcaactcttgtactgatttgtgctggccagggaggaagacgagaggacggaggccctgcgtgctacggcggatttgacctgtattttattctggacaagtctggttcggtcctccatcactggaatgagatttactacttcgtggaacagttggcccacaaatttatctccccccagctcagaatgagtttcatcgtcttttctacccggggtacaactctgatgaaactgacagaagatcgggaacagattagacaaggactggaagagctgcagaaagtgctcccaggaggcgacacctacatgcatgagggtttcgaaagagccagtgagcaaatctactacgaaaacagacaggggtatcggaccgcctcagttattatcgcacttactgacggagagctgcatgaagatctcttcttttattcagaaagggaggctaaccgctccagagacctgggagccattgtttactgtgttggtgtgaaagattttaacgagacccagctggcccgtatcgcggattccaaggatcatgtatttcccgttaatgatggcttccaagcgctgcagggcattatccattcaatactgaaaaagagttgcattgaaattctcgcagctgaacccagcaccatctgtgccggagaatcatttcaggtggtagtgagggggaatggctttagacatgcaagaaatgtcgatcgtgtcctttgcagctttaagataaacgattctgtcactctcaacgagaaacccttttctgtggaggatacttaccttctgtgccctgccccaattctcaaggaagttggcatgaaggctgcactgcaggtgtccatgaatgatggtctgtccttcattagttcctcagtgataatcacaaccacacattgcagcgatgggtccattctggctatcgccttgctgatcctgttcctgctgcttgccctggcactgctgtggtggttctggcctctgtgttgcacagttattattaaggaagtaccacctccccctgcagaagaatccgaggaaaacaagatcaagtag

SEQ ID NO: 214614 - DNA, 1002 bp, synthetic construct
  misc_feature 1..1002: note = Description of Artificial Sequence: Synthetic coding sequence
  source 1..1002: mol_type = other DNA
atggccacagcggagcggagggccctcggtatcggcttccagtggctgtccttagccaccctcgttctgatttgcgccggtcaaggcggaaggcgagaggatggcggaccagcatgttacggtggctttgatttatacttcatattagataaaagcgggagcgttctgcatcactggaatgaaatctactactttgtggagcagctcgcgcacaagttcatttctcctcagctgagaatgagcttcattgtgttttcaacccgaggcaccaccctgatgaaactgacagaggacagggaacagatccggcagggcttagaagaactgcagaaggtgctgccaggcggagacacgtacatgcacgaggggtttgaacgcgcatcagaacaaatttactacgaaaataggcaaggctaccgcaccgcatctgtaataatcgctctgaccgatggcgaacttcatgaagatctcttcttctacagtgaaagagaggctaacaggtccagggacttgggagcaatagtgtattgcgtgggtgtgaaagattttaacgagacacagctggcacggattgcagatagcaaggatcatgtgttccccgtcaacgatgggtttcaggctttacagggcatcatccatagtattctcaaaaaatcgtgtatcgagatacttgctgcagagccaagcactatctgtgccggagagtctttccaggtggttgtgcggggaaatggctttcgacacgcaagaaatgtggatcgcgtgctatgttccttcaaaattaacgactccgtgactttgaatgaaaagcccttctctgtggaagatacctacctcctgtgccccgctccaattctgaaggaagtgggaatgaaagctgccctgcaggtgtctatgaacgacgggttgagctttatctcgagctctgtgatcataactacgacccattgctccctgcataagatcgcttcgggcccaaccactgccgcatgcatggagtag

SEQ ID NO: 214615 - DNA, 969 bp, synthetic construct
  misc_feature 1..969: note = Description of Artificial Sequence: Synthetic coding sequence
  source 1..969: mol_type = other DNA
atggtggcagagcgctcgcccgcacggagtcccggttcatggctctttccaggcctctggttactggtgctgagtggtcctggagggctgctgcgtgcacaggagcagccttcatgtaggcgtgcatttgatctatacttcgttctggacaaaagtggcagtgtggccaacaattggatcgaaatctataattttgtccagcaactagcagaaagattcgtgagtccagagatgcgtctgtcattcattgtgttttcctctcaggccacaattattcttcccttgacaggcgaccgaggaaagatttccaaaggactcgaggacttgaagcgagttagcccggtcggagagacatacatacatgagggcctcaaattggccaacgaacagatccagaaggctggcggactgaaaaccagcagcataattatagcattgaccgacgggaaattagatggcctcgtacctagctatgcagaaaaggaggctaaaatctctcggtcccttggagcaagcgtatactgcgtgggagttctggacttcgaacaggctcaactcgagcggatcgccgatagtaaagagcaagtgttccctgtgaagggaggatttcaggctctcaaaggtataattaacagcattctggcccagagttgtacggaaatcctggaattacaaccgtccagcgtgtgcgtcggggaagagttccagatcgtgctcagtgggagagggttcatgctaggatcacgcaacggtagtgttctctgcacctacaccgtaaacgagacctacaccactagcgtgaagcctgttagcgttcagctgaatagtatgctgtgccccgctccaatcttgaataaggccggtgaatggggactcacagttacccaggctggggtgaaatggcacgatctgacccactgtactttcggacttagcggttcaggcgatcctcctacgagcgcctcctag

SEQ ID NO: 214616 - DNA, 1470 bp, synthetic construct
  misc_feature 1..1470: note = Description of Artificial Sequence: Synthetic coding sequence
  source 1..1470: mol_type = other DNA
atggtggcagagaggagtcccgcaaggtctcccggtagttggctgtttcctggactctggctcctggtcttatccggccctggtggtcttctccgggcacaggagcaaccctcttgtagacgtgccttcgacctatacttcgttctggataagtccggatccgtcgccaacaactggatcgagatttataatttcgtccaacagctcgccgagcgctttgtctctcctgaaatgaggttatctttcatcgttttctcctcccaggccaccattattcttcctctgaccggagatcggggaaagatcagcaaaggattggaagacctgaagcgcgtttctcctgtcggagagacctacatacatgaaggcctcaagctggccaacgaacagattcagaaggccggagggctaaagaccagctcgatcatcatcgctttaactgatgggaaactggacggactggtcccctcatacgctgagaaagaagctaaaatatctcgctccctgggcgctagcgtgtattgcgtaggagtgcttgacttcgaacaggctcaactggagagaatcgccgacagtaaggagcaagttttcccagtgaaggggggatttcaggctttgaagggtattatcaacagtatcctggctcagtcttgcaccgaaattcttgaactccagcccagctccgtatgcgtcggtgaggaatttcaaattgtcctgtcgggacgtggattcatgctaggaagtagaaatgggtccgtgttgtgtacatataccgtcaacgagacatacactacaagtgtgaaacccgtctctgtgcagctgaactccatgctgtgtccagcgcctatcctgaacaaagccggagagacccttgatgtgtctgtcagcttcaatggcggaaaatctgtaatcagcgggagcctgatcgtgactgcgaccgagtgtagcaacggaattgccgctataatagtgatcctggtgctcctgctgttactcggcattggcttgatgtggtggttctggccgctctgttgtaaggtggtcattaaagacccccctccaccccctgctcctgcacccaaggaggaggaggaggaacctctgccgaccaagaagtggccaaccgtcgatgcatcatattacggcggaagaggcgtgggagggattaagcggatggaggtacgatggggggataaaggaagcactgaggaaggggctagactggaaaaggccaagaacgctgtggtgaagatccctgaggaaacagaggaaccgattagacccaggccacctcgcccaaaaccaactcaccagccccctcagacaaagtggtacactcctataaaggggcgtctggacgctctgtgggcgcttctgaggcgacaatacgatcgggtgtccctgatgaggccccaggaaggcgacgaagtatgcatttgggagtgcatcgagaaggaacttaccgcgtag

SEQ ID NO: 214617 - DNA, 1161 bp, synthetic construct
  misc_feature 1..1161: note = Description of Artificial Sequence: Synthetic coding sequence
  source 1..1161: mol_type = other DNA
atggtggcagagcggagcccagcccgaagccccggatcttggctatttccaggcctttggctgctggtactctcagggcctggaggcctgctgcgagcccaggagcaaccttcctgcaggagggcttttgatttgtatttcgtcctggacaagtctggtagtgtggccaataattggatcgaaatatacaattttgtgcagcaattggccgaacgtttcgtaagtccagagatgcggcttagcttcatcgtattcagttctcaagccaccatcatactgccccttaccggggatcggggaaaaatctccaaaggtctggaagatttgaaacgggttagtcctgtcggggagacgtacattcacgaaggattgaagctcgctaacgagcaaattcaaaaggcagggggtttgaagacgtcttcaatcattatcgcactgactgacggtaaacttgatggactagttccgtcttacgccgaaaaggaagccaagatttcgagatctctgggcgcatcagtatattgtgtcggggtgttggattttgaacaggctcagctagagcggatcgccgacagtaaggagcaagtgtttccagttaaagggggtttccaggcactgaagggtataatcaatagctccaacggaatcgccgcaatcatcgtgatcctcgtgctcttattgctgctgggcattggtctgatgtggtggttttggccactgtgttgcaaggtggtgattaaagaccctccacctccgcctgccccagcacccaaggaagaagaggaagaacctttaccaacaaagaagtggcccacagtggacgccagctactatggtggacgaggagtcggcggaattaagaggatggaggtgcgctggggggacaagggttctacagaagaaggagctcggttagagaaggctaagaatgcagtggtcaagatcccagaagagacggaggaacctatacgcccacgaccaccgcgtcctaagccaacccatcagccaccgcagactaaatggtacacgccaataaaagggaggttggacgctctgtgggccttattaaggaggcaatacgatcgcgtttcactcatgagaccacaggaaggcgatgaagtctgtatctgggagtgcattgagaaggaactgaccgcgtag

SEQ ID NO: 214618 - DNA, 1467 bp, synthetic construct
  misc_feature 1..1467: note = Description of Artificial Sequence: Synthetic coding sequence
  source 1..1467: mol_type = other DNA
atggtcgcggagagaagccccgctagatctcccggatcttggctatttccaggtctgtggcttctggtgctgtctggcccaggaggcctgctgcgtgcgcaggaacagccttcgtgtcgtcgtgccttcgatctttactttgtactagataagagcggatccgtggccaacaactggattgaaatctataattttgtacagcagctggcagaacgctttgttagcccagaaatgaggttgagttttatcgtgttcagcagtcaggcaaccattattctgccactgacaggagatagaggcaagattagtaaaggcttagaagatctgaaaagggtctctccggtgggtgaaacttatatccacgaaggtttaaagctggccaacgaacaaattcagaaagccggagggctgaagaccagttctattattattgccttgacggacgggaagctggacgggttggtgccctcttacgccgaaaaggaggccaagatttctcggtccctcggggctagtgtgtactgcgttggggtccttgactttgagcaggctcagcttgaacgcattgctgattccaaggagcaggtattcccggtcaaaggtggtttccaggccctcaagggaattattaatagtatcctggctcagtcttgcaccgaaatactagagcttcagccttcatccgtctgcgtgggagaggagttccaaatcgtgctctccggacgaggcttcatgctcggatcaaggaacggatccgttctttgtacatacacggttaatgagacctatactacaagcgtgaaacctgtgagtgtgcaactgaactcaatgctgtgccccgctccgattctaaataaggccggagaaaccctggatgtttctgtctcttttaatgggggaaagtctgtaatctccgggagtctcatagtgaccgccacagagtgtagtaatgggatagccgcaatcatcgtaatcctggtgctgctgctgctgctggggattgggctaatgtggtggttctggcccctatgttgcaaggtggtaatcaaggatccccctcctccccctgcaccagctcccaaggaagaggaagaagaacccctacccacaaagaaatggcccacagtggacgcatcctattatggaggacgtggtgtggggggaataaaacggatggaagtgcgctggggggataaggggtcaacagaagagggcgcacggctggagaaagccaaaaatgccgtggttaagatcccggaagagacggaggagcccatccgcccacggcctccgagaccaaagcctactcaccagccgcctcagaccaagtggtatacacctattaagggcagactagacgcactgtgggcccttttgagacggcagtacgaccgcgtgagcctcatgcgacctcaggagggcgatgaaggcagatgtattaatttcagcagagttcctagccagtag

SEQ ID NO: 214619 - DNA, 2217 bp, synthetic construct
  misc_feature 1..2217: note = Description of Artificial Sequence: Synthetic coding sequence
  source 1..2217: mol_type = other DNA
atgcgcggtcctagcggggcactgtggctcctgctcgccctgagaacggtcctgggcggtatggaagttagatggtgcgccacctctgaccctgagcagcacaagtgcggaaacatgagcgaggcttttcgggaggccggaatacagccatctctgttatgtgtgagagggaccagcgctgatcactgcgtccagctcatcgctgcacaggaggcagatgccatcaccctggatgggggtgctatctacgaagccggaaaggagcacggcctcaagcctgtcgtgggagaggtttacgaccaggaggtaggtacctcctattatgccgtggccgtagttcggagatcttctcacgtgaccatcgacacactgaaaggggtcaagtcatgccacacaggaattaatcgcaccgtgggatggaatgtcccagttggctacttagtggagagcggcagactatctgtcatgggatgtgatgttctgaaggccgtgtctgactactttggtggctcttgcgtgcctggggcaggcgagacaagttactctgaatccctgtgccgtctgtgtcgaggtgacagttccggggagggggtctgcgacaaaagccctctggagaggtactacgactactctggggcattccgatgtctggccgaaggggctggtgatgtcgcctttgttaaacattctactgtgcttgaaaacaccgatggaaaaaccctgccatcatgggggcaagcgcttttaagccaggactttgagttgctgtgtagggacggcagtcgcgctgatgtaactgagtggcgacagtgccacctcgcgagggtgcccgctcatgccgtggtagtgcgggctgacacggacgggggactgatattcagactgctcaatgaaggacaacgcttgttttcccatgagggctccagtttccagatgttcagcagcgaggcatacgggcagaaagatctgcttttcaaggatagcactagtgaattagttcccatagcgacccagacttacgaagcctggctgggacacgagtacctccacgcaatgaagggcctcctctgtgaccccaatcggctccccccatacctgaggtggtgcgtgctgagtacccctgagatacagaagtgtggagatatggctgtggccttccggagacagagattaaagccagaaattcagtgtgtctctgctaaatcaccgcagcattgcatggagagaattcaggcggaacaggtagacgcagtgactctttccggagaagatatttacacagccggtaagacctacgggttagtgcccgctgctggagaacattacgctcccgaagacagctcaaactcgtactatgtcgtggctgtcgtgcgccgagattcgtctcatgccttcaccctggatgaactgcggggaaaacggtcctgtcatgccggattcgggtccccggcaggttgggatgtccccgtcggggctctgattcagcggggttttatccgccctaaggactgcgatgtcttaaccgctgtctcagaattctttaacgcgtcttgtgtccctgtaaacaaccccaagaattacccctcatctctatgtgctttgtgtgtgggagatgagcagggacgcaataaatgtgtgggcaacagtcaagaaaggtactacggctacaggggcgcattcaggtgtctcgttgagaatgcaggcgatgtggctttcgtcagacacacaacagtgtttgacaacaccaatggccacaacagcgagccttgggctgcagaactaagaagcgaagactatgaactgttgtgtccaaacggggctagagcggaggttagtcagtttgccgcttgcaatttggcccaaatccctcctcatgcagtgatggtacgccctgataccaatatctttaccgtctatggcctcctcgacaaggcacaagacctgtttggagatgatcacaacaaaaatggattcaagatgttcgattcctcaaactaccacggacaggacctgcttttcaaagatgcgaccgtccgggctgtgcccgtgggggaaaaaacaacatatagaggctggctgggattggattacgtggcagctttggaaggtatgtcaagtcaacagtgtagcggggctgccgctccggctcctggggctcctctgctccctttgctgctccccgctttggctgccagacttcttcctcccgcattatag

SEQ ID NO: 214620 - DNA, 909 bp, synthetic construct
  misc_feature 1..909: note = Description of Artificial Sequence: Synthetic coding sequence
  source 1..909: mol_type = other DNA
atgagaggcccatcaggcgcactgtggttattgctcgcattgagaaccgtcctggggggaatggaggttcggtggtgtgcaactagtgaccctgagcagcacaagtgcggcaacatgtcagaggccttccgcgaggcagggatacagcctagtctcttatgcgttcgaggtacatcagccgaccattgtgtgcagctaatcgctgcccaggaggcagatgcaatcaccttggacgggggagcgatctatgaggccggaaaagaacacggtttgaagcctgtggtgggagaggtctacgatcaggaggtcggtaccagctattacgccgtagcggtggtcaggagaagttcacatgtgaccattgacaccctaaagggcgtcaagtcttgtcacactgggattaaccgtactgtgggctggaacgtccccgttggctacctggtagagagcgggcgattaagcgttatggggtgtgatgttctcaaggccgtttctgactacttcggaggcagctgcgtccccggagcaggggaaacttcctacagtgaatcactttgcagactgtgtagaggagacagcagtggagagggagtgtgtgacaagtcgccactggagcgttattatgattatagcggcgcatttcgatgtttagccgagggtgccggagatgtggcttttgtgaagcacagcacagttcttgaaaataccgatgagtctccctccagaagacagacatggacccgatccgaggaagaggagggtgagtgcccagcacatgaggaggccaggcgaaccatgcgttcttcggcaggccaggcgtggaagtgggctcctgtccatagaccccaggatgagtctgacaagggcgagttcggtaagagggctaagtccagggatatgctgggatag

SEQ ID NO: 214621 - DNA, 1395 bp, synthetic construct
  misc_feature 1..1395: note = Description of Artificial Sequence: Synthetic coding sequence
  source 1..1395: mol_type = other DNA
atggattttcaacaccggcctggcggaaagacaggatctggaggcgtggcaagtagcagtgagtcaaacagggatcgacgcgagaggctgagacagttagctttggaaacaattgatatcaataaagacccgtatttcatgaaaaatcatttaggatcctatgaatgtaaactgtgccttactttacacaacaacgagggctcctatctggcacacacccaaggtaagaagcaccagactaacctggccagacgggcagcaaaagaagcgaaggaggctcctgcgcagcctgctccggaaaaagtgaaggtggaagtcaagaagttcgtgaaaattggacgaccaggatataaagttacaaaacaacgtgatagtgaaatgggtcagcagtctttgttattccagattgactaccctgagatcgccgagggaataatgccaaggcaccggttcatgtccgcatatgagcagcgtattgagccgcctgacaggcgatggcagtacctgttgatggcagctgaaccctacgagacaattgcttttaaggtgccaagcagagaaattgacaaagcggagggtaaattttggacacactggaatagagagaccaagcagttttttctgcaattccatttcaagatggagaaacccccagctcccccatctctgcccgctggcccaccgggagtgaagcggccaccccctcctcttatgaatggactgcccccacggcctccactgccagaatcacttcctccccctccccctggagggctgcctctccctcctatgcctccaactgggccagcaccaagtggccctcctggcccacctcagcttccaccacccgctccaggagtacacccccctgcccctgtggtccaccctccagcttctggagtgcaccccccagcccctggtgtgcacccccctgctcccggagtccaccccccagcccctggtgtccatccacctacttcaggggtccaccctccggctcctggcgtgcacccgcctgcaccgggagttcaccctcctgcacccggtgttcatccgccagccccaggcgtgcatccacctgcccctggagtgcacccgcctccaagcgctggagtccatcctcaggcgcctggtgtgcaccctgctgctcccgcagtgcacccgcaggcaccaggagtacaccctccggcacccggtatgcatccacaggcccctggcgtgcatccccaacccccaggcgtccatccatcagctcccggagtgcacccacagccccctggtgtgcacccgtcaaatcccggtgttcacccccctaccccaatgccgcctatgctgaggcccccactcccctctgagggaccaggcaatataccccctccaccccctacgaattag

SEQ ID NO: 214622 - DNA, 1437 bp, synthetic construct
  misc_feature 1..1437: note = Description of Artificial Sequence: Synthetic coding sequence
  source 1..1437: mol_type = other DNA
atgctggggagtctgggactgtgggctctgcttcctaccgccgtagaagcgccaccaaatcgcagaacgtgcgtcttttttgaggctcccggtgtccggggttctaccaaaactctcggcgaactcctggatacaggcacggagctaccacgagccatccgttgtttgtattcccgctgctgtttcgggatctggaacctgacccaagatagggctcaagtagaaatgcagggttgcagggattcagatgaaccaggctgcgagtcacttcattgcgatccctcacccagggctcatccaagtcctgggagcacactgtttacctgttcatgcgggactgacttttgcaacgccaattactcccacctccctccacctggttctcccggaactcctggctcgcagggtccccaggccgctcccggagagtccatctggatggcgctggtccttctcgggttattcctgctccttcttctcctgttggggtccatcatactggcactcttgcagagaaaaaactaccgcgtacgtggagagcccgtacccgagccccgtccggattctggacgagactggtctgtggaactccaggaactgccagagttgtgctttagccaggtcatcagggaaggagggcatgcagtcgtatgggccggtcagctgcaaggaaagctcgtagcgattaaagccttccctcccagatcagttgcccagtttcaggccgagcgggcattgtacgagctacctggactgcagcatgatcacattgtccggtttataacggcttcaaggggaggccctggaaggctcttgtctgggcctcttcttgttctggagctgcacccgaagggtagcttgtgtcactacctaacccagtatacctcagattggggaagctccctgcggatggcgttatccttagcacagggattggcgtttctccacgaggaaagatggcaaaacggtcagtataagcccggtatcgcccatcgggatctgtcctcccagaacgtgctcattagagaggacggatcatgtgctatcggcgatctggggctcgcactggttctgcctgggctgacccagcctcctgcctggacccctacccaaccccagggacctgcagccataatggaggatccagatggcctgcgggagctgttagaggactgttgggacgccgacccagaagcccgactgacagccgagtgcgttcagcagaggctggccgcactcgcccatccgcaggagagtcacccattccccgaatcctgtccaagagggtgcccccctctgtgcccagaggactgcacgagtatccctgcacccacgatcttgccatgtcgccctcaaaggtctgcctgtcacttttccgtgcagcagggaccctgtagcaggaacccacagccagcttgtaccctcagcccagtctag

SEQ ID NO: 214623 - DNA, 1437 bp, synthetic construct
  misc_feature 1..1437: note = Description of Artificial Sequence: Synthetic coding sequence
  source 1..1437: mol_type = other DNA
atgctgggctcattaggcctgtgggcccttctgccaacagcagtggaagcaccaccgaatcggcgtacctgtgtgtttttcgaagctccaggggtccgcggaagcaccaagacattgggagagttactcgacaccggcactgaactgccccgtgccatccgctgcctgtactccaggtgttgcttcggcatatggaatctgacacaggatcgagcacaggtggagatgcaaggatgccgagactccgacgaacccggatgtgaaagcctgcactgtgaccccagtccgcgtgctcacccctcacctgggagcacactcttcacttgttcatgtgggaccgatttctgcaacgctaactactcccatctgcctccgccaggctcacctggcaccccagggtcacagggaccgcaggcggcacccggtgagtctatctggatggcccttgtgctgctgggactctttttattgctcttgttgctactggggtccataattctggctctgctgcagcggaaaaactacagagtacgtggagagcctgttccagagccacgacccgacagtgggagggattggagcgtagaactgcaggaactgcctgaactctgcttttcccaggtgatccgggaaggagggcacgccgtagtgtgggccggacagttgcagggtaagctggtcgcgattaaggccttccctcctagaagcgtggcccagtttcaagctgagcgggctttgtatgaactgcctgggttgcagcacgatcatattgtgcggttcatcacagctagtagagggggtcccggtcggctgttgagtggacccctcctagtgttagaactgcacccaaagggctctctgtgtcattaccttactcagtatacatcagattggggctcatctttacgtatggcactgtctctcgcgcagggtctcgccttcttgcatgaagagcgctggcagaatggacagtacaaacccggaattgcccaccgggatctgtcctcgcagaacgtactgatcagggaggatggctcatgtgccattggcgatctcggtctggccctggtcctgcccggattgacccagccccctgcttggaccccaacacagcctcagggccctgccgctataatggaagccggtactcagagatacatggcgcctgagctcctggataagacgctggatctgcaagattggggaatggccctcagacgggcagatatctattctctcgcattactgctctgggagattctcagccgatgtcctgacttgaggcctgcagttcaccatcctagtaattggcccatgagacagaattgggctatcccgttaccccttatgagctacggtccatggcagtgtcgaaggggtggagtgccgacttcccacccacctggcgctgccctacctcagaccctcatgggatag

SEQ ID NO: 214624 - DNA, 1722 bp, synthetic construct
  misc_feature 1..1722: note = Description of Artificial Sequence: Synthetic coding sequence
  source 1..1722: mol_type = other DNA
atgcttggatccctgggactgtgggcattactccccactgcggtggaagcaccacctaaccgaaggacctgtgtctttttcgaggctcctggtgtcagaggctctaccaagacactcggcgagctactagatacagggacagaactccctagggctatcagatgcctttacagtaggtgctgttttggcatttggaacttgacccaggaccgcgcacaggtagaaatgcaagggtgccgcgattccgatgagcctggttgtgaatccctgcactgcgatccgtcgccaagggcccatccttccccaggcagcacgttgtttacctgctcatgtggcaccgacttttgtaacgccaattactcccatctgcccccaccaggatcaccaggcactcccggatcccaaggaccgcaagccgctccaggcgagtctatctggatggcgctggtgttgttgggcttgttcttactgctgctgctgcttctcggcagcattatactggctctgctgcagcgtaaaaactaccgcgttcgaggtgagccagttccggagcctcgccctgactcaggacgagactggtcagtggaactgcaggagttgccggagctgtgtttcagccaagtaatccgcgaggggggacacgccgttgtgtgggccggtcagttgcaaggcaaactggttgccatcaaggccttcccccctagaagcgtggcccagttccaggcagagcgagcgttatacgagctgcccggtctgcagcatgaccacatcgtaagatttattacagcttccaggggcggtcctgggagactgctcagcggccctcttctcgttctggagcttcaccctaaaggcagtctctgtcattatctgacgcagtacacctctgattggggatctagcctgaggatggccctgagcctggctcagggtctggcctttctgcacgaagagagatggcagaatggacagtataagcctgggatcgcccatcgggacctttcttcacagaatgtgctaatccgcgaggatggctcatgcgcgatcggagatctcggattagctctggtgctgccgggtctaactcagcctccggcatggacacctactcagccacaggggccagccgctataatggaagctggtactcagcgctatatggctcccgagctgctggataagactctagatctgcaggactggggaatggcactcagacgagccgatatctacagcctggccctcctcctgtgggagatactgtcccgctgccccgatctgcgccctgacagttctccacctcccttccagctcgcttacgaagccgaactgggcaataccccaacatccgatgagctctgggccctggccgtgcaggagcgccgacggccttacatcccgtctacttggagatgcttcgcgaccgatcccgacggcctgcgggagctgctggaggactgctgggatgctgaccccgaggccaggttgacagcagagtgcgtgcagcagcgcctggccgcactggcacatccacaggagtcacatccattccccgagtcctgtccacgcggatgccctcccctatgtcctgaagactgcacgagtattcctgctccaaccatcttaccttgtcgccctcagcgatcggcctgccacttcagtgtccagcaaggtccctgcagcaggaatccccagccggcttgtaccctttcccctgtgtag

SEQ ID NO: 214625 - DNA, 1347 bp, synthetic construct
  misc_feature 1..1347: note = Description of Artificial Sequence: Synthetic coding sequence
  source 1..1347: mol_type = other DNA
atgaaagggttcattgacgacgccaactatagtgttggacttctggacgaaggaactaacctggggaacgttattgataattacgtgtacgagcataccttaaccggtaagaacgctttttttgtcggtgatctggggaaaattgtgaagaagcacagtcagtggcagaacgtcgtcgcccagattaaacctttttacaccgttaagtgtaattcggcaccggctgtcttggagatccttgctgcccttgggacagggttcgcttgctccagtaaaaacgagatggcactggtccaggagttgggcgtgcctccagagaatataatttacatttcgccttgtaaacaggttagtcaaattaaatatgccgcaaaagttggggtaaacattttgacctgtgacaatgagatagaattgaaaaaaatcgcccgaaaccatcccaatgcaaaggtcctccttcatatcgccactgaggataatatcggcggagaggaggggaacatgaagttcgggactacactgaaaaactgccgacacctcttggagtgcgcgaaggagctcgacgtgcaaatcattggagtgaagtttcacgttagctctgcctgcaaggaatcccaggtgtatgtccatgcattgagtgacgctcggtgcgtcttcgacatggctggtgaaatcggattcacaatgaacatgcttgacatcggcggaggctttaccggcacagaattccagctggaggaggtgaatcacgtcatttccccgctgctggatatctattttcctgagggatctggcgtcaagattataagtgaacccggaagttactatgtctcaagtgcctttacccttgcagtcaacatcattgcaaaaaaagtggttgagaacgacaaatttccatctggcgtggagaagactggcagtgacgagccggcttttatgtactacatgaatgacggtgtatacggatcgtttgcttctaagttaagtgaggatttaaacaccattccagaggttcacaaaaagtacaaagaggacgagccactgtttacaagttccttatggggcccttcatgtgacgagctcgaccagatcgtcgaaagctgcctgctgcccgagcttaatgtgggtgactggctcatctttgataatatgggagccgacagctttcacgaaccgagtgccttcaacgattttcaacgtcctgcaatatattacatgatgtccttcagcgactggtatgaaatgcaagacgctggtataacctctgactccatgatgaagaatttcttctttgttcccagttgcatccaattgtctcaagaggactcttttagcgcagaggcttag

SEQ ID NO: 214626 - DNA, 1347 bp, synthetic construct
  misc_feature 1..1347: note = Description of Artificial Sequence: Synthetic coding sequence
  source 1..1347: mol_type = other DNA
atgaagggatttatagacgacgcaaactactctgtcgggctgctcgatgagggcactaatctgggcaacgtcatcgataattacgtgtatgagcatactctcactggtaaaaacgcgttttttgtgggtgacctgggcaaaatcgtaaaaaaacatagtcagtggcagaacgtggtggctcagatcaagcccttttataccgtgaagtgcaactcagctccagctgtcctggaaattcttgctgccttagggacagggttcgcgtgttcctccaaaaatgagatggctctggtgcaggaactcggtgtgccccctgaaaacattatctacatatccccctgtaagcaggtatcgcagatcaaatacgccgctaaggtaggcgttaatatcttgacttgtgacaatgaaattgagttgaaaaaaatcgccaggaaccatcccaatgcaaaggtgctcctgcatatcgctactgaggacaacataggaggcgaggagggcaatatgaagtttggaacgaccctgaaaaactgcaggcaccttttagagtgcgcaaaggagctcgatgtgcagatcattggggttaaattccacgtgagctctgcttgtaaagagtctcaggtgtatgtgcatgccctgtccgacgcacggtgcgtgttcgacatggccggagaaatagggttcaccatgaacatgctggacatcggaggtggattcaccggaacagaatttcagttggaggaggtgaatcatgtgatttctccactcttggacatctactttcctgagggctcaggcgtgaaaattatctctgagccaggcagttattacgtgtccagcgcattcactctagcagttaacatcattgccaagaaggtggtagaaaatgacaagtttccctccggagtcgaaaaaactggatctgacgagcccgctttcatgtactatatgaatgacggcgtgtatggatcttttgcgagtaagctaagcgaggacctcaacacgattcccgaagtgcacaagaagtataaagaggacgaacctttattcactagttctctgtggggtcctagttgtgatgagctggatcaaattgtcgagtcttgcctcttgccagagttgaacgtgggggactggttgattttcgataatatgggtgcagattcctttcatgagcctagtgctttcaatgactttcagaggccagccatctactacatgatgtctttctcagattggtatgagatgcaggatgctggaatcaccagtgacagtatgatgaagaatttcttcttcgtgccaagttgtatccaacttagccaggaggacagtttctccgccgaagcctag

SEQ ID NO: 214627 - DNA, 102 bp, synthetic construct
  misc_feature 1..102: note = Description of Artificial Sequence: Synthetic coding sequence
  source 1..102: mol_type = other DNA
atgaagggattcattgacgatgccaactactctgtggggctactggacgaaggtacaaatctaggcaacgtgatcgacaattacgtgtatgagcacacctag

SEQ ID NO: 214628 - DNA, 294 bp, synthetic construct
  misc_feature 1..294: note = Description of Artificial Sequence: Synthetic coding sequence
  source 1..294: mol_type = other DNA
atgaaggggttcatcgacgacgccaattattctgtgggcctgctggacgagggtacaaacctgggcaatgtgattgataactatgtctacgaacatacactaacagggaagaatgcattctttgttggcgacctggggaaaatcgttaagaaacactcacagtggcagaacgtggtggcacagatcaaaccgttctacaccgtgaaatgtaatagcgctcctgcggtgctggagatactagccgcacttggaacaggatttgcctgtagctccaagaacgagatggccttgtag

SEQ ID NO: 214629 - DNA, 780 bp, synthetic construct
  misc_feature 1..780: note = Description of Artificial Sequence: Synthetic coding sequence
  source 1..780: mol_type = other DNA
atgcggagggcagtcgcttacatggccatcaaaattgaagtgcagggtcaccagtccttcgctattccatctggaactttttggttgtggcgcagcctgctgtcccaggacaaggaacacccgagatatttgattcccgagttgtgtaaacagttttatcacttgggatgggtgacaggtaccggtgggggaattagcttgaagcatggcgatgaaatttatattgctccatcaggcgttcaaaaggaaaggattcagcctgaggacatgtttgtgtgcgacataaacgagaaggacatctccggccctagcccgtccaaaaaactcaagaagtcccagtgcaccccgctcttcatgaatgcttacactatgaggggtgctggagctgtaatacacacccatagcaaggccgcagttatggccaccttgctgtttcccggtagagagtttaaaatcactcaccaggaaatgattaaggggatcaagaagtgtaccagcgggggatattacaggtatgatgacatgctggtcgtccccattatcgagaacacacccgaggagaaggacttgaaagatcgaatggcacatgctatgaacgagtatcccgacagttgtgccgtcctggtgaggcgacatggcgtgtacgtgtggggagagacctgggagaaagctaagaccatgtgtgaatgctacgactatttgtttgacatcgccgtgtccatgaagaaggtcgggctggatccctctcagctgcctgtgggagaaaacggcattgtttag

SEQ ID NO: 214630 - DNA, 729 bp, synthetic construct
  misc_feature 1..729: note = Description of Artificial Sequence: Synthetic coding sequence
  source 1..729: mol_type = other DNA
atgtctggttgcgacgccagagaaggggactgttgctcaaggaggtgtggggcacaagacaaagagcacccacggtatctgatcccggagctatgtaagcagttctatcacctcggctgggtcacaggaaccggcggagggattagcctgaagcatggggacgagatctacattgctcccagcggggttcaaaaggaaaggatccagccagaggacatgttcgtgtgtgatataaacgagaaagatatcagcggccctagccctagcaagaaactgaagaagtcccagtgtacgccactttttatgaatgcctacaccatgcgtggcgcaggggctgtgatccatactcactcgaaggcggctgtgatggccacccttctttttccaggaagagagtttaaaatcacacaccaagaaatgattaaagggattaaaaaatgcacttctgggggatactataggtacgatgatatgctggtggttcctatcattgaaaacacccccgaggagaaggatttaaaagatcgaatggcgcacgcaatgaatgagtatccagattcctgtgccgtactagtgagacggcacggcgtgtatgtgtggggcgaaacttgggagaaagccaagactatgtgcgagtgttatgattatctctttgacattgccgtcagcatgaagaaagtgggactggatcctagtcagctccccgtcggcgaaaatggtattgtctag

SEQ ID NO: 214631 - DNA, 234 bp, synthetic construct
  misc_feature 1..234: note = Description of Artificial Sequence: Synthetic coding sequence
  source 1..234: mol_type = other DNA
atgaatcttaggctgtgcgtgcaagctctgttacttctctggttgtcccttacagcagtctgcggcggttccctcatgcccctgcctgacggaaatggactggaggatggcaacgtgcggcatttggtgcagcccagggggtccaggaatggcccaggcccatggcagggcggacgcaggaaatttaggcggcaacgtccacggctatcccacaagggacccatgcccttctag

SEQ ID NO: 214632 - DNA, 369 bp, synthetic construct
  misc_feature 1..369: note = Description of Artificial Sequence: Synthetic coding sequence
  source 1..369: mol_type = other DNA
atgagtgccacctggtgctccccagagggacaggggatgggacaggggccaggccgtgaggtaggaggcaactccgcggcttctgggcctgccagccccattcgcgacccatgcctaagcgaggccggtctcaaagggcctccgtccgcccaccccagacggctgtgtctcttgcaccgccttgtgtgtttttccgggggattaacatctatccagctatccccaagaacctgttgtagccaccagtgggcacagcttttctcaccagcgtgttttccccagtggagagcacccggatgctccctggatgattcccggtccctcacccgtatccgtcccgtccatctccccggaccaagcttggattag

SEQ ID NO: 214633 - DNA, 369 bp, synthetic construct
  misc_feature 1..369: note = Description of Artificial Sequence: Synthetic coding sequence
  source 1..369: mol_type = other DNA
atgtccgccacatggtgctccccggagggacaggggatgggccagggccctggccgagaggtaggtggaaattctgctgccagcggaccagcgagtccgattcgcgatccctgcctgtctgaggctggcctgaaaggccctcctagcgcacacccgaggcgattatgtctgctgcaccgccttgtttgcttctccggtgggctaaccagcattcagctgtctccacgcacctgctgttctcaccagtgggcacagctgttctccccggcttgcttcccacagtggcgcgctcccggttgctccctggacgactctcgctctctgacaaggatcagacctgtgcatctccccggaccctcattagattag

SEQ ID NO: 214634 - DNA, 303 bp, synthetic construct
  misc_feature 1..303: note = Description of Artificial Sequence: Synthetic coding sequence
  source 1..303: mol_type = other DNA
atgaagctcctcgctgcaacagtactgctgcttactatctgttccttggagggcgctctggtcaggcgccaggccaaagagccatgcgtggaatccctagttagtcagtattttcagaccgtgaccgactacggcaaggatttaatggaaaaagttaagtccccagagcttcaggccgaagccaagtcctatttcgaaaaaagtaaggaacagcttacacccctcataaagaaagcaggcacggagctggtcaattttctgtcttactttgtcgagctggggacacagccagctacccagtag

SEQ ID NO: 214635 - DNA, 1191 bp, synthetic construct
  misc_feature 1..1191: note = Description of Artificial Sequence: Synthetic coding sequence
  source 1..1191: mol_type = other DNA
atgttcctgaaagccgtggtgctcacactcgcactggtggctgtggctggggctcgcgcagaagtgagcgcagatcaggtggccacggtcatgtgggattacttctctcagctctcaaataatgcgaaggaagctgtggaacacctccagaagtcagaattgactcagcagttgaacgccctatttcaggataagttgggtgaggtcaatacatacgcaggcgaccttcagaagaaattggtgcccttcgccacagagttgcatgaaagactggctaaagattccgagaagttgaaggaagagattggtaaagagctggaggagctccgggcaaggctcctgccccacgccaacgaagtttcacagaagatcggcgataacctccgcgagctccagcaaaggttagaaccctacgccgaccaattgcgaacccaagtaagtacccaggccgaacagctgagacgccagctgactccgtatgcacagcgcatggagagagtcttacgggagaacgctgatagcttgcaagcgagtttgagaccccacgccgatgagctgaaagccaagatcgatcagaacgttgaggaattaaagggaaggcttaccccttacgctgacgaattcaaagtgaagattgaccaaactgtggaggagttaaggaggagcctcgctccctacgctcaggacacccaggaaaaactcaaccatcagctggagggccttacgttccagatgaaaaagaacgccgaagaactaaaggcgaggatttctgcctcagcagaggaacttcggcagcgcctagcacccttggctgaagatgtcagggggaacctccggggaaacactgaggggttgcagaagtcactcgctgaattggggggacaccttgatcagcaggtagaagaattccggaggagggtggagccatatggcgaaaatttcaataaagcccttgtccaacaaatggagcaactgcgtcaaaaactgggcccacatgccggtgacgtggagggccacctctcctttcttgagaaggaccttagggacaaggttaatagttttttctcaacattcaaagagaaagaaagccaggataagacactgtctctgcctgagctggaacagcagcaggagcagcaacaggaacagcagcaagagcaggttcagatgctggctccactcgagagctag

SEQ ID NO: 214636 - DNA, 1281 bp, synthetic construct
  misc_feature 1..1281: note = Description of Artificial Sequence: Synthetic coding sequence
  source 1..1281: mol_type = other DNA
atggcgatcgctcagctggcgacggaatatgtcttcagcgacttcctgctgaaagagccaaccgagcctaagtttaaagggctcaggctggagctggctgtcgacaagatggttacttgtatcgctgtgggcctgcctcttctcttaatttccttggcttttgctcaggaaatctccataggcacacagatcagttgtttctccccatcgtcgttctcctggaggcaagccgctttcgtggatagctattgttgggcagctgtgcagcagaaaaacagcttgcagtcagagtcaggaaatcttcccctgtggctacacaaattctttccatacattctcttactctttgcaattctgctgtacctgccacccctcttttggcggttcgccgctgcacctcacatctgttcagaccttaaattcatcatggaggagctcgacaaggtgtacaacagagctatcaaggctgccaaatcagccagggatctcgacatgcgcgacggcgcatgctcagtgcccggagtgaccgagaatcttggccagtctctgtgggaggtctctgaaagccattttaagtaccccatcgtggagcagtacctcaaaacaaagaagaatagcaacaacttgattatcaagtacatttcctgccgtctgttgacgcttatcataatcctgctggcctgcatttatctgggctactatttttccctgagtagtctcagcgatgaattcgtctgctccatcaagagtgggattctgcgtaatgattctaccgtccctgaccaattccaatgcaaactgatcgccgtgggtatcttccagttgctgagtgtgatcaacctcgtcgtatacgtgctcctggcaccagttgtcgtgtacaccctctttgtgccttttagacagaagacagacgtgcttaaggtgtatgaaatcctgccaactttcgacgttctgcacttcaaatctgaggggtataacgatctgagtctttataacttgtttctggaggagaacatatcagaggtgaagtcttacaaatgtctgaaagtgctagagaatattaaatccagcggccaaggcatcgatcctatgttgttactaacaaaccttggaatgatcaaaatggacgtcgtggacggcaaaacgcctatgagtgcagagatgcgcgaggagcagggcaaccagactgcggagctgcaaggcatgaatatagacagcgagacaaaggccaataacggggagaagaacgcgcgtcagcgactgctcgattcaagctgctag

SEQ ID NO: 214637 - DNA, 489 bp, synthetic construct
  misc_feature 1..489: note = Description of Artificial Sequence: Synthetic coding sequence
  source 1..489: mol_type = other DNA
atggcttcgatggctgctgtgttgacttgggctctggctcttctgagtgcgtttagtgccactcaggccaggaagggcttctgggattacttctcgcagacatcaggtgataaaggccgagtcgagcagatacatcagcagaagatggcacgcgagcctgccaccctcaaggatagtctagagcaggatctgaacaatatgaataaattcctggagaagctgaggcccctcagcggaagtgaagctcccagactaccacaggatccggtcggcatgcggaggcagttacaagaagaactcgaggaagtaaaggccaggctgcagccctacatggccgaagcccatgagctggtcgggtggaatctcgagggccttcgacagcagctgaaaccttacaccatggatcttatggaacaggtggccctgagggtgcaggagcttcaagagcagttgagagtggtcggagaagacaccaaggcccagctgtag

SEQ ID NO: 214638 - DNA, 1101 bp, synthetic construct
  misc_feature 1..1101: note = Description of Artificial Sequence: Synthetic coding sequence
  source 1..1101: mol_type = other DNA
atggcgtctatggctgccgtgctgacatgggccctcgcccttctgtctgcgttttccgctacccaggcccgtaaaggattctgggattacttttcgcagacatcgggcgataaaggacgcgtcgaacagattcaccagcaaaagatggccagagagccagccaccctgaaagattcgcttgagcaggatctgaacaacatgaacaagttcctcgaaaaattgaggccactgtccggatcagaagctccgagattgccgcaggaccctgtgggaatgcgcaggcagctccaggaggaacttgaagaggtgaaggcccgtttacagccctatatggccgaggcccacgaactggttggctggaacctggaaggcctcaggcagcagttgaaaccatacactatggacctcatggaacaggttgctctgcgcgtgcaggaactgcaggagcagctgcgggtagtaggggaggacactaaggcgcagctcctgggcggtgtcgatgaagcctgggccttgctgcaggggctgcagagccgggtggtacaccacacgggccgatttaaagagctgttccacccttacgcggagagtctggttagcggtatcggaaggcacgtgcaggaactgcaccggtctgtcgctcctcacgctccggctagccctgcccgtctgagcagatgcgtgcaggtgttaagtaggaagctcacattgaaagctaaggccctgcatgcaagaatccagcaaaatttggatcagcttcgggaagagctgagcagggccttcgctggaacaggaaccgaggagggggctgggccagacccacagatgttatcagaagaagtgcgccagaggctccaggccttcagacaggatacatatctgcagattgcagccttcacacgagctattgaccaggagaccgaggaagttcagcagcagctcgcacctccgcctccgggacatagcgccttcgcgcctgagttccagcaaactgattcaggaaaggtgctttccaagttgcaggcccgattagatgacctctgggaggacataacacactccttacacgatcaaggtcactctcacttgggcgacccctag

SEQ ID NO: 214639 - DNA, 1074 bp, synthetic construct
  misc_feature 1..1074: note = Description of Artificial Sequence: Synthetic coding sequence
  source 1..1074: mol_type = other DNA
atgaacccccagatccgcaaccccatggagaggatgtatagggacaccttttacgacaactttgaaaacgaacctatcctttacggtaggtcttatacttggctgtgttacgaggtaaaaattaaacgcggtaggtccaacctgttgtgggacactggcgttttccgaggccaggtgtacttcaagccccagtatcatgccgagatgtgcttcctctcctggttctgtggtaatcagctccccgcttacaaatgtttccagatcacctggttcgtgtcttggacaccttgccctgattgcgtcgctaagttggctgaatttttgtccgagcatccgaacgtgacgcttacaataagtgccgctcggttgtattattactgggaacgagactaccggagggcactatgccgactgtcacaggccggtgcccgagtgacaattatggactacgaagagttcgcatattgttgggagaacttcgtttataacgaggggcaacagtttatgccctggtataaattcgacgagaactatgcattcctccatagaacccttaaggagatattgcggtacctgatggatccagatactttcacctttaatttcaacaacgatccacttgtcctgagacgacggcagacatacctgtgctacgaggtcgagagattggataatggcacgtgggtgctgatggatcagcatatggggtttttgtgcaacgagctagaccctgcccaaatctaccgcgtcacatggttcattagttggagtccttgttttagttggggctgtgcaggagaggtaagggcgttcctccaggagaatactcacgttagactgcgtattttcgcagccaggatctacgactatgaccccctttacaaagaggctctccagatgctgcgggacgccggagcccaggtctcaataatgacatacgacgagtttgaatattgttgggacaccttcgtgtataggcagggttgcccattccagccgtgggacggattggaggaacactcacaggccctgtctggcaggctgcgggcaatcctacaaaaccaggggaattag

SEQ ID NO: 214640 - DNA, 306 bp, synthetic construct
  misc_feature 1..306: note = Description of Artificial Sequence: Synthetic coding sequence
  source 1..306: mol_type = other DNA
atgaagccccattttcgcaataccgtggagaggatgtacagggacacttttagctacaatttctataatcgccctatcctctccaggaggaacaccgtatggctctgttatgaggtgaagacaaagggcccttcccgaccaagactggatgctaagattttccgcggacaggtgcctcggagctttataagagcaccctttcaagtgctctcctctccctttggccaatgcgctccaccccatggtacggcacaagtccagtggcccccacagctgactgcaggcagggagcagggtaggccctag

SEQ ID NO: 214641 - DNA, 381 bp, synthetic construct
  misc_feature 1..381: note = Description of Artificial Sequence: Synthetic coding sequence
  source 1..381: mol_type = other DNA
atggcctcagcctccactcaacccgcagcgctctctgctgaacaagctaaggtggtactggccgaggtgatccaggctttcagtgcgcctgaaaacgcagtgagaatggacgaagcacgggacaacgcttgcaacgatatgggcaaaatgctgcaatttgtgttgcccgtggcaactcagatccagcaggaggttatcaaagcgtatgggttctcctgcgacggggagggagttctaaagtttgcccgactcgtcaaaagctatgaagcccaagaccctgagatcgctagtttgagtggtaagctgaaagccttattcctcccacccatgaccctgccaccgcatggtcccgcagccggagggtccgtggcagcttcatag

SEQ ID NO: 214642 - DNA, 675 bp, synthetic construct
  misc_feature 1..675: note = Description of Artificial Sequence: Synthetic coding sequence
  source 1..675: mol_type = other DNA
atggctcaaaaagaggaggcggctgttgcgaccgaagccgcaagccagaacggggaagatttagaaaacctagacgatcctgagaaactgaaggaactcattgagctgcccccatttgaaatcgtcactggagagcgcctgccggcaaacttttttaagtttcagttccgcaacgtcgagtattcctccggacggaataagacattcctttgctatgtcgtcgaagcacaggggaagggcggacaggtgcaggccagcagagggtatctagaagacgagcacgcagccgcacacgccgaagaagcgttcttcaataccatattgcctgcctttgacccggcactgcgctataacgtaacctggtatgtgagcagtagtccgtgtgcagcctgtgcagatcggatcataaaaaccctgtctaagacaaagaacttgcgactcttgatccttgtcggtcgtctcttcatgtgggaagagcctgaaatccaggccgctcttaagaaactcaaagaggcaggctgtaagctgagaatcatgaaaccccaggacttcgagtacgtctggcagaacttcgtggagcaagaagaaggagagtccaaagccttccagccctgggaggatatacaggaaaacttcctctactatgaagagaaactggcagatatcctcaagtag

SEQ ID NO: 214643 - DNA, 393 bp, synthetic construct
  misc_feature 1..393: note = Description of Artificial Sequence: Synthetic coding sequence
  source 1..393: mol_type = other DNA
atggcccagaaagaggaggctgctgtcgctactgaagccgctagccaaaacggcgaagacttagagaacctggatgacccagagaagctgaaagagttgatcgaactgccaccttttgaaatcgtaaccggcgaaaggctccctgcaaacttcttcaagtttcaatttcggaacgtggagtactcttcgggcaggaaactgagttccacaccctcatgtcagccctctacacagccgtgcggcaccatgagtccaggtatgtgcccgccagccccagtccagcgtgttctgaccgctctgtccaagcctctggctcggcctagaacctgcgtgtgcagcttctggtgggtggacagttcttgcggccgtagccgcaggtctagattgctgtag

SEQ ID NO: 214644 - DNA, 600 bp, synthetic construct
  misc_feature 1..600: note = Description of Artificial Sequence: Synthetic coding sequence
  source 1..600: mol_type = other DNA
atggaggcttccccagccagcggccctcggcacctgatggacccccatatttttacttctaatttcaataacggcattgggaggcacaagacctacctgtgctacgaggtggaaaggctggacaacgggacaagcgtgaagatggaccaacatagaggcttcctgcataaccaggcaaaaaatctgctgtgcgggttctatggacgccacgccgaattaaggttcctcgatctggtgccttccctgcagctcgacccagcacagatctatagagtgacttggtttatctcatggtctccatgctttagttggggctgtgccggtgaggttagagccttcttgcaggaaaatactcatgtcagactgaggatttttgcagctcgcatttatgattacgacccactgtacaaggaggcactgcaaatgttaagagatgctggcgctcaggtgagtatcatgacctatgacgaatttaagcactgctgggacactttcgtagatcaccaaggctgcccatttcagccttgggatggcttagacgagcactcgcaggctctttccgggagactgcgggcaatacttcagaatcagggtaactag

SEQ ID NO: 214645 - DNA, 600 bp, synthetic construct
  misc_feature 1..600: note = Description of Artificial Sequence: Synthetic coding sequence
  source 1..600: mol_type = other DNA
atggaagcaagtccagcctcaggtcctcggcacctgatggacccgcacatattcacatcaaactttaacaacggcatcggcaggcacaagacttatctctgctacgaagtggagcgactggataacgggacctcggtgaagatggatcagcatagaggatttttgcataaccaggccaagaatctcctttgcggtttctacggaaggcacgccgaactgaggttcttggacctggtgccctcactccagctggatcccgctcagatttaccgtgtgacctggtttatttcctggagcccctgtttcagctggggttgcgccggagaagtaagagcattcttacaggaaaatacgcacgtgcgcctccgtatcttcgccgctcggatctacgactatgatcccctatacaaggaggccctccaaatgctgcgcgatgctggcgctcaggtgtctataatgacctacgacgaattcaaacactgctgggacacatttgttgaccatcaaggctgcccattccagccgtgggatggtctcgacgagcatagccaggccctgagcgggaggctgcgcgctattctgcaaaaccagggcaattag

SEQ ID NO: 214646 - DNA, 1149 bp, synthetic construct
  misc_feature 1..1149: note = Description of Artificial Sequence: Synthetic coding sequence
  source 1..1149: mol_type = other DNA
atgaacccccagatcagaaatccaatggaacgcatgtatagggacacattttacgataacttcgagaacgagcctatcttgtatggaaggagttacacgtggctatgttacgaggtgaagattaaaagaggcaggtctaacctgctgtgggacaccggggtgttcagagggcaggtgtactttaagccccagtatcacgccgagatgtgtttcctctcctggttttgcggcaatcagctgcccgcttataaatgcttccagataacatggttcgtaagctggacaccatgccctgactgcgtggctaaactagccgagttcctttcagaacaccccaacgtgactcttacaatctctgctgctaggttatactattactgggagcgggactatcggcgtgcactctgtaggctttcccaagcaggggctcgcgtgaccattatggactacgaggagtttgcgtactgttgggagaattttgtgtacaatgagggtcagcagttcatgccttggtataagtttgatgaaaattacgcatttctccatagaaccctaaaggagatcctgcggtacctaatggaccccgacactttcacctttaattttaataacgacccattggtgctcagaagaagacagacttacctttgttatgaggtagagcgcctggataacgggacctgggtcctgatggatcagcatatgggctttctgtgtaacgaggccaaaaacctgctctgcggcttctacggaaggcacgctgagcttagattccttgatctggtccccagtttgcaactcgaccctgcccaaatttaccgggtcacatggtttatttcgtggagcccttgcttttcgtggggttgcgccggagaggtgcgcgcttttctgcaggaaaacacccacgtgcgcctgcgcattttcgcagccagaatttacgattatgatccactctataaggaggcattgcagatgctgcgggatgcaggggcacaggtctcaatcatgacctatgacgagtttgaatattgctgggacaccttcgtttatcgccaggggtgccccttccagccatgggacggactggaagagcactcacaggctctgtcgggcagactacgcgctattctgcagaatcaaggcaattag

SEQ ID NO: 214647 - DNA, 573 bp, synthetic construct
  misc_feature 1..573: note = Description of Artificial Sequence: Synthetic coding sequence
  source 1..573: mol_type = other DNA
atgaatccacagatcagaaaccccatgaaggccatgtaccctggcaccttttattttcagtttaagaatctttgggaggccaatgacaggaacgaaacctggctctgtttcaccgttgaaggtattaagagacggtctgtggtgagttggaagacaggggttttccgtaaccaggttgattccgagactcactgtcacgccgagagatgtttcctcagttggttttgcgatgacattctgtctcccaacacaaagtaccaggttacctggtatactagttggagtccatgccccgactgtgccggagaagtggcagaatttcttgccaggcattcaaatgttaacctgacaatcttcaccgccagattgtactattttcagtatccatgttatcaggagggcctgagaagcttgagccaggaaggcgtggcggtggaaatcatggactatgaagactttaaatactgttgggaaaatttcgtgtacaacgacaacgagccatttaagccttggaaaggcctgaagaccaacttccgcctgctgaaaagacgtctccgagagtctcttcagtag

SEQ ID NO: 214648 - DNA, 1122 bp, synthetic construct
  misc_feature 1..1122: note = Description of Artificial Sequence: Synthetic coding sequence
  source 1..1122: mol_type = other DNA
atgaaaccccatttccgcaatacggtggagagaatgtaccgcgatacgttctcctacaatttttacaaccgtcccattctcagtcgccgaaacaccgtctggctatgctatgaggtaaagactaagggcccatctcgacctaggttagatgctaaaatcttcagaggccaagtttactctcagccggagcaccacgcggagatgtgcttcctgtcatggttctgtggaaaccagttacctgcatataaatgcttccagattacgtggttcgtgagctggaccccttgcccagattgcgtcgccaagctagctgaatttctggcagagcacccgaacgttactcttactatttccgctgctaggttatactactattgggagcgggattacaggcgagctctctgccggttgagtcaggctggggcacgagtgaagatcatggatgatgaggagttcgcctactgctgggagaatttcgtttactcagaagggcagccattcatgccctggtataagtttgatgacaactatgcgttcttgcaccgcacattgaaggaaatcctccgcaaccccatggaggctatgtacccccacatattctactttcactttaagaatctgaggaaggcgtacggcaggaacgagtcttggctgtgctttacgatggaagtggtcaaacaccacagccctgtcagttggaagagaggagtattcaggaaccaggtggatcctgagacacactgccacgcggagcggtgttttttgagctggttctgtgacgatatactctcccccaacaccaattatgaggtcacttggtacacctcatggtcgccctgccctgagtgcgccggagaggtggcagagtttctggcgaggcactcgaacgtgaacctcaccatcttcacagcacgtctgtactacttttgggacaccgattaccaggaaggtttgcgctccctttctcaagaaggagctagtgtcgaaattatggggtataaagattttaagtactgttgggagaactttgtgtacaatgatgacgagccgtttaagccctggaagggcttgaaatacaactttctattccttgattccaagctgcaagaaatccttgagtag

SEQ ID NO: 214649 - DNA, 1155 bp, synthetic construct
  misc_feature 1..1155: note = Description of Artificial Sequence: Synthetic coding sequence
  source 1..1155: mol_type = other DNA
atgaagccccactttcgtaacaccgtggaacgtatgtaccgcgacacctttagctataatttctacaatcgtccaattttgagccgacggaatacagtgtggctctgctatgaggtaaagacaaagggaccttcccgacctccgttggacgccaaaatatttcggggacaggtgtattccgaactgaaatatcaccccgagatgcgtttctttcactggttctcaaaatggcggaagctgcatcgcgaccaagagtatgaagttacatggtacatctcttggtccccatgtaccaaatgtacccgagatatggcaacgtttctggcggaggatccaaaggtgacactgaccatcttcgtggcccgtttgtattatttctgggacccagactaccaagaggcattgcgcagcctgtgtcaaaagagggacggaccaagagccaccatgaagatcatgaactatgacgaattccagcactgctggtctaagtttgtgtattcccagcgcgagctgttcgaaccttggaacaacctgccaaaatattatattttgctccacatcatgttaggcgaaatcctgcgccattcaatggaccccccaacctttacttttaactttaataatgagccgtgggtccggggaagacacgagacgtatctgtgctatgaagtcgaaagaatgcacaatgacacttgggtcctgttaaatcagagacgaggcttcttgtgcaatcaggccccacataagcatggctttctagaagggagacacgcagaactgtgctttctggacgtgattccattctggaaactcgatttggaccaagattatagggtgacctgttttacctcctggtctccgtgtttcagttgtgcacaagagatggcgaagtttatctccaagaataaacacgtgagtctctgtatttttaccgcacgtatctatgacgatcaggggaggtgccaagaaggcctgagaaccctcgccgaggcaggcgcaaagatttctatcatgacgtactccgagttcaaacactgctgggatactttcgtggatcatcagggatgcccgtttcagccatgggacggattggatgaacattctcaggacctcagcggcagactgagagctatcctgcagaaccaggagaattag

SEQ ID NO: 214650 - DNA, 1155 bp, synthetic construct
  misc_feature 1..1155: note = Description of Artificial Sequence: Synthetic coding sequence
  source 1..1155: mol_type = other DNA
atgaaaccacatttccgcaatacggtggagcgaatgtacagggacacattcagctacaacttttacaataggccaatcctgtctcgcaggaacactgtgtggctctgctatgaggtaaaaacaaagggaccctctcggccaccactggacgcaaagatattccggggtcaggtctactccgaattaaaatatcacccagagatgaggttttttcattggttctccaaatggagaaaattacaccgcgatcaagagtatgaggtgacctggtacatatcatggtccccctgcacaaagtgtactagagacatggctacctttctagctgaggaccctaaagtaactctgacaattttcgttgctcggctctactatttctgggacccagactatcaggaagctctgcggtccctgtgccagaaacgcgacggccctagggctactatgaaaattatgaactacgacgagttccagcattgctggagtaaattcgtgtatagtcagagggagttgttcgaaccatggaataacttgcctaaatactacattttactccacatcatgctgggagaaatcctgaggcattcaatggatccccctacttttacattcaacttcaataatgaaccttgggtgcgcggaagacacgagacctatctatgttacgaggtggagcggatgcataacgatacttgggtgttactgaaccaaaggcgtgggttcctctgcaatcaggcgcctcataaacatggatttttggaagggcgacacgcagaactctgttttctcgatgtcattcccttctggaaacttgatttggatcaggactacagagttacatgttttaccagttggagcccatgcttttcatgtgcccaggaaatggccaagttcatctccaagaacaaacacgtgtctctctgtatcttcacggcgagaatttacgacgaccagggacgctgccaggaaggcttacggactctcgcagaggccggagccaagatctcaataatgacatactcagaattcaaacactgctgggacaccttcgtggaccaccagggatgtccctttcagccatgggatggattagacgaacacagccaggatttgtcgggcaggcttcgggcaattctacagaaccaggaaaactag

SEQ ID NO: 214651 - DNA, 549 bp, synthetic construct
  misc_feature 1..549: note = Description of Artificial Sequence: Synthetic coding sequence
  source 1..549: mol_type = other DNA
atggccttgttgaccgccgaaacttttaggttgcagttcaataacaagcggagacttcggcgaccatactaccctcgaaaggctctcttatgctaccagctgacaccacagaacggcagtacgcctacccgcggttacttcgagaataagaaaaaatgtcacgctgaaatttgcttcattaacgagataaaatcaatgggactggatgagacccaatgctaccaggtgacttgctatctgacctggagcccatgttcgagctgtgcatgggaactcgtagatttcatcaaagcccacgaccacctgaatctgggaatttttgctagccgcctctattatcattggtgtaagcctcagcagaagggcctgagactattatgcggatcccaggtgccagtcgaggtgatgggctttcctaaattcgctgactgctgggagaactttgtagaccatgagaagccccttagttttaatccatataagatgctcgaggagctagacaagaattcccgtgcaatcaagaggaggctggagagaataaaaagctag

SEQ ID NO: 214652 - DNA, 603 bp, synthetic construct
  misc_feature 1..603: note = Description of Artificial Sequence: Synthetic coding sequence
  source 1..603: mol_type = other DNA
atggctttgctaacagcagaaactttcagactgcagttcaataacaaacggcgtcttaggcgaccctattacccacgaaaggcgttgctgtgctaccagctcactccccaaaatggcagcacacctacacggggatacttcgaaaataagaagaagtgccacgccgaaatttgttttattaacgagatcaagagcatgggccttgacgaaacccagtgctaccaggtgacgtgttacctaacatggtccccttgtagttcttgtgcgtgggagttagtggactttatcaaggctcacgaccatctcaatctcgggatcttcgcttccaggctgtattatcactggtgcaagccgcagcaaaaggggctgcggttgctctgtggctctcaggtgcctgtggaggtcatggggtttcctaagttcgctgattgttgggagaacttcgtggatcacgagaagcctttgagtttcaacccgtacaaaatgttagaagaactcgacaaaaactcacgggctattaaacggaggctggagcggatcaaaatcccaggtgtccgcgctcaggggaggtatatggatatattatgtgatgctgaagtgtag

SEQ ID NO: 214653 - DNA, 465 bp, synthetic construct
  misc_feature 1..465: note = Description of Artificial Sequence: Synthetic coding sequence
  source 1..465: mol_type = other DNA
atggccttgctcactgctgaaacattccggctgcagtttaacaacaagagacggctgcgacgcccttactaccccagaaaagctcttctatgctaccagcttaccccccagaatggatcgacccctacaaggggttacttcgaaaataagaaaaaatgccatgctgagatctgctttattaacgagattaaaagcatgggattggacgagactcagtgctaccaggtcacctgttatctcacctggagcccttgtagttcttgtgcctgggagttggtggacttcataaaggctcacgatcatctcaacctggggatatttgccagcaggctctactaccactggtgcaagccccagcagaaaggcttgagactgttgtgcggctcacaagtcccagtcgaggtgatgggattccctaattccaggggcacttgcgccggaagtctccacggctatatcgtttag

SEQ ID NO: 214654 - DNA, 552 bp, synthetic construct
  misc_feature 1..552: note = Description of Artificial Sequence: Synthetic coding sequence
  source 1..552: mol_type = other DNA
atggccttgttgactgctgagactttccgcctccagtttaacaacaaaaggcgtctgcgacgcccatattacccccgaaaagccttactctgctatcagctcaccccgcagaatggatccacaccgactcgcggttacttcgaaaataaaaagaagtgccacgcggagatttgctttataaacgaaataaaaagcatgggactggatgaaacgcagtgttaccaggtaacttgctacctcacctggtctccctgctcctcctgtgcctgggagctggtagattttatcaaggctcacgatcatttaaacttgggcatctttgctagccggctctactaccactggtgcaaacctcagcaaaaaggcctacggttactgtgtggatcccaagtcccggttgaagttatggggttcccgaagttcgcggattgctgggaaaactttgttgaccacgagaagccgttatcatttaacccttacaagatgctggaggaactggacaaaaacagcagagctatcaagcggagactagaaaggataaagcagagctag

SEQ ID NO: 214655 - DNA, 1104 bp, synthetic construct
  misc_feature 1..1104: note = Description of Artificial Sequence: Synthetic coding sequence
  source 1..1104: mol_type = other DNA
atggagcctatttacgaggagtatttggcaaatcacggtacaattgtgaagccatattattggctgagcttctcgctggattgcagtaattgtccctatcacatcaggaccggcgaggaagcacgagtgagcttgactgagttctgtcagattttcggttttccttatggcacaacgttcccacaaactaagcatcttacattctacgagctgaaaaccagtagcggaagcctggttcagaaaggccacgcttccagctgtacaggcaattacatccaccctgagtcaatgctgttcgagatgaacggctacctggattccgcaatatacaacaatgattctatccgtcacataatactatatagtaacaattctccatgtaatgaagctaaccactgctgcataagcaaaatgtacaatttcctcatcacctatcctggcataactctatctatttatttttcacaactttatcatactgaaatggactttccagcatcagcctggaatcgggaagccctgcgtagcttggcatctttatggcccagggtggtgttgtcacctatcagtggcggaatctggcacagtgtccttcactcgttcattagcggtgtgagtggatctcacgtgttccaacccattctcactggacgagcactggcagaccgacacaacgcttacgagatcaacgccataaccggcgtcaaaccttactttaccgatgttctcctgcagaccaagagaaatccaaacacgaaggcccaggaggccctagaaagctatcctctgaacaatgcatttcccggtcagtttttccagatgccatccggccagctccagccgaacttgccgcctgacttgcgtgcccctgtggtgtttgtgctggtccctctgagagatttgccacctatgcacatgggccagaatccgaataagccacgaaatatcgtgcgccacctcaacatgccacagatgtcattccaggaaacaaaggacttagggcgattgcccactggccgtagcgtggagatagtcgagataacggagcagttcgcttcgagcaaggaggcagatgagaaaaaaaaaaagaaaggtaaaaaatag

SEQ ID NO: 214656 - DNA, 252 bp, synthetic construct
  misc_feature 1..252: note = Description of Artificial Sequence: Synthetic coding sequence
  source 1..252: mol_type = other DNA
atgcgattgtttctcagtctgccagtcctcgtagtggtccttagcatcgtcttagagggccctgccccagcccaaggcacacccgatgtatcatcggcgctggacaaattaaaagagttcggaaatactttggaggataaagcgagggaactgatcagccgcattaagcaatcggagctgtccgctaagatgcgggaatggttttcagaaaccttccagaaggtgaaggagaagctgaagattgatagttag

SEQ ID NO: 214657 - DNA, 306 bp, synthetic construct
  misc_feature 1..306: note = Description of Artificial Sequence: Synthetic coding sequence
  source 1..306: mol_type = other DNA
atgggaactcgtctcctcccggctttgtttctggtgctcctcgttttggggttcgaagtccaaggcacacagcaacctcagcaggacgagatgccatccccaactttcctgacgcaagtgaaggagtctcttagctcttactgggagagcgccaagactgccgctcagaacttatacgagaagacttatctaccagcggtggatgagaagctcagagacctgtactccaaaagtacagccgcaatgtctacatatacaggcatattcacagatcaggtccttagcgtgttgaagggtgaggaatag

SEQ ID NO: 214658 - DNA, 384 bp, synthetic construct
  misc_feature 1..384: note = Description of Artificial Sequence: Synthetic coding sequence
  source 1..384: mol_type = other DNA
atgagtctgctgagaaacaggttgcaagccctcccagctctgtgtttgtgtgtgctggtcctggcctgcatcggagcatgccaaccggaagctcaggagggaaccttgtccccccctcctaaactgaaaatgagtcggtggtccttggtccggggacgaatgaaggaactgctggagacagtggtaaatcgcacgcgcgacgggtggcaatggttttggtctccctctaccttccggggatttatgcagacgtactatgacgaccacttaagggaccttggaccccttaccaaggcttggtttctagaatctaaagactcgctcctaaaaaaaactcactctctgtgtcctcggctggtctgcggcgataaggaccagggatag

SEQ ID NO: 214659 - DNA, 1101 bp, synthetic construct
  misc_feature 1..1101: note = Description of Artificial Sequence: Synthetic coding sequence
  source 1..1101: mol_type = other DNA
atggccagtatggctgcagtcctcacctgggcccttgctttgctcagcgctttctccgccacccaggcgaggaagggcttctgggattacttctcacagacatccggcgacaagggacgagtcgaacagatccaccagcagaaaatggctagggaacccgcaaccctgaaagatagtctggaacaggacctgaacaatatgaacaaatttctagaaaagctgcgcccactgagcggcagcgaagccccacggctgccacaggatccagttggaatgaggagacagcttcaggaagagttggaagaggtgaaggctcgcctgcagccgtatatggccgaagcccatgaactggtgggatggaacctggaagggctgcggcagcagctgaagccatatacgatggatctgatggagcaggtagccctcagagtccaagagcttcaggaacagctgagggtggttggggaagacactaaagctcagttgcttggtggcgtggatgaggcatgggctctgcttcagggactgcagagcagggtggtgcatcatacaggtaggttcaaggagctgtttcatccgtacgccgagtcactcgtcagcggcattgggaggcacgtgcaagagctgcataggtccgtcgccccacacgcacctgcgagcccagctcgcttgagtcggtgtgtgcaggtactaagtcgcaaacttactctcaaggccaaagctctgcatgcccgaatccagcagaatctggatcaactgagggaggagttgtcacgggcttttgctggaactggtacggaggagggggctggaccagatccccagatgctgtccgaggaggtcaggcagagactacaggcctttagacaggacacatacctgcagatcgcagctttcacccgagccatcgaccaagaaacagaggaggtacagcagcagctggctcctccccctcccggacattcggcattcgcccctgagttccagcagaccgacagcggaaaagtcctatctaaactgcaggcaaggcttgatgatctgtgggaagatataacgcatagcctccacgaccagggccactctcaccttggagacccttag

SEQ ID NO: 214660 - DNA, 354 bp, synthetic construct
  misc_feature 1..354: note = Description of Artificial Sequence: Synthetic coding sequence
  source 1..354: mol_type = other DNA
atgggaacttggggtgcacctcacagaaccctgccgtgccggaatagaggcgctatgcagccgagagtactgcttgtagtcgccctcctcgcacttctggctagtgctcgcgcttccgaggctgaagacgcttctcttctgtcctttatgcagggttatatgaaacacgccactaaaacagccaaggacgccttgagctccgtccaggaatcacaggtcgcgcaacaagcccgaggatgggttacagatggattctcctctctcaaggattattggagcaccgtgaaggacaagttttctgagttctgggacttggaccccgaggttagacccacttccgctgtggccgcttag

SEQ ID NO: 214661 - DNA, 168 bp, synthetic construct
  misc_feature 1..168: note = Description of Artificial Sequence: Synthetic coding sequence
  source 1..168: mol_type = other DNA
atgcaacctagagtcctgctggttgtggcgctattagccctcctagccagcgccagggcttctgaagcggaggatgcctcattactatccttcatgcaggggtacatgaaacatgcaacaaagacagccaaggatgcactgagctccgttcaggagagccaggtgtag

SEQ ID NO: 214662 - DNA, 384 bp, synthetic construct
  misc_feature 1..384: note = Description of Artificial Sequence: Synthetic coding sequence
  source 1..384: mol_type = other DNA
atgagcctcctgagaaaccgcctccaagcccttccggcattgtgtctttgtgtgttggtgctcgcctgtattggagcgtgccagccagaggcccaagaaggaactctgagcccgcctccaaagcttaaaatgagcaggtggtcactcgtgcgcggaaggatgaaggagttgctggagacagttgtaaacaggaccagagacggttggcagtggttctggtcaccatctacgttcaggggatttatgcaaacatattacgacgatcacttgagagacctggggcctttgaccaaggcctggttcctcgagtcaaaagatagccttctcaagaaaactcattctctttgtcctcgtctggtctgcggagataaagatcagggatag

SEQ ID NO: 214663 - DNA, 384 bp, synthetic construct
  misc_feature 1..384: note = Description of Artificial Sequence: Synthetic coding sequence
  source 1..384: mol_type = other DNA
atgtcgctgctccgaaacaggctgcaggcacttcctgccctatgcctgtgcgttctcgtcctggcgtgtatcggcgcttgccagcctgaggcacaagaggggactcttagtccgccaccgaagctcaaaatgtctagatggtctctggtgcggggtcgaatgaaagagctcctcgaaaccgtggtgaaccgcactagagatggctggcagtggttctggagcccctccacgtttcgtggattcatgcagacatattatgacgaccacctcagagatcttggacccctgaccaaggcctggtttctggagtctaaagactcactgctcaagaaaacccacagcctctgccctcggctggtgtgcggcgataaggaccagggctag

SEQ ID NO: 214664 - DNA, 570 bp, synthetic construct
  misc_feature 1..570: note = Description of Artificial Sequence: Synthetic coding sequence
  source 1..570: mol_type = other DNA
atggtgatgttactacttttgctgagtgctttagccggtttgtttggtgcagcggaaggacaggctttccatctcgggaaatgccctaatccacccgtccaagagaacttcgatgttaataagtaccttggcaggtggtatgagatcgagaaaatcccaacaacatttgaaaatggtcggtgtatccaggccaattattctctcatggagaatggcaagatcaaggtgctgaatcaggaactgcgcgctgacggtacagtgaaccaaattgagggggaggccacaccagtgaatctcactgaacctgccaaactggaggtgaaattctcatggttcatgccctccgccccatactggattctggcgactgactacgaaaattatgccctggtctactcctgcacgtgtatcattcagctgttccacgtcgatttcgcttggattctcgccaggaacccaaacctgcctcctgaaacggtcgatagccttaagaacatattgacatccaacaacatagacgttaagaaaatgacggtcacagatcaggttaactgccctaagctttcctag

SEQ ID NO: 214665 - DNA, 450 bp, synthetic construct
  misc_feature 1..450: note = Description of Artificial Sequence: Synthetic coding sequence
  source 1..450: mol_type = other DNA
atggtaatgcttctgcttctgctatccgccctggccggtctttttggagctgcagaagggcaggcctttcacctgggtaagtgtcctaatccacctgttcaggagaatttcgatgttaacaaatatctgggacggtggtacgagatcgaaaagattccaaccacttttgaaaatgggagatgtattcaagctaactatagcctgatggagaatggaaaaatcaaagtgctaaaccaggagttgagggctgatggtaccgtcaatcagatagagggtgaggctactcccgttaatctgaccgaacccgctaaactggaagttaagttcagctggttcatgccctcagctccttattggattctcgctacagactatgaaaactacgccctggtgtactcctgcacctgcattatccagctgttccacgtggatttcgcctggattctgtag

SEQ ID NO: 214666 - DNA, 954 bp, synthetic construct
  misc_feature 1..954: note = Description of Artificial Sequence: Synthetic coding sequence
  source 1..954: mol_type = other DNA
atgaaagtgttatgggccgcactgctggtaaccttccttgctggttgccaagcaaaggtcgagcaggctgtggagaccgagccagagcctgaactgaggcagcagacagagtggcaaagtggccagcgttgggagctggccttaggcagattctgggactacttacgctgggtgcaaaccctgagcgaacaggtacaggaagagctcttgagttctcaggtcacccaggagctccgcgcattgatggacgagacgatgaaggagctcaaggcttataaatcagaactggaagagcagctcaccccagtcgccgaagaaacgagggcacggctatctaaagaacttcaggccgctcaggctcgtctgggcgcagatatggaggacgtgtgtgggaggctggtgcagtaccgtggcgaggttcaggccatgctggggcagtctacggaggagctacgggtgagactggcctcacatctgcggaagttgaggaaaagattgttgcgagacgccgatgaccttcagaaacgactggctgtgtaccaagccggagcacgggaaggcgctgaacggggattaagcgcgatccgagaaaggctgggccctttagttgagcaggggagggtgcgagccgcaactgtgggctcgctggcaggacagccgttgcaggagagggcacaggcatggggagaacggttgcgggctaggatggaggaaatggggtcacgtacgagagatagacttgatgaggttaaagaacaggtcgccgaggtccgggctaagctggaggagcaggctcagcaaattagattacaggccgaggcttttcaggctagactgaagagctggtttgaacccctggtggaagacatgcaaagacaatgggctggattggtggagaaggtacaggctgctgttggaaccagtgctgctccagtaccttccgacaaccattag

SEQ ID NO: 214667 - DNA, 660 bp, synthetic construct
  misc_feature 1..660: note = Description of Artificial Sequence: Synthetic coding sequence
  source 1..660: mol_type = other DNA
atgaaagtgctgtgggccgctctgctagtgacattcctggctggttgccaggctaaggtggaacaggccgtggagaccgaacccgaaccagaactccgtcagcagacagagtggcaatccggtcaaaggtgggaactggccctaggcagattctgggattatttgcgctgggttcaaacactgtccgaacaggtgcaggaggaactgctgtcctctcaggtcacacaggagcttagagcactaatggatgagacaatgaaggagctcaaagcctataagtctgagctcgaagaacagctcacccctgttgcagaagagactagggccagactatccaaggaactccaggctgcccaggccagattgggggcagacatggaagatgtgtgcggcaggctagtgcagtaccgaggcgaggttcaagccatgctgggacagtccactgaagaattgagagtgagactggcgtctcatctgcgcaaactgcgaaagcggctgttgcgggatgccgacgatcttcagaaaagactagctgtgtatcaggctggtgctcgggagggcgctgaacgcggtcttagcgcaattcgggaacgtctgggaccactcgtcgagcagggacgtgtgcgggctgctaccgtagggtctttagcgggtcagtag

SEQ ID NO: 214668 - DNA, 867 bp, synthetic construct
  misc_feature 1..867: note = Description of Artificial Sequence: Synthetic coding sequence
  source 1..867: mol_type = other DNA
gaagtaaaggacgtgctgccccaggaacctgttaggtcagctgtgggcggaaccggaatgtccagtggggcaagcaggaagtcctgggaccccggaaatccttggccacccgattggcccatcactggccgtaagatgaaggtgttgtgggccgcactgttggtgacttttttagccggttgccaagctaaagttgagcaagccgtcgaaaccgagcctgagccggagctgagacagcaaacagaatggcagtccggccagcgttgggagctggctctcgggcgtttctgggattaccttcggtgggtgcaaaccctgagcgaacaggtgcaggaggaattgttgagctcgcaggtcacccaggaattgagagccctgatggacgagactatgaaagagctcaaggcctataagagcgagctggaagaacaattgactcccgtggcagaggaaacgcgtgccaggttgagtaaggagctccaggcagctcaggcccgactcggtgcagacatggaggacgtatgtggcagactggttcagtataggggcgaagtacaggccatgcttggtcagtcaaccgaagagcttagagtccggttagcctcccaccttcgaaagttaagaaagcggctgctgagggacgcagacgatcttcagaaacggctcgccgtgtaccaggccggagccagggaaggagctgagcgaggcctctctgccattagggagcgcctcggcccactggtagaacagggtagagtgagggccgctactgttggttctctagcaggccagcctctgcaggaacgtgcccaagcctggggggaacgcctgagagctagaatggaggagatgggcagtcgcacgtag

SEQ ID NO: 214669 - DNA, 651 bp, synthetic construct
  misc_feature 1..651: note = Description of Artificial Sequence: Synthetic coding sequence
  source 1..651: mol_type = other DNA
atgaaggtactgtgggccgcactcttggttacattcctggcaggctgccaggccaaggtggagcaagccgtggaaacagagcccgaacctgagcttcggcagcagacagagtggcaaagtggacaacgctgggagctcgctctcgggaggttctgggactatcttcgttgggtgcaaaccctttccgaacaggtgcaggaagaactgctatcctcgcaagtgacacaggagcttagggctctgatggatgaaaccatgaaggaattgaaagcctataaatctgagttagaggaacagcttacaccagtggccgaggagacccgcgcacgactcagcaaggagctacaggccgctcaggctcgcctgggagcagacatggaggatgtttgcggccgtctggtgcagtaccgtggtgaggttcaggcaatgctgggacaaagcacggaagaactcagggtgcggctcgcttctcacctgagaaaattgcgcaagcgtctgctccgcgatgccgatgatctgcagaaaagactggctgtgtaccaggcaggtgccagagagggtgctgagcgcggtctgtcggccatcagagagagattaggaccactcgtcgaacagggccgagtgagggctgccaccgtaggctctctgtag

SEQ ID NO: 214670 - DNA, 10593 bp, synthetic construct
  misc_feature 1..10593: note = Description of Artificial Sequence: Synthetic coding sequence
  source 1..10593: mol_type = other DNA
atggcaaaggaggaggatgaggagaaaaaggctaaaaaaggcaaaaagggcaaaaaggccccagagccagaaaaacctaagcggagcttaaagggaacatctaggctcttcatgggttttagggataggacccccaagatctcaaaaaaggggcagttcagatcagcctctgcatttttttggggcctccacaccggaccccagaaaacaaaacgaaaacgtaaggctaggaccgttctcaaatcgacgtcaaagttgatgacacagatgcgcatgggaaaaaagaagcgcgctatgaaagggaagaaaccctctttcatggtgattcggttccctggccgaagagggtatgggagattgcgtcccagggctcgctctctgtctaaagcttctaccgctatcaattggctgaccaagaaattcctactgaagaaggccgaggagtctggctccgaacaggctactgttgatgcctggcttcagagatcttccagtcgaatggggtctcggaaactaccctttccatcaggggctgaaatattgcgcccagggggtagacttcgccgatttcccagaagcaggtcaatatatgctagtggagaacccctgggcttcctaccttttgaagatgaggctcctttccatcattctgggtcaaggaagtctctgtacgggttggagggatttcaggacctgggagaatactatgactatcatcgcgatggtgatgactactatgaccggcaatccctccatagatacgaggagcaggagccttacctggctgggctcggcccttattcccccgcttggcctccttatggtgaccattactacggctaccctcccgaggacccgtacgactattatcaccccgattactacggcggtccttttgatcccggatatacctacggatacggctatgacgactatgagccaccttacgcgcctccatctggatactcgagcccctactcatatcacgacgggtatgagggggaggctcatccttacggatactatctcgacccgtatgctccgtacgatgcaccttacccgccttacgacctgccctaccacacaccttacgacgtcccttattttgatccttatggtgttcactacaccgtgccgtacgccgagggggtatatggcggtggggacgaggccatctatccccctgaagtgccctacttttaccctgaggaatcagcatcggctttcgtctatccgtgggtgcctccgccaatcccgagccctcataacccatatgctcacgctatggacgatatagccgagctggaagaacctgaggacgccggagtggaacgccagggcacctcctttcgcctgccctcagccgctttcttcgaacaacaaggcatggacaaaccggctcgaagtaagttgagtctgattcgcaagtttagactgtttcccagacctcaggttaagctatttgggaaggaaaagctggaggtccccttaccacctagcctggatatcccactgcccctgggagacgccgatgaagaagaagatgaagaggagctacctcctgtgagcgctgtgccttacgggcacccattttggggctttctgaccccacggcagaggaatttacagcgcgcactgagcgcgtttggcgctcaccgtgggctcgggtttggcccagaattcggccgaccagttccccgaccagcaaccagcctggctcgattcctgaagaagacattgagcgagaaaaagccgattgcacggctgcgtggctcccagaaagcccgagctggtgggcctgcagtgagagaagcggcatacaaaaggtttggctacaaacttgccggtatggacccagaaaagccaggcacccctatcgttctgagacgcgctcaaccgagggcacgtagctcgaatgacgccaggcggcctcccgctcctcaacccgcacccagaaccctctcgcactggtctgccctgctgtcgccaccagtaccgccaaggccgccttcttctggcccacccccagcccctcctctgtcacctgcgctgtctgggctgccccgacccgcttctccatacggatcactgaggcgccacccgcctccatgggctgcacccgctcacgtaccaccggctccacaggcgtcttggtgggccttcgtagagcctcccgcagtaagtccggaagtaccacctgacctgctcgcttttccaggacccaggcccagctttcgcggatcaagaagaaggggggcagccttcggattccccggtgcatcgccaagagccagtcgccgtcgggcatggagcccactggcctctccccagcccagcctcagatcctctcctggccttggctattgtagccccttagctccgcctagtcctcaacttagcttaagaaccggcccttttcagcctccatttctccctcccgcacgacgtccacgatcactgcaggaaagccccgcacctcggagagccgcagggaggctgggacctccgggtagccctcttcccggttcccctagacctccctctcccccattgggcttgtgccattcgccacgaagaagcagcctgaatctgcccagccgacttcctcacacttggcgtcgactgtccgaacccccaacgcgagccgttaagccgcaggtgcggctcccatttcacagacccccaagagctggagcttggcgtgctccgctcgagcatagagagtcccccagggagccagaggactcggagaccccctggaccgttccacccctcgcaccttcgtgggacgtagatatgcctcctacacagcggccacctagcccctggccgggaggcgcagggtcccgccgaggcttttccagacctcccccagtgcctgagaatcccttcctgcagctgctggggcctgtgccttcacccaccctgcaacctgaggaccctgcagccgacatgaccagagttttcctgggcaggcaccacgagcctggacccggacagttgaccaaaagtgcagggccaactccggaaaaacctgaggaagaggccaccctcggggaccctcaattgcctgctgagacaaaaccccctacacccgctccacctaaagatgtgacaccaccaaaggacataacgccacctaaggatgtcttgcctgagcaaaaaaccctgcgcccaagcctcagctacccacttgccgcatgtgaccagactagagcgacgtggcccccatggcaccgatgggggacgctccctcaggcagccgctcctttggctccgatcagggcccctgaaccgctgccaaagggtggcgaacgcaggcaagctgcgcctggtcggtttgccgtggtcatgcccagggtgcaaaaattgtcaagctttcagcgagtgggccctgctaccctcaagcctcaggttcaaccaatccaggaccccaaaccacgtgcttgttccttaagatggagttgtctctggcttcgagccgacgcatatggcccatggccacgggtccatactcatcctcagagttgtcatctaggaccaggagctgcatgcctgagcttgcgcggaagctgggaggaggttggcccaccaagctggaggaataagatgcattccatccggaacttgccaagcatgcgctttagggaacaacacggcgaagacggagtggaggatatgacgcagctagaggatctacaggagactactgtgctgtccaatctgaagattcggttcgaacgaaatttgatctacacgtacataggcagcatccttgtttctgtgaacccctatcagatgtttggaatttatggaccagagcaggtgcaacagtataatggcagggccttaggcgaaaatccccctcacctcttcgctgtagctaatttggcattcgctaagatgttggatgccaagcagaaccagtgcattattatctccggggagtcagggtccggcaagaccgaagcgaccaaactgatattacgatatctggctgcaatgaaccagaaacgggaagttatgcagcagattaaaatcctcgaggccacgcctttgctggagtcattcgggaacgcgaaaacagtcaggaacgataattcgagtcgatttggaaagtttgtcgaaattttcttggaggggggagtgattagcggagcaattactagtcaatacctgctcgaaaaaagtcgtatagttttccaggcgaaaaatgaacgaaattatcatatcttttatgaactactggcaggtctccctgcccagcttcggcaagcattctccctgcaggaagccgagacctattattatttgaatcagggcggtaattgcgagattgccggaaaatctgacgccgatgactttcggagactgcttgccgcaatggaagtcctagggttcagcagcgaagaccaggattctatttttcggattcttgcttccatcctgcatttgggcaatgtttacttcgagaagtacgaaacagacgctcaggaagtcgcttccgtggtgtcagcccgagaaattcaagccgtggccgagctgttgcagatcagtcccgaggggctccagaaggctatcacttttaaggtcacagaaacgatgagagagaagatattcactcccttgacagttgaaagtgcggttgatgcacgagacgcgattgctaaggttctgtacgccctgctgttctcctggctcatcacccgagtgaatgctcttgtgtccccacgccaagatacactctcaatcgccatcctggacatttatgggttcgaagatcttagttttaacagtttcgaacagttgtgtatcaactatgccaacgaaaacctgcaatacttgttcaacaaaatcgttttccaggaagagcaggaagagtatatacgtgaacagatagattggcaagagatcacttttgccgataaccagccgtgcatcaatttgattagtctgaaaccgtacggcatcctgcgaattctcgatgaccaatgttgctttcctcaggctacagatcatactttcctgcagaaatgccactatcatcacggcgctaaccctctgtactccaagccaaaaatgcctctgcctgagttcacaatcaagcattacgcagggaaggttacttatcaggtgcacaagtttttggacaaaaatcacgaccaggtgagacaggacgtgctggacttgttcgttcggtcaaggacgagagtggtggctcacctctttagctctcacgcacctcaggccgctcctcaaagattgggcaagtcctcgtctgtgacgaggctttataaagcacataccgtagcggcaaagttccagcagtcactcttggacctggtggaaaagatggagcgctgcaacccgttatttatgaggtgcttgaaaccaaaccataaaaaagaacccggactgtttgaacccgatgtggtaatggctcaattgcgatattcaggtgtcctcgagactgtgagaatacgcaaggagggctttccagtacggctgccttttcaagggttcatcgatagatactgctgtctcgtggccctcaaacatgacctccccgctaatggggacatgtgcgtgtctgtgttgagccggttgtgcaaggtgatgcctaatatgtatcgggttggcgtgagcaagctgtttctgaaagaacacctctatcaactgttggagtctatgagagagcatgtattaaatcttgccgctctcactctgcagcggtgcctgcgtgggttctttatcaagcgtcgattccgctcattgagacacaagataattttactgcaatcccgagctcggggatatctggctcggcaaaggtatcagcaaatgagacgttcattagtcaaatttaggtctcttgtacatgcatacgtctcgcggaggcgatacctgaagctgcgcgctgagtggagatgccaggtggagggagctctcttgtgggaacaggaagagttgtccaaaagagaggttgtggcggtcggccacctcgaggtgccagccgaactcgctggtctattgcaagccgtcgcaggactcggccttgcacaggtgccacaagtagcgcctgtaaggactcccagattgcaggcggagcctcgcgttacactgcctctggatattaataactacccaatggcaaagttcgtgcagtgccactttaaggaaccggcttttggcatgctgacggtgccactcagaacacctctgacacaacttccagcagagcaccatgctgaggccgtctccatcttcaagttgatcttacgtttcatgggggatcctcacctgcacggcgcacgcgaaaacatctttggcaactatatcgtgcagaaaggtctggcagtgccagagctgagagatgaaatattggcacagcttgctaatcaggtgtggcacaatcataatgcccataatgccgaacggggttggctgctgttagcagcctgcctgtcaggtttcgccccatcaccatgttttaataagtacctgctcaagtttgtctccgattacggccgtaatggatttcaggcggtatgtcaacatcggctgatgcaggcaatgggcagggcgcagcagcaagggtcgggcgcagccagaacactgcctccgacacagctggaatggaccgcaacctacgagaaggcgtctatggctcttgatgtcgggtgcttcaatggcgatcagtttagctgcccagtgcattcttggtctaccggggaagaggttgccggtgacattctgaggcacagaggtctcgctgacggttggagaggttggactgtggctatgaaaaatggtgttcagtgggcagaacttgcgggtcatgattacgtcctggatctcgtgagcgacttggaattgttacgagatttcccccgacagaagtcttattttatagtagggaccgaaggaccagccgcttctaggggtggacctaaggtcgtctttggaaacagctgggatagcgacgaggatatgagcactagacctcagccacaggagcacatgcctaaggtcctcgattccgatggatacagctctcacaatcaggatggcactaacggcgaaaccgaggctcagcgcggaacagctacgcatcaggagtctgatagcctcggcgaacctgccgtgccccataaaggcctagattgttatctcgattctctgtttgatcccgtgctgtcctatggagacgctgacctagaaaagcccactgccatcgcctacaggatgaagggaggcggacagcccggagggggaagtagttccgggacggaggatacccccagaagacctcctgaaccaaagcctatcccagggctagatgccagtactctcgctcttcagcaggcatttattcataaacaagctgtcctactggctcgagagatgaccctccaggccacagcgcttcagcaacagccactgtccgccgctttgcgttctctccccgctgaaaagcctccagcccctgaagctcagccaacatctgttggcactgggcctcccgcaaagcctgtactactcagagctactccaaagcctcttgcaccggctccactcgcgaaggctccacgtttgcctatcaaacccgtagcagcacccgttctcgcccaggaccaggcctcccccgagactaccagtcctagtccggagctggtgcggtactcaaccctgaactcggaacatttccctcagcctacacagcagatcaaaaacatcgttaggcagtaccagcagcccttcaggggagggcgtcctgaggccctgcgcaaggacggcggaaaggtttttatgaaacggcctgacccccatgaggaggctctgatgattctcaaaggtcagatgactcacttagccgcagccccaggcactcaggtgtctagagaggcagtggctctggtgaaacctgtgacttcggcgcctaggccctctatggcccctacaagcgctctacctagccgctctctggagccaccagaggaactgactcaaacgcgcctccataggctgatcaatccaaatttttatggataccaagacgccccatggaagatttttctcagaaaagaagtgttttatcccaaagactcatactcccaccccgtccaactggatctcctatttcgacaaatactccatgacacactgtccgaggcctgtctgcgtatctcagaggatgagcgtctgcggatgaaagccctgttcgctcagaaccagcttgacacccaaaagcccctagtgactgagtccgtgaagcgcgctgtggtaagcacagccagagatacgtgggaggtgtacttcagcagaatcttccccgcaaccggctctgtgggaactggggttcaattgttggccgtgtcccacgtgggcatcaaactcttgcgaatggtgaaaggcggtcaggaggcaggcggtcagttgagagtgttgcgcgcttattctttcgctgacatactttttgttacaatgccaagccagaatatgctggagtttaacttggcatccgaaaaagtcatactcttttcagcaagggcacaccaagtgaagaccctggtcgacgacttcatcctcgaactcaagaaggactccgactacgtcgtcgccgttcgcaacttcctgcccgaagaccctgctctcctggccttccataaaggagacattatccatcttcaacctctggaaccaccccgtgtaggctattctgctgggtgcgtcgtgagaagaaaagtggtttatcttgaagaactgcgccgtcgcggacctgattttggttggaggttcgggaccatccacggcagagtcggaaggtttccatctgaactggtgcagcccgctgcggcacccgactttctgcagttgcccaccgagcccggtcggggtcgggctgcggctgtggccgcagccgtggctagtgccgctgcagcacaagaggtcggacgacgccgtgaagggcctcccgtgcgagctagatcagccgatcacggcgaggacgcactggcactgcccccttatactatgctggaattcgctcagaaatactttagggacccacagcggagaccccaggacggcttgcggctgaagtcaaaggaacccagggagagtcggacactggaagatatgctctgctttacaaaaacgccactacaggaatccctcattgagttgtcggattcctctctgagcaagatggcgacagatatgttcttggctgtcatgaggtttatgggtgacgctcccctgaaaggccagagtgatctggacgtgctgtgtaacctcctaaagctgtgtggggatcacgaggtcatgcgcgatgagtgttactgccaggtggtcaaacaaatcacagacaatactagctcaaaacaggactcgtgccaaagggggtggagactgctctacatcgtgaccgcgtaccatagttgctcagaagtgcttcatccgcacctaacaaggtttctccaagatgtttctcgtactccaggattaccatttcagggcatagcaaaggcctgcgaacaaaaccttcaaaaaacactgcgtttcggaggtcgcctggagctgccttccagcatagagctccgggcaatgttagccggaagatcaagcaagcgccagttattcctccttcctggcggactggagcgccacctgaaaattaagacatgtacggtcgcactggacgttgtcgaggaaatttgcgccgagatggcgctcaccagacccgaagcttttaacgagtacgtaatattcgtggtaactaaccggggtcagcacgtctgcccattgtctaggcgcgcttatatcttggatgtcgccagcgaaatggaacaggtcgatggcggatacatgttatggtttcggcgagtgttgtgggatcagcctttaaagtttgagaacgaactgtatgtaaccatgcactataatcaagtgctgcctgactatctcaagggcttgttttcctccgttcccgcttcccgtcccagtgagcagctgctccagcaggtgtcgaaactcgccagcctccagcaccgcgcaaaagaccacttttatctgccctctgtgcgggaagtgcaggagtacataccagcccagctttatcggaccaccgccggatctacatggttgaacctggtgtcccagcataggcaacagacacaagccctgtcgcctcatcaggcgagagcccagttcctcggacttctgtccgctcttcctatgtttggttcctctttctttttcattcaatcctgttcaaacatcgccgtgcctgctccttgtatcttggctatcaatcataatggccttaatttccttagcacagagacacacgagctcatggtgaaattccctctcaaagaaatccagtctacccgaacacagcgacctactgccaactctagctatccctatgttgaaatcgccctgggcgatgtggccgctcagcggacactgcagcttcagctggagcagggcctcgaactgtgcagggtggtggctgtacacgttgaaaatctgctgtcagcccatgaaaaacgcctgacactaccaccctcggagatcaccctgctatag

SEQ ID NO: 214671 - DNA, 840 bp, synthetic construct
  misc_feature 1..840: note = Description of Artificial Sequence: Synthetic coding sequence
  source 1..840: mol_type = other DNA
atgtttcgagccccatgtcaccggttaagagcgaggggtacgcgcaaggccagggccggtgcctggaggggttgcacattcccctgtctgggtaaaggaatggaaagacctgctgcaagagagccacacggcccagatgccctgagacggttccaaggattgctgctggaccgacggggtcgactccatggccaagtcctgcgcttgcgggaagtagccaggagactggagcggctaaggcgtaggtctctggtggctaacgtcgcaggtagcagcctctccgccacgggagccttagcagctatagttggcctgagtctgagtcccgtgacgttgggtaccagcctgctggtctccgccgtgggtctcggagttgctacagccggtggggcagtaactattactagcgacctgagtttaatcttctgcaactcccgggaacttcgcagagtccaggagattgcagctacctgtcaagaccagatgcgcgagatcctgtcatgcttagaatttttttgtaggtggcaaggctgtggggatcgacagctcctccagtgcgggaggaacgccagcatcgccctctataactccgtgtattttatcgtcttttttggctcccgaggctttctgatacccagacgagccgagggcgacaccaaagtaagccaggccgtcctcaaggccaaaattcaaaagctcgctgaatccttggagtcttgtacaggcgctttggacgaattgtcagagcagctggaaagccgcgtgcaactgtgtacaaaatcttcgagaggacacgacctgaaaatcagcgccgatcaacgagcagggctgttcttttag

SEQ ID NO: 214672 - DNA, 747 bp, synthetic construct
  misc_feature 1..747: note = Description of Artificial Sequence: Synthetic coding sequence
  source 1..747: mol_type = other DNA
atgggaatggaacgtccagctgcacgggagccacatggcccagacgcgctgcggaggttccagggcctccttctagaccggcgtggaaggttacacgggcaagtcctgcggcttcgagaggtggccagaaggctggagcggttaaggcgcagatctctggtcgctaacgtggccggaagtagcttaagcgcaacgggggctctcgcagcaatcgtgggtctgtctctttcccctgtcacgctgggtacaagtctgctggtctcagccgttgggctgggcgtcgccactgctggcggagccgttaccattacgtcagatttgtctctcatcttctgcaatagcagggagctccgcagagtgcaggagattgccgctacatgccaggatcagatgagggaaatcctctcatgtctggaatttttctgcagatggcaaggctgcggcgaccgacagctgctgcagtgtgggcgtaacgcaagtatcgctttatataacagcgtctatttcatcgtatttttcggtagcagaggctttctcatccctcgcagggctgagggcgacacaaaggtgtctcaggccgtactgaaagcaaaaatacagaagctcgctgaatctctcgaatcttgtacaggagcactggacgaactgtccgaacagctggagtcccgggtgcagctatgcaccaaatcttcacgcggacatgacctgaagatttccgctgaccagcgagccggactgtttttctag

SEQ ID NO: 214673 - DNA, 1245 bp, synthetic construct
  misc_feature 1..1245: note = Description of Artificial Sequence: Synthetic coding sequence
  source 1..1245: mol_type = other DNA
atgcgcttcaaaagccacactgtagaacttcggagaccctgcagcgatatggagggggcagccctgcttcgcgtaagcgtgttgtgtatctggatgtcggcactgttcctcggcgttggagtgcgggctgaagaagctggagctcgcgtacagcagaatgtgcccagcggtacggacacgggcgatccgcagagcaaacccctgggcgactgggctgccggaaccatggatccagaatctagcatcttcatagaagatgctattaaatacttcaaagaaaaggtgtccacccagaacctcttactcctcctgaccgacaatgaagcgtggaacggatttgtcgcggctgccgagctgccaaggaacgaagctgacgagctaaggaaggcattggacaacctggccaggcaaatgatcatgaaggataaaaactggcacgacaaaggccagcagtaccgcaactggttccttaaagaattccccaggttaaaatccgagcttgaagataacattagacggctgcgggcactggctgacggggttcagaaggttcacaagggcaccacaatcgcgaacgtcgtgtctggctctctgagcatttctagcgggatcctcaccctggtcgggatggggctagcccctttcaccgagggcggaagcctcgtgctgctggagcctggaatggagctgggcatcacagccgcactcactggcatcacatccagcacgatggattacggtaaaaagtggtggacacaagctcaggcccacgatcttgttatcaagtcattggacaaacttaaggaggtgagagagtttctgggcgagaacatttccaacttcctttcactagccggtaacacgtaccagttaactagggggattggtaaggatatcagggctttacggcgagccagggcaaacctccagtccgtccctcacgcctcagctagccgcccacgagtgaccgagccaatttccgccgaatcgggcgagcaggtggaacgagtaaatgagccgtctatccttgaaatgagcaggggcgtgaaattaacagatgtcgcccctgtcagtttctttctcgttctcgatgtggtttacctcgtttatgagtcaaaacatttgcacgaaggtgcaaagtctgagaccgctgaagaattgaagaaggtcgctcaggagctcgaggaaaagctgaatatccttaacaacaactacaaaatattacaggccgatcaggagctgtag

SEQ ID NO: 214674 - DNA, 834 bp, synthetic construct
  misc_feature 1..834: note = Description of Artificial Sequence: Synthetic coding sequence
  source 1..834: mol_type = other DNA
atgatcatgaaagataaaaattggcacgacaagggacaacagtaccggaattggtttctcaaggagtttcctcgcctcaagagcgagctggaggataatattcgtcggctccgagccttggcagacggggtacagaaggtccacaaaggaactacaatcgcaaatgtcgtcagtggctctctgtctatcagttctggcatccttactcttgtcggaatgggactcgccccttttaccgaaggcggatcgctggtgttgctcgagccaggcatggagctgggaattaccgctgcactgactggtataacctcaagtacaatggattacggaaagaagtggtggacacaggcgcaggctcacgatctcgttattaaaagcctcgacaagcttaaagaggtcagggaattcctcggggagaatatttccaattttctttccctggctggcaacacatatcaactaacaagagggattggaaaagacatccgagcactgcggagagctcgagcaaatctgcagtctgtccctcacgccagcgcgtccaggcctcgggtcaccgagcctatctccgccgaatccggagagcaagtggagagagtgaacgaaccctctattctcgagatgagtagaggcgttaagctcacagacgtcgccccagtcagcttcttcctggttcttgatgttgtgtacctggtctatgagtccaaacatctgcacgaaggtgctaaatccgaaactgctgaagaactgaaaaaagtggcccaggaactggaagaaaagctcaatattctgaacaacaactacaagatcctccaagccgaccaagaactttag

SEQ ID NO: 214675 - DNA, 1197 bp, synthetic construct
  misc_feature 1..1197: note = Description of Artificial Sequence: Synthetic coding sequence
  source 1..1197: mol_type = other DNA
atggaaggcgctgccctgctgagggtttccgtcctttgtatctggatgtcagccctcttcctgggcgtgggcgtgagggctgaagaagccggtgcacgagtgcagcaaaacgtgcctagtgggacagatacaggagaccctcagtctaagcccctgggtgattgggccgcaggaacgatggacccagaaagcagcatttttatagaagatgcaatcaagtatttcaaggaaaaggtgagcactcaaaacctcctcctgctgcttaccgacaacgaagcgtggaacgggttcgtggcggctgctgaactgccacgaaacgaagccgacgagctgaggaaggcactggataatctggcacggcagatgataatgaaagataaaaattggcacgacaagggtcagcaatataggaattggtttctaaaagagtttcctaggctgaaatccgaacttgaggataacatcagacgcctgagggcactcgcagacggagtgcagaaggtccataaaggaaccaccattgcaaatgtggtttccgggagtttgtccataagttcaggaattctgaccctggtcggcatgggcttggctccctttaccgaaggcggatcgttagtgttattggagcccggtatggaactggggattactgccgcactgacagggattacaagctctactatggattatgggaagaagtggtggacacaggcccaggcccatgatctcgtaattaagagccttgacaagcttaaggaggtgcgagaatttctcggggagaacattagcaacttcctgtccctggctggtaatacctaccagttaactaggggaattggaaaagacattcgtgcattacggcgtgcccgtgctaacctgcagagtgtaccccatgcaagcgccagccgccctagggtgaccgaaccgatcagtgccgaaagcggcgagcaggtcgagcgggtcaatgagccgtctatcttggagatgagcaggggtgtaaagctaactgacgtggccccagtctcttttttcctcgtgctggatgtcgtatacctcgtttacgagtccaagcacctacatgaaggagcaaagtcagaaacggctgaggagctgaagaaggtggcccaggagctggaagaaaagcttaatatcctcaataataattataagattctgcaggctgaccaagaactctag

SEQ ID NO: 214676 - DNA, 1197 bp, synthetic construct
  misc_feature 1..1197: note = Description of Artificial Sequence: Synthetic coding sequence
  source 1..1197: mol_type = other DNA
atggagggcgctgcgctgttaagggtgtctgtgctttgtatttggatgagcgcactgtttctgggcgtgggcgtccgagctgaggaggccggagctcgcgtacagcagaatgtcccctccggtaccgacacgggggaccctcaaagcaaacctctgggggactgggccgctggaaccatggaccctgagtcctccatcttcatcgaagatgccattaagtacttcaaggaaaaagtgtcaactcagaacctcctcctgctgctaaccgataatgaggcctggaatggcttcgttgccgctgccgagctgccgagaaatgaggccgatgaactaagaaaagccctggacaacttagctcgccagatgattatgaaggacaaaaactggcatgacaaaggccagcagtaccggaattggttcttgaaagagttcccccgtctgaagtccgaactggaggataacatcaggcgcctcagagcgctcgccgatggggtacagaaggtacacaagggaactaccatagcaaatgtggttagcgggtcgctctctatttcaagcggaattctgactctggtgggcatgggattagccccttttacggagggtggctcccttgtgctgttggagcctgggatggagttggggatcacagccgctcttacaggcatcacctcctctaccatggattacgggaagaaatggtggacgcaagcacaggcccatgatctggtgattaagtcactcgataagctgaaggaagtccgcgaatttctaggtgagaacatttccaattttctgtccctcgccggtaatacataccaactaacccgcggaattggaaaagacatccgcgctcttaggagggcccgagctaatctccagtccgttcctcacgcatctgcatcgcggcctagagtaactgagcctatttccgccgagtccggagagcaggtcgaacgcgtcaatgagccatcaatcttggagatgtcacgcggagtgaagctgacggatgtggcgccagtgtcttttttcctggtcctagacgtagtctatcttgtctatgaatccaagcacctccacgagggggctaaatccgagaccgccgaggagctgaagaaggtagcacaagaactcgaagaaaagctcaatatcctcaataacaattacaagatcctgcaggccgaccaagagttatag

SEQ ID NO: 214677 - DNA, 1197 bp, synthetic construct
  misc_feature 1..1197: note = Description of Artificial Sequence: Synthetic coding sequence
  source 1..1197: mol_type = other DNA
atggaaggggcagcactcctgagagtctccgtgctttgcatctggatgagcgccttattcctgggtgtgggagttcgggctgaagaggccggagctcgcgtgcaacaaaatgtgccctccggaactgacaccggagatccccagtcaaaacctctgggagattgggcagccggaaccatggatcccgaaagcagcatttttatcgaggatgccatcaaatacttcaaagagaaggtgtctacccagaatctgctgctcctgctaaccgacaatgaggcttggaatggtttcgtggcagcggctgaactaccccgaaacgaggccgatgagttgagaaaggccctggataacttagcaaggcagatgatcatgaaggacaaaaattggcacgacaaaggccaacagtataggaactggtttcttaaggaattcccgaggcttaaatctgagctcgaagataacatcagaagattgcgcgcactcgccgacggagtccagaaggtgcataagggaaccacaatagctaatgtcgtgagcgggtccctgtctatctcctcaggaatactaacactggtgggcatgggactggcaccctttaccgagggcggaagcctggtcctgcttgagccgggaatggagctagggatcaccgcggctctgaccgggatcacatcctctactatggattatgggaaaaaatggtggactcaggctcaagcccacgatctagttattaagagcttagataaactgaaagaagtcagagagtttctcggcgaaaatatttccaactttcttagcctggccggaaatacctatcagctcacaaggggcatcggcaaagatatcagagcgctgcgcagagccagagccaatcttcagtcagttcctcatgcgtccgccagccgccctagggtgaccgagccgattagcgctgaatcaggtgagcaggtggagagagtcaatgaaccaagcatcctggagatgtccaggggcgtcaaactgacggacgttgcacctgtttctttttttctcgtccttgacgttgtttacttggtgtacgaatctaaacacctgcacgaaggtgctaaatctgaaaccgccgaggagttgaagaaggtagcccaagaacttgaggagaaactcaatatactgaataataactacaagattcttcaggcagatcaggagttgtag

SEQ ID NO: 214678 - DNA, 1197 bp, synthetic construct
  misc_feature 1..1197: note = Description of Artificial Sequence: Synthetic coding sequence
  source 1..1197: mol_type = other DNA
atggagggagccgctctgctgcgtgtttccgtcctttgtatctggatgtctgccctgttcttaggagtgggcgttagggctgaggaggcaggtgccagggtgcagcagaacgtgccctcaggcacagatactggagatccccagagcaaaccccttggcgattgggcggctggcaccatggacccagaaagctcgattttcatcgaggacgcgattaagtactttaaggagaaggtctccacgcagaacctgctccttctccttactgacaacgaggcatggaatggcttcgtcgccgctgccgagctgccacgcaacgaggcggacgagttgaggaaggccctggacaatcttgcccgtcaaatgatcatgaaagacaagaattggcacgacaagggacaacagtatagaaactggttccttaaggagtttcctagactgaaatccgaactcgaagataatattagaaggctaagagcccttgcagatggagtccaaaaagtccataagggcacaaccattgcaaacgtcgtgagcgggagcctctctatcagtagtggaatcctcacactggttggcatggggcttgctcctttcactgaggggggaagtctggtgctgttggaacccggaatggagctcggaattacagcagcactgacggggattacaagcagcaccatggactatggaaagaagtggtggacccaagcccaggcgcacgacctggtgataaaatccctggacaagttgaaggaggtccgcgaatttctgggcgaaaatatttctaactttctaagtcttgccggaaacacctatcagctgacccggggaattggtaaagatatcagagcgctccgtcgtgccagggccaacctgcagtccgttccccacgcttcagcaagccgacccagagtgactgaaccaataagtgctgagtctggcgaacaggttgaacgggtgaacgagcctagtatacttgagatgtctaggggcgttaaactgacggatgtcgcacccgtgagcttcttcttagttctcgatgtggtctatctggtctacgagagcaagcacctgcatgaaggagcaaagtcagaaaccgcggaggaactcaagaaagtggcgcaggagttagaggagaaattaaatatcctgaacaataactataagatcctgcaggccgaccaggagttatag

SEQ ID NO: 214679 - DNA, 1143 bp, synthetic construct
  misc_feature 1..1143: note = Description of Artificial Sequence: Synthetic coding sequence
  source 1..1143: mol_type = other DNA
atggagggtgcggctttgctgcgcgtcagtgtgctgtgtatttgggtgcagcagaatgttccctccgggaccgatactggggatccccagtccaagccattaggggattgggcggctggcaccatggacccagagtcttctattttcatcgaggacgccataaagtactttaaggaaaaggtgtccacccagaacctacttctgcttcttaccgataacgaggcttggaatggttttgtggccgctgccgagctgcctcgcaatgaagcagacgagctgagaaaggcattggataacctggcacgacagatgataatgaaggacaagaattggcatgataagggtcaacagtaccgtaactggttcctgaaggagttccctcggttgaagtccgaactcgaggacaacattcggagactgcgcgctctcgccgatggggtccaaaaagtccacaagggcacaactattgcaaatgtggtgtccggaagtctgtctatcagcagtgggatcctgacactagtgggtatgggcctcgctccttttacagagggcggatcactggtgctcctggagccaggtatggagttaggaatcaccgctgctctgaccggcatcacatcatccaccatggactatggtaagaaatggtggacacaggcccaggcccacgacctggtaatcaaaagcctcgacaaacttaaagaagtgcgtgagtttctcggcgaaaatatttctaatttccttagtctagccggaaatacgtaccagctaacaagaggaattggaaaagacatcagagctctaagacgggctagagcgaaccttcagtctgttccgcacgcgagcgcttcccgtccaagggtgaccgagccaatcagtgctgaaagtggtgaacaggtggagagggtcaatgaaccatcaatcctggaaatgtcaaggggcgtgaaacttaccgacgtcgcgccagtgtctttcttcttggtcctagacgtagtgtatctggtgtatgaatctaagcacctgcacgaaggagcaaagtctgagactgctgaggagttgaagaaggtcgcacaggagctggaggaaaagttaaacattctgaataataattacaagattttacaggcagaccaggagctctag

SEQ ID NO: 214680 - DNA, 483 bp, synthetic construct
  misc_feature 1..483: note = Description of Artificial Sequence: Synthetic coding sequence
  source 1..483: mol_type = other DNA
atggagggggctgctctcctaagggtgagtgtcctgtgtatttggatgtctgccctgttcttgggtgtaggggtgagggctgaggaggctggtgcacgcgtgcagcagaacgtgccctcgggcacggataccggcgaccctcaaagtaagcctctgggcgactgggccgctggaactatggatcctgaatcgtctatctttatagaagacgcaataaaatactttaaggagaaagtttctactcagaatctgttgctgctcctgactgataacgaggcatggaatgggtttgtggctgcagctgagttacctcggaacgaagctgatgagctgagaaaggctcttgacaatctcgcccgacagatgatcatgaaggacaaaaattggcacgataagggtcagcagtaccggaactggtttctcaaagaatttcctcgcctgaagagcgagctggaggataatatccggaggctccgagcctag

SEQ ID NO: 214681 - DNA, 426 bp, synthetic construct
  misc_feature 1..426: note = Description of Artificial Sequence: Synthetic coding sequence
  source 1..426: mol_type = other DNA
atggaaggggcagccctgctgagggttagtgtgctgtgcatttggatgtctgcacttttcctgggggttggagtgcgtgctgaggaggccggagcaagggttcagcaaaacgtcccctcaggaacggatactggagacccgcagagcaaaccactaggggattgggccgctggcactatggaccctgggcctgccggttctaggggcgattcaggcgagccttgtaccctgaggcccgcttgccgtggtcagagacagcatggaggcgcatccaggatctccgccgaaggacccgcacccatgcccagacgaaggactcccagtaccgcacatctgcgcgtgcctaagacctcgcggagaaatttgctgtgcatgagagccgtaagcctgttgagaatgccactttcaatctcccgcaagaagtag

SEQ ID NO: 214682 - DNA, 357 bp, synthetic construct
  misc_feature 1..357: note = Description of Artificial Sequence: Synthetic coding sequence
  source 1..357: mol_type = other DNA
atgaggttcaagtcccatacggttgaactcagatctactctgtcacaaccactgttttcgtgcagtagaaggcgcccttgctctgacatggaaggggctgccttgctgagggtctccgtgttgtgcatttggatgagtgctttgttcctgggtgtgggcgtcagagccgaggaagctggggctcgggtgcagcagaacgtgcctagcggtactgataccggggacccacagagcaaaccactgggggactgggccgctggaactatggatccagagtcatccattttcatcgaagatgctataaaatatttcaaggaaaaggtctctacacagaacctgctgctgctgctgacttag

SEQ ID NO: 214683 - DNA, 426 bp, synthetic construct
  misc_feature 1..426: note = Description of Artificial Sequence: Synthetic coding sequence
  source 1..426: mol_type = other DNA
atggagggtgccgcacttctgcgcgtgtcagtgctctgtatttggatgtccgctttgttcctgggggttggcgtcagagccgaggaagccggtgccagggtgcagcagaatgtcccaagcgggacagatacaggcgatccacagtctaagcccctgggagactgggccgcaggcactatggacccgggtccggcaggaagccggggtgactccggagagccctgtaccctgaggcctgcttgccggggtcagcggcagcatggcggagcatcccggatttctgcagaggggcctgccccaatgcctaggagaaggaccccatcgacagcccacttacgggttccaaagacgtcccgcaggaacctactgtgtatgcgtgctgtctctctccttcgcatgccgctgtctatttctcgcaagaagtag

SEQ ID NO: 214684 - DNA, 1014 bp, synthetic construct
  misc_feature 1..1014: note = Description of Artificial Sequence: Synthetic coding sequence
  source 1..1014: mol_type = other DNA
atgaaccctgaaagctcaatcttcattgaggactacttgaaatatttccaagatcaagtcagtcgtgaaaatctcctgcagttgctgaccgatgacgaggcctggaatgggtttgttgcggcagccgagttaccccgagacgaggctgacgagctccgcaaggcactgaataaactagcatcacacatggtgatgaaagacaagaaccgtcatgataaggaccagcaacatagacaatggttcctaaaggaatttccaagactgaagcgcgagctggaggaccatattagaaagctgagggctttggctgaggaagtcgagcaagtgcacagaggaacaactatcgcaaatgtcgtaagtaacagcgtaggcacaacttcaggtattcttacactgctcggactcggcttggcaccatttactgaagggattagttttgtactgctggatactggcatgggcctgggtgccgctgccgcagtagcagggataacctgttctgtggtggagttagtcaacaagctcagggccagggcgcaggcgcgaaaccttgaccagagcgggactaacgtcgctaaagtgatgaaagaatttgtcgggggtaacaccccgaacgtgctgacgctggtggacaattggtaccaggttacgcagggcattggtagaaacattcgggcaattcgacgggcaagggccaacccacagcttggcgcttacgccccacctcctcacatcattggtagaatctcagctgagggcggtgaacaggtcgagcgcgttgtcgaagggcctgcacaagcaatgtcacgtggcactatgattgtgggtgctgcgactgggggaattttacttctgctcgacgtggtctccttggcctacgaaagtaagcacctgcttgaaggcgcaaagtctgagtccgctgaagagctgaaaaagcgggcacaggaactcgaggggaaactgaatttccttacaaagatccatgaaatgctgcagcctggacaggaccagtag

SEQ ID NO: 214685 - DNA, 1014 bp, synthetic construct
  misc_feature 1..1014: note = Description of Artificial Sequence: Synthetic coding sequence
  source 1..1014: mol_type = other DNA
atgaaccctgaatccagtatttttattgaggattacctaaagtactttcaagaccaggtatcccgggaaaacctgcttcagttattgacggacgatgaggcatggaacggtttcgtggccgctgcagagctgccaagggacgaagctgatgagctgcggaaagcgctgaacaagcttgcctctcacatggtcatgaaagacaagaatagacatgacaaggaccagcagcacagacaatggtttctgaaagaattcccacgactgaaacgtgaactggaagatcacattagaaagctgcgcgcactggccgaggaggtggaacaggtacatcgcggaaccactatcgccaatgttgtatcaaacagtgtgggaactaccagcggcattctgaccctactggggttaggattagccccatttactgaaggaatctctttcgtactcttggatacagggatgggcctaggcgcagcagccgcagttgccggtatcacttgcagcgttgtggagctcgtgaacaaactacgggctagggcccaagcccgaaacttggaccagagcgggacaaacgtagctaaggtgatgaaagagttcgtggggggaaatacaccaaatgtgctcacgctcgtcgataattggtaccaggtgacccagggaatcggtaggaacatacgagccatccgccgagctcgagccaatccacagttgggagcctatgctccccctccacatatcataggcagaatatccgcagagggcggagagcaggtcgaaagggtagtggaggggcctgctcaggctatgagccgcggtaccatgattgtgggagcagccaccggaggaatattgttattgctggatgtggtgtcactggcttatgaatccaagcacctccttgaaggagctaagtctgaatccgcagaggagctgaaaaagcgcgctcaagagctcgagggcaaactgaattttctcacaaaaatccacgaaatgctgcagcccggacaggaccagtag

SEQ ID NO: 214686 - DNA, 1350 bp, synthetic construct
  misc_feature 1..1350: note = Description of Artificial Sequence: Synthetic coding sequence
  source 1..1350: mol_type = other DNA
atgcatagctggacttgggaccctcattcctctgagcaattggatctggctcaatcgctctcagaggaagatccactgagcagccttagggggtctatacagcctcagccccctgcagaagcccctgacaagggtggctctcaggccaacaacgaccccggtgggtgggacccgggatgttcctcttcccaggtcctgggtcgcacgcgcggaccatgcctcggggtccgagtgagggaggaagaggccggtactcgtgttaaggaaaacctgcctgtgtggactgtgacgggagaattgcaaggtaaacccctgggtaatccggcagccggtacaatgaatcctgaaagtagtatattcatagaggactatctcaagtactttcaggaccaggtgtcaagggagaatctcctccaactcctaacggatgatgaggcttggaatggcttcgtggccgctgccgagctgcccagagacgaggccgatgaattacggaaagccctgaataaactggcctcccacatggttatgaaggacaagaaccggcatgacaaggatcagcagcaccgtcagtggtttcttaaggagtttcccagactcaaacgagagttggaagaccatattcggaaacttagggccctcgctgaagaggtagagcaagtgcaccgcggaacaactatcgccaacgtggtatctaactctgtggggacaacgagtggtatcctgactctgttgggcttaggcctggccccattcactgagggcatttcctttgtcctgctggacacggggatgggcttgggtgccgctgccgctgtcgcaggcattacatgctcagtggtggaactggttaataagctcagagccagggcccaggctagaaacttggaccagagtggtactaatgttgccaaagttatgaaggagttcgtgggcggtaacactccaaacgtgctgaccttggtggataattggtatcaagtgacacaggggataggcaggaacattcgagctattcgtcgggctcgcgcaaacccccagctaggtgcctacgcgccaccaccgcatattatcgggagaatctccgccgagggtggagagcaggtggagagggtagtagaggggccagcccaggctatgtcccggggaacaatgatcgtaggggcagcgactgggggtatcctgctgctgctggatgtggtctctctggcttatgagagcaaacacctgctggaaggagctaagagtgagagtgcggaagaactgaagaagcgggctcaggagcttgagggtaaactgaatttcttaaccaagattcacgagatgcttcagcctggacaagaccagtag

SEQ ID NO: 214687 - DNA, 225 bp, synthetic construct
  misc_feature 1..225: note = Description of Artificial Sequence: Synthetic coding sequence
  source 1..225: mol_type = other DNA
atgaacccagagtcaagtatatttatagaggattacttgaagtacttccaggatcaggtgagtagggagaacctgctccagctgctgacagatgacgaggcatggaatggattcgtcgcagcagccgaattacctagagacgaagcggatgagcttcggaaggccctgaacaagttagcttcccatatggtgatgaaggacaagaacaggcatgataaagactag

SEQ ID NO: 214688 - DNA, 387 bp, synthetic construct
  misc_feature 1..387: note = Description of Artificial Sequence: Synthetic coding sequence
  source 1..387: mol_type = other DNA
atgaacccagaatcgtctatcttcattgaagactatctgaaatactttcaggaccaagtgagccgcgagaatctgttacagctgttgacagacgatgaggcctggaatggctttgtggccgcagccgaactgccgcgagacgaggctgatgagctccgaaaagctctaaacaaactggcttctcatatggtcatgaaggacaagaataggcacgataaagaccagcagcacagacagtggttcctaaaggagtttccgaggctcaaacgggaactggaggatcacataagaaagcttcgagcgttggcggaagaagtggagcaggtccatcggggtacaactatcgcaaacgttgttagcaactctgtcggcacaactagcggctag

SEQ ID NO: 214689 - DNA, 1209 bp, synthetic construct
  misc_feature 1..1209: note = Description of Artificial Sequence: Synthetic coding sequence
  source 1..1209: mol_type = other DNA
atggggctgggccagggctggggttgggaggcctcttgcttcgcgtgtttgatcaggtcttgctgccaggtggtgacctttaccttcccgttcggtttccaagggatttcccaaagccttgagaatgtttcaggatactacgccgacgcgagattggaggtcgggtctacccaattgcgcaccgcaggcagttgtagtcactccttcaaaagatcttttctcgaaaaaaaacgcttcacagaggaggccacaaaatatttccgggaacgggtgagccccgtgcacctgcaaatcttgctcacgaacaatgaggcctggaagcggtttgtgaccgccgctgaactgccgcgagatgaagcagacgcgttatacgaggcactgaagaagttaagaacgtatgctgccatagaggacgaatacgtacaacagaaagacgaacagttccgggagtggtttctgaaagagttcccacaggtcaaacggaaaatccaggaatctatagagaagttgcgcgctttggctaatggaatcgaagaagtgcatcggggttgcacaatctcgaacgtggtctcttcatctaccggtgctgcctccggcatcatgagtctcgcagggctcgtactcgccccttttaccgcagggacaagcttggctctgacggctgccggagtgggcttgggcgcagcctctgcagtaaccgggattacaacgtccatcgttgagcatagctatacttccagcgcagaagcagaagcatctagactgacagcgacatctatcgatagactaaaagtgtttaaggaagttatgagggatatcactccaaatctactaagtctcctcaacaattactatgaagcaacacaaacgattgggtccgagatcagggccatccgccaggctagggctcgcgcacggctccccgtgacaacttggcggatatctgccggttcaggcggtcaggccgagcggaccattgccggaactactcgcgcagtttcacgaggggcacggattttaagtgctacaacctccggtattttcctggccctcgatgtggtgaatctcgtgtacgaaagtaaacatcttcatgagggagctaagtccgcaagcgccgaggagctccgacggcaagctcaggagctggaggagaacctgatggaactaacgcaaatttatcagagactcaatccgtgccacacccactag

SEQ ID NO: 214690 - DNA, 609 bp, synthetic construct
  misc_feature 1..609: note = Description of Artificial Sequence: Synthetic coding sequence
  source 1..609: mol_type = other DNA
atgtctctcgccggactagtgcttgctcctttcactgctggcacaagcttggccctgacagcagccggagtggggctgggtgcagcatcagcggtgaccgggattaccacttcgatcgtggagcactcctacacatcctccgccgaggccgaggcatctaggcttaccgccacttcgattgacagattgaaggtctttaaagaggtgatgcgagacatcactcctaacttgcttagtcttttgaataattactatgaggccacccagacaattggttctgaaatcagggctatccggcaggccagagcacgggctcggctacccgttaccacctggcgcatctctgcaggcagtgggggacaggcagagcgtacaatcgccggtacgacccgagccgtctctaggggcgcacggatcctctctgctactacatccggcattttcctggcactggacgtggttaatttggtatatgagtccaaacacttgcacgagggagcaaagagcgcttcagccgaagagttgagacggcaagctcaggagctcgaagaaaacctgatggaacttacccaaatttatcaacggctgaacccctgtcatactcactag

SEQ ID NO: 214691 - DNA, 609 bp, synthetic construct
  misc_feature 1..609: note = Description of Artificial Sequence: Synthetic coding sequence
  source 1..609: mol_type = other DNA
atgagtctcgcaggcctagtgttagctcccttcacagcaggaacatctctggccctcacagccgcaggtgttggcctgggggcagcaagcgcagtcaccggcattacgacctctatcgttgaacattcatataccagctcggctgaggctgaagcatcgaggcttaccgcgactagcattgataggctgaaagtttttaaagaggtgatgagggatattacccctaaccttctgtccctactcaacaattattacgaagccacacaaaccatcgggtctgaaatccgggctattcgccaggcccgtgcccgtgctcgcttgcccgtgacaacttggcggatcagcgccggaagtgggggtcaggcagaaagaaccatcgccggaacaacccgagctgttagcaggggagcgcgaattttgagcgccaccacatctggaatttttctcgccttggatgtggtgaatctggtgtatgagtccaaacacttacacgagggggcaaagagtgcgagcgcggaggagctgcggagacaagcgcaggaactggaggaaaatctgatggagctaactcagatatatcagcgccttaacccatgtcacacgcactag

SEQ ID NO: 214692 - DNA, 996 bp, synthetic construct
  misc_feature 1..996: note = Description of Artificial Sequence: Synthetic coding sequence
  source 1..996: mol_type = other DNA
atggatagcgaaaagaaacggttcacggaggaggccactaagtacttcagggagcgtgtgtcgcctgtgcacctccaaatcctcttgaccaacaacgaggcctggaaaaggttcgtcaccgccgcagagcttccacgggacgaggctgatgccctctatgaggcccttaaaaaactacggacttacgccgcaatagaagatgagtatgtgcagcagaaggatgagcagtttcgggaatggtttttgaaagagttcccgcaggtgaaacgtaaaattcaggagtcaattgaaaaactccgagcgcttgctaacgggatcgaagaagtccaccgaggctgtaccattagcaacgtggtgtcctcttctaccggcgctgccagcggaattatgtccctggctggactcgtgttggcgccattcaccgccggaacttccctggccctcacagcagcaggagtcgggctcggggctgctagtgctgtgactgggatcacaacttctatcgtcgagcatagctacactagttccgccgaggcggaagcctcaagactcactgcaacttccatcgataggctcaaggtgttcaaggaagtgatgagagacatcacccccaatctgctgagcctactgaacaactactacgaggcaactcagacgataggaagtgaaattagggctattagacaggctagggcgcgagcccgtctccccgtgactacttggcgcatctctgccggaagcggcggacaggcagagcgcaccatagccggtactaccagggccgtctcgagaggagccagaattttatccgctactacttcaggcatttttttagctttagatgtggtgaacctggtgtatgagtctaagcacctgcacgagggggcaaaatcagctagcgccgaggaactaagaagacaagcccaggagttggaggaaaatctgatggagttgacccagatataccagagactgaatccatgccacacccattag

SEQ ID NO: 214693 - DNA, 609 bp, synthetic construct
  misc_feature 1..609: note = Description of Artificial Sequence: Synthetic coding sequence
  source 1..609: mol_type = other DNA
atgtcactggccggactggttctggccccatttacagccggtacttctttagcgctcaccgctgccggagtaggtctgggcgcagcttccgcggtgactgggatcactacaagcatcgtagagcacagctacacatccagcgccgaagctgaagcatctcgcttaacagctacgagcattgaccggctcaaggtgtttaaagaggtgatgcgagatattacaccaaacctgttgagcctgctaaacaactactatgaagccactcagactatcgggtctgaaattagagcgattcgacaggccagagcacgtgctaggctgcccgtgacaacctggcgaatatccgcaggctctggagggcaggcggagcggacaattgcgggaaccaccagggctgtatcaaggggcgctagaatactgagcgcaactacctccggtatctttctcgctctcgatgtggtcaatcttgtttacgagtccaagcatctgcacgaaggagctaaatccgcttctgccgaagaactaaggcggcaggcccaggaactcgaagaaaacctgatggagctcacccagatatatcagagactgaatccgtgccacactcactag

SEQ ID NO: 214694 - DNA, 324 bp, synthetic construct
  misc_feature 1..324: note = Description of Artificial Sequence: Synthetic coding sequence
  source 1..324: mol_type = other DNA
atgggtagctgggtacaactgattacatcagttggcacaagtgggttattcctcggcgtcagggttcgggaggagggggctggaatgcgttgcagcaagacgatccaggcaggccaatggctggactcaagcaaagggccattgggaccatcccccccacctgtcccgacggcaggatatagttcgagcttctgcgtgcactacgtgaatctacttccgggagtcctggtgctcagtgtgacttcacagtacccccacttaagtatggccctttgtcagctggccgctcatgactggccacggctgtcatgtgtgtgcgtgtag

SEQ ID NO: 214695 - DNA, 1044 bp, synthetic construct
  misc_feature 1..1044: note = Description of Artificial Sequence: Synthetic coding sequence
  source 1..1044: mol_type = other DNA
atgggcagttgggtacaacttattacctccgtgggtgtgcagcagaatcatcccggttggacggtggcgggacaatttcaggagaagaagcgctttaccgaagaggtgatcgagtactttcaaaagaaggtgtcaccagtgcacctcaaaatcttacttactagcgatgaggcctggaaacgatttgtgagagtggcagaactcccaagggaggaggccgacgctctttacgaagcactaaagaacctaaccccctatgttgccattgaagataaggatatgcagcagaaggagcaacaatttagggaatggttcttgaaatttccacaaatccgatggaaaatccaagagagtattgagcgactgcgagtcatcgctaacgaaatcgagaaagtgcatagaggctgtgtgatcgccaatgtggtgtctggttctacaggaatcttgagtgttatcggggttatgctcgccccattcaccgcaggcctgtctttgtccattacagcagccggtgtgggcttaggtatcgctagcgctacagccggaatcgcttcaagtatcgttgagaacacctacaccagatctgcagaacttaccgcgtcaaggcttacggccacatcaactgaccaactggaggctctgagagatatcctaagagatatcacaccgaacgtgctctcattcgccctggacttcgacgaagcaaccaaaatgattgctaacgatgttcacaccctgcgccgtagtaaggctaccgtgggaagacccctgattgcgtggagatatgtgccaatcaatgtggtcgagacccttcggacacgtggggctcccactagaatcgtccggaaggtggctagaaatttgggcaaggcaacctccggcgtgttagtcgtcctagatgtggtgaacctagtccaagattctttagatcttcacaaaggagccaagagcgagagcgccgagagcctgcgacagtgggcccaagagctagaagagaacctcaatgaactgacccacatccaccagtcgctgaaggcgggatag

SEQ ID NO: 214696 - DNA, 1053 bp, synthetic construct
  misc_feature 1..1053: note = Description of Artificial Sequence: Synthetic coding sequence
  source 1..1053: mol_type = other DNA
atggagggcgcagcactgctgaagatcttcgtcgtgtgcatttgggtgcagcagaaccaccccggatggaccgtagccggtcagtttcaagagaagaagaggttcacagaggaggtcatcgagtattttcagaaaaaggtgagcccggtgcaccttaagatcctgctcaccagtgacgaagcttggaagaggttcgttagggtcgcagaactgcctcgggaggaggccgacgctctgtacgaagctctgaagaacttgactccttatgtggcaatcgaggacaaagacatgcagcagaaggagcaacaattccgtgagtggtttctgaaattcccacagatccgctggaaaatacaggaaagcatcgaaaggctaagagtcatagcaaacgaaatagagaaagtgcacagagggtgtgtaatcgcgaacgtcgtctccggctctaccggcattctctcagttattggcgtgatgcttgccccattcacagccggactttccctgtcgatcaccgccgctggggtgggattgggcattgcctctgcaactgccggaatcgcttccagcattgtcgagaacacgtatacccggagtgctgaattaactgcatcccggctcaccgctacttcaactgaccaactggaggcgctgagagatatcctaagggatatcacccctaacgtgctctcattcgctctcgacttcgacgaagccacaaagatgatcgcaaacgacgttcacactttgcgacgatcaaaagccaccgtgggcaggccactaattgcctggagatacgtaccaataaatgtggtggaaaccctgcgcacacgcggagccccaacaagaatcgttagaaaagtggcgagaaacctcggaaaagctacatcaggggtcctggtggtgctggatgtcgtcaaccttgtgcaggactctctcgatcttcataaaggggcaaagtcagaaagtgcagaaagtctgaggcagtgggctcaggagcttgaagagaaccttaatgagctgactcacatccatcagagtctgaaggccggttag

SEQ ID NO: 214697 - DNA, 393 bp, synthetic construct
  misc_feature 1..393: note = Description of Artificial Sequence: Synthetic coding sequence
  source 1..393: mol_type = other DNA
atggagggcgcagctctcctcaagatttttgtggtttgcatatgggtgcagcaaaatcaccccggatggactgtcgcgggacagtttcaggaaaaaaaaagattcacagaagaagtaatcgaatacttccagaaaaaggtgagtcccgtgcatctgaagatacttcttacctccgatgaagcctggaagaggttcgtccgggtggccgagttgccgcgagaggaggctgacgctctctacgaggccctgaagaatctcacaccatacgtggcgatcgaagacaaggatatgcagcaaaaggaacagcagttcagagaatggtttctgaaggtgtccagtaatcaaatggaggactctggagtgcatcggaaggccagctgtcactgcaaatag

SEQ ID NO: 214698 - DNA, 384 bp, synthetic construct
  misc_feature 1..384: note = Description of Artificial Sequence: Synthetic coding sequence
  source 1..384: mol_type = other DNA
atggggtcctgggttcagctgataactagtgtgggcgtgcagcagaatcaccccggatggaccgtagcagggcagtttcaggagaagaaaagattcactgaggaggtaatcgaatactttcagaaaaaagtgtcaccggtgcacctaaagatcttactcaccagtgacgaggcctggaaacgttttgtgagggtggcagagctgccacgcgaggaggcagacgctctctacgaggccctaaaaaacctgaccccttacgtggcgatagaagataaagatatgcagcagaaagagcagcaattcagagaatggtttctgaaggtgtcctccaaccaaatggaagattcaggggtacacagaaaggcgagctgtcactgcaagtag

SEQ ID NO: 214699 - DNA, 198 bp, synthetic construct
  misc_feature 1..198: note = Description of Artificial Sequence: Synthetic coding sequence
  source 1..198: mol_type = other DNA
atgggatcctgggtgcaacttattacctccgttggagtccagcagaaccacccaggctggacggttgcgggtcagtttcaggagaagaagagatttacagaggaagtgatcgaatatttccagaagaaagtgagtcctgttcacctgaaaatcctgctcacatccgacgaggcctggaagcgctttgtgagagtgtag

SEQ ID NO: 214700 - DNA, 384 bp, synthetic construct
  misc_feature 1..384: note = Description of Artificial Sequence: Synthetic coding sequence
  source 1..384: mol_type = other DNA
atgggttcctgggtccaactgattaccagcgttggcgtccaacagaaccatcccggatggactgttgcaggccagtttcaggaaaagaagcgtttcactgaggaagttatcgagtattttcaaaaaaaggtctccccagttcatttaaaaattctgctcacaagcgacgaggcgtggaaacgttttgtgagggtcgctgaattgccgagggaagaggccgacgctctctacgaagcacttaaaaacctgacaccatatgtggcaatcgaagataaagatatgcagcagaaagagcagcagtttcgcgaatggttccttaaggtgtccagcaatcagatggaggatagtggcgtacacaggaaggcatcttgccattgtaagtag

SEQ ID NO: 214701 - DNA, 183 bp, synthetic construct
  misc_feature 1..183: note = Description of Artificial Sequence: Synthetic coding sequence
  source 1..183: mol_type = other DNA
atgggatcatgggtgcagctcatcacttcagtgggggtacagcagaatcacccaggctggactgtcgccggacagtttcaggaaaaaaagaggtttacagaagaggtaattgagtactttcagaaaaaggtaagtccggtgcatctaaagatcctgctaacatcagacgaagcctggaagtag

SEQ ID NO: 214702 - DNA, 219 bp, synthetic construct
  misc_feature 1..219: note = Description of Artificial Sequence: Synthetic coding sequence
  source 1..219: mol_type = other DNA
atgggcagctgggtgcagctcattaccagtgtcggagtgcaacagaaccaccctggctggaccgttgcaggccagttccaagagaagaaaaggtttactgaagaggtgatcgagtactttcagaaaaaggttagcccagtgcacctgaaaatccttttaacatcagacgaagcatggaaacgcttcgtcagggtagccgagctgccacgggaggagtag

SEQ ID NO: 214703 - DNA, 213 bp, synthetic construct
  misc_feature 1..213: note = Description of Artificial Sequence: Synthetic coding sequence
  source 1..213: mol_type = other DNA
atgggatcgtgggtgcagcttattacctctgtcggagttcaacaaaaccacccagggtggacagtggccggacagtttcaagagaagaagaggtttacggaggaagtaattgagtactttcagaaaaaggtatctccagttcatttaaagatcctgctgacctccgacgaggcatggaagagatttgttcgggtcgccgagctgcccagatag

SEQ ID NO: 214704 - DNA, 1302 bp, synthetic construct
  misc_feature 1..1302: note = Description of Artificial Sequence: Synthetic coding sequence
  source 1..1302: mol_type = other DNA
atgccttgcggcaaacagggaaacctacaggtgcctggttctaaggtgttgccagggctcggcgaaggctgtaaagaaatgtggttgcgcaaagtgatctacggaggcgaagtatggggcaagtcgccagagccagagtttcccagcctggttaacctgtgtcaatcctggaaaatcaataatcttatgagtaccgtacatagtgacgaggcgggaatgctgtcttatttcctcttcgaagagttgatgaggtgcgataaggattccatgcccgatggaaatctgagtgaagaggagaaactgtttttgagttactttcctctccacaagtttgagttggaacagaatatcaaagagcttaacacccttgcagatcaggttgataccactcacgaactcctgaccaaaacatccttggtggccagcagttcaggggctgtgtctggcgtcatgaatatccttggccttgcacttgcgcctgtaaccgcgggtgggtccctgatgctcagcgctacaggaaccgggcttggtgcagccgctgccatcacaaatatcgttaccaatgtcctcgagaatcgttccaactccgctgccagggataaggcaagtaggctcggcccactgaccacctctcacgaggccttcggcggtatcaattggagtgagatcgaagcggcagggttctgcgtgaacaaatgcgtcaaagcgattcaggggatcaaagacttacacgcctatcaaatggctaagagcaacagcggtttcatggccatggtcaaaaatttcgtggccaagcggcatatccctttttggacggcacggggtgtccaacgggcttttgaggggacaacacttgcgatgactaatggtgcatgggtcatgggggctgcaggggctgggttcttactgatgaaagacatgagttccttcctgcagagttggaagcacttggaagacggcgcaaggacagaaactgcagaggagctccgggctctggccaagaagctggaacaggaactagacaggctgactcagcaccaccgacatctaccgcagaaggcttctcagacttgttcgtcctctcggggaagggcggtgagaggaagccgggtggtgaagcccgaagggagcaggagccccctcccttggcccgtggtggagcaccagcccagactggggcctggagtggccctgcgtacacccaagaggacagtatctgcccctcgaatgctgggtcaccagcctgccccacctgcgcctgcgaggaaaggcaggcaggctcccggaaggcacaggcaatag

SEQ ID NO: 214705 - DNA, 1032 bp, synthetic construct
  misc_feature 1..1032: note = Description of Artificial Sequence: Synthetic coding sequence
  source 1..1032: mol_type = other DNA
atggataaccaggctgagcgtgagtcagaggccggagtagggttacagagagatgaggatgatgctccattatgcgaagacgtggaattgcaggacggcgatctgagtccggaggagaaaatcttccttagggaatttccaaggttgaaggaagacctcaaaggcaacatcgacaaactcagagcacttgctgacgacatcgacaagacgcataagaaatttacaaaagcaaatatggttgccacgtctacagcagtgataagcggggtgatgagccttctcggccttgccctggcccctgctactggaggtggaagcctcctgctgtccactgcagggcagggcctggctaccgccgctggcgttacctcaatagtctctggcacactggaaagaagtaaaaataaggaagcacaggccagagccgaggacatcctaccgacatacgaccaggaggacagagaagacgaggaggagaaagccgactacgtgacagccgctgggaaaataatatataatttgcggaacaccctgaagtacgctaaaaaaaatgttcgcgctttctggaagttgagagccaaccctcggctggccaacgccacaaagcgactgttgaccactgggcaggtttctagccggtcgcgtgtgcaggtgcaaaaggctttcgctggtaccacgttagctatgaccaagaatgccagggtgctgggaggcgtgatgtctgctttctctctgggatacgacctcgcaacgctgagcaaggagtggaagcatctgaaagagggcgctaggacgaaattcgccgaggagctgcgagccaaagcacttgagctcgagaggaagctaacagagctcacccagctttataagtccctgcagcaaaaggtgcgatcgcgagccaggggtgtcggcaaggatctgaccgggacatgtgagacagaggcatactggaaggagctgcgtgagcacgtgtggatgtggctttggttgtgcgtctgtctttgcgtgtgcgtctatgttcagtttacctag

SEQ ID NO: 214706 - DNA, 540 bp, synthetic construct
  misc_feature 1..540: note = Description of Artificial Sequence: Synthetic coding sequence
  source 1..540: mol_type = other DNA
atgtttaaggtgattcagcgtagtgtggggccagcttctttgtccctcctgacttttaaggtgtatgctgctcccaaaaaggattcccccccaaagaactctgtcaaggtggacgaattgagcttgtactcagtgcctgagggccagagcaaatacgtcgaagaagctagatcccagttagaagagtccatcagccagttacgacactactgtgaaccatacactacctggtgccaaactgccatgacgatctccaaaatgcacttgctctttttccccagactcggggtcatcggtttcgccggattaatagggcttttgctcgccagaggatccaagatcaaaaagttggtttatccccctggttttatgggccttgccgcttcgttgtactacccacaacaggctatagtgttcgctcaagtgtctggagagcggctgtacgactggggcctaaggggatatatcgtgattgaggatctatggaaggaaaattttcaaaagcctgggaatgtaaagaattcccctgggacgaagtag

SEQ ID NO: 214707 - DNA, 597 bp, synthetic construct
  misc_feature 1..597: note = Description of Artificial Sequence: Synthetic coding sequence
  source 1..597: mol_type = other DNA
atgtttaaagtgatccaacgtagtgttgggcctgctagcctttcccttttaaccttcaaggtgtatgcggcaccgaagaaggatagtccccctaagaacagcgtgaaagtagatgaattgagcctctactcagtacctgaaggtcaaagcaagtacgtcgaggaggctcgatctcagctcgaagagagcatatctcagctgcgccactattgcgaaccgtatactacttggtgtcaagaaacttactcccagacaaaacccaaaatgcaatccctggtgcagtggggactcgattcctatgattacctccagaatgctcccccaggattctttcccaggttaggcgttataggctttgccggtttgattggactgctcctggccagaggttcaaaaataaagaaacttgtgtatccaccaggcttcatgggactcgccgcttccctctattacccccagcaggccatagttttcgcccaggtgtcgggcgaacgactgtatgattggggcctgcgtggctacatcgtgattgaggatctgtggaaggagaatttccaaaaacctggtaatgttaaaaattcaccgggtaccaaatag

SEQ ID NO: 214708 - DNA, 537 bp, synthetic construct
  misc_feature 1..537: note = Description of Artificial Sequence: Synthetic coding sequence
  source 1..537: mol_type = other DNA
gtatacgctgccccaaagaaagattctcctcccaagaactccgtcaaggtggacgaactcagcctgtacagtgttcctgagggccaatctaaatatgttgaagaggctcgctctcaactagaggagtcaatttcccagctgcgacactactgtgaaccgtatacgacctggtgtcaagagacttactctcagactaaacctaagatgcagagcctcgttcagtgggggctggacagctatgattacctccagaatgccccacccggattcttccccaggctgggggtaattgggttcgcagggcttattggactactgttggcccgaggcagcaagatcaagaagttggtctatcccccaggtttcatgggactcgctgccagcctgtactacccacaacaggccattgtgtttgcgcaggtgagcggagaacgcttgtacgactgggggcttagggggtacattgtgatcgaagacctgtggaaagagaatttccagaaacccggtaatgtcaagaacagcccaggaacaaaatag

SEQ ID NO: 214709 - DNA, 1332 bp, synthetic construct
  misc_feature 1..1332: note = Description of Artificial Sequence: Synthetic coding sequence
  source 1..1332: mol_type = other DNA
atggacaggctcggacccttctcaaatgatccaagcgataaacctccctgcagaggctgctctagctatttaatggagccctatataaagtgtgccgaatgcggccctccgccttttttcctgtgtctgcagtgcttcactagggggtttgagtacaagaaacaccagagcgatcacacctacgagattatgacgagtgatttccccgttctggacccatcatggaccgcccaggaggagatggccttgctggaggcagtaatggattgtgggttcggcaattggcaggatgttgcaaatcagatgtgcacaaagaccaaggaggagtgcgagaagcattatatgaagcacttcatcaacaatcccctattcgcttccaccctcttgaacctcaagcaagccgaggaagctaaaaccgctgacactgcaatcccttttcacagtacggatgatccacccagaccgacctttgactcattgctaagcagggacatggctgggtatatgccagctcgtgcggacttcattgaagaatttgataactatgcagaatgggatttgagagatattgacttcgtggaggacgatagcgacatactgcacgctcttaagatggccgtggtcgatatttatcatagtagactgaaagaacgacagagaagaaaaaaaattataagagatcatggactgattaacctgaggaaattccagctgatggagcgcagatatcctaaagaggttcaagatctatatgagaccatgagacgcttcgccagaattgtgggccctgtggagcatgataagttcattgagtctcacgcccttgagtttgaattacgtagagaaattaaaagactgcaggagtaccgcacggctgggattaccaacttctgtagcgccagaacctatgaccacctcaagaaaacccgtgaggaggagagactgaagcgcacaatgttatctgaggtcctccagtatatccaagacagtagtgcatgtcagcagtggctgaggagacaggctgacatagatagtggcctatctccctccatcccaatggcgtctaatagcggacgccgttcagctccccctctcaacttgacggggctgccgggtactgagaaactcaatgagaaagaaaaagaactgtgtcagatggtacgccttgtgccaggggcttatctggagtacaagtccgccctcttaaatgagtgtaataagcaggggggactccgcttggcgcaggccagagccctgattaaaattgacgtcaacaaaacaaggaaaatttacgacttcttgattagagagggttacatcaccaagggctag

SEQ ID NO: 214710 - DNA, 978 bp, synthetic construct
  misc_feature 1..978: note = Description of Artificial Sequence: Synthetic coding sequence
  source 1..978: mol_type = other DNA
atggtacctagagaagccccagagagcgcccaatgtctgtgcccgagtcttactatccctaatgccaaggatgtgctgagaaaacgacacaagcggcgaagccgtcagcaccagagattcatggcccgtaaggcactgctccaggagcagggtctcttaagtatgccgcctgagccaggaagtagcccactcccgacgcccttcggcgcagcaactgccactgaggccgcatcctctggcaagcagtgcctgagggcgggatcaggctccgcaccctgttcacggagaccagctcccggaaaagcaagcggacccttgccctcaaagtgtgtagccatcgactgcgagatggtcggaaccggcccacgcggacgtgtgagcgagctggctagatgcagcatcgtatcttaccatggcaatgtcctgtacgacaaatatatccgccctgaaatgcctatagccgattatcgcaccagatggtccgggataaccagacagcacatgcggaaagcagtgcccttccaggtagcacagaaggaaatactgaagctgctcaaagggaaagtggtagtgggacatgccctccataatgactttcaggcgctgaagtatgtgcatccccgatcccagaccagagacaccacctacgtacctaatttcctatcagagcctggacttcacactcgcgctcgtgtgtcactgaaggacctcgcgctccagctgctgcacaagaaaatccaagtaggacagcacggtcacagctcagtcgaggatgctacgacggcaatggaactctaccggctagtggaggtccagtgggaacagcaggaggcacgatctctgtggacatgcccggaggaccgggagccagacagctcaacagatatggagcaatatatggaggatcagtattggccggacgacttggctcatggtagccggggtggggctcgggaggcgcaggaccggcgaaactag

SEQ ID NO: 214711 - DNA, 984 bp, synthetic construct
  misc_feature 1..984: note = Description of Artificial Sequence: Synthetic coding sequence
  source 1..984: mol_type = other DNA
atggtgccacgcgaagcccctgagagtgctcagtgtctttgtccgtccctgactatcccgaacgcgaaggacgtccttcgcaagcggcacaaacggcgtagccgacaacaccagcggtttatggctaggaaggccctcctgcaggagcagggcttactttcaatgccgccagaacccggatcaagtcccctcccgacccctttcggcgcagccaccgccaccgaagccgctagcagtggcaagcaatgtctgagggctggttcaggatctgcaccatgttcaaggaggccggctccaggcaaggcctcaggccctctgccgtctaaatgcgtagccattgattgcgagatggtgggaaccggacctcgagggagggtgtcggagctagcacggtgctcaattgtatcataccacggaaacgtcctgtatgacaagtacatcaggccggagatgccaatagccgattaccgcacccgctggagcgggatcaccaggcagcacatgcgcaaggctgtcccatttcaggtcgcccagaaagagatcctgaagctattgaagggcaaggttgttgttggtcacgctcttcacaacgatttccaggccctgaagtacgtacaccctcgatctcagacacgggacacaacctatgtcccaaacttcctgtctgagcctggattgcacacgcgagccagggtctcacttaaagatctcgccctccagctactgcacaaaaagattcaagtgggtcagcatggacactcgtccgtcgaagatgctaccacagcgatggaactgtaccggttggtcgaagttcaatgggaacagcaagaagcaaggtctctgtggacatgcccggaggacagggaaccggactcgagcacggatatggaacaatatatggaggaccaaagtacccagtattgggccctcaaacaaaagagcgagaaacaagactcaggcctgaacagcggagcttttgtatag

SEQ ID NO: 214712 - DNA, 1515 bp, synthetic construct
  misc_feature 1..1515: note = Description of Artificial Sequence: Synthetic coding sequence
  source 1..1515: mol_type = other DNA
atgcccacagtcgaagagctttatcgaaactacggcatcctggcagatgcaaccgaacaggtgggtcaacacaaggacgcatatcaggttatcctcgacggcgtcaagggcggtactaaagagaagaggctcgcggctcagttcatccctaagtttttcaagcattttccagaattggcagattctgctatcaacgcacaactggacctctgcgaagatgaagacgtgtctatcaggaggcaggctattaaggagctcccccaattcgcaacaggagagaatctgccgagagtagcagatatactcacacaactgctgcaaaccgacgatagtgcagagtttaatttagtgaacaacgccctactgtccattttcaagatggacgctaaggggactcttggtggcctgttttcgcagatactgcagggcgaggatatcgtccgagaaagggctatcaaatttctgtccacaaagctgaagactctgccagacgaggtactgacaaaagaagtagaagagttaatcctcacagagagcaaaaaagtgcttgaggacgtgaccggagaagaattcgtgctgtttatgaaaattctatctgggctgaaatcgctgcagaccgtcagtgggcgtcaacagctagtcgagctggtcgccgagcaagccgatttggagcagacatttaaccccagcgacccagactgcgtagatcggctgttgcaatgtacgcgtcaggccgttccgctattttctaaaaatgttcattccacccgcttcgtaacttatttctgtgaacaagtgttacctaacctaggcactctgaccactcccgtggagggcctcgacattcagctcgaggtccttaagctgctcgctgagatgtcatcattttgtggagacatggagaaactcgagacaaacctcaggaaactttttgacaaactgctggagtacatgcccctccctccggaagaggcggaaaatggcgaaaacgccggtaatgaagagcccaaactacagttctcttacgtcgaatgccttttgtatagctttcatcaactgggaagaaaactacctgatttcctgactgcaaaactaaacgccgaaaaactcaaggacttcaagatccggctgcaatacttcgcccgaggtctgcaggtctacataaggcagctgaggctcgcactgcagggaaaaactggggaggccttgaaaacagaggaaaataaaattaaggtagtggctctcaagatcaccaataatatcaacgtccttatcaaagatcttttccacatcccaccatcatacaaatcgactgttacgctatcctggaaacctgtacagaaggtagagataggccagaaacgggcaagtgaagatacaacctctggctccccacccaaaaagagttccgccggaccaaagagagatgccagacaaatctacaatcctccatctggaaaatattcatctaaccttggaaattttaactacgaaagaagcctccaagggaagtag

SEQ ID NO: 214713 - DNA, 1353 bp, synthetic construct
  misc_feature 1..1353: note = Description of Artificial Sequence: Synthetic coding sequence
  source 1..1353: mol_type = other DNA
atgcctaccgttgaagagctgtaccgcaactacggaattctggctgacgcaaccgaacaggtcggacaaatcaggcggcaggccataaaagaacttccccaattcgctacaggggagaatctgcccagggtggctgacattctcacccagcttttgcaaaccgatgacagcgcggagtttaacttggtgaataacgctttgctgagcatcttcaagatggatgccaaaggtacattgggagggttgttcagccagattctgcagggtgaagatatcgtgcgcgagagggcgattaagtttctctctacaaagttgaagaccctacccgatgaagtgcttaccaaggaggttgaagaactaattctgaccgaaagtaagaaggtgctggaggatgtgactggtgaggaatttgtcctgtttatgaaaatactgtcagggctcaaatcattacagaccgtttctggcagacaacagctggtggagctcgtcgccgaacaagcagaccttgagcagacctttaacccatcggatcctgactgcgttgaccgcttgctgcagtgtacgaggcaggccgtaccccttttcagcaagaacgtgcactcaaccaggtttgtgacttatttctgtgagcaggtgctgcctaatttgggcactctgactactcccgtggaagggctcgatatccagctggaggtgctgaaactgctagccgaaatgtcttccttctgcggtgacatggagaaactagagaccaaccttcgcaagctctttgacaagttactggaatacatgcctctgcctcctgaagaagcagaaaatggggagaacgcaggaaacgaagaacctaagctccagtttagttatgtggagtgcctcctgtacagttttcatcagctgggacgtaaacttcccgattttctgacagctaagcttaacgccgaaaaactcaaggactttaaaatcagattgcagtacttcgcacgtggcctgcaggtctacattagacaactgagactggcgctccaaggcaagacaggcgaggccttgaaaacagaagagaacaaaataaaggtagtggcgctgaaaataacaaataacattaatgttctgataaaggatttgttccacatcccccctagctataaaagcaccgtgacactgtcctggaaacccgttcagaaagtggagatcggtcagaagcgcgctagcgaagatacaacttctggatctcccccaaagaagtcttcagctggccctaagcgggacgcacggcagatatataatccccctagcggtaaatattcttccaatctcggcaatttcaattacgaacgcagcctccaaggaaaatag

SEQ ID NO: 214714 - DNA, 1575 bp, synthetic construct
  misc_feature 1..1575: note = Description of Artificial Sequence: Synthetic coding sequence
  source 1..1575: mol_type = other DNA
atgcctaccgtggaagaattgtaccggaactatgggatcctggccgatgctactgaacaggtaggtcagcataaggatgcataccaggtcattcttgacggcgttaaggggggaacaaaagagaagaggctggcggcacagttcattccaaagttcttcaagcatttccccgagctcgccgattccgcaatcaatgcacagttagatctctgtgaagacgaagacgtcagtattcgtcgccaagccatcaaggagctgcctcagttcgctactggggaaaatttgccgagggtggcagatatactaacacagctgctgcaaaccgatgactcagccgaattcaacctggtgaacaatgctctgctctccattttcaagatggacgcgaaaggaaccctgggcggactttttagccagatcctgcagggagaagacatcgtgcgcgaacgggcaattaagttcctgagtaccaagctgaaaactctcccagatgaagtactgactaaggaggtcgaagagctcattctcaccgagtccaagaaagtgctggaggatgtcaccggcgaggagtttgtcctcttcatgaagatcctgtctggattgaagtccctgcagactgtttcaggacgacagcagctggtggagttggtggccgagcaggccgacctcgagcaaaccttcaaccctagtgaccctgactgcgtggaccgccttctccagtgcactcgccaggcagtgccactttttagcaagaacgtccattccactcgcttcgtcacttatttttgtgaacaggtgctgcctaatttgggcacccttaccaccccagtcgagggcttggatattcagctcgaagtcctgaagctgctggcagaaatgtcaagcttttgtggagacatggaaaagctggaaaccaacctccggaagctgtttgataagctgttggagtacatgccccttcctcctgaagaagcagaaaacggtgagaacgccggaaatgaggagccaaagctgcagtttagctatgtggagtgtttattatatagctttcatcaacttggcagaaagctgcccgactttctcacagctaaactgaacgctgagaaactgaaagattttaagatacggcttcagtactttgccagaggcctgcaggtgtacattcggcaactgcgtctcgctctgcaggggaagactggcgaggcactgaaaactgaagaaaataagataaaagttgtggcacttaagattacaaacaacatcaacgtgctcattaaagacctgtttcatatccccccaagctacaagagcaccgttacgctgtcctggaagcccgtccagaaagttgagataggccagaagcgtgcctcagaagacaccacatcgggatcccctcccaagaagtcaagcgccggacccaagagggatgcaagacagatttataaccctccctccgggaaatatagctccaatctgggtaacttcaactacgaacagcgaggagccttcagaggcagccgcggaggtcgtggctggggtacgagaggaaataggtctagagggagactgtactag

SEQ ID NO: 214715 - DNA, 1533 bp, synthetic construct
  misc_feature 1..1533: note = Description of Artificial Sequence: Synthetic coding sequence
  source 1..1533: mol_type = other DNA
atgccaacagtcgaagagctgtatcgaaactacggcatactggccgatgcaacagaacaggtggggcaacacaaagacgcatatcaggtcatcttggatggagtgaagggcggaactaaggagaagcgcttggccgcacaattcattcctaagttcttcaagcactttcctgaattagccgatagtgccatcaatgcccagcttgacctgtgtgaagatgaagatgtgtctattcgccgtcaggctattaaggaattgccacaatttgccaccggtgaaaatcttcctagggtggccgatatactgacacagctcctccagaccgatgattctgctgaatttaacctggtgaataacgccctgttgtcgatatttaaaatggatgcaaaagggacactcggcggactcttctcccagatcttgcaaggggaggacatcgttcgcgagcgtgctattaagttcttgtccaccaagctcaagaccctaccagacgaggttcttactaaggaggtggaggaattgattctgacagagtcaaaaaaagtcctggaagatgtgaccggagaggaattcgttctctttatgaagatcctctccggcctcaaaagtcttcagaccgtgtccgggagacagcagctcgtggaactggttgctgaacaggcagacctggaacaaaccttcaatccatccgatcccgattgcgtcgaccgtctgctgcagtgcaccagacaggccgtgccactcttcagcaaaaacgtccactcgactcgatttgtaacatatttttgtgagcaggtgttgccgaatctcggaactctcacaacccctgtggagggccttgatatccagctcgaagtgttaaaactgctggccgagatgtctagcttctgcggggacatggaaaaacttgagacgaatctcaggaaattgtttgacaaacttttagaatatatgcctctgccacctgaggaagctgaaaacggagagaatgcagggaacgaagagccgaaactccagttctcttacgtggagtgcctgctgtatagcttccaccaattgggcagaaaattgccagactttctcacagctaaacttaacgccgagaagttgaaggacttcaaaatcaggctgcagtattttgcccgagggctgcaggtgtatatccggcagctgagacttgccctccaggggaagactggcgaggccctgaagacagaagagaataaaatcaaggtcgttgctctaaagattacgaataacatcaatgtcctaattaaggacctctttcatataccgcctagttataagtccacagtcaccctgtcctggaagcccgtgcagaaggtcgagatcggccaaaaacgggcaagcgaggatactaccagcggctctccccctaaaaagagcagcgctggacccaaacgcgatgctaggcagatatacaaccctcccagtggaaagtactctagcaacttgggcaatttcaattacggagagcgctttaggttgggaacaagaaacatgcgcgattag

SEQ ID NO: 214716 - DNA, 1089 bp, synthetic construct
  misc_feature 1..1089: note = Description of Artificial Sequence: Synthetic coding sequence
  source 1..1089: mol_type = other DNA
atgcaggctgaaagaggagcccgaggcggtcgcggtcggaggcctggacgcggaagaccgggaggcgaccgtcactccgagaggccaggcgcagccgctgccgtggcccgtggagggggaggaggcggaggcggtgatggtggaggtagacggggtcggggacgtggcagaggtttccgcggagccaggggcggtcgcggaggcggaggggcaccacgcggatctagacgcgaacctggcggatggggcgcaggggcttccgcgccagtcgaagacgacagcgacgcagaaacatacggagaagaaaatgacgaacagggcaactactctaagcgtaagattgtcagtaattgggaccgctatcaggacatagagaaagaagtgaacaacgaatccggcgagtcccagcggggaaccgatttctctgtgttgctgtccagcgcaggagatagtttctcacaattcaggttcgccgaagaaaaagaatgggatagtgaagcgtcttgcccaaaacagaacagtgccttctacgttgacagcgagctccttgtacgtgcattacaggagctgccgctctgtctcagacttaatgtggcagcggaactggttcagggtacagtgccactcgaggtgcctcaagtgaaaccaaaaagaaccgatgacggcaagggcctcgggatgcagctgaaggggccacttggtcctggaggacgcggacccatcttcgagttaaaaagcgtggctgccggatgtccagttctgctggggaaagacaatcctagtccaggaccttcgcgcgacagtcaaaagcccacaagtcctcttcagtccgccggtgaccacctcgaagaggagctagatctgttgcttaatttggacgcccctataaaagagggagataatattctccctgatcagacaagtcaggacctgaagtcgaaggaggacggcgaagtggttcaggaggaggaggtgtgcgcgaagccctccgtaactgaagagaagaacatggaacctgagcagccaagcacctcaaagaacgtgaccgaagaggagctggaggactggttggactccatgatatcatag

SEQ ID NO: 214717 - DNA, 4125 bp, synthetic construct
  misc_feature 1..4125: note = Description of Artificial Sequence: Synthetic coding sequence
  source 1..4125: mol_type = other DNA
atgtccagctccttcttcaatcccagctttgccttttcttcccacttcgaccctgacggagcaccactgtcagaactctcctggccatcatcgctggcagtcgttgccgtctcattctccggcctgttcgcggtaatagtgctgatgctagcatgcctctgttgtaagaagggtggcatcggtttcaaagaatttgagaacgccgagggcgatgagtatgccgcagatttagctcagggatcacctgctaccgccgctcagaacggcccagatgtgtatgtactgccccttactgaagtgagcctgcccatggctaagcagcccggtaggagcgttcaattgctcaagtcaacagacgttggacgccactctctcttgtaccttaaggagatcgggagaggatggtttgggaaggtgtttttgggcgaggtcaactctggtatctctagcgcgcaagtggtggtcaaagaactgcaggcctcagcctccgtacaggagcagatgcaattcttggaggaagtgcagccataccgagccctcaagcacagtaaccttctgcagtgcttagcccaatgcgcggaagtgactccgtatctgttggtgatggaattttgtcccttaggcgacctaaaaggctacctgcggagttgccgggtggcggagagcatggctccagacccacgcactctccagcggatggcttgcgaggtggcatgcggtgtcctgcaccttcaccggaacaactttgtccacagcgacctggccctccggaactgtctgctgacagcagacctgactgtgaagattggcgactacggtctcgctcattgtaagtatcgggaagattatttcgtcactgcagatcagctgtgggttccattacgctggatcgcccctgaacttgtggatgaggtgcactctaatctgttggtcgtggatcaaaccaagagtgggaacgtatggagcctcggggtgactatctgggaactgtttgaactagggactcaaccgtacccacaacacagtgaccagcaagtgctcgcatataccgttagggaacagcagctgaaactgcccaagccccagttacaattgaccctttctgatcgctggtatgaagttatgcagttttgttggcttcagcctgaacaaaggccgactgcagaggaggtacacctcttattgagctatctctgtgccaaaggggctacagaagctgaggaggagttcgagcgccgttggaggagcctcaggcccggaggaggcggtgtcggcccaggcccaggcgctgccggaccaatgctcggcggtgtggtggaactcgctgctgcctcttcatttccgcttctggagcaatttgccggtgatgggttccatgctgacggagacgacgtcttgaccgtgactgagacatccaggggcctgaactttgagtacaaatgggaagctgggagaggagctgaagcgttccccgctaccctatcacccggaaggaccgcgagactccaggagctgtgtgcccctgacggcgctccgcctggcgtggttcccgtgctaagcgcccactcaccctctctaggctctgagtattttatccggctggaggaggcagctcccgcagctggccatgatcctgactgtgcaggatgtgccccttcgcctcctgctactgcggaccaggacgacgacagtgatggttccacagccgcatcccttgctatggaacctttactgggccatgggccacccgtggacgtgccatggggacgtggcgaccactaccctagaagatcactggctagagatcccctgtgcccatccagaagtccatctccttccgccggacccctcagtttagcggaagggggtgctgaggatgcagactggggcgtggccgctttttgtccagccttttttgaggaccccctgggtacttcccccctgggctcctcaggagctccacctctcccactgaccggagaagacgagctggaagaggttggagcccgtagagcggctcagagaggacattggagaagtaacgtgtctgccaacaataatagtggaagccgttgtccggaaagttgggaccctgtcagcgccggtggacatgccgaggggtgcccctctcctaagcaaaccccccgagctagccctgagcccggatatccgggagagccactgctgggcctgcaagccgcttctgctcaggaaccgggttgctgcccaggcctgccgcacttgtgttctgcacaaggcctggccccagctccttgcctcgtgacaccttcctggactgaaaccgccagcagcggaggggaccatccgcaggctgagccgaagttagccaccgaggcagaaggcactacgggaccccgactgcctctgccctctgtgccttcgccatcacaggagggcgctcccctcccaagcgaagaggcctctgcccctgatgccccagacgccttgccagactcccctacgccggctactgggggtgaggttagcgctatcaaactagccagcgcactgaacggtagcagctcatcgcccgaggtggaggccccttctagtgaagacgaggacacagcagaggcaacttctgggattttcactgatacaagctctgatgggttgcaagctaggaggcctgacgtcgtacctgccttccgatccttgcagaagcaggtgggtacacctgacagcctggacagtcttgacattcccagttccgcaagtgacgggggatacgaggtattctcaccatcagctacagggccatccgggggtcagcccagggcacttgactccggatacgacactgaaaactacgagtccccagagttcgtccttaaggaggctcaggaggggtgcgagccccaagcgttcgccgagctggccagcgagggtgaaggtccagggcctgaaaccaggctcagcactagcctgagcggacttaacgagaagaatccctaccgtgattctgcctatttctccgacctggaggctgaagccgaagccactagtgggcctgaaaagaagtgtggtggggacagggcccctgggccagaactgggcctgccatcgacaggacagcctagcgagcaggtttgtttacgcccaggggtgtccggcgaagcacaaggttctggtccgggagaggtcttgcccccactcctgcagctagagggctccagccctgaaccatccacttgccctagcggcctggtgccagagcccccagaaccccaaggacccgcaaaggtgcgacccggaccttctccatcctgctcacagttctttttgcttacacctgtgccattgaggagcgagggcaattcttccgagttccagggcccacccggacttctgtccgggcctgcccctcagaaacgtatgggaggacctgggacacccagggcaccactcaggttagccctcccagggctccctgcagctctggaggggagaccagaagaggaggaggaggactctgaagatagtgacgagagcgacgaggagttgcggtgctattctgtgcaggaaccatcagaggattctgaggaggaggccccagctgtccccgttgttgtcgctgaatctcaatccgctcgaaatttacgctctctgctcaaaatgcccagtttgctgtccgaaaccttttgcgaagatctggagagaaagaaaaaagccgttagcttcttcgacgatgttactgtgtatctctttgatcaggagtcacctacgagggagctgggggagccgttccccggtgcaaaggagtcccccccaacattcttacgcggttctccaggcagccccagcgccccaaatagacctcaacaggctgacggctctccaaacggaagcacagcagaggagggcggtggattcgcgtgggacgatgacttcccactcatgaccgctaaggccgctttcgcgatggccctggaccctgcagctcctgccccagctgccccaaccccgacacccgctccattctcgaggtttaccgtttcccctgcacccacatcccgcttctcaatcacccacgtgagcgacagtgatgctgaaagtaagcgcggaccagaagccggagccggaggagaatcgaaggaggcatag

SEQ ID NO: 214718 - DNA, 2640 bp, synthetic construct
  misc_feature 1..2640: note = Description of Artificial Sequence: Synthetic coding sequence
  source 1..2640: mol_type = other DNA
atgagttcgagttttttcaatcccagctttgccttttcatctcactttgatccggatggggctccactgagtgagctctcttggccttcctccctggctgttgttgccgtgtcgttttcggggctctttgccgtgattgtactcatgctggcttgcctatgctgcaagaaaggcggtattggatttaaagagtttgagaatgccgagggggacgaatatgctgcggatctcgcccagggatcacccgcaacggccgcacaaaacggacccgacgtatatgtcctgccactgactgaggtgtccctgcctatggccaagcaaccaggtaggtccgtgcagctcctgaagtcaactgacgttggccgacactccctcctctatctgaaggagattggtagaggctggtttggaaaagtgttcctgggcgaggtgaattccggaatcagtagtgcccaagtcgttgtgaaggaacttcaagctagtgccagcgtgcaggagcagatgcagtttctcgaggaagtgcagccttacagagcattgaagcattcgaatctgctgcagtgcctcgcccagtgtgctgaggtgacgccataccttcttgtgatggagttttgcccgctaggggacctcaagggctacctgcggtcctgcagggtggctgagagcatggctcccgatccacgaacactccagcggatggcatgcgaagtggcctgtggtgttctccacctgcaccgtaacaattttgtacactcagatctggcccttcgtaactgcctcctgaccgctgaccttaccgtgaaaattggtgactatggactggcccattgcaagtatagagaggactacttcgtgaccgcagaccagctgtgggtccccctacggtggatcgctcctgaacttgtcgatgaggtgcactcaaacctgctcgtagtggatcagacaaagagcggcaacgtttggagccttggtgtcaccatatgggagcttttcgagctcgggacacagccttacccacagcatagtgatcagcaggtcctggcatacacagtccgcgagcagcagctcaaactgcctaagccgcagctccaactgaccttgtccgaccgatggtatgaagtgatgcagttttgctggctgcagccagagcagcggcctaccgccgaggaggtccatctgctgctgtcctacctgtgtgccaaaggagcaaccgaggccgaggaagaatttgaaaggaggtggaggagtttaaggcccggtggaggaggggtgggcccagggcctggggctgccggtcccatgctggggggagtggtagagctagctgcggcatcgtctttcccccttttggaacaattcgctggggacggatttcatgctgatggcgatgatgttctaaccgagctttgtgcaccagatggcgcaccgcctggagtggtgcccgttctgagtgctcattccccatcactgggctctgagtatttcattaggttagaagaagccgctccggctgcaggtcatgatcctgattgcgcagggtgtgctccctcacctccggcaactgccgaccaggacgatgatagcgacggctctacagccgcaagcctggccatggagccgctcttagggcatgggccacccgtggacgttccttgggggagaggcgaccattatccgagaaggtctctggctcgcgatcccctgtgccctagccgcagtcccagtccatcggcaggaccgttatcactggcagaaggcggagctgaggatgctgattggggagtggcagccttttgccctgctttttttgaagacccactgggaaccagccctctgggctccagcggcgcaccacctctcccgcttacgggagaagatgagttggaggaggtcggggctcgacgggcagcacaacgcggtcactggcgaagcaatgtgagcgccaataataacagcggatctaggtgccctgagtcttgggacccagtctccgcaggcggacatgccgagggctgtccttcccccaaacagacacctcgcgctagtccagagcccggatatccgggtgaacccttgcttgggctgcaggccgcttctgctcaagaacctggatgttgtccaggcttaccacatctctgttcagcccagggcctagcaccagccccttgtctggtgactcccagctggaccgagaccgccagttctggtggagaccacccacaggcagagcccaagctggcgacggaggctgaggggaccactggcccacggctgcctctgccatctgttcctagtccctctcaagagggcgctccccttccaagtgaagaagcctcggcgccagacgctcccgacgccctgcctgacagccccactccagccactggtggtgaggtttctgcaataaaactggctagcgccttgaatggcagctctagctcccccgaggtggaagccccatctagcgaagatgaggatacagccgaagctacttcagggatattcacagataccagttccgacggtttgcaggcacgaaggcctgacgtggtgccagcatttagaagtcttcagaaacagtggcctcagagggaggaatccctccctcgcctctgcctcctgttgcgccctcgaggttag

SEQ ID NO: 214719 - DNA, 3984 bp, synthetic construct
  misc_feature 1..3984: note = Description of Artificial Sequence: Synthetic coding sequence
  source 1..3984: mol_type = other DNA
taacatcaggtgaaggtgcagggatgctggggaaggtggcgctggcaggagttcgaaaacgcagagggcgacgagtacgcagctgacctcgcccagggttccccagcaacggcggctcagaatgggcctgatgtctacgtgcttcccctcacagaggtgagcctccctatggcaaaacagccgggtagaagcgttcagctgctcaagtccaccgacgtggggaggcattccctgttgtatctgaaagagatcggcaggggatggtttggtaaggtctttcttggagaagtcaactccggaatcagttcagcccaagtcgtggtgaaggagttgcaggcgtccgcaagcgtgcaggagcaaatgcagttcctggaggaggtccaaccctacagagccttgaagcactcaaacctgctccagtgcctggcacagtgtgccgaggttactccctatttgttagtaatggagttctgccccctcggagacctcaaagggtacctccggtcttgtcgagttgccgagagtatggccccagaccctcggacactccagcggatggcctgtgaagtcgcttgtggcgtcttgcatctgcataggaataactttgtccactcagatctggccttgaggaactgcttgctgacagctgatttgaccgtcaagatcggcgactatggactcgcacattgtaagtaccgcgaagactatttcgtgaccgcagatcagttatgggttcccctgaggtggatcgctcctgagctggtggatgaagtccatagcaacttactggttgtggatcagactaagtcaggtaacgtatggagcctcggcgtgaccatctgggagctgttcgagctaggcacacaaccctacccgcagcattctgaccagcaggtactggcctacaccgtacgcgagcagcaactcaagttacccaagccccagctccagctgaccctctccgaccggtggtacgaggttatgcagttctgctggctgcagccagagcaacgccctaccgccgaggaggtccatctgctgctaagctatctgtgcgccaagggagccacagaggctgaagaggaattcgagcgcagatggcggtcgttgcgcccagggggaggcggagtgggacccggaccaggtgccgctgggcctatgctggggggagtggtggagctggcggcagcatcctcattcccactcctagaacaattcgctggagatggattccacgcagacggggacgatgttcttactgtcaccgagacatcccggggactcaacttcgagtacaagtgggaggcagggaggggagccgaggccttcccagctaccctgtcgccaggtcgaacggcccgtctccaggagctttgcgccccagacggcgcaccgccaggcgtcgttcctgtgcttagtgctcacagcccatcattgggcagtgagtatttcatccgcctcgaggaagctgccccagccgctggacatgatcctgactgtgccggttgtgctccctcacccccagccacagccgatcaagatgacgacagcgatggatccactgccgcttcactcgcaatggagccgttgttaggccatgggccaccggtagacgtgccatggggcaggggggaccactatcctaggaggtccctggccagggatcctttatgtccaagtcggtctccctccccctcagctgggcctctgtccctggctgaggggggtgcagaggacgccgattggggcgtcgcagccttctgcccggcatttttcgaggatccgctgggaacttcacccctggggagcagcggggcaccgcctctgcccttgaccggagaagatgagctcgaagaggttggggctaggagggcagcccagcgcggacactggcgtagcaacgtgtctgctaataacaactccggctcccggtgcccagaatcatgggaccccgtgagtgccggtgggcacgctgaggggtgtccatcccctaagcagacaccacgggcttctccagagccaggctaccccggtgagcctctcctgggacttcaagctgcttctgctcaggagccaggctgttgccctgggctgccacatctgtgcagcgcccagggattggctccagcaccatgccttgtgactccttcttggaccgaaacggctagcagtggaggggaccacccgcaggccgaaccaaagctcgccacagaagccgagggaactaccggcccacggttgccactcccttctgtaccctctccctcacaggagggggcacccctgccaagcgaagaagctagcgctcccgatgcacccgacgccctccctgatagccccaccccagcaactggcggagaggtctcagccattaaactggcctctgccctgaacggatcttcaagctcccctgaggtcgaggctccgtccagcgaagacgaggacacggccgaggccacaagcggcatctttacagacacatcctctgacggcctccaggcacgacgtcctgacgttgttccagcattcagatcactgcagaagcaggtgggaacacctgactctttggacagtctggatatcccgtcaagtgcttcagacgggggttatgaggtgtttagcccctccgctacgggaccaagcggtggccagccaagagcccttgattctggttacgacactgaaaattacgaaagcccggaattcgtactgaaggaagcccaagaagggtgtgagccccaggcgttcgccgagctcgcgtcggagggcgagggaccaggcccagagactagactgagcacatctctgtctggactcaacgaaaagaatccataccgcgactctgcatatttctctgatttggaagcagaagccgaagccacctctggacctgagaagaagtgtggtggagatcgagcccctggacccgaactgggcctgccctctaccgggcagcctagtgaacaggtttgcctgcggccaggagtgtccggtgaggcccaagggagtggacctggagaagtgctgcctccgctcctgcagctcgaagggagcagccccgaaccatccacttgccccagcgggctggtacctgaaccaccagaacctcagggcccagccaaggtgagacccggtcctagcccaagctgcagtcagttttttttgcttactccggtgccactgcggagtgaaggtaattctagtgagtttcagggcccaccaggacttttgtccgggcctgcaccccagaaacgcatgggtggccctgggacgccacgggcacctctgaggctggctttacccggactgcccgcagctctggagggtcgccctgaagaagaggaggaagatagcgaggatagcgacgaatccgatgaggaattgcgctgttactccgtgcaagaacccagcgaggactctgaagaggaggccccagccgtccctgtcgtagttgccgagagtcagtctgcgagaaacctgcggtcattgctgaagatgccatcgctgctttctgagaccttctgcgaagatctggaaaggaagaagaaggcagtaagcttctttgatgacgtgacagtgtatctgtttgaccaggagagccctacgagggaactcggagaacctttccccggtgcaaaagagtctcctccgacatttcttcggggatcacccggatcccctagcgcccctaacaggcctcaacaggctgatggatccccaaatggctcaacagccgaggaggggggagggttcgcctgggatgacgatttcccactgatgacagctaaagccgcatttgcaatggcacttgatccagccgcacctgctcctgccgcaccgaccccgaccccagcaccgttttctcgcttcactgtgtctccagctcctacttcacggttttcgattacccacgtgagtgattccgacgccgaatccaagcgaggccctgaagccggagcaggtggcgaatccaaagaagcctag

SEQ ID NO: 214720 - DNA, 417 bp, synthetic construct
  misc_feature 1..417: note = Description of Artificial Sequence: Synthetic coding sequence
  source 1..417: mol_type = other DNA
atggaggaggaggccgagactgaggaacagcaacgcttcagctaccagcaacgtttaaaggcagctgtgcattacaccgtgggatgcctgtgcgaagaggtggcgctcgataaagaaatgcaattctctaaacagaccattgcagcgatatccgagctcaccttccggcagtgcgaaaactttgcgaaggacctagaaatgttcgcaaggcacgctaaaaggacaacaatcaacactgaggacgtgaagctgttggctagacgttcaaatagtctgctaaaatacatcacggataaaagcgaagagatcgctcagattaacctagaaagaaaagcgcagaagaagaagaagtctgaggacggtagtaaaaacagccgacaacctgccgaggcaggcgtggtggaatccgagaattag

SEQ ID NO: 214721 - DNA, 495 bp, synthetic construct
  misc_feature 1..495: note = Description of Artificial Sequence: Synthetic coding sequence
  source 1..495: mol_type = other DNA
atggaggaggaagctgaaacagaagagcaacagcgattcagttaccaacagaggctgaaggcggcagtgcactacacagtcgggtgcctctgcgaggaagtggctcttgataaggagatgcagttcagcaagcaaactatcgcagctatctccgagctcaccttccgtcagtgcgagaatttcgctaaagatttggaaatgtttgctagacacgcgaaacggaccactatcaacacagaggacgtgaagttgctggcacggaggagcaatagcctgcacatgcaagaagctgccggaatcagaaagtcatctctgttgaccttcctggcctggtggtttgagtggacctctcaagcttccgcaggcccactgataggagaggaggccagggaggtcgcacggcgtcaagaaggcgcacccccacagcagtctgctcggagggacagaatgccttgcagaaactttttctggaagaccttttcctcctgtaaatag

SEQ ID NO: 214722 - DNA, 234 bp, synthetic construct
  misc_feature 1..234: note = Description of Artificial Sequence: Synthetic coding sequence
  source 1..234: mol_type = other DNA
atggaggaggaagccgagaccgaggagcaacaacgcttcagctatcaacagcgcctgaaggccgcagtgcactatacagtggggtgtttgtgtgaagaggttgccttagacaaggaaatgcaatttagcaagcagaccatagcagcaatctctgaattgacattcaggcaatgcgaaaatttcgcaaaagatcttgagatgttcgcaagtatttgtcgaaagagacaggaatag

SEQ ID NO: 214723 - DNA, 921 bp, synthetic construct
  misc_feature 1..921: note = Description of Artificial Sequence: Synthetic coding sequence
  source 1..921: mol_type = other DNA
atgtcaaatgttaacttgagtgtctctgacttctggcgggtcatgatgagagtgtgttggctggtccgccaggattctcgacatcagcgcattcgcctgccccatctggaagctgtggtgataggtagagggccagaaacaaaaataaccgacaagaagtgttcccgccagcaggtccagcttaaggcagagtgcaataagggatacgtaaaggttaagcaggtaggagtcaacccgacttctattgatagtgtagttattggaaaagatcaggaagtcaaactccagcctggccaggtgttacacatggtcaacgaactctacccttacatcgtggagttcgaggaagaggctaaaaaccctggccttgagacccacaggaagcgcaaaagatcaggaaacagtgattcaattgagcgcgacgctgcccaggaagcggaagctggcacaggcttagagccagggtccaattctggacagtgttccgtgcccctgaaaaaaggcaaagacgctccaatcaaaaaggaaagcctgggtcactggagccagggtctgaagattagcatgcaggacccgaagatgcaggtttacaaggacgaacaggtggttgtgatcaaagataagtatcccaaagctcgataccactggttggtgctcccatggacatctatttcaagcttgaaagcggtcgcacgcgagcacctcgagctgctcaaacacatgcatacagtcggcgagaaggtgatagtcgacttcgccggatcatcaaagctgagatttcgactggggtaccatgccatccccagcatgtctcacgtgcacctccacgtgataagtcaggacttcgattctccctgtctcaagaacaaaaaacactggaattccttcaataccgaatatttcttggagtctcaggaatag

SEQ ID NO: 214724 - DNA, 1014 bp, synthetic construct
  misc_feature 1..1014: note = Description of Artificial Sequence: Synthetic coding sequence
  source 1..1014: mol_type = other DNA
atgagcaatgttaacctaagtgtgtccgacttctggagagttatgatgcgagtatgttggctagtgagacaagattccagacaccaaaggataagactaccccacctggaggccgtggtgatcggtcgcggacctgagactaagatcactgataagaaatgttcccggcaacaggtccagctaaaggcagaatgtaacaaagggtatgtgaaagtaaagcaggtgggcgtgaatccgacatcaattgactcagtcgtcattggcaaagaccaggaggtgaagctccagcctggtcaagtccttcatatggtcaacgaactgtacccctatattgtcgaattcgaggaggaggcaaaaaaccctgggctggagacgcatcgaaagagaaagcgtagcgggaattctgatagtatagagcgggatgccgcacaagaggccgaggccggaacaggcctggaaccgggtagtaatagcgggcaatgttcggttccactaaagaagggcaaggatgctccaatcaagaaaaaggtttataaggacgaacaagtcgtggtgatcaaggacaaatatcccaaagcacggtatcactggttggtgctgccgtggacatctatctctagtctgaaggcggtggccagagagcacttagaactgttgaagcatatgcatacagtgggagagaaggtgatcgtggatttcgctggctcgtcaaagctaaggtttcggctgggatatcatgctattcccagtatgtctcacgttcacctccatgtgatctctcaggattttgattcgccatgcttgaaaaataaaaagcattggaatagtttcaatactgagtactttctggagtcacaggctgtgatcgagatggtgcaggaggctggcagggtgaccgttcgggacggcatgcccgagctgttgaaacttccgcttcgctgccatgagtgccagcagcttctcccatcaatcccgcagctaaaggagcacctgagaaagcattggactcagtag

SEQ ID NO: 214725 - DNA, 1029 bp, synthetic construct
  misc_feature 1..1029: note = Description of Artificial Sequence: Synthetic coding sequence
  source 1..1029: mol_type = other DNA
atgatgagagtttgttggctagtgagacaagactcccgccatcagagaatacgacttccacacctggaggctgtcgtaattggaagaggtcctgagacaaagattaccgataaaaagtgttcccgacagcaggtccagctgaaggcagaatgcaataaaggctatgtaaaggtgaagcaagtaggagtcaaccctacatcgattgacagtgtggtcatcgggaaggatcaggaggttaagcttcagcccggtcaggtgttacatatggtgaacgaactctacccttacatcgtggagtttgaggaggaggcgaaaaacccaggcctagaaacccacaggaagcggaagcgctctgggaatagtgactctattgagagagacgccgctcaggaagcagaggcgggaaccggccttgaaccaggcagcaactctggccagtgttctgtgcctctcaaaaaaggcaaagacgcaccgatcaagaaagagagccttggtcattggagccagggactcaaaatcagcatgcaggatcccaagatgcaggtctacaaggacgagcaggtcgtggtgatcaaggacaagtaccctaaggctcgatatcattggttggtccttccatggacctccataagttctcttaaagcagtggctcgcgaacacttagaattgttaaagcatatgcacactgtgggagagaaagtgatcgtggacttcgcagggtcatccaagctgaggtttcggctggggtatcatgcaatcccatccatgtcacatgtgcatctgcatgtgatctcacaggactttgacagcccttgcctgaagaacaagaagcactggaatagtttcaatacggaatacttcctggagagccaagctgtcatcgagatggtgcaagaagccggtcgagtgacagtacgggatggcatgccagaattactcaagcttccactgcgatgtcacgaatgtcagcaactcctacccagcattccacagctcaaggagcatctgcggaagcattggacacagtag

SEQ ID NO: 214726 - DNA, 1071 bp, synthetic construct
  misc_feature 1..1071: note = Description of Artificial Sequence: Synthetic coding sequence
  source 1..1071: mol_type = other DNA
atgtcaaatgtgaatttgtcggtcagcgatttctggcgcgttatgatgagagtttgctggttggtgcgccaagattccaggcaccaaagaatacgccttccacacctggaggcagtcgtgataggcaggggcccagagaccaagatcaccgacaaaaagtgctcccggcagcaagtgcagctgaaggccgagtgcaataagggctacgttaaggtgaaacaagtgggagtgaaccccacttccatcgatagcgtggttattgggaaggaccaggaggtcaagttacagcccggtcaggtcttgcatatggtgaatgagttgtacccttacattgtggagttcgaagaggaggccaagaatcccggtttggaaacccatcgtaagagaaaacgcagtggtaattcagactccattgaaagggacgctgctcaagaagcagaggccggaactggtctggagcccggatctaactcagggcaatgtagcgtgccactgaagaagggtaaggacgctccgataaaaaaagagtccctgggacactggtcacagggcctcaaaattagcatgcaggatccaaaaatgcaggtctacaaggacgagcaagtagttgtcatcaaggacaagtaccccaaggcccgttatcattggcttgtactcccttggacatcaatcagcagcttgaaggccgttgccagagagcatttagaactcctgaagcatatgcacactgtgggtgagaaggttatagttgattttgccggatcctcaaaactgcgcttcaggctcggctatcacgctatccccagcatgagccacgtccacctacacgtaatctctcaggatttcgacagtccctgtctgaaaaacaaaaagcattggaactcttttaacacagagtatttcctggaatcccaggcagtcattgagatggtgcaggaggcgggtcgtgtgacagtcagggatggaatgcccgagctccttaagctgccattgagatgccacgaatgccagcagctgctcccctccatacctcaactgaaagagcatttaaggaaacattggacacaatag

SEQ ID NO: 214727 - DNA, 921 bp, synthetic construct
  misc_feature 1..921: note = Description of Artificial Sequence: Synthetic coding sequence
  source 1..921: mol_type = other DNA
atgagcaatgtgaacctttctgtgagtgacttctggagagtcatgatgagggtgtgctggctggtccggcaagattcccgtcaccaaaggataaggctgccgcatctcgaagcagtggtcatcggacggggtcccgaaaccaaaattaccgataaaaagtgcagtcgacagcaggtccagctcaaggccgagtgtaacaaagggtacgtgaaagtgaaacaggtcggcgtgaatccaacttccatcgatagtgtagtaatcgggaaagaccaagaggttaagctgcaaccgggtcaagtcctacacatggtgaatgaattatatccatacatcgttgagttcgaggaggaagccaagaaccctgggctggaaactcacaggaagaggaaacggtctggtaacagcgactcaattgagagggacgctgcccaggaggccgaggctggaaccggcttagaacctgggagcaactccgggcaatgcagcgtgccccttaagaaaggtaaggatgcccctatcaaaaaagaatctttgggtcactggagccagggcctgaagattagcatgcaggacccgaagatgcaggtgtataaagatgagcaagtggtggtcataaaggacaagtatccaaaggctcggtaccattggcttgtgttaccatggacaagcattagctcactcaaagccgtcgctcgagagcatctggagctcctgaaacatatgcatacagtcggagaaaaggtgattgtggacttcgccggtagcagtaagcttaggttccgtctgggctaccacgccatacccagtatgtcccacgtacatctccacgtgatcagccaggacttcgatagcccgtgcttgaagaataagaaacattggaattcttttaataccgagtactttctcgaatcacaggagtag

SEQ ID NO: 214728 - DNA, 855 bp, synthetic construct
  misc_feature 1..855: note = Description of Artificial Sequence: Synthetic coding sequence
  source 1..855: mol_type = other DNA
atgtctaatgtaaatctgagcgtctcagacttttggagagtgatgatgcgggtgtgctggttggttaggcaagattccaggcatcagcgtataagacttccacacttggaagccgtggtgatcggcagaggacccgaaacaaaaattaccgataagaagtgtagtcgacaacaggtgcagcttaaagcagagtgcaacaaggggtatgtgaaagtaaagcaggtgggggttaatcctacctcaatcgacagcgtggtaattggaaaggaccaggaggtcaagctccaacccggacaggtgctgcacatggaatccttgggacattggagtcagggtctcaagatcagtatgcaggaccctaagatgcaggtctacaaggacgaacaggtcgtggtcatcaaagataaatatcccaaagctcgctaccattggttagtgctcccttggacaagtatctcttccttaaaggccgtggcgagggaacacctggaactcctgaaacacatgcacactgttggcgaaaaagtgatcgtggacttcgccggttcctctaagttgcggttcagactgggatatcacgccattccgtccatgtcccacgtgcacttgcacgtgatcagccaagattttgactctccgtgtctcaagaacaaaaaacactggaattctttcaatactgaatacttcctggaatctcaggccgttattgagatggtacaagaggcagggagagtgaccgtccgggacggcatgcctgagctgttgaagctccctctgaggtgtcacgagtgccagcagctgctgcctagcatcccgcagctgaaggaacatctgagaaagcactggacacaatag

SEQ ID NO: 214729 - DNA, 579 bp, synthetic construct
  misc_feature 1..579: note = Description of Artificial Sequence: Synthetic coding sequence
  source 1..579: mol_type = other DNA
atgatgagggtgtgttggcttgtacgacaggatagtaggcaccaacggatcaggctgcctcacctcgaagccgtggtgatcgggaggggccctgagacgaagatcactgacaaaaagtgcagtcggcaacaggtgcagcttaaggccgagtgcaacaagggttacgtgaaggtcaagcaggtgggggtgaatcccaccagcatcgatagcgtggtgattggaaaagaccaggaagttaagctgcaaccaggtcaggtcctccacatggttaatgaactgtacccatacattgtagaattcgaagaggaagccaagaatcccggactggagactcacaggaagagaaagcgatcagggaatagcgattccatagaacgcgatgctgcgcaggaggccgaagctgggaccggacttgagccaggtagcaattcagggcagtgctcggttccactgaaaaagggaaaggacgctcctattaaaaaggaatctcttggccactggtcacagggactgaaaatatcgatgcaagaccctaagatgcagccttgcacatccagctgtgaccagcccggtttttag

SEQ ID NO: 214730 - DNA, 1029 bp, synthetic construct
  misc_feature 1..1029: note = Description of Artificial Sequence: Synthetic coding sequence
  source 1..1029: mol_type = other DNA
atgatgagagtttgctggctcgtgcgacaggactcccgccatcagcgcattagactgccacacctggaagctgtagtgattggaagagggcctgagaccaagatcactgataagaaatgctccaggcagcaggtgcagttgaaggcagaatgtaacaaaggctacgtgaaagtgaaacaggttggggttaatcccacaagtatcgactcagtggtgattggcaaagatcaggaggtgaaactccagcccggacaagtgcttcatatggtgaacgagctgtatccgtatattgtagaattcgaagaagaagcgaagaacccagggctggaaactcacaggaagcgaaagcggtcgggcaatagcgacagcattgagcgagatgccgctcaagaggctgaggcgggaacagggttagaacctggatcaaattcaggacaatgttccgtgccactgaagaagggaaaagacgcacccataaagaaagagtccctcggacactggagccaggggctgaaaatcagcatgcaggacccgaagatgcaggtctataaggatgaacaggtggtcgtgattaaagataagtatccaaaggccagatatcactggttggtgctcccttggaccagcatctccagccttaaggctgtcgctcgagagcatttagagcttctgaaacacatgcatactgtgggcgagaaagtgatcgtggactttgctggatcaagcaaactgaggtttcgcctcggctaccacgccattccaagcatgtcccacgtccacctgcacgttatatctcaggactttgatagcccctgcctgaagaacaaaaaacactggaatagcttcaacacagaatatttcctcgaatctcaggcagtgatagagatggtgcaggaggctggtagagtgactgtccgcgacggcatgcctgagctgctcaagctcccactacgctgccatgaatgtcagcagctcttgcctagtatcccacagctcaaggagcatctgaggaagcactggacccagtag

SEQ ID NO: 214731 - DNA, 909 bp, synthetic construct
  misc_feature 1..909: note = Description of Artificial Sequence: Synthetic coding sequence
  source 1..909: mol_type = other DNA
atgagcaacgtgaacctgtctgtgagcgatttttggcgggtaatgatgcgcgtgtgttggctcgtgagacaggattctaggcatcagcgaatccgcttgccccacctggaggccgtggtaatcggtcgaggccctgagactaagatcacggacaagaaatgttctcgacaacaagaattcgaagaagaggctaagaatccgggactcgagacccatcgcaagaggaaaaggagcggtaactcagattccattgagagagacgccgcacaggaagccgaggccggtacaggcctggagccaggttccaattcaggacagtgctccgtacctttgaaaaaaggcaaggatgctcctataaagaaagagtcactgggtcactggtcacagggcctgaagatctcaatgcaggatcctaaaatgcaggtgtacaaagatgaacaagtagtggtgatcaaggacaagtaccccaaggcacgctatcactggttagttctgccctggacatccatttcctctcttaaggctgtggctagggaacacttggaattattaaagcacatgcacaccgtgggcgagaaggtaatcgttgatttcgctggttctagcaagttacggtttcgactgggctaccacgccattccatctatgtcccacgttcacttgcacgttatttcacaggacttcgactctccttgcctgaagaacaagaagcattggaacagtttcaacaccgagtactttctggaaagccaggccgtcattgaaatggtccaagaggctggcagagtaaccgtgcgggacgggatgcctgagctgctgaaactgccgctccggtgccacgagtgtcaacagctgctccctagcattcctcagctgaaggagcatcttagaaaacattggacacagtag

SEQ ID NO: 214732 - DNA, 1029 bp, synthetic construct
  misc_feature 1..1029: note = Description of Artificial Sequence: Synthetic coding sequence
  source 1..1029: mol_type = other DNA
atgatgcgggtgtgctggttagtgcgccaggatagcagacatcagagaatccgcctaccacatcttgaggcggttgtgatcggcagagggcctgagactaaaattaccgataaaaagtgtagtcgtcagcaggtacagctgaaagctgagtgcaacaaaggatatgtgaaagtcaagcaggtaggcgtaaatcccacatcaattgattccgtggttattgggaaagaccaggaagtgaaactgcagcccggacaggtgcttcacatggttaacgagctgtacccctacattgtggagtttgaagaggaggctaagaatcccggactcgagacacaccgaaaacgtaagcgcagcgggaacagcgattctatcgagcgagacgccgctcaagaggctgaggccggtactgggctggaaccgggaagtaatagcggacagtgtagtgtcccacttaagaaaggtaaagacgcacctatcaaaaaggagtcacttggccattggtcccaaggactaaagatctctatgcaagaccccaagatgcaggtttacaaggacgaacaagtggtagtgataaaggacaaatacccgaaggcaaggtatcactggttagttttaccgtggacttcgattagtagcctaaaggccgtggcacgagagcacctggagctgttgaaacacatgcatacagtgggagaaaaggtgattgttgattttgctggctcctccaaacttaggttcaggttaggatatcacgctatcccttcaatgagccacgtccatcttcacgttatttctcaagattttgactccccttgtctaaaaaacaagaaacattggaactcttttaataccgaatactttctggagtctcaggccgtcatcgagatggtgcaggaagctggcagagttactgttcgggatggaatgcctgaacttctgaagcttcctctgagatgtcatgagtgtcagcagctgctgccctctatccctcaactgaaggagcacttgcgtaagcactggacacagtag

SEQ ID NO: 214733 - DNA, 687 bp, synthetic construct
  misc_feature 1..687: note = Description of Artificial Sequence: Synthetic coding sequence
  source 1..687: mol_type = other DNA
atgtatattatcgcccaatgcgtgggcgctatcgtggccactgccattctaagtggtataacctcctcactgactggaaattcccttggcagaaacgatttggcggacggagtgaacagtggtcagggcttgggcatcgaaatcatcggaacactccagctggttctgtgcgttcttgccactactgataggcggcgtagggacctagggggtagcgcacctctagcaatcggcctgagcgtggcactgggccatcttctcgctattgactacactggttgtgggatcaaccctgctcggtcctttggatcagccgttataacacacaatttcagtaaccattggattttttgggtgggaccgtttatcggcggagccctggcggtactgatctacgactttattttagccccaaggtcatctgatctaaccgatcgcgtgaaagtgtggaccagtggccaggtggaagagtacgaccttgacgccgatgatatcaactcccggagctttttgggtaccaaaatctatcagtttacacacagtctggaagtggtggaagaggtgaaggaaagggatcctcccgcatccaggccatctgagcacgatggtcggtgtgccagaaagtcacctcttgccccaaagctgctgaccgatagccccgcacaagtaccaggtattctgccatag

SEQ ID NO: 214734 - DNA, 810 bp, synthetic construct
  misc_feature 1..810: note = Description of Artificial Sequence: Synthetic coding sequence
  source 1..810: mol_type = other DNA
atggccagtgagtttaaaaagaagctgttctggcgcgctgtggtggctgaattcctagcgactactctgttcgtatttatctctatcgggagcgcactcggctttaaataccccgttgggaataatcagactgctgtgcaggataatgtgaaagtaagtctggcgtttggactgagcatcgctacgctggcccagagcgtgggccacatatctggtgctcatctcaaccctgccgtcacactggggctgctcttgtcatgtcagatttccatcttccgagcactgatgtatataatcgcacagtgtgtcggggctatcgtggccacagcgatactaagtggaattacttcctcacttactgggaactctctgggtcgaaacgatctcgccgacggcgtcaattccggccagggattggggattgagatcatcggaactttgcagcttgtcttatgtgtgctggccactacagaccgaaggagaagagatctgggcggatctgcacctctagccattggtctgtctgttgcgcttggacacctgctggccatagattacacaggctgcgggataaacccagcaagaagttttggtagcgcggtgattactcataatttctctaaccattggattttttgggtgggaccctttattggaggagcgctcgctgtgctgatctacgacttcatcttggctcctcggagttcggatctcaccgaccgcgtcaaagtctggaccagcggtcaagtggaggagtacgacctcgacgcggacgatatcaactcccgcgtagagatgaaacccaagtag

SEQ ID NO: 214735 - DNA, 657 bp, synthetic construct
  misc_feature 1..657: note = Description of Artificial Sequence: Synthetic coding sequence
  source 1..657: mol_type = other DNA
atgttttggacgttcggctacgaggctgtctcaccggcaggaccctctcacctgttcgcttccctccttctgggtgtgctgctgactatcacttttatgcctggggctaggcccctgcccttggtgctcgtcccccaaaatacactagcctggatgcagttggatgccaaggcccctgcccatccgagacctctccagcttctggggagagtgggaccgggttctaggcaactcgctgacggcgtaaattcaggtcaaggccttggcatcgagataattggcaccttacagttggtgctgtgcgtccttgcaaccactgataggcgtaggagagatctggggggaagcgctcctctcgctatcggcttgtccgtggccctcgggcacctgcttgcaattgattacaccggctgcggaataaatcctgctagaagttttgggtctgccgttattacccacaatttctctaatcattggattttttgggtggggccattcatcggcggagctctggccgttctgatttatgactttattctcgctccccgatcctccgatctgactgatagagttaaggtctggacttcaggccaggtagaggagtacgacctggatgcagacgacatcaattctagagtggaaatgaagcctaagtag

SEQ ID NO: 214736 - DNA, 465 bp, synthetic construct
  misc_feature 1..465: note = Description of Artificial Sequence: Synthetic coding sequence
  source 1..465: mol_type = other DNA
atgcagtccggcatgggatggaatgttcttgatttttggctggccgatggggtgaattctggtcaaggtcttgggattgaaatcattgggaccctgcaactagtcctctgtgtgctcgctaccacagatagacgcaggagggatcttggcggaagtgcgccattagcgattgggctttctgtggccttgggtcatctcctggcaatcgattacactggctgtggaataaacccggctcgcagctttggaagcgcagtgataactcataacttctctaatcattggattttctgggtggggccttttattggcggtgcgctagcggtcttgatctatgatttcatactggcccctaggagttccgaccttacagaccgggtgaaagtctggacatcgggacaggtggaggagtatgaccttgatgcagacgatatcaacagtagggttgaaatgaaaccaaaatag

SEQ ID NO: 214737 - DNA, 765 bp, synthetic construct
  misc_feature 1..765: note = Description of Artificial Sequence: Synthetic coding sequence
  source 1..765: mol_type = other DNA
atggcctctgaatttaagaagaaactgttctggagagccgtcgtggcggaatttttggctaccactttgttcgtttttataagcatcgggtctgccttgggatttaagtatcctgttggaaataatcagaccgcggtgcaggataacgtgaaagtcagtctagcgttcggtctctcaatcgcaacccttgcgcagtctgtcgggcacattagtggggcacacctgaatccagccgtaactttgggacttttactgtcttgtcagatctctattgtggccaccgccatactcagcggcatcacaagctcgctgactggtaattccttggggcgaaacgacttagcagatggtgtaaattccggccagggactgggcattgaaattattggaacactccaactggtcctgtgtgtcctggccaccaccgatcggcgaagacgtgaccttgggggaagcgcgcctctcgctattggactctccgtagcccttgggcatctgctcgccattgactataccggctgcggaattaacccggctcggagctttggatcagctgttataacacacaacttttccaaccactggatcttctgggtcggcccttttataggcggtgccctggctgttctgatttacgacttcatcctcgctcctagatcttctgacctcacagaccgagtgaaagtttggacttccggacaagtagaggagtatgatctggatgctgacgatattaactccagagtggagatgaagccaaaatag

SEQ ID NO: 214738 - DNA, 990 bp, synthetic construct
  misc_feature 1..990: note = Description of Artificial Sequence: Synthetic coding sequence
  source 1..990: mol_type = other DNA
atgtgccaggtcggctgctttctgaaaacacctcgttttcctatttgggttgtgtgttcggaaagccacttcagcattctgttttctctgcaaccaggactcctcagggactggaggactgagcgcctcttcgacttatattactacgacgggctggcaaatcagcaggagcaaatccggctgacgatcgacaccactcaaaccattagcgaggacaccgataatgatctggttccgccactggagctgtgcatccgcaccaacataggatcggccctggggtttaagtatcccgtcgggaataatcagacagcagtccaggacaatgtgaaggtctccctggcttttggcttgtctattgcaactctggctcagtcagtggggcatatttctggcgcacacttgaacccagcagtgactctcggtttgttattaagttgccaaatttctattttcagggcgctgatgtatataatcgcccagtgcgtcggcgctatcgtcgcaaccgccatcctgtccggaatcacttccagtctcacaggtaattctctgggcagaaatgacctggcggacggcgtgaactccggccagggcctgggcattgagattattggtaccctgcagctagtgctgtgtgtgctggccacaactgatcggcgtcgcagagatctcggtggctctgcccctcttgcgattgggctgtctgtcgcattgggacacctgctggcgatcgattatacaggttgtggaatcaatccagcacggtcgttcgggtccgccgttatcacacacaacttctccaatcattggatcttctgggtgggcccattcattggaggggctctggcagtattgatctacgacttcatcctggcccctagaagctcagatctgactgatcgagttaaggtatggacatccggacaggtggaggagtacgatttggatgccgacgatatcaatagccgggtggaaatgaaacctaagtag

SEQ ID NO: 214739 - DNA, 561 bp, synthetic construct
  misc_feature 1..561: note = Description of Artificial Sequence: Synthetic coding sequence
  source 1..561: mol_type = other DNA
atgccaggagcccgtcccctgcctctggtgctcgtgccccagaataccctcgcttggatgcaactcgatgcaaaagctccggcacatcccagacccctgcagttactggggagggtggggccaggctctcgtcagctggccgacggggtgaacagcgggcaaggattgggaatcgaaataatcggaactcttcagctggtcctatgcgttctggccacaacagacaggaggcggagggacttggggggatcggctcctctggcaattggtttaagcgtggccctcgggcatttgttggcaatcgactatacagggtgcggtatcaaccctgccagaagtttcggatcggcagttatcacacataatttttctaatcactggattttctgggtgggcccattcatcggaggagctctggctgtcctcatttatgattttattcttgcccctcggtcttccgatctgactgatcgcgtcaaggtttggaccagcggccaggttgaagaatacgatctggatgccgacgacataaactctcgagtcgaaatgaagcccaagtag

SEQ ID NO: 214740 - DNA, 816 bp, synthetic construct
  misc_feature 1..816: note = Description of Artificial Sequence: Synthetic coding sequence
  source 1..816: mol_type = other DNA
atgtctccgcttctgggtctgagatccgagcttcaggatacctgtacaagcttaggcctgatgctgtccgtcgttcttcttatgggattagccagggtggtggctaggcagcaactccataggccagtagctcacgcctttgtgttggagttccttgccactttccagctgtgctgttgcacacatgaactacagttgctctccgagcaacatcccgctcatccgacatggacgttgactctggtttacttttttagcctggtccacggcctgacgctcgtggggacttcttccaacccttgtggagtaatgatgcagatgatgctggggggaatgtctccagaaacgggtgcagtccgactcctggcccaacttgtgtccgctctgtgtagcaggtactgtacctccgccttatggtccctgggtctgacccagtaccacgtctcagagcgaagctttgcgtgcaaaaaccctattcgggtggatctcttgaaggcagtcataaccgaggctgtgtgctcttttctgttccattcagctctgctgcatttccaagaggtccgtactaaactaagaattcacctattggccgcacttatcaccttcctggtgtacgctggcggttcattaacaggggctgtctttaacccggcactcgctctcagccttcattttatgtgcttcgatgaagcgttcccgcagttttttattgtctactggctggcccctagtctgggaattcttctgatgatcctgatgtttagtttcttcctaccctggctgcataacaatcacacaattaataagaaagagtag

SEQ ID NO: 214741 - DNA, 888 bp, synthetic construct
  misc_feature 1..888: note = Description of Artificial Sequence: Synthetic coding sequence
  source 1..888: mol_type = other DNA
atggcaggactgaatgttagcctgtcgttctttttcgcgacattcgcgttgtgtgaggctgctaggcgggcaagcaaagcactccttccagttggcgcttatgaggtgtttgcccgagaggccatgagaacacttgtcgagctgggaccatgggccggagacttcggccctgacttactgctgacgctgctctttttgctattcctcgcccacggcgtcactttagacggtgcgagcgctaatcccaccgtctccttgcaagaattcctcatggcagagcagtcgctgccaggcaccctgctgaagctggccgctcagggccttggcatgcaggcagcgtgtaccctgatgagactgtgttgggcgtgggagttgtccgacctccatttgttgcaatcattgatggctcaatcttgctcatccgcgctgcgtacatcggttcctcatggagctctggtggaggcggcttgcgccttttgtttccacctcacacttctgcatctgcggcactccccacctgcctacagtggcccagccgtggccctccttgtcacagtcacggcgtacactgctggccctttcacaagcgctttcttcaatcctgcgctggcagcttcagtaacttttgcctgttcaggccacactttattagaatatgtacaggtttactggctcggaccccttactggcatggttctggcagtgctgttacaccaggggcgacttccccatctgtttcaacgaaatctcttctacgggcagaaaaataagtatcgggctcccagaggtaagcccgctccagcctcgggggatacccaaacgcccgctaaggggtccagcgtcagggaacctggcagaagcggggtggagggaccacattcatcttag

SEQ ID NO: 214742 - DNA, 798 bp, synthetic construct
  misc_feature 1..798: note = Description of Artificial Sequence: Synthetic coding sequence
  source 1..798: mol_type = other DNA
aatcaacccgcacccgctctaagtcctcaggtcagctgccgtcattcctcttccggtggacccggacgatggcaagagttcctgatggccgagcagtccctcccaggcaccctgctgaagctcgctgcccaaggcctagggatgcaagccgcatgtactctgatgagattgtgttgggcctgggagctgtccgacctccacttgctgcagtctctgatggctcaaagttgctcatccgccctgaggacatcagttccacacggggcactggtggaagccgcatgcgctttctgttttcacctcacactgctccatcttaggcacagcccccctgcctattctggacctgccgtcgcccttctggtcaccgtcaccgcatatacagccggacctttcacctccgcgttctttaatccagctttagcagctagcgttactttcgcttgcagcggccatacccttttggaatatgtacaggtgtattggctggggcctctaactgaagaacaacacggcgaagtgatggagccaccgttggggcctcgcagcggcgactccggcccatggttacagcgacccaggtggtctccccatctgctgctccacctcctaagcgatacgcgcttgcatctgaccgaggtgccagagggccagttgggcagttatggtattctggaggcctttttctctttttgctggctgtatacaggtgaagtttctggagccatgccacagcctcccctgggagggaaggatcggtcatggggtagcttacggcacctggccctgcgttggtag

SEQ ID NO: 214743 - DNA, 924 bp, synthetic construct
  misc_feature 1..924: note = Description of Artificial Sequence: Synthetic coding sequence
  source 1..924: mol_type = other DNA
atggccggactgaacgtgtctctttcctttttcttcgcaacatttgccctgtgcgaggcagccagacgcgcttcaaaagctttactgcccgtgggagcctacgaggtattcgctcgtgaggctgtgggcgcagtacagctgggcccttgttgcctggaaatgagaaccctggttgagttaggtccatgggctggcgacttcggtccagacttgctgctgaccctgttatttctcctgttcctagcccacggagtgacgctggatggtgcttcggcaaatcctactgtgtctctgcaagagtttctaatggccgaacagagcctcccaggaacccttctcaagcttgccgcacaaggtctgggtatgcaggctgcctgcaccctgatgcgtctgtgttgggcctgggaactaagtgaccttcacctgcttcagagtctgatggctcagagctgctcctctgcccttcgtacctctgttccccacggagctctggtcgaagcagcatgcgctttttgctttcacctgactctcctacacctgcgtcacagcccacctgcttactcgggacccgcagtggcgctgctcgtgaccgtcacagcgtataccgcaggaccctttacttctgccttctttaaccctgctctggctgcaagcgtgacctttgcttgttctggccacacactcctggaatatgttcaggtgtactggctgggacccctgaccggaatggtactagcggtcctgcttcaccagggcagactgccccatctgttccaaaggaatcttttttatggacaaaaaaataagtatagagccccaagaggaaagcccgctcccgcaagcggggacacgcagacaccagctaagggcagctctgtgcgtgaacccggaagaagcggggtagagggaccacattccagttag

SEQ ID NO: 214744 - DNA, 816 bp, synthetic construct
  misc_feature 1..816: note = Description of Artificial Sequence: Synthetic coding sequence
  source 1..816: mol_type = other DNA
atgtgggagctgagaagtatcgcgttcagcagagcggtgttcgctgagttcctcgccaccctgctttttgtcttcttcgggctgggctcagcactgaattggcctcaggctctgccctcagttctgcagatcgctatggcctttggcttgggtataggtaccctagtgcaggcacttggccacatcagcggcgcacacatcaacccagctgtgactgtggcatgtctggtaggatgccatgtttcagttttgagggctgcattttacgtagccgctcagctgttgggggcagttgcaggggctgccttactccatgagattaccccagctgacatcagaggtgatttagctgtcaatgcattgtctaacagcacaaccgcaggccaggctgttaccgtggaactattcctcaccctgcagctggtcctctgcattttcgcgtccacagacgagcggagaggtgagaaccccggtactcctgccctttcgattggcttctccgtggcactcggtcaccttctgggaatccattataccggatgctccatgaatcccgcacgctccctggcaccagccgtggtgactgggaagttcgacgaccattgggtcttctggatcgggcctctggtgggggctatcttggggagtctgctgtacaactatgtcctgtttccccctgccaagagcctgtcagagcggctcgccgtgctgaagggactcgagccagataccgactgggaggagagggaagtgagaaggcgacagtccgtggagctgcatagtccccagagccttcccagggggactaaggcttag

SEQ ID NO: 214745 - DNA, 879 bp, synthetic construct
  misc_feature 1..879: note = Description of Artificial Sequence: Synthetic coding sequence
  source 1..879: mol_type = other DNA
atgggaagacagaaggaactggtctcccgctgcggcgagatgctccatattaggtaccgcctcctgaggcaggccttggcagagtgcctcggaacattgattctggtaatgtttggctgtgggtcagtagctcaggtggtactatccagaggaacgcatggtgggttcctcacgatcaatcttgcgttcggcttcgctgtgaccctcgggatcctcattgcaggacaggttagtggagctcatctgaaccccgctgtcacctttgccatgtgttttctggcgagggaaccgtggataaagctgcccatctatacgctggcccagacattgggagctttcttaggagcagggattgtctttggtctttattacgatgcgatttggcactttgcagataaccagttattcgtgtctggaccaaacgggaccgccggaatctttgcaacttacccttcggggcatctggacatgataaatggattttttgaccaattcatcggaactgccagtcttatcgtctgcgtcctggccatagtcgacccctataacaacccagtccctcgcggattggaagcttttacggtcggcttggtcgttttagtgatcggaacaagcatggggtttaactccgggtacgcagtcaatccagcacgggatttcgggcctaggttatttacagccctcgctggctggggcagcgccgtcttcactacaggtcagcactggtggtgggtgccaattgtctcacccctactaggcagtattgccggagtcttcgtgtatcagctgatgatcggatgccacttggagcaacccccaccatccaacgaagaagagaacgtgaagctggcccatgtaaagcacaaggaacaaatatag

SEQ ID NO: 214746 - DNA, 840 bp, synthetic construct
  misc_feature 1..840: note = Description of Artificial Sequence: Synthetic coding sequence
  source 1..840: mol_type = other DNA
atgggccgacagaaagagcttgtatcccgttgcggcgagatgctgcacatccgctatcggctcttgagacaggctcttgcagaatgccttggtacactgatcctggtgatgttcggctgcgggagcgtcgcacaggtggtgctctcacgcggaacacacggaggatttctgaccattaacctggcctttggttttgccgtcacactgggcatactgatcgctgggcaggtgtccggcgcacatctgaacccagcagttaccttcgcaatgtgtttcctagctcgcgagccttggatcaaacttccgatttacacacttgcccaaacattaggcgcatttcttggagcgggaatcgtgttcggcctatactatgatgctatctggcacttcgccgataaccagctctttgtttcaggcccaaatgggacagccggtatcttcgcaacatacccttctgggcatctcgacatgatcaacggcttctttgatcaggacaggccggctctagttgtcggcgcacaccgcgtgcctaccccgggtttgcactgcggctgcttaagagtcccggctgacgacagacttccgcctggagcggctcctacccttcagcgaggccgagaatgcgaggctggcccttgtgaagcacagggcgcagatttatctggtcagggcagccccctccgatgccccggtctggagcaccctctcacagtacaaggacctctccctagatctccgctgcatgaccctccattccaggccaaggaacttcccatctatccccacccaactacggcacctagcggatttcccctcgacttggcgcaaatcgccccatag

SEQ ID NO: 214747 - DNA, 972 bp, synthetic construct
  misc_feature 1..972: note = Description of Artificial Sequence: Synthetic coding sequence
  source 1..972: mol_type = other DNA
atgtccgatcgcccaaccgcacgcaggtggggcaagtgtggtccactctgcacacgggaaaacattatggtagccttcaagggagtgtggactcaagccttctggaaggccgtgactgctgaatttttggccatgctgattttcgtattactgtcattgggaagtacaataaattggggcggaactgagaagcccctgccagtggacatggttctgatctccctgtgcttcgggctctctatagccacaatggtgcagtgcttcggacacatttccggaggacatatcaaccctgcagtgactgtcgcaatggtgtgcaccaggaagattagtattgccaaatccgtcttctatatcgctgctcaatgcctgggtgccataataggtgctggtatattatacttggtcacacctccaagtgtcgttgggggactgggtgttaccatggttcatggaaacctaaccgctggacacggattactcgtagagctgatcatcacattccagctcgttttcacgatctttgcatcatgtgattcaaaaaggaccgacgtgacaggctcaatcgccctggccatcggattcagcgttgccatcgggcatctgttcgcgatcaactacacgggcgcatccatgaacccggctcgaagctttggtccagcagtgattatggggaattgggagaaccattggatctactgggtgggcccaatcattggagccgtcctggcaggcggactgtatgagtacgtcttttgcccggatgtggaattcaagcgtcggtttaaggaggctttttcaaaggccgcacagcagactaaaggcagctatatggaggtcgaagacaatcggagccaagttgagaccgacgatctcattctaaaacctggcgtcgttcatgtgatagatgtcgatagaggagaagagaaaaagggtaaggaccagtccggggaagttctgtcttcagtgtag

SEQ ID NO: 214748 - DNA, 660 bp, synthetic construct
  misc_feature 1..660: note = Description of Artificial Sequence: Synthetic coding sequence
  source 1..660: mol_type = other DNA
tgcaccttggcaggagagggcatgtccgacaggccaactgcacgcagatggggcaagtgcggccctctgtgcacgagggaaaacatcatggttgcattcaagggagtctggacgcaggcattctggaaggcagtaacagctgagtttcttgccatgctcatcttcgtcctcctgagcctgggttccacgatcaattgggggggaaccgagaaacctctaccagtcgacatggtcctgatctctctttgtttcggcctgagcattgcaaccatggtgcaatgctttggtcacatttctggcggacatattaatccagctgtgacagtggccatggtctgtacacgcaaaatcagtatcgctaagagtgtgttttacattgctgcccagtgcgttggtcccatcatcggagcggtgctggcagggggactgtacgagtatgtgttctgcccggatgttgagtttaaaagaaggttcaaggaggcatttagcaaggctgcgcagcagactaagggatcttacatggaagtggaagacaaccggtcacaggtagaaactgatgacctcatcctgaaaccgggtgtcgtgcatgtcattgacgtggatagaggtgaagagaaaaaaggaaaagaccaaagtggcgaggtcttgagctctgtctag

SEQ ID NO: 214749 - DNA, 912 bp, synthetic construct
  misc_feature 1..912: note = Description of Artificial Sequence: Synthetic coding sequence
  source 1..912: mol_type = other DNA
atgagcgaccgcccaacggcccgaagatgggggaaatgcgggccactttgtacaagagagaacatcatggtcgcttttaagggcgtgtggacccaagcattctggaaagccgtgactgccgaattcctagctatgctaatttttgtgctactcagcctgggctccacaattaattggggcggaaccgagaagccactgcccgtggatatggtgctgatatccttatgcttcggacttagcattgctacgatggtttgcacccgcaaaatatcaatagccaaatcggttttctacatcgccgcacagtgcttaggggcaattatcggagccggaattctgtatctcgttactcctccaagtgtggtggggggactgggggttacaatggtccacggaaaccttacagcaggccacggattgctcgtcgagctcatcattacctttcagctcgtgttcacaatttttgccagttgcgactcaaagaggacagatgtgaccggctcaattgccctggctataggattttccgtcgccattggccatctgttcgccatcaattatacaggggcttctatgaacccagccaggtcattcggcccagccgtaatcatgggcaactgggaaaaccactggatctattgggtcggcccaattataggcgcagtgctagcaggcggtctctatgaatatgtgttttgccctgacgtagagtttaaaagacgctttaaggaggctttctccaaggcagcccaacagactaaagggtcctatatggaggttgaggacaacaggtcccaggtagagacggacgatctgattctcaaaccgggagttgtgcacgtcattgacgtagatcgaggcgaagaaaagaaggggaaggaccagtcaggtgaggtcttgtcatccgtttag

SEQ ID NO: 214750 - DNA, 849 bp, synthetic construct
  misc_feature 1..849: note = Description of Artificial Sequence: Synthetic coding sequence
  source 1..849: mol_type = other DNA
atggatgctgtggagcccggagggaggggttgggcgtctatgctggcttgccgcttatggaaagcgatctcgcgcgcactgtttgccgagtttttggctacaggactctatgttttcttcggggtgggcagcgtaatgcggtggcctactgcattaccatcagtcttgcagattgccatcaccttcaacttggtgaccgcaatggccgtccaggtcacctggaaggcctctggagcccatgcgaatcccgcagtgaccctggcattcctggtgggcagccatatatcactgcctcgtgccgttgcttatgtagccgcacagctcgtaggcgctacggtgggggctgccttgttatacggtgttatgcctggggacattcgcgagacacttggaataaatgtggtacgcaatagcgtctcaactggccaggccgttgctgtagagcttctgctgacattgcagctcgtgctttgcgtgtttgcctccaccgatagccgccaaacctcaggctcacctgctaccatgatcggtatttcagtggcattgggccatctgattgggattcactttaccggctgtagtatgaatcccgctaggtccttcgggcctgccatcataatcggaaagttcactgtccattgggtattctgggtggggcctctgatgggagctctcttggccagcctcatctacaattttgtgttgtttccagataccaagactctggctcagcgattggctatcctgaccggcacagttgaggtggggacaggagccggtgccggagcagaacccctgaaaaaggaatcacaaccaggatccggggcagttgaaatggagagcgtttag

SEQ ID NO: 214751 - DNA, 1029 bp, synthetic construct
  misc_feature 1..1029: note = Description of Artificial Sequence: Synthetic coding sequence
  source 1..1029: mol_type = other DNA
atggtgcaggcttcgggccaccggaggtctaccaggggatcaaaaatggtgagttggtccgttattgcaaaaatacaggagatcctgcaacggaaaatggtacgagaatttctggcggaattcatgtcaacctatgtgatgatggtgtttggcctcggaagtgtggctcacatggtgctcaacaaaaagtatggttcctatttaggcgtcaacctgggcttcgggttcggggtgacgatgggggtgcatgtggccggaagaattagtggcgctcacatgaacgccgcagttaccttcgctaattgtgcactgggacgggtgccttggagaaagtttccggtatatgtgctcggccagtttcttggttccttccttgctgccgctacaatttatagcctcttctacacagcaattctacatttctctggcggtcagttgatggttactggaccggttgctactgcaggtattttcgcgacatacctccctgaccatatgacactgtggcggggttttctgaacgaggcctggctgactggcatgcttcagctgtgcctgtttgccataacagaccaagaaaataacccggctctccccggaaccgaggcgctcgtgatagggatacttgtagttataataggcgtgtctctgggcatgaacaccgggtatgcgatcaatccctcgcgcgaccttccccctagaatctttacatttatcgcaggctggggtaaacaagtcttctctaatggcgaaaattggtggtgggtacccgtggtcgctcccctactgggcgcataccttggagggattatctatctggtgttcatcggctcaaccattccgcgtgaacctttgaagctcgaagatagcgtggcatacgaggatcatgggattaccgtgttacccaagatgggcagccatgaaccgacgataagccctctcaccccagtctccgtgtcccctgcaaaccgtagctctgtccacccagcccctcccctccacgagagtatggctctcgagcacttttag

SEQ ID NO: 214752 - DNA, 651 bp, synthetic construct
  misc_feature 1..651: note = Description of Artificial Sequence: Synthetic coding sequence
  source 1..651: mol_type = other DNA
atggtgctcaacaagaagtacgggtcttacctcggggtgaaccttgggttcggattcggggtgaccatgggggtccacgtggccggtaggatcagcggagcacacatgaatgcagccgtgacattcgccaactgcgctctcggtcgagtgccatggcgaaagttccccgtctacgtgctcggccaatttcttgggtcgttcttggcggcagctactatttattcactgttttacacagccatccttcatttttcagggggtcagctaatggtgactggacccgtggcaaccgccggaatttttgcaacttatttgccggaccatatgacactgtggcggggatttctgaacgaggcgtggcttaccggtatgttgcagctatgtcttttcgccatcacagaccaagaaaacaacccggcacttcccggaacggaggcactggtcatcggaatcttggtggtcatcatcggagtctctctcgggatgaataccggctacgccatcaacccttcccgggacctgcctcccaggattttcactttcatcgccggatggggaaagcaggtgtttcggtggcaccatctgcccggactgcactggctgcaccaccctaccggggctccagagatcggtggtttctgcggagtttag

SEQ ID NO: 214753 - DNA, 582 bp, synthetic construct
  misc_feature 1..582: note = Description of Artificial Sequence: Synthetic coding sequence
  source 1..582: mol_type = other DNA
atgggatgggctacctttacagaccagggggaagagggattagaaccttcaggaccctggaagacctcccacacacgagcacacatgaacgctgcggttacctttgccaattgcgcattggggagagtaccttggcggaagttccccgtttatgtacttggccagtttcttgggtcatttctcgccgcagctaccatctactcattattttacacagccattctccacttctcaggcggtcagctgatggtcactggcccagttgccactgcgggaatcttcgctacttatttaccagatcacatgaccctttggagggggtttctcaacgaggcttggctcaccggcatgctccaactgtgcctatttgctatcaccgatcaggagaacaacccagccttgcctggaaccgaggctctcgtgattgggatcctcgtagtaattattggggtgtctctggggatgaacaccggctacgctataaacccctcaagggacctgcccccaagaatctttacatttattgccggatggggaaaacaggtgtttagatactgtccttgccctgggcctttcctttag

SEQ ID NO: 214754 - DNA, 771 bp, synthetic construct
  misc_feature 1..771: note = Description of Artificial Sequence: Synthetic coding sequence
  source 1..771: mol_type = other DNA
atgggtagcggacattgccttcgctcaactcgtggctccaaaatggtgtcatggagcgtcatcgctaagatccaagagattcttcagagaaaaatggtaagggaattcctcgcggagtttatgagcacttatgtgatgatggtgtttggacttggcagcgtggcccatatggtgttaaataaaaaatacggctcatatctgggtgtgaacctggggtttgggttcggagtcaccatgggagtccatgtggcgggtagaattagtggggctcatatgaatgctgccgttacttttgcaaattgtgcccttggtcgcgttccgtggagaaaatttcccgtctacgtgctgggtcaatttttggggagtttcctggcggctgccaccatttactctctgttctacaccgcaatccttcacttttccgggggtcagctcatggtgaccggccctgtggctacagcaggcatcttcgccacttatctgccagatcacatgacattgtggcgcggatttctgaatgaagcctggcttactggaatgctgcaactgtgtcttttcgcaatcacagatcaagagaataaccccgctctgcccggtacagaagctctggtaatcggtatcctagtcgtgattataggtgtctcactcggaatgaataccgggtatgctattaacccttctcgcgacctgccaccgaggatttttactttcatcgctgggtggggcaaacaggtattccgctattgcccctgcccaggtcccttcctctag

SEQ ID NO: 214755 - DNA, 1026 bp, synthetic construct
  misc_feature 1..1026: note = Description of Artificial Sequence: Synthetic coding sequence
  source 1..1026: mol_type = other DNA
atgggctccggtcactgtttacggagtacccggggatctaagatggtatcctggtcagtcattgccaaaatacaagagatcctgcaaagaaaaatggtgcgtgaattcttggctgagtttatgagtacttatgtaatgatggttttcggactcggctctgtggcccatatggtgttgaataaaaagtacggatcgtacctgggggtgaacctggggtttggctttggcgtgaccatgggcgtacacgtcgctgggcgaatctctggagcgcatatgaatgcagctgtgacattcgctaactgcgccctggggcgagtgccgtggcgcaaattccctgtctacgtgctgggccagttcttgggatcgtttctagccgctgctacaatttactctctattctatactgccattctgcacttttcaggcggtcagttaatggtgacgggacccgtagccacagcaggcattttcgcaacatacctgcctgatcacatgactctatggcgcggatttctgaatgaggcctggttgactgggatgcttcagctctgtctgttcgcgattacagatcaagagaacaatccagcacttcccggaacagaggcattggtgatcggtatcctggtggtcataattggagtgtctttgggcatgaataccggatatgccatcaatccaagtagggacttgccccctagaatttttacatttatcgcaggctgggggaaacaagtcttcagcaacggcgaaaattggtggtgggttcccgtcgtagctcctctgcttggggcttatctcggaggaattatttatctggtgttcatcggaagcaccatacctagagagcccctgaagctcgaggattctgttgcctacgaagatcacgggatcacagtcctgcccaaaatgggatcccacgagccaacaatttctcccctgacacccgtctccgttagtccagccaatcgctccagcgtgcatccagctccgcctctacacgagagtatggccctcgaacacttttag

SEQ ID NO: 214756 - DNA, 513 bp, synthetic construct
  misc_feature 1..513: note = Description of Artificial Sequence: Synthetic coding sequence
  source 1..513: mol_type = other DNA
atgaatgccgcagtgactttcgcgaattgcgcccttggcagagtgccctggagaaagtttcctgtatatgttctgggccaatttctgggatctttcttggcagcagctactatctatagcctgttctacactgccatcctgcacttctctgggggacagctgatggtgacggggccagtggcaacagccggtattttcgcaacttatctgccggatcatatgacgctgtggaggggtttcttgaacgaagcctggctcactggcatgcttcagctttgtctgttcgctattaccgatcaagaaaacaatcctgccctgcctggtactgaggcactggttattggcatcctggtggtgattataggtgtgagccttggtatgaataccggatatgctatcaatccgagccgggatctaccccctcgcattttcacattcatcgcgggatgggggaaacaggtcttttcaaacggggaaaactggtggtgggtccctgtggtggccccactctag

SEQ ID NO: 214757 - DNA, 426 bp, synthetic construct
  misc_feature 1..426: note = Description of Artificial Sequence: Synthetic coding sequence
  source 1..426: mol_type = other DNA
ctgttttacaccgccatcttgcacttctcaggcggtcagctgatggtcacaggacccgtggcaacagctggaatcttcgcaacctaccttcctgaccacatgacactctggagaggttttctgaatgaggcgtggctcacggggatgctgcagctttgcctgttcgcaattactgatcaagagaataaccctgccctacccggaaccgaggcccttgtaatcggaatacttgtagtaattatcggggtcagcctgggcatgaacactggctacgctatcaatccatcccgggatttgcccccacggatttttacttttattgccggatggggtaagcaggtctttagatggcatcacctgccaggcctccattggctgcatcacccaacgggcgctcctgaaattggtggattttgtggagtttag

SEQ ID NO: 214758 - DNA, 498 bp, synthetic construct
  misc_feature 1..498: note = Description of Artificial Sequence: Synthetic coding sequence
  source 1..498: mol_type = other DNA
atgaatgccgcagtgactttcgctaactgcgcactaggtcgtgtaccctggaggaagttccctgtgtacgtcttaggacagtttctgggctcctttctggctgctgcaaccatttactccttattctatacagcaattctgcatttttccggaggccagctgatggtgacaggtcctgtggccaccgctggaattttcgcgacgtacctgcctgaccatatgaccttgtggcgtgggtttcttaacgaggcatggctcaccggcatgctgcagttatgcctcttcgcaattaccgaccaagagaataaccctgccttgcccggaacagaggcacttgttatcggcatactggtggtaatcatcggggtgtcgctcggaatgaacacgggctacgccattaatcctagccgagatttgccccctcgcatatttacgttcatagccggatggggcaaacaggtgttcagatattgtccatgtcccggacccttcctgtag

SEQ ID NO: 214759 - DNA, 774 bp, synthetic construct
  misc_feature 1..774: note = Description of Artificial Sequence: Synthetic coding sequence
  source 1..774: mol_type = other DNA
atggtgcaagctagcggtcatcgacggtccacaagagggtccaaaatggtgagctggtcagtgattgcgaagatccaggaaatcctccaacggaaaatggtacgcgaatttctagcagagttcatgtccacctacgtcatgatggtatttggcctgggatctgttgcacacatggtcctgaataaaaaatacggctcatacctgggcgtaaatctcgggttcggtttcggagtgaccatgggggtccatgtcgcaggaaggatctccggcgctcatatgaacgccgctgttacattcgcaaattgcgcattgggcagggtcccatggcgcaagtttccagtttatgtgctgggccagtttctgggatcttttttggctgccgctacaatttactctttgttctataccgccatcttacatttcagtggcggacagctgatggtgaccggccctgtggccaccgcaggcatttttgcaacctacctgccagaccacatgacattgtggcgtggttttctgaacgaagcgtggttaactggcatgttgcaactctgtctgttcgcaatcacagatcaggagaacaaccctgcgctgcctggcaccgaggccctcgtgattggcattctggtggttataatcggggtgagtctcggtatgaacaccggctatgccatcaatcccagccgtgacttgcccccacggatcttcacgttcattgccggatggggcaagcaagttttcaggtactgtccatgcccaggcccatttctctag

SEQ ID NO: 214760 - DNA, 426 bp, synthetic construct
  misc_feature 1..426: note = Description of Artificial Sequence: Synthetic coding sequence
  source 1..426: mol_type = other DNA
atgaacgccgctgtgacgttcgccaactgtgctcttggtagggtgccttggcgaaagttcccggtatatgtgctgggccaatttttaggctccttcctcgcagccgcaaccatatactctctcttttactccgtcgccgatagagatgctccggctgtttctctgcggcatcacggacccggtgagcagcccagcacagcaaggaaccggggagctggagacaggcatcctcggggacatcacaggggggttccttggcatgagcataggatttgccaccaacccgttcccggacccgctcctcctcatttgcatctccattgttggttgggccagaccgggctccaggtcctgccactgccacgccctattccactgagcttcagtgtcggccctctgtgcgtggagggctggggcgttatgtag

SEQ ID NO: 214761 - DNA, 1602 bp, synthetic construct
  misc_feature 1..1602: note = Description of Artificial Sequence: Synthetic coding sequence
  source 1..1602: mol_type = other DNA
atgggcagcaggtgcctgaatccaccaccgcctgcccatagcgataccacagggaaggattctttcggcaacatcaggggcgctgaaaccgggcagggcgcttctgcctgtagcgtgacaagcgcaagggtgacctgtggcgcaggctcggagccccattctcacagaaatcccggtatctccgcccaggttggcctggccccaagctacggggctgcacggggtagaagacgaccgctggctctgcagcagagccctcaggaacggcgtcatgtgggatggaatagcactcgtggcctgctaccagcatctcttcccggaacagcaagtagtcagtctgcaagcgcaaccgcgtccgcggcactcccgttgaaggtgacgggtccactggcccgtaacccgacacctccatggactgctgccgctgcgctcgctacaaggggacagagacctgaaaaaggtctgttccccggaccggctcccttcagtctgggaaagaggaaacggggtagaggtcgaacgtgggaacggagacggagagtgagtatcgaaactagtacatgcttcaggccagggtgtgaaaggctcggcgcagccgctggggcaaacctctcccaattagcttcctcacagcgtcctttgcgagagcgctgggtactctacacaataattatggctgccgctggcgctcctgacggaatggaagaaccgggaatggacactgaagccgaaacggtcgccacagaggcacccgcacgtcccgtgaactgcctggaggcagaggcagctgctggggcagccgctgaggattctggcgcagccagaggatccctgcagcctgccccagcacaacctccaggcgatcctgctgcgcaggcgtcagtgtccaatggtgaagatgccggtggcggagccggaagggaactagtggacctaaagatcatatggaataaaactaagcacgatgtaaagtttcccctggattctacaggtagcgagctgaagcagaaaatccatagtattactggactcccgccagccatgcagaaagtgatgtacaaaggtctggtgccagaggacaaaacccttagagaaattaaagttacttccggagccaagatcatggtggtgggtagcacaatcaacgatgttctcgctgtaaacacacccaaagatgctgcccaacaagacgcaaaagcggaggaaaataagaaagaacccttatgccgacagaagcaacataggaaagtgctagataaaggcaaacccgaagatgtgatgccttccgtcaaaggagcacaggagcgtcttccgacagtgcccctcagcggtatgtataataaaagcggagggaaggtacgacttacatttaagctggaacaggaccagctttggattgggacaaaagaaagaacagagaaactgccaatgggctccatcaaaaacgttgtgagcgagcctatcgaaggacatgaagactatcatatgatggcattccagttagggccaaccgaagccagctactactgggtgtactgggtccccacacagtatgtggatgcaatcaaggatacggtgctggggaagtggcaatacttttag

SEQ ID NO: 214762 - DNA, 9198 bp, synthetic construct
  misc_feature 1..9198: note = Description of Artificial Sequence: Synthetic coding sequence
  source 1..9198: mol_type = other DNA
atggaggaaaagcaacaaatcattcttgccaaccaagatggtggaaccgtggctggcgctgcccctacgttctttgtgatcctgaagcaacccggtaacgggaagaccgaccagggtatactcgttacgaatcaggatgcatgtgccctcgcgtcatctgtcagctccccagtaaagagcaaagggaagatttgcttacctgctgattgcactgtcgggggtatcactgtgacgcttgacaataactctatgtggaacgagttctaccacagatccacggaaatgatccttactaaacaaggcagaaggatgttcccgtactgtagatattggattaccggacttgatagcaacctcaagtacatactggtgatggatatttcaccagttgacaatcatcgatataagtggaatggcaggtggtgggagcccagcggaaaagcggagcctcacgtcctgggacgagttttcattcaccctgaaagccccagcactggtcactattggatgcatcagcctgtgtccttctacaagctgaagctgactaacaatacgctggaccaggagggccacattatcctgcacagcatgcataggtatctgcctagactacacctagtgcccgctgagaaagccgtcgaagtgatccaactgaatggtcccggagtgcatactttcactttcccccagacagaattcttcgccgtgaccgcttatcagaacattcagattactcagctaaaaattgattataatcccttcgccaaaggctttagagatgacggactgaataataagccacagcgcgacggcaaacaaaagaactcatcagaccaagagggtaacaatatcagctcctcatccggccaccgtgtccgtctcaccgaaggccaggggagtgaaatccagcccggagatttggatccgctgagtagaggacacgaaacttctggaaagggtttagagaaaacgagtctcaacattaaacgcgattttctgggcttcatggacactgacagtgctctttccgaggtaccccaattgaaacaggagatctcggagtgccttatcgcgagcagctttgaggacgatagtcgcgtagcctctcctctggaccagaatggctcttttaatgtagttattaaggaagaaccacttgatgattacgattatgagctcggcgagtgtcctgagggcgtcactgtcaaacaagaggagaccgatgaggagacagatgtgtacagtaacagtgatgatgatcccattttggagaagcagctgaagcgccataacaaggtcgacaacccagaagccgaccacctctccagcaagtggttaccttcttctcctagcggtgtagccaaggcaaaaatgtttaaactggatacaggaaagatgcccgttgtgtacttggagccttgcgcagtgacaagatctactgtgaagattagtgagctccccgataacatgctatccacaagtagaaaagacaaatcatccatgcttgccgagctggaatatctgcccacttacatcgagaacagcaatgagaccgccttctgcctgggaaaagaaagcgagaacggcctgcggaaacattctcctgacctgcgcgtggtccaaaagtatccccttctgaaggagcctcaatggaaatatccagatattagtgatagtataagtacagaacgtattttggacgatagtaaggactcggtaggcgacagtctttccgggaaggaagatctgggcagaaagagaaccacaatgcttaagatcgctacagctgctaaagtggtgaatgctaatcagaatgcatccccaaacgtgccaggcaagagagggaggccaaggaagttgaaactctgcaaggccggaaggccccctaaaaacaccggcaagtccttaatctctactaaaaatacaccagtcagccccggaagcaccttcccagatgtcaaaccggatctagaggatgttgatggcgtactattcgtgagcttcgagagcaaagaggctctcgacatacacgccgtggacgggactaccgaagaatcaagcagcctccaggctagcaccacaaacgactccggatatcgcgctcggatctctcagctggagaaggaactcatagaagacctgaaaacactgagacacaaacaagtaatccacccaggactgcaggaagtcggcctgaaactgaactctgtagatccaacgatgagtatcgatctgaagtacctaggcgtccaactgccgctcgccccagcgaccagcttcccgttctggaatttgacgggaacgaatccagccagtccggatgctggctttccctttgtgagtaggactggcaagacaaatgacttcaccaagattaagggctggcgcggtaagttccactcagcctccgcaagtcggaatgaggggggaaactccgaaagctctctgaagaatcgatccgcattttgcagcgacaaactagacgagtatttggaaaacgagggcaagctaatggagaccagtatgggatttagcagtaatgccccaactagtccggttgtgtatcaactgcctactaagtctacctcctatgttcgcactctagactctgtgctgaaaaagcagtctacgatcagcccatctacgtcgtactcactcaagccgcactctgtgcctcccgtgtcccggaaggctaaatcgcagaaccgccaagcgaccttttctggcaggacaaagagctcttacaaatctatcttgccttacccagtgagccccaaacaaaagtacagccacgtaatcctgggggacaaggttaccaaaaattcctccgggatcatttcggaaaatcaagccaataacttcgtagtccccaccttggacgaaaatatcttcccaaagcagatctcactcagacaggcacagcagcaacaacagcagcagcagggctcaagaccccctggactgtcaaagtcccaggtaaagctgatggatctcgaggattgcgccttgtgggaggggaaaccacgcacttatatcaccgaggagagggcagacgtatccctgactactttgctgacagcgcaggcgtcgctgaaaacaaaacctattcataccatcatccgaaagagagctccaccgtgtaacaacgacttctgccggctgggttgcgtgtgtagcagcctcgcgcttgaaaagagacagccagcacattgtagacggcctgattgtatgtttggttgcacttgtcttaaacgcaaggtggtccttgtgaaggggggttctaaaacgaaacattttcagcgaaaggcggcacacagagatcccgtattttatgacaccttaggggaggaagccagagaggaagaagaggggattcgtgaagaagaggagcagcttaaagagaagaagaagaggaagaaactcgagtacacaatctgcgaaactgagcccgaacagccagtgagacattaccctctctgggtgaaggttgaaggtgaggtcgatcctgagcctgtgtacattcccacgccttccgtaatcgaacccatgaagcccctgttactgccccagccggaggtgctgtcacccacggtgaagggtaagttgttaaccggtatcaagagccctcgcagctacacacctaaaccaaaccctgtaatccgcgaggaggacaaagacccagtgtacctgtattttgaatccatgatgacctgtgccagagttcgggtctatgaaagaaagaaagaggaccagaggcagcctagtagtagctctagcccctccccctccttccaacagcagactagctgtcattcttcacccgaaaaccataacaacgccaaagaaccagactctgaacagcaacccctaaaacagttgacatgtgacctcgaggatgactcagataagctccaggagaagtcctggaagtcaagttgcaacgagggagaatcatcttctacctcatacatgcatcagcggtcaccaggaggccctaccaagcttattgagatcatcagcgattgcaattgggaagaagacagaaacaaaatactgtcaatattgtcccaacatatcaattccaacatgccacagtcccttaaagtcgggtccttcatcatagaactggctagccagagaaagtcacgtggcgaaaagaatccacccgtgtattccagcagagttaagatctccatgccgtcatgtcaggatcaggatgatatggctgaaaaaagtggctcagaaacccccgacggcccactaagtcctggaaagatggaagatataagcccagtgcagactgatgcgctggactccgtcagggagcgtctgcacgggggtaaaggactaccgttttacgccggtttgtctccagccggtaaactcgtggcatataaacgcaaaccttctagcagcacaagtggactgattcaggtggccagcaatgccaaagtcgctgcctccagaaaaccacgcacattactcccgtccacttccaattccaaaatggcctcatcttctggcacggccactaacaggccaggtaaaaacctgaaggcatttgtgcccgctaaacgccctattgcggcaaggccctcgcccggaggggtgttcacacaatttgtaatgtcgaaagtaggagccttacaacagaaaatccctggtgttagcaccccacagaccttggccggtactcagaagttcagtatcaggccttccccggtgatggtcgtgactcccgttgtttcatccgaacctgtgcaggtgtgtagtcccgttacagccgctgtcacaaccacaactccacaggtctttctcgagaatactacggcggtgacccccatgactgcaataagtgatgtcgagacaaaggaaaccacctacagctccggtgcaacaacgacaggagtcgtggaggtcagcgagacaaacacaagtacctccgtgacctctacccagtccacggctactgttaatctaacaaagaccaccggcatcacaacccctgttgcctcagttgcttttcctaagtcactggtggctagtccctcaactatcaccctgccagtggcttctacagcttccacttctctggtggtggtgacagccgctgcatcaagtagcatggtcaccacgcccacctcatcattgggctccgtccctattatactctcagggattaatggcagtccaccggtcagccagcgccctgagaatgccgctcagattcctgtggcgacccctcaggtttcacctaatactgtgaagagggccggacctcggctgctgctaatcccagtccagcaaggctcccccactctgaggccggtgagcaacactcagctgcaaggccataggatggtattgcagccggttcggtccccaagtggaatgaatcttttccggcatccaaacggacaaattgtgcaactgttgcctctccatcagctgcgcggaagcaatacacagcccaatctccagcccgttatgttccggaatccaggaagtgtcatgggaatccggctcccagccccaagtaagccaagcgagacgcccccatcttcaacttctagttcagccttcagtgtgatgaaccctgtgatccaggccgtcggtagtagtagtgccgtcaatgttatcacgcaggccccatctctcctgtcctctggtgcgagtttcgtgtctcaggcgggtacgctcaccttgaggattagcccgcctgagccccaatcatttgcctcgaaaacaggctctgagaccaaaataacatattcgtctggagggcaaccagtgggtacagcaagtctgatacctttacagtctggttccttcgcactgctgcagcttcctggccaaaagccagtcccctctagtattctgcaacacgttgcttccctacagatgaagcgggagtcccaaaaccctgaccaaaaagacgagacgaactccattaagagagaacaggaaaccaagaaggtcctgcagtccgaaggggaagctgtagaccccgaggctaacgtgataaagcagaatagcggcgcagcgacaagtgaggaaactctgaacgattccctggaagatcggggagaccatttagacgaggagtgtctcccagaggaaggttgtgctacagtgaagcctagcgagcacagttgtatcaccgggagtcacacggaccaggactacaaagatgtgaacgaagaatacggcgctagaaaccgtaaatccagcaaggagaaagtggcagtgctggaggtgcggactatctcagagaaggcatcaaacaagacagtgcagaatctctccaaggtgcagcatcagaagctgggcgatgttaaagtggagcaacaaaaaggattcgataaccccgaagagaacagtagtgaatttcctgttacgtttaaagaagaatcaaaattcgaactctcggggtcgaaggtcatggagcagcagtcgaatcttcagcccgaagccaaagagaaagagtgcggggatagccttgagaaagatcgggagagatggagaaagcaccttaagggcccactgacgcggaaatgtgtcggcgcatcccaggagtgcaaaaaggaagccgacgagcaactcataaaagagaccaaaacgtgccaggagaacagcgacgtgtttcagcaggagcagggcatttccgacctcttgggcaagagcgggatcaccgaggacgccagggtgctcaagaccgaatgcgattcctggagccgcattagcaatccatctgcgttctctatcgttccgcgacgagccgcaaaatcctctcggggaaatggccacttccagggacaccttctcctgccgggagaacaaatccaacctaagcaggagaagaagggagggaggagtagtgccgattttacagtgctcgacttggaagaggatgacgaagacgacaatgagaagacagatgacagcattgacgagattgtcgacgtggtctccgattaccaatctgaagaagtcgatgacgtcgaaaaaaataattgcgtggagtatattgaggatgatgaggagcatgttgatatcgaaactgtggaggagctctcagaagagatcaacgtcgcccacctgaagaccactgctgctcatacccagtcatttaagcaaccgagttgcactcatatctccgctgatgagaaagctgctgagcgaagtaggaaggcaccgcctatccccctaaagctcaagcctgattattggtccgataagctgcaaaaagaagccgaagctttcgcatattataggcggacacatacagccaacgaacggagaagacggggtgagatgcgggatctgttcgagaaactgaagataacgttgggcctgctccattctagcaaggtaagcaagagcctaattttgaccagggcattttccgagatacaagggctgactgatcaggctgacaaactcattggacagaagaatttattgacccggaagaggaatatcctgatccgaaaggtgagctctctttcaggcaaaacggaggaagtggtgttgaagaaactagaatacatctatgcaaaacaacaagccctggaagcccaaaagcgtaaaaaaaagatgggcagcgacgaattcgacataagtcctcggataagcaagcagcaagaaggatcttccgcttcaagcgttgacctagggcaaatgttcataaataatcgccgaggcaaacccctcatcttatccagaaaaaaagatcaggcaacggagaatacgtccccactcaataccccgcatacttcagccaacctggtgatgacgcctcaaggccagcttcttactctaaaaggacctctgttcagtgggcctgtggtggctgtaagtccagatcttttggaatcagacttaaaaccccaggtggccggatcagcggtggccctgcccgaaaacgatgatctgttcatgatgcctaggattgttaacgtaacaagtctagcaacagagggcggactggtggatatggggggaagtaaatatcctcatgaggtgcctgattcaaagccctctgaccacctaaaagatactgttaggaatgaagataattccctagaggacaagggccgtataagttcccggggaaaccgagacggtcgagtgaccctcggaccaacccaggtgttcctggcaaacaaagattccgggtaccctcaaatcgtggacgtttccaatatgcaaaaagcgcaggagttcttgcccaagaagatttcaggggatatgcggggtattcagtacaagtggaaggagagtgaatcacggggtgaacgggtgaagtcgaaggacagtagttttcataagttgaaaatgaaggacctgaaggacagcagtatcgaaatggaattgcggaaggtaactagcgccattgaagaggcagccctagattcatctgagctactgacaaatatggaggacgaggacgatacggatgaaactctgacctccctgttgaacgaaatcgccttcctgaaccagcagctgaacgatgattctgtcggactcgccgaactcccaagctccatggataccgaattcccaggcgacgccaggcgcgcattcatctcgaaggtgccccctgggagtagggctaccttccaggtggaacatctgggcaccggcttgaaagagctgcctgacgtgcaaggggagagcgattcaatttcaccattacttttacatctagaagatgatgacttttcggaaaacgagaaacaattagccgagcctgctagcgagcctgatgtcctgaagatagtcatcgactctgaaataaaagatagcctcctctcaaacaagaaagcaattgatggcggaaaaaacacctctgggctgcccgcagaacctgagtcagtgtccagccccccaaccttacatatgaaaaccggcttggaaaattctaattcaacggataccttgtggcggccaatgcctaagctggcgcctctggggctgaaagttgccaacccatcctccgacgctgacggccagtccctgaaggtgatgccatgcttagccccaattgcagccaaagttggatccgttggacacaagatgaacctgaccgggaacgaccaagaggggagggagagcaaggtgatgcccacattagcccctgtggtggcaaagctcggcaactctggagcatcgccttcgagcgctggaaaatag

SEQ ID NO: 214763 - DNA, 888 bp, synthetic construct
  misc_feature 1..888: note = Description of Artificial Sequence: Synthetic coding sequence
  source 1..888: mol_type = other DNA
atgcagccagagggtgctgagaaaggcaaatctttcaagcagagactcgtcttgaaaagctctctggcaaaagaaacattgagtgaatttctggggactttcatactcatcgtactcgggtgtggctgtgtggcacaggccattctgagtagaggcaggtttggaggtgttattaccataaacgtaggcttttcaatggcagtcgcaatggccatctatgtggccggtggagtgagcgggggtcacataaatcccgcagtgagccttgcaatgtgtctgttcggccgaatgaagtggttcaagctgcccttctacgtgggcgcacagttcctcggcgcatttgtgggggcagcaactgtgttcggaatttactatgatggtctgatgagctttgcaggtggcaagctgctaatagtgggcgagaatgcaactgcccatatctttgcgacctatccagcaccctatctgtccctggctaacgctttcgcagaccaggtcgtagccaccatgatcctactgatcatcgtgtttgccatttttgatagtagaaatctaggcgcaccacgaggcttagagccaatcgcgattggactcctcataatcgtcatcgcctcttctcttggactcaacagcggatgcgcaatgaatccagccagggacctcagcccacgcctattcacagcactggctggatggggcttcgaagtttttagagccggaaacaacttctggtggatcccggtggtgggaccccttgtgggggctgtaattggaggtttgatttacgtgctcgtgattgaaatccatcatcccgagcctgacagtgtgtttaagacagagcagtctgaggacaagcctgaaaagtacgagctgtcggtgatcatgtag

SEQ ID NO: 214764 - DNA, 1992 bp, synthetic construct
  misc_feature 1..1992: note = Description of Artificial Sequence: Synthetic coding sequence
  source 1..1992: mol_type = other DNA
atggggaggtataggattagagtcgccacaggcgcttggctctttagcggtagctataatagggtgcagctctggctggtaggcacgagaggggaagcggaactggaattgcaactcaggcctgccaggggagaggaagaggagttcgaccacgacgtggctgaggacctggggcttctgcagttcgtgagactccgaaaacaccattggttggtcgatgatgcctggttctgtgacagaatcacggtccagggtcccggtgcatgcgctgaagtcgcgttcccatgctatcgttgggtccagggagaagatattctctcattgccggagggcaccgcaagattgccaggggataacgcacttgatatgttccaaaaacatagggagaaggagctcaaggacagacagcagatctactgttgggccacctggaaagagggactgccgctgaccatagcagctgaccgaaaggatgatctgccacccaacatgaggttccacgaggaaaaaaggcttgatttcgaatggactctgaaagcaggggcacttgagatggctctgaaaagggtgtacaccctgctcagcagttggaattgcttagaagacttcgatcagatcttctggggccagaaaagtgcccttgccgagaaggttcggcagtgttggcaggatgacgagttgttctcctatcagttcttaaacggtgccaacccaatgttgttgagaagatctactagcctgccatcccggctcgtcctgcctagtggaatggaggaacttcaggctcagctggagaaggagctgcagaatggcagcctattcgaggcagacttcattctgctggatggaattcccgctaatgtcatccggggagagaagcagtatcttgccgcaccgctggtaatgctgaaaatggaaccaaatggcaaactccagccaatggttatccagattcagccccctaacccaagctccccaactccaacgctgttcctcccctcagacccccctctggcatggttacttgcaaagtcctgggtgcggaactccgatttccagctccacgagatccaataccatcttctcaacactcatctggtggccgaggtgatagcagtggctacaatgcggtgtcttcccggactgcaccctatcttcaaattcctaattccacacattcggtacactatggaaatcaataccagagcgagaactcagctaatctccgatgggggtattttcgacaaggccgtgagcaccggcggagggggtcacgttcagttgctgcgtagagccgcagctcagctcacatattgcagtctgtgtcctcccgacgacctcgctgacaggggacttctgggcctgcccggtgctttgtacgcccacgatgctcttcggctgtgggagatcattgccaggtatgtggagggaattgtgcacctgttttatcagcgggacgacatcgttaagggggatccggaactgcaagcctggtgccgagagatcacagaggtgggcctgtgccaggcccaggaccgtgggttccctgtgagctttcagagccagtcccaactgtgccactttctgactatgtgtgtatttacatgtactgctcagcatgccgcaatcaatcagggacagttagattggtatgcgtgggtgccaaacgcaccatgtactatgcgtatgccgcctcccacgacaaaagaggatgtgacgatggccacagtgatgggcagtctccccgatgtgcgccaggcctgcttgcagatggctatcagttggcatctgtctcgccgacaaccagacatggtccccttggggcatcataaagagaaatattttagtggacccaagcctaaagctgttttaaaccagtttcgcactgacctggagaaacttgagaaagaaattacagctcgaaatgaacagctcgattggccctatgagtatctgaaacccagttgtattgaaaatagcgtgactatctag

SEQ ID NO: 214765 - DNA, 2106 bp, synthetic construct
  misc_feature 1..2106: note = Description of Artificial Sequence: Synthetic coding sequence
  source 1..2106: mol_type = other DNA
atggctacatataaggtgagagtagccactggaaccgatctgctttcaggcacaagagactcaatctccttaacaatcgtgggcactcaaggggaatctcacaaacaactcctgaaccattttggacgcgacttcgcaaccggcgctgttggtcagtacaccgtacagtgccctcaggacctaggagagctgatcattatcaggctacacaaggagagatacgcctttttccccaaagatccatggtattgtaattacgtgcagatctgtgcacctaacggaagaatctaccattttcctgcttaccagtggatggacggctatgaaacactggcacttcgcgaagccaccggtaaaaccactgctgatgacagcttgccagtgctgcttgaacacaggaaggaggagattagagctaagcaagacttttatcattggagagttttcctgcccggactgccgtcttatgtgcatatccctagctaccggccacctgtgcgtagacacagaaacccaaacagaccagaatggaatgggtacatcccgggttttcccattctcatcaatttcaaggccaccaagtttctcaatctgaacctacgatattcatttctcaagaccgcatcattcttcgtgcgattgggccctatggccctcgcctttaaggtaaggggactgcttgactgcaagcatagttggaagcggttaaaggacatcaggaagattttccccggaaagaaaagtgtagtgtctgaatacgtcgccgagcactgggcagaagacacatttttcgggtatcagtacctgaacggtgtgaacccaggacttattagacgctgtactcgcattccagataagttcccggtgaccgacgacatggtagccccttttctgggcgaaggtacatgcctccaagctgagcttgaaaagggcaacatttacttggcagattatcggatcatggagggtattccaaccgtagagctgtccggaagaaagcagcatcactgcgcccctctgtgtctcttgcattttgggcctgaggggaagatgatgcccatcgccattcagctgtcacaaacaccaggcccagactgtccaattttcttaccctccgacagcgagtgggactggctccttgccaagacctgggtgagatacgccgagttttatagtcacgaggccattgcccaccttctggagactcatctcatcgccgaagccttttgcctagcactgcttcggaatctgcctatgtgtcaccccttgtacaaactgcttataccccatacccggtacacggtgcagataaattctatcggaagggctgttctcctgaacgagggcggactatcagccaaggggatgagcttaggggtggagggctttgctggcgtcatggtgcgcgctctatcagaactcacttatgatagtctgtacctgccaaatgatttcgtggagaggggagtgcaggacctaccaggatactattacagggatgacagcctcgcagtgtggaacgccctcgagaaatacgtcacagaaatcattacatactactaccccagtgatgctgcggtagagggggaccccgaactccaatcatgggtgcaagaaattttcaaggagtgcctgctgggaagggagagcagcggcttcccccgatgtctgaggactgtacctgaattgatccggtatgtcaccatagttatttacacttgttcagcaaagcatgcagcagtgaacactggccagatggagtttacagcatggatgccgaacttcccagctagcatgagaaatcccccaattcaaaccaaagggctgaccactctcgagacgttcatggacacgctccctgacgtaaagactacttgcattacactgctggtgctgtggaccttaagtcgcgaacccgatgaccggaggcctctgggacattttccggatattcacttcgtagaagaagcaccaaggcgctccattgaggctttcaggcagagactgaatcagatttcacacgatataaggcagcgcaataaatgtcttcccattccgtattactatctcgatcctgttctgatagagaatagtattagcatttag

SEQ ID NO: 214766 - DNA, 1989 bp, synthetic construct
  misc_feature 1..1989: note = Description of Artificial Sequence: Synthetic coding sequence
  source 1..1989: mol_type = other DNA
atgggcctatatcggatccgcgtttctaccggcgcttctttatacgccggaagcaacaaccaggtgcagctgtggctggtggggcaacacggtgaggctgctctgggcaaaagactgtggcctgccagaggcaaggagactgaacttaaagtcgaagtcccagagtacctcggacctctgttgtttgtcaaattgaggaaacgccacctcctgaaggacgatgcctggttttgtaattggatatccgtgcagggccctggcgcaggcgacgaagtgcgatttccttgttaccggtgggtggaaggtaatggtgtgttgtccctgcccgaaggaactgggagaaccgttggggaagacccacaggggcttttccaaaagcatagggaggaggagctagaggaacggaggaaactctaccgctggggtaattggaaggacggactcatcttgaacatggctggcgcaaagctatacgacctccctgtggatgagagattccttgaagataagcgagtcgactttgaggtctctcttgcaaaaggtttggccgacctcgcaatcaaggattccctgaacgtcctgacttgttggaaagatctggatgactttaatcggattttctggtgtggacaatcaaaactggccgaacgggtgcgtgactcctggaaggaggatgcattgttcgggtaccagttcctcaacggggcaaaccctgtcgtgctgcgcaggagcgctcatctgccagccagactcgtgttccctcctggaatggaggaactccaagcccaattggaaaaggaactggaggggggaaccttattcgaagctgatttcagcctcctcgatggaattaaggctaacgtcatcttgtgctcgcagcagcatctggccgctcctctggtgatgttgaagctgcagcccgatggcaagctgctgcctatggtgattcaactccagctaccacgaactgggagcccccctccgccactgttcctgcctacagacccccctatggcatggctcttggccaagtgctgggtcagaagctccgactttcagctgcatgagcttcagtcccacttattgaggggccaccttatggctgaggtgatcgttgtagctacaatgaggtgccttccgagcattcacccaatattcaaacttatcatcccccacctccggtatacgttggagatcaatgtccgggctaggactggcctagtgtccgacatggggattttcgatcagatcatgtccaccgggggaggcggtcacgttcagttgttgaagcaggctggagcttttctcacgtattcctcattctgccctccagacgatctagccgaccggggtctgctgggagtcaagagcagcttctatgcgcaggatgccctcagactttgggagattatctatcgctacgtggagggcattgtaagtctccactacaagacggacgtagccgtgaaagatgacccagaacttcagacctggtgcagagagattaccgagattgggcttcagggcgctcaggatcgcggatttcccgtgtctcttcaggctagagatcaggtgtgccattttgtcaccatgtgcatctttacttgcaccggacagcacgcctcggttcacctcggacaactggactggtattcctgggttcccaatgctccttgtaccatgcggttgcctccccctactaccaaggacgcaaccttagagactgtcatggccacattacccaatttccaccaggctagtctgcagatgtctatcacttggcagctgggcagacgacagcctgttatggtggcagtgggccagcatgaagaggaatatttcagcgggcctgagccgaaggccgtcctcaaaaaatttcgagaagaacttgccgctctggataaggagatcgagatcagaaatgcaaagctagatatgccctatgagtatctcagaccttccgttgtggaaaattcggtggcaatttag

SEQ ID NO: 214767 - DNA, 2055 bp, synthetic construct
  misc_feature 1..2055: note = Description of Artificial Sequence: Synthetic coding sequence
  source 1..2055: mol_type = other DNA
atgctgaagaggaatgaatcccaatggctggcccagcggaggcgctccgaaacttccctgtcaaaaatgggcctctatcgcatacgggtgagtaccggcgctagtctatacgcgggttccaacaaccaggttcagctctggctcgtgggccaacatggggaagctgcccttggtaaaaggctgtggcctgctagaggcaaggaaaccgagcttaaggttgaagtgccggagtacctgggaccattgctgtttgttaagctgcgtaagaggcaccttctgaaggatgacgcttggttttgtaattggatttcagtgcagggcccaggagccggtgacgaagtgcggtttccatgctatcggtgggtcgaaggcaacggggtgctgagcctgccggagggaaccgggcgaaccgtcggcgaagacccccaggggctgtttcagaaacatagagaagaagagctggaagaaagacggaagctgtataggtggggcaactggaaagacggtctaatactcaacatggccggtgccaagctctacgacctgcctgtcgacgaacggttcctggaggacaaaagggtcgactttgaggtgagcctggcgaaaggtctggctgatctggccattaaagacagtctaaacgtgcttacttgctggaaggatctggatgatttcaatcggatcttttggtgcggccagtctaagctcgccgaaagggttagagatagttggaaggaggatgccctgttcggataccagttcctgaacggggcaaaccctgtggttcttcgacggagcgcacacctgccagccaggttggtgttccctcccggtatggaggaactccaggcccaactggaaaaggagctggaaggtgggactctcttcgaggcagatttcagccttctggacgggatcaaagccaacgttatcctttgctcccaacagcatctagccgcaccattagtgatgttgaagctgcaacccgatgggaagcttctgcctatggtcattcagctccagttaccacggacggggagcccacctcccccactcttcctgcccaccgacccaccgatggcttggctgttagccaaatgctgggtgaggagcagtgattttcagctgcatgaactgcagtcccatctcctgcggggacacctgatggcggaggttatcgtcgtagctaccatgcgatgccttccatctattcatcccatctttaaactgattatcccccaccttcggtatacactggaaataaacgtaagggctcgaactggcctggtctcggatatggggatattcgatcagatcatgagtaccggtggcggaggtcatgttcagctccttaaacaggcgggagccttcttaacttatagttcattttgtccacctgacgacctggccgacaggggattactaggggtgaaatccagcttctacgcccaggatgctctgcgcctgtgggagatcatctacaggtatgtagaggggatcgtgtcattacactataaaacagacgtagccgtaaaggacgatccggaactccaaacatggtgcagagaaatcacagagattgggctgcagggagcacaggataggggctttccagtttctctgcaggccagagatcaggtatgtcatttcgtgacgatgtgtatcttcacctgcactgggcagcacgcgagcgtgcacctcgggcagctggattggtattcctgggtgcccaatgcaccctgcaccatgcggctgcctccccctacaacaaaggacgctactctggaaaccgtgatggccacactcccaaacttccaccaggccagtttacaaatgagcatcacttggcagctcgggagacgacagcccgtgatggttgctgttgggcagcacgaggaggagtattttagcggacccgagcccaaagccgtgctgaaaaagttccgggaggaattggctgccctcgacaaggaaatcgaaatccgtaacgcgaaactggacatgccatatgagtacctgaggccctcggtagtagagaactctgtggcaatttag

SEQ ID NO: 214768 - DNA, 1989 bp, synthetic construct
  misc_feature 1..1989: note = Description of Artificial Sequence: Synthetic coding sequence
  source 1..1989: mol_type = other DNA
atgggcctttacagaatcagagtatcaactggagcatctctgtacgcaggctctaataatcaggtgcagctctggctcgtgggtcagcatggagaagccgcactgggaaagcgcctgtggcccgcacgaggcaaagagactgaattaaaggtggaggtgcccgaatacctggggccattgctgtttgtaaaacttaggaagcgacacctcctgaaagacgacgcctggttttgtaattggatatctgtgcagggtccgggagccggagacgaagttaggttcccttgctaccgctgggtggaaggcaatggagtgttaagcttgccagaaggcaccggcaggacagtgggagaggaccctcagggcctcttccagaagcatcgggaggaagagctggaggagagacggaagctttacagatggggaaactggaaagatggcctcatattgaatatggccggagccaagctatatgatctccctgtcgacgagcgctttctggaggataaacgcgttgacttcgaggtctcactggcaaaaggacttgccgatctcgcaattaaagatagtctcaatgtgctcacctgctggaaagacctggacgactttaaccggattttctggtgcggtcagtccaagctggcggaacgcgtgcgggatagctggaaggaggatgctctctttggttatcaattcctgaacggagctaacccagtggtgctcaggaggagcgcccacctgcccgctcgtttggtgttcccccctggaatggaggagttgcaggcgcagctggagaaggaactcgagggcggaaccttattcgaagccgatttcagtttactcgatggcatcaaggccaacgtgattctttgctcgcagcagcatctggccgcacccttagtaatgctgaagctgcagcccgacggcaaactcctgcctatggttatccagttgcagctgccaagaactggctccccaccccctccccttttcctcccgacagacccaccgatggcctggctccttgcaaagtgttgggtccggtcttcagattttcagctccatgaattgcagtctcatctgttacgagggcacctgatggcggaagtaatcgtggtggcaacaatgaggtgtcttccgtccatccatccaatattcaagctgataatccctcacttgagatacactctggagatcaacgtaagagcgaggaccggtttggtgtccgatatgggcatttttgatcaaatcatgagcacaggaggcggtggtcatgtccagctgctgaaacaggcaggggcattcctaacatatagtagtttctgtcctcctgatgatctcgccgacaggggcctcctgggcgttaagagtagtttctatgctcaggacgcccttaggctttgggaaatcatctacaggtatgttgagggcatcgtgtccctgcattacaagacagatgttgcggttaaggatgatcccgagctacaaacctggtgtcgcgagattaccgagataggtctgcaaggcgcacaagatcggggattccctgtgtcactgcaggccagggatcaggtctgtcactttgtaacaatgtgcattttcacttgtactggccagcatgcttctgtccacttgggccaactagactggtactcgtgggtcccaaatgcgccttgcactatgagacttcctcccccaacgaccaaggatgcaactctcgaaacagtcatggccaccctaccaaacttccaccaagctagtcttcaaatgtctatcacgtggcagctgggacggagacaacctgtgatggtcgccgtgggtcagcacgaggaggagtatttttccggccctgaacccaaggcagttctcaaaaagtttagagaggaattagctgcccttgataaagagattgagatccgaaatgcaaagctggacatgccgtacgaatacctgaggccgagcgtggtcgaaaattccgtagccatatag

SEQ ID NO: 214769 - DNA, 486 bp, synthetic construct
  misc_feature 1..486: note = Description of Artificial Sequence: Synthetic coding sequence
  source 1..486: mol_type = other DNA
atggaccaggaaactgttggtaatgtagttttgctggccattgtcacacttatcagtgtggttcaaaatggattttttgcccacaaagtggaacacgagtcaaggacccagaacggacgatcctttcagcggactggtactcttgcatttgagagagtgtatacagcgaaccaaaattgcgtggatgcctaccctacatttttggctgtgctctggagtgctggtcttctgtgttcccaagtaccagctgcattcgccggactgatgtacctcttcgtgcgccagaaatactttgtggggtatttgggggagcgcacacagagcactcctggctacatcttcggaaagagaatcatattatttctgttcctgatgtctgtggctggcatatttaactactacctgatctttttcttcggctctgattttgagaactatattaagaccatcagtactactatctcgcccctgctcctgataccttag

SEQ ID NO: 214770 - DNA, 2532 bp, synthetic construct
  misc_feature 1..2532: note = Description of Artificial Sequence: Synthetic coding sequence
  source 1..2532: mol_type = other DNA
atgccccgaggagcatttagaccatgtctccccgcactctacttcgctttcctgacgtgccctacgccagagcagcggatgtccggcactcaggcgccagatatccatttaggcgagcccgctcgagggacaggttgtgtacggggaaaacaaactagcatcagggttcaagactgcggccgtagagaagaggcaagagccgcatctagagagttaaggagggaaaaggcacaggaacaccccagagaaagctgggcccacccccaaccgtaccccgctccacaaccactcgctctcagaccagagacacaaccgtgccccgcatgcagatcatcccccccagggagactactcttacgtccagctctcccgggtcacccctttttactcccgattatggctgtgtaccgtttgtgtgtgaccactggcccatacctccgggctggcaccctcgataatataagtgtcaccctcgtgggtacatgtggcgagtcacccaaacagagactggatcgcatgggcagggacttcgctcctggatccgtccagaagtataaggtgagatgtacagccgagctgggagagctgctccttctcagggtgcacaaagagcgttacgcattcttcagaaaggactcctggtactgctcccgtatttgtgtaactgaaccagacggcagtgtttcacattttccatgctaccagtggatagagggatactgtaccgtggagcttagaccagggaccgctcggacaatctgccaggattctctgcctctgttgctagaccaccgaacacgggagctgagggcaagacaagagtgttatcggtggaagatttacgctcctggctttccctgcatggtagatgtgaacagctttcaggaaatggaatctgacaaaaaatttgcgctaaccaagactaccacctgtgtggaccagggtgattccagcggcaacaggtatctaccagggtttccaatgaagatcgatatcccttctttaatgtacatggaacccaacgtgagatacagcgccactaagaccatttcactcttatttaatgcgattcctgcatctttagggatgaagctcagaggactgttagaccgcaaaggatcttggaagaagctggacgacatgcagaacattttctggtgtcataagacctttacgactaagtatgtcaccgaacactggtgtgaggatcatttttttggatatcagtatttgaacggcgtgaacccagtgatgttacactgcattagctcactcccttctaaattaccggtgaccaatgacatggtggcaccgctgcttgggcaggacacctgccttcagacagaacttgagagaggcaacatttttttagccgactactggatccttgccgaggcccctacacactgtctcaacggaagacaacagtacgtggcagctcccctgtgcctgctgtggctgagtccccagggagcactagttcccctagcaattcagctgtctcagacccctgggcctgacagcccgatcttcttgcctactgactccgaatgggactggctgctggccaagacatgggtgcggaacagcgaatttctcgttcatgaaaacaacacacacttcctttgcacacatctgttgtgcgaggccttcgcaatggcgacactgcgacagcttcctctttgccatcccatttacaagttgcttcttccacacactaggtataccctacaggtaaacactatcgcccgagcaaccttactgaaccccgaagggcttgtggatcaggtcacgtcaatcggaaggcaagggttaatatacctaatgagcacggggctggcccactttacatatacgaatttctgcctgcccgactctctccgcgcaaggggggtactggcaatcccaaactatcactacagggacgacggactgaaaatctgggccgctattgagagttttgtctctgagatagtggggtactactaccccagcgacgcatctgtgcagcaggattcagaactacaggcatggactggcgaaatcttcgcacaggcctttctgggcagagagtcgtctgggttcccaagcagactatgcacccccggtgaaatggtcaaatttttaaccgcgattattttcaactgtagtgcccagcacgctgcagttaactccggccagcacgatttcggggcttggatgccgaatgcccctagctccatgcgccagccaccccctcagaccaagggcactaccacactcaagacatacctggacacgctcccagaggtaaatatttcctgcaacaatcttctgctgttctggctcgtgagccaggaacccaaggaccaacgacccctcggcacatacccagacgaacactttaccgaagaggcccctcgcagatccattgcagccttccaatctcgtttggcccaaatcagtcgggacatccaggagcgcaaccagggacttgctctgccctacacttatcttgacccacccctcattgaaaactctgtgtcgatctag

SEQ ID NO: 214771 - DNA, 2604 bp, synthetic construct
  misc_feature 1..2604: note = Description of Artificial Sequence: Synthetic coding sequence
  source 1..2604: mol_type = other DNA
atgggcaggaacagatcctgggggaccctgggaagtggccgtacatccacaccaggtcaccagtcagggcctctcacccgaaggcgggctgtgtcacagctgtatcgtaggtatttgttgttcagtatctctgcaagcgaccctagcctgcgcagtgggacacaggccccagatatacatctcggagaacctgcacggggtacaggttgcgtccgaggcaagcagacctccattcgtgtacaggactgtggcagacgagaggaagcacgggcagccagcagagagcttcgtcgggaaaaagctcaggaacacccgcgtgaatcttgggctcacccccagccttaccctgcccctcagccactcgccttaagaccagagacccagccatgtccagcctgccgaagctcacctccaggaagactattgcttcgtcctgctctgcctggacacccattcctgctccccatcatggctgtctacaggttatgcgtgacaaccgggccttatctgcgcgcaggaaccttggacaacatttcagtgacgctagtaggtacttgcggcgagagtcctaagcagcgacttgacaggatggggagagactttgccccaggctctgtgcagaaatataaagttagatgtacagctgaacttggggagctactcttgctgcgcgtgcacaaggagcgttacgccttctttcgaaaggattcttggtattgttctcgaatatgcgtgaccgagccagacggatctgtatcacacttcccctgctatcagtggatcgagggctactgtacagttgaacttcgtcccggaaccgcccgaaccatttgtcaggatagtttaccattgctgctggaccatcgcacgcgagaattaagagctagacaggagtgttaccggtggaaaatttatgcacccggtttcccttgtatggtcgatgtgaacagttttcaggagatggagagcgataaaaagttcgcgttgactaagacaaccacatgcgtggatcagggggatagcagcggaaaccggtacctgccaggttttccgatgaaaatagatattccatccttgatgtatatggaaccgaacgtgcgatattcagccacgaaaacaatctcgttgctttttaatgccatccccgcatccttgggcatgaaacttagggggctgctcgatcgtaaagggagttggaagaaactggacgatatgcaaaatatcttttggtgccataaaaccttcacaaccaagtacgtcaccgaacattggtgtgaagatcacttttttgggtaccagtacctaaatggagtgaatcccgttatgctgcactgcatctcctcattgccctctaagcttccagtgaccaatgatatggtggctcctttattgggtcaggacacctgtctccaaaccgagcttgaaagaggaaatatcttcctggcggattattggattctggctgaagccccaacccactgtctcaatgggagacaacagtacgtcgctgcgcctttgtgtctactgtggctctctccgcagggagctttagtccctctggcaatccagttgagtcagacccctggcccagactccccaatctttctgcccaccgattctgagtgggattggctcctggccaagacttgggtccgtaactccgaattcctggtccacgaaaacaatacacacttcctgtgcactcacctgctctgtgaggctttcgccatggctaccctcaggcagctgccactgtgtcaccctatctacaaattgttgctgcctcatacacgatacacattacaggtgaacacaatagccagagccacgttgctgaacccggagggtctcgtggaccaggtcacctccataggccgacaaggtttaatttatttaatgagcacaggtctggctcacttcacatatactaacttctgcctgccagattccctgagggccaggggggtgctagctataccgaactaccactacagggacgacggcttgaagatctgggcagctattgagagttttgtgtctgaaatagttggatattactatcctagcgacgcctcagtgcagcaagactccgagttacaagcatggactggagaaatcttcgctcaggcttttctgggcagggagtcctccgggtttccatcccggctgtgtacaccgggagaaatggtcaagttcctgaccgcaatcatttttaactgctccgctcaacatgccgcagtcaatagtgggcaacatgactttggcgcttggatgccaaacgccccttcctccatgcgccagccccctccacagacaaaaggcacgacgactctcaagacatacttggacacactcccggaggtgaacatctcatgtaataacttgctgctgttctggctcgtctcccaggaacccaaagatcagagacctctgggaacataccccgacgagcattttacagaggaggccccaagaaggtccatcgccgcattccagtcacgactggctcagatttctagagacatacaggagcgtaaccagggtttagcgcttccatatacttatctagaccctccgctgatcgaaaattccgtgtccatctag

SEQ ID NO: 214772 - DNA, 2136 bp, synthetic construct
  misc_feature 1..2136: note = Description of Artificial Sequence: Synthetic coding sequence
  source 1..2136: mol_type = other DNA
atggctgtctacaggctttgtgtcaccaccggtccctatcttcgtgcaggcaccttggacaacatctctgtgactctggtcgggacttgcggggagtcccccaaacagcgcctcgaccggatggggagagacttcgccccaggctccgtccagaaatataaggtgagatgcactgccgaactcggtgagctgcttctcctcagagtccataaggagcggtacgctttctttagaaaagattcatggtattgctcacgcatttgcgtgaccgagcctgatggctcagtgagccatttcccttgctaccagtggattgaggggtactgtaccgtagagttacgcccaggcacagcaaggacaatttgtcaggatagcctaccgctgttgctggaccatcgtacccgggagcttagggctaggcaggagtgttatcgatggaaaatttacgcccctggatttccttgcatggtcgacgtgaacagttttcaggagatggaatctgacaaaaagtttgccctaactaagactaccacctgcgtcgatcagggggatagctctggcaatcgctatcttccaggcttccccatgaagatcgacatcccttcactcatgtacatggaaccgaacgtccggtacagcgcgaccaagaccatatctctactctttaatgccattcccgcaagcttgggcatgaagctgaggggactattagacaggaaaggcagctggaaaaagcttgatgatatgcagaacatattttggtgccacaagacattcactacaaagtatgtcaccgagcactggtgcgaggaccacttctttggatatcagtacctcaacggcgtgaaccctgtcatgttgcactgcatctcgtccttaccctcaaagctgcctgtcaccaatgacatggtagccccactgctcggccaggatacatgtctgcagactgagctggagaggggcaatatctttttggcagactactggatattggccgaagctcctacgcattgtctgaacggaagacagcaatatgtagccgcacccctctgcttactttggctgtcaccccaaggagcattggtgcctttggctatccagctgtcccagacccctggccctgacagccctatcttcctgccgacagactcagaatgggattggctgcttgcaaaaacctgggttcgcaactctgagttcttagtgcatgaaaacaatacacactttctttgtactcaccttctctgtgaggcttttgctatggcaacactacggcagctccctttgtgccatccaatatacaaactcctgctgcctcatactcgctacaccctgcaggttaacactatcgccagggctacattactgaatcccgaggggttggtggatcaggtgacaagcattggcaggcagggattaatctacctcatgagtacagggctcgcccatttcacctacactaacttctgtctgcctgatagcctcagggccagaggtgtcctggccatccctaattaccactatagagatgacggactgaaaatctgggcagctatcgagagctttgtgtcggaaatcgtcggctattactacccgagcgatgcgagcgtccagcaggactcggaactgcaggcttggaccggagagatctttgctcaggcgttcctcggcagagaatcttctggcttcccctcccggctatgcacacccggtgaaatggttaagtttctgaccgccattatctttaattgtagtgcgcagcatgccgctgttaactcggggcagcacgactttggtgcttggatgccaaatgctccatcgtccatgcggcaaccaccccctcaaacaaagggtactaccacactgaaaacgtatttggatacgctaccagaagtgaacataagctgcaacaacctgcttctgttttggctggtgtctcaggagccaaaagaccagcgcccactaggaacatacccagacgagcatttcaccgaagaggcccctcggagatcgattgcggctttccagtctaggctcgctcagattagcagagacatccaggagcggaaccaaggccttgccctgccttacacttacctggatcctccactaatcgaaaacagcgtctctatctag

SEQ ID NO: 214773 - DNA, 759 bp, synthetic construct
  misc_feature 1..759: note = Description of Artificial Sequence: Synthetic coding sequence
  source 1..759: mol_type = other DNA
atggaaccacaatcaatgaaaggccagaaacgcccattcggaggtccatggcgcctgaaagttctcgggggacctccttggctgaggagaactctgcccaagcttgggcgtccaaaagaggccccagtagcgaggatgagtacccagagcacccacccgctcaaacctgaagcccctcgactgcccccaggaatcccggaaagtccttcctgtcagcgcaggcatacgttgcctgcttctgagtttaggtgtctcacccccgaagatgccgtgtcagccttcgagatcgaaagggaagcttttatttccgtgctgggcgtctgtccactgtacctggatgagatcagacactttctcacactgtgtcccgagcttagcctcgggtggtttgaggagggctgtttggttgcattcatcatcggctctctatgggataaagaacggctgatgcaagagtctctgacacttcaccggtcaggaggacacatcgcgcacttacacgtgctggctgttcaccgggcatttagacagcaggggagaggaccaatcttgctgtggcggtatctgcaccaccttgggtctcagccagcggtgcgacgggcagcactaatgtgtgaagacgctctcgtccccttctatgagcgcttctcgtttcacgccgtggggccatgcgctatcaccgtaggatccttgacattcatggagctccactgcagcttgaggggtcacccatttctgaggcggaactccgggtgttag

SEQ ID NO: 214774 - DNA, 624 bp, synthetic construct
  misc_feature 1..624: note = Description of Artificial Sequence: Synthetic coding sequence
  source 1..624: mol_type = other DNA
atgagcactcagtcgacacatcctctgaagccagaggcccctagactcccccctggcatccctgagtccccgagttgccagcgaagacatacccttcccgcaagcgagttcagatgcctgacacctgaggatgctgtgtctgctttcgagatcgagcgggaggctttcatctcagtgctgggggtctgtcctctttacttggatgagattcggcacttcctaacgttgtgccccgagttatcgttggggtggtttgaagagggctgtctggttgctttcattattggctccctttgggataaagaacgactcatgcaggagagcctgacgcttcatcgctctggcggacacatcgctcacctgcatgtactggccgtgcatcgggctttccgccagcaaggaagagggcctattcttctctggcgctatctccaccacctgggctcacagccagctgtgagacgcgctgccctgatgtgcgaagacgctctggtgcctttctatgaacgcttcagctttcatgccgtgggtccctgcgctataaccgtaggtagcctgacgtttatggagctacactgctccctgaggggccacccttttctcaggaggaactcaggctgttag

SEQ ID NO: 214775 - DNA, 1536 bp, synthetic construct
  misc_feature 1..1536: note = Description of Artificial Sequence: Synthetic coding sequence
  source 1..1536: mol_type = other DNA
atggtgttgctggccgctgcagtatgtaccaaggccggtaaggctattgtttcgcgacagtttgtggaaatgacaaggacccgtatcgagggattattagccgcattccccaagttgatgaatactggcaaacagcacacgtttgtcgaaacagagtccgttaggtacgtgtatcagcccatggagaagctgtacatggtcctgattaccaccaagaacagtaacattctggaggaccttgaaaccctgagactgttttctcgagttataccagaatactgcagagctctggaagaaaatgaaatatcggagcattgcttcgacctgatcttcgcgttcgacgagattgtggccctcggctaccgcgagaacgtgaacctagcccagattcgcactttcaccgagatggatagtcacgaagagaaagtgttcagggccgtgcgggagacccaggaacgggaagccaaggccgagatgagacgtaaggccaaggagctgcaacaggctcgtcgggatgcagagcggcagggcaagaaggctcccggtttcggaggcttcggctcttccgctgtctctggtggcagtacagctgctatgatcaccgaaactataatcgagaccgacaagcccaaggttgctccagcccctgccaggccgtctggcccttcaaaagctctgaagctgggcgcaaaaggaaaggaagtggataactttgtggataagctaaagagcgagggggaaaccatcatgtcttctagtatgggaaagcggactagtgaggccactaagatgcatgcacctcctatcaatatggaatccgtgcatatgaagattgaggaaaaaattacactcacctgcggcagggacggcggactgcagaacatggaactgcatggcatgatcatgctcaggatctccgacgacaagtacgggcgtatcaggttacacgtggaaaatgaggacaagaaaggggtacagctgcagacccatccaaatgtggacaagaaactcttcacagcggaatctctaattggccttaagaaccccgaaaaaagctttcccgtgaatagtgatgtgggggtcttaaagtggcggttgcagaccaccgaggaatcttttattcccttgacaatcaattgctggccaagcgaaagtgggaacggctgtgatgtgaacatcgaatatgaacttcaggaggataatcttgagcttaacgatgtggtgatcacgatcccgttgcctagcggtgtgggcgcacctgtcattggagaaatcgatggcgaatatagacacgattcccgaagaaacactctggagtggtgcctgcccgtaattgacgccaaaaataaaagcggtagccttgagttttccattgcgggacagcccaacgacttttttcctgtgcaggtctcatttgttagcaagaagaactactgtaatattcaggtcactaaagttacccaggtcgacggaaacagtcccgtgcgattctccaccgagactacgttcctggttgacaaatacgagatactgtag

SEQ ID NO: 214776 - DNA, 1659 bp, synthetic construct
  misc_feature 1..1659: note = Description of Artificial Sequence: Synthetic coding sequence
  source 1..1659: mol_type = other DNA
atggccgaatgcaacctggtagctatcctcatttctagcattgataaccctctggacaagaatctggataatgggggtaactcctgcttagactttcgacctctgaactcctttagtcagccccaagtgctgctagctgccgcagtgtgtacaaaggctggaaaggccatcgtatctcgccagttcgtggagatgacccggacaagaatcgaagggctcctggcagcctttccgaagctcatgaacaccgggaaacagcatactttcgtcgagacagagagcgttcgatatgtgtaccaacctatggagaagctctatatggtgctgattacaaccaagaactctaatatattggaggatctggagactttaagattatttagtcgtgtaataccggagtattgtcgtgcgctggaggagaacgagatctctgagcattgtttcgatctcatctttgccttcgatgaaatcgtggctctggggtatcgggagaacgtaaatttggcccagatccggacctttacagagatggactctcatgaagaaaaggttttcagagcagtgagagagacccaggaaagggaggcaaaggcggagatgcggaggaaggctaaggagttgcaacaagcccgtagggatgcggagcgtcagggaaagaaggcgccaggcttcggtggattcggatcctccgcagtttctggcggatctactgccgcaatgatcactgagaccatcatagagacagacaaaccaaaggtggctcctgcccctgcccgaccttctggcccaagcaaagccttaaagctaggggcaaaaggaaaggaggttgataattttgttgataagctgaagagtgaaggggaaaccataatgtccagctctatgggtaagcgcacatccgaggctaccaagatgcacgcccctccaataaacatggaatctgtccacatgaagatcgaggaaaaaattactctgacgtgtggcagggatggcggtctacagaatatggagcttcacggcatgattatgctgcggatctccgacgataagtacgggagaatccgactccacgtagaaaatgaagataagaagggagtccaacttcagacacaccccaacgtagacaaaaagcttttcaccgccgagtcgctaattggccttaaaaaccctgagaagtctttccctgtcaattctgatgtgggcgtcctgaagtggcgcctgcagacaacagaggaaagcttcataccccttacgatcaactgctggccctcagagtccgggaacggctgcgatgtcaatatcgaatacgaactccaggaagataatctagagcttaacgacgtggtgattaccatcccgctccccagtggcgtcggagcaccggttatcggtgaaatagacggcgagtacaggcacgattctagaaggaatactctggagtggtgcctgccagtgatcgatgcgaaaaacaaaagcggatctctggaattctctattgccggacagcctaacgacttcttccctgtgcaagtctcattcgtctccaaaaaaaactattgcaacattcaggttactaaagtaactcaggtagacggcaactcacctgtacgcttctccaccgaaaccacgtttctcgtcgataagtatgagatcctttag

SEQ ID NO: 214777 - DNA, 1272 bp, synthetic construct
  misc_feature 1..1272: note = Description of Artificial Sequence: Synthetic coding sequence
  source 1..1272: mol_type = other DNA
atgatccccgaatactgcagagctcttgaggagaatgagatttccgaacattgtttcgatctgatcttcgcctttgacgagatcgtggcactagggtacagagaaaacgtaaatttggcgcagatacgtacttttacagaaatggatagccatgaggaaaaggtatttagggccgtgagagaaactcaagagcgcgaagccaaggctgagatgcggcgaaaagccaaggagctgcagcaggccaggcgggacgccgaacgtcaagggaaaaaggcgccaggctttggtggattcggcagctcagcggtcagtggaggctcgaccgcagccatgatcacagagacaatcatcgagaccgataagcccaaagtggcccctgcccctgcaaggccgtccggtccttccaaagctctgaaacttggggcaaagggcaaggaagtagataactttgtggataagctcaagtcagagggcgagaccatcatgagctcctcaatgggaaagaggacatcggaggccaccaaaatgcacgctccccctatcaacatggaaagtgtacacatgaagattgaggagaaaattaccttgacttgtgggcgagatgggggattgcagaacatggagctccacggaatgatcatgctgcggataagtgatgacaaatatggccgtattagactccacgtagagaacgaggacaaaaaaggcgttcagctccagactcaccccaatgtcgacaagaagctgttcacagcagagagcttgattggtcttaagaatcccgaaaagtcattccctgtaaattctgacgtgggggtgctgaaatggcgccttcagaccacagaggagtcattcattcccctaaccatcaactgctggccatctgagagcggcaacggttgtgacgtgaatattgagtacgagttacaggaagataacctggaactcaatgatgtcgtgataactatccccttaccgtccggagttggagcccctgttatcggggaaattgatggagagtacagacatgatagccgtagaaatacactagaatggtgtctgccagtgattgacgcgaagaataagtctggctcactagagttttctatcgccggtcagcccaacgactttttccctgtgcaggtttcattcgtgagcaaaaagaactactgcaatatccaggtcacaaaagtgacacaggtagatggcaatagccccgtgcgcttctctacagaaacgacatttttggtggacaagtatgaaatactttag

SEQ ID NO: 214778 - DNA, 570 bp, synthetic construct
  misc_feature 1..570: note = Description of Artificial Sequence: Synthetic coding sequence
  source 1..570: mol_type = other DNA
atggtccttcttgcagcagccgtgtgcactaaagccggaaaggctattgtgtcccggcaatttgtggagatgacccggactaggattgagggtttgctggctgcattccctaaactcatgaatacaggtaagcagcacactttcgtggaaactgagagcgtccgctacgtgtaccagcctatggagaagctgtatatggtcttgatcactactaaaaactctaacatcctggaagatctggagacactacggctcttttcgagagtcattcccgagtattgtagggctctcgaggaaaatgagatatccgaacactgttttgatctgatcttcgctttcgacgaaatcgtggccctgggatatcgcgaaaacgtaaacctcgcccagattaggacattcacggagatggactctcacgaggagaaagtctttagggccgtccgggagacccaggagcgcgaagctaaagctgaaatgaggcggaaggctaaggaactgcaacaggctcagtctgtaggtattactgggatgtctcaccacgcccagttgttactctactttaatccgtag

SEQ ID NO: 214779 - DNA, 2223 bp, synthetic construct
  misc_feature 1..2223: note = Description of Artificial Sequence: Synthetic coding sequence
  source 1..2223: mol_type = other DNA
atgaccgtaaagctggatttcgaagagtgtctgaaggattcgcccagattcagagcatcaatagaactggtcgaggcagaagtgtctgagctggagacacgcttggaaaagttgttgaagctgggaactgggctgctcgagagcggacgacattatttagccgcatcccgggcatttgtggtcgggatatgtgatctggccaggctcggaccaccagaaccaatgatggctgagtgtctcgagaagttcacggtttcactgaaccacaagctcgactcccacgcagagctgctagacgcaacacaacacacgctgcaacagcagatccagacccttgtgaaggagggattgagaggcttcagggaagctcgacgcgatttttggagaggggctgagtctctggaagccgctttgacccacaatgccgaggtgccacggcgtcgagctcaggaagcagaagaggccggtgcagcattacgcaccgctcgggcaggttatagaggtagggcactggattacgccctccagatcaatgtcattgaggataaacggaagttcgacattatggagtttgttcttcgcctggtggaagcacaggctacccattttcagcagggacatgaagagctgagtcgcctgtcgcagtaccgcaaggaactaggggctcagctgcatcaactcgtcctgaattcggcacgagagaagcgggacatggagcaacgccacgtgctcctgaaacagaaggagttggggggagaggagccagagccctctttgagagaagggccaggaggacttgtcatggaggggcacctatttaagagggcatccaacgcctttaagacttggagccgcagatggtttaccatccagtccaaccaactcgtctatcagaaaaaatacaaggatccggtaacggtggtagtagatgatttaagactgtgtactgtcaaactatgtcccgacagcgagaggagattctgctttgaggtggttagcacgtccaagtcttgtttactgcaggcagactccgaaaggctgcttcagctctgggtgagtgcagtccagtcgtctattgccagtgctttttctcaagctaggttagatgattctcccagaggacccggtcagggatccggccacttggctataggctccgcggctactctgggaagcggtggcatggctaggggcagggaaccgggtggggtgggccacgtcgttgcacaggtccagtctgtcgacggcaatgcgcagtgttgtgattgtcgcgaacctgctcctgagtgggcgtctattaacctgggggtgaccttgtgcatccagtgttctgggattcatagaagcttaggggttcacttcagtaaggtccgttcactgacactggattcgtgggaacctgagctcgtaaaactcatgtgcgagctaggtaacgtcattattaatcagatttatgaggccagggtcgaagctatggccgtcaaaaagcccggaccaagttgctcacggcaggagaaggaggcctggatccatgctaaatatgtggagaaaaaatttttgacgaagctgcctgagattagaggaagacggggaggtcggggacggcctcggggacagccacccgtgccaccgaagcccagcataaggcctcgcccaggatccttacgctcaaaacccgaaccaccgtctgaggatctaggctcactccacccaggggctctattatttcgggctagcggtcatcctccgtcattaccaacgatggctgatgctctggcccacggcgcagacgtcaattgggttaatggagggcaggacaacgccacaccccttatccaggcaaccgctgcaaacagtctcctagcttgtgaattccttctacagaatggtgccaatgtaaaccaggctgactccgctggccgtgggccactgcatcatgccacgatactggggcacacagggctcgcttgtctgtttttaaagcggggagcggatctcggagcgagagacagcgaaggaagagaccctctgacaatagcgatggagacggcgaacgcagacattgtcaccctgctgcgactggcgaagatgagggaagcagaggccgctcagggccaagcaggagacgaaacttacttggatatctttcgggacttctcccttatggcctctgatgacccagagaaactttcgcgtagatctcacgatctccacaccttatag

SEQ ID NO: 214780 - DNA, 2337 bp, synthetic construct
  misc_feature 1..2337: note = Description of Artificial Sequence: Synthetic coding sequence
  source 1..2337: mol_type = other DNA
atgaagatgacagttgactttgaggaatgtctgaaagattcccctcgctttcgggctgctctggaggaagtggaaggagacgtggcggagctcgaactcaagctggataaattggtcaagctttgcatcgcaatgatcgataccggaaaagcgttttgtgtggccaacaaacagttcatgaatggcatacgggatcttgcccagtattcgtccaatgatgcggtcgtagaaacatccttgacgaagtttagcgatagcctccaggaaatgatcaactttcacacaatacttttcgatcagacccaacgaagtattaaggcccagctccagaactttgttaaagaggatcttcggaaatttaaagacgccaagaagcaattcgagaaggtttccgaggagaaggagaacgctttggtgaagaacgcgcaagttcaaagaaacaaacaacatgaggtagaggaagcgaccaacattctgacagcaacccgtaagtgttttaggcacatagctctggattacgttctacagattaacgtgctccaatccaaaaggaggtccgaaatcctgaaaagcatgctctcattcatgtacgcccatcttgcattctttcaccaagggtatgaccttttttccgaattagggccatatatgaaggacttgggggctcagttggacagactcgtagtagatgcagctaaagaaaaaagggagatggaacagaaacatagtactattcaacagaaggacttcagctccgatgacagcaagctggagtacaacgtcgatgccgctaatggcattgttatggagggctatcttttcaagagggcatcaaatgcgttcaaaacttggaaccggaggtggttcagcattcagaacaaccagctggtataccagaaaaagttcaaagataaccctacggttgttgtcgaggatctccgcctttgcaccgtgaaacattgcgaggacattgagcggagattttgttttgaagtggtcagcccaacaaagtcttgtatgttgcaggctgacagcgaaaagcttcgacaggcctggattaaagcggtacagacctctatcgctactgcgtatcgggaaaaaggtgacgagtctgaaaagcttgacaaaaaaagcagcccctctactgggtcactggactcgggaaacgagagcaaggagaaactcctcaaaggggagtcagcacttcagcgcgtccagtgtatccccggaaacgcctcatgctgtgactgtgggctcgccgaccctaggtgggcctcaattaacctgggaattacattatgcattgaatgtagtgggatacatcgttctctgggagttcacttctccaaggtccgatcgctcacccttgatacatgggaacctgaactcctcaagctgatgtgcgagctggggaatgacgtgatcaaccgggtatatgaagccaacgtggaaaaaatgggtattaaaaaacctcaaccgggacagcgccaggagaaagaagcttacatcagggccaaatacgtcgaacgcaagtttgtggacaaatacagtatctctttaagccctcctgaacagcagaaaaaattcgtttctaagtcttcagaagagaaaagactgagcatctctaaattcggaccaggcgatcaggtcagggcatcagcccaaagctcagtgcggagtaatgactcaggaattcagcaaagcagtgacgatgggagggaatcccttcccagtactgtatcagctaactcactctacgaacccgaaggcgaacggcaggacagctctatgttcttggacagcaagcatcttaatcctggactgcagctgtatcgggctagctacgagaaaaacttaccaaaaatggccgaagcattggcgcacggcgctgacgtaaactgggctaatagcgaggaaaataaggcgaccccgctgattcaggccgtgcttggcggttccctggtgacatgtgagttcctattacaaaacggagccaacgtcaatcagcgggatgtccaaggcagaggcccacttcatcacgcaaccgttctggggcacactggccaggtatgtcttttcctgaagagaggcgctaaccagcacgcgaccgacgaggaggggaaggaccccctgtcgatcgccgtagaggctgccaacgctgatattgtgaccctgctgcgtcttgccagaatgaacgaggagatgcgcgagtccgagggcctatacggacaaccaggggatgagacgtaccaggatatcttccgagatttcagtcagatggccagcaacaaccctgagaaactgaatcgctttcagcaagattctcagaagttttag

SEQ ID NO: 214781 - DNA, 3618 bp, synthetic construct
  misc_feature 1..3618: note = Description of Artificial Sequence: Synthetic coding sequence
  source 1..3618: mol_type = other DNA
atgacgaagaaggaggagcctccacccagcagggtgcctcgcgctgtgcgggtggcaagcctgttgtcggaaggtgaggaattgagcggcgacgaccagggcgacgaagaggaggatgaccatgcctacgaaggcgtgcctaatggaggatggcacacgtcttcactgtctctctccctgccatcaaccatcgctgctccgcaccccatggatggtccacccggtggctccactccagtgacaccggttattaaggcagggtggctggataaaaacccacctcagggctcctacatttaccaaaaacgttgggtgcgacttgacaccgatcacttaagatactttgacagcaataaggacgcatactccaagcgattcatttccgttgcatgcatctctcacgtggcagctattggggatcagaagttcgaggtgataaccaataatcgcaccttcgcgttcagggcagagtccgacgtggagaggaaagagtggatgcaggccctacagcaggctatggccgagcagcgtgcccgagcccgtctgagcagcgcttacctgttgggcgtgcctggctccgaacaacccgaccgcgcagggtctctggaactgagaggattcaaaaacaagctttacgtcgccgtggttggtgataaggtgcagctgtataagaacctggaagaataccacctcgggatagggattacatttatagatatgtccgtgggcaacgtgaaggaagtggatcgcagatcgttcgacttgaccactccataccgcattttcagcttttccgctgacagcgagctggagaaggagcagtggcttgaagccatgcagggcgcaatagctgaagctctctccactagcgaggtcgcagagaggatctgggccgctgctccaaatagattctgtgctgattgcggagctccccagcccgattgggcctccatcaacttgtgcgtggtgatctgcaagcgctgcgccggagagcaccggggtttgggtgccggagtgtctaaggtgcgcagcttaaagatggaccgaaaggtatggacggaaacactcattgaactgttcctccagctgggaaatggggcaggtaaccgcttttgggccgctaacgtccctccaagtgaggctttacagccctcaagctcaccctcaacccgacgttgtcacctggaggcaaaataccgcgaagggaaatatcgccgatatcacccattattcggaaatcaggaggaactcgacaaggcactatgtgctgctgtcacaacaacggacctcgctgagacccaggcactgctcggatgcggcgctgggattaattgcttctccggagacccagaagctcccacaccccttgcgttggcagagcaagctggacagactctacagatggagttcttgagaaacaatagaactacggaagttcctcgcctggatagcatgaaacctctcgaaaagcattactctgtggtcttaccaaccgtttcccattctgggtttctctacaagactgcttctgccggtaagcttctgcaagatcgcagggcaagagaagagttttctcgccgttggtgtgtgctgggagacggcgtgctgtcatatttcgagaacgagcgcgctgtaacccctaacggcgaaatccgtgcctccgaaatcgtatgccttgccgtgccccctcccgatacacatggattcgaacatacatttgaggtttataccgaaggagagcgcctgtatctcttcggcctcgagtctgccgaacaggctcacgaatgggtcaagtgcatcgcaaaagcattcgtacccccattggccgaagacctactcgccagagactttgaacggttgggccgactgccatataaggcagggctgtccttgcagcgcgcacaggaaggctggtttagcctgtccggctccgagcttagagcagtgtttcccgaggggccatgtgaggaacccctccagctgcggaaactgcaagagttatctattcagggcgattctgaaaaccaagtgctagtccttgttgagcgtaggaggaccctttatatacagggcgagagacgcctggatttcatgggctggcttggggcaattcagaaagccgctgccagtatgggcgacacactctctgaacaacagttgggggactctgatattcctgtgatcgtctatcggtgtgtggactacattacccaatgtggcttaaccagcgagggaatttatcgtaagtgcggacagacctctaagacacagcgcctgctggagagtcttcgacaggatgcgcgttcagtgcacctcaaagagggcgagcagcacgtagatgatgtcagtagtgctcttaaaaggttcctgcgcgatctgcccgacggactatttacaagagctcagaggttgacgtggttggaagccagcgaaatcgaagatgaagaagagaaggtcagtcgctacagggaacttcttgtcagactccctcctgtcaaccgtgcaacagtaaaagcacttatctctcacctttattgtgtccagtgtttctctgacacaaatcagatgaatgtgcataacctggccatagtgtttggacccactctctttcagacagatgggcaagattacaaagccggtagagtggtggaagatctcattaaccactacgtggttgttttctcagtcgatgaggaggagttacggaagcagagggaggagatcaccgccatagttaagatgcgcgtggcaggaacagcttcaggcacccagcatgcgggagatttcatatgcaccgtgtatttagaggagaagaaggctgaaaccgagcaacacataaaggtccccgctagcatgactgcggaggaattgacgctcgaaattctggatcggagaaatgttggtatccgggagaaagattactggacatgtttcgaggttaatgaaagagaggaagccgaacgacctcttcacttcgcagaaaaggtccttccgattctccacggtctgggaactgactctcacctggtggtgaagaagcaccaggctatggaagccatgctcctgtatctggcatctagggttggagataccaagcatgggatgatgaagtttcgtgaggatcggtccttgttgggcctgggactcccatccggcggatttcacgaccggtattttatcctcaattcatcctgtctgcgtctctacaaggaggtgcgatcacagcgtccatggtccggcgctccagagacaagccatcgccctgagaaggaatggcctatcaaatctcttaaggtgtatctcggggtgaaaaagaagctgcggccacccacttgttgggggtttaccgttgtgcacgagaccgaaaagcacgagaaacaacagtggtatctttgttgcgatacccagatggagctgagggagtggtttgcaacttttctcttcgtgcagcatgatggactggtgtggccttctgagccgtcccgcgttagtcgcgcagttccagaggtgaggctggggtctgtctccctgatccccctgcggggaagtgagaacgaaatgcgtcggagtgtggcagccttcactgcagatcccctgtccttactgaggaacgtctag

SEQ ID NO: 214782 - DNA, 1884 bp, synthetic construct
  misc_feature 1..1884: note = Description of Artificial Sequence: Synthetic coding sequence
  source 1..1884: mol_type = other DNA
aagtgctgggccgtctgggtgggtgcggtgtggacagagggagcttggcagcccagggtgggggtgatttgcggcctaaagggccgaatgacattatctgggtcccgcggacaggaggagccgccaccatctagagtgccaagggctgtcagagtggcttcactcttgagcgagggggaagagttatcaggggatgatcaaggcgatgaagaagaagacgaccacgcttatgagggcgttccaaatggcggatggcacaccagctctctttcactcagccttccctcaacgatcgcagcccctcatccgatggacggccctccaggaggtagtacgcctgttacccctgttatcaaggccggttggctagacaagaatccaccacagggttcctatatatatcaaaaacgctgggttcgactggatacggaccatctgagatacttcgactctaataaggatgcatacagcaaacgctttataagtgtggcttgcattagtcacgtggccgctattggcgatcagaaattcgaagtgattacaaacaatagaacatttgccttcagggcggagagcgacgtggaacgaaaggagtggatgcaggcccttcagcaggcgatggccgaacagagagcgcgtgcacgattgagtagcgcctatttactgggagtgcctggaagcgagcagcccgatcgggcaggttctctggaactaaggggcttcaaaaacaaactgtatgtagcagtggttggcgacaaagttcaattatataagaacctggaggaataccacctcggcatcgggatcacctttattgacatgtccgttggaaatgtcaaggaggttgaccgcaggagttttgacttaaccaccccctacagaatcttcagcttttccgcagatagcgaactggaaaaggagcagtggctggaagccatgcagggggctatcgctgaagccctgtctacttcagaggtcgctgagagaatttgggctgctgcccctaataggttttgcgctgactgtggcgcaccccagccagactgggctagtatcaacctgtgcgtggtgatttgcaaacgctgcgctggcgagcaccgcggactgggcgctggcgtctccaaggtgaggtctctgaaaatggaccgcaaggtgtggaccgagacattaatcgaactgttcctgcagctaggcaatggagccggaaatcgcttttgggccgctaatgtcccgccatctgaggctctccagcctagctcaagtccatctacacgacggtgccacctggaagccaagtaccgggaaggcaaatacaggaggtaccatccactgttcggaaatcaggaggagcttgacaaagctctatgtgcagccgttacaactacggacctggctgagactcaggcacttctcggctgcggcgcaggtatcaactgtttttctggtgaccctgaggcacctactcctttggcgctcgccgagcaggcaggacagactctccaaatggagttcttaaggaataataggaccaccgaagtcccccgactggactccatgaaaccactggagaaacactatagcgttgtattgccaacagtgtctcacagtggcttcctgtataagacagcttccgcagggaagctgctgcaggacagaagagcaagagaggagttctcacggaggtggtgtgttttgggagatggcgttctgtcgtactttgaaaacgagagggccgtgacgcctaacggtgagatcagggcgagcgaaattgtgtgcctagcagtccccccacctgacacccacggcttcgaacacactttcgaggtgtataccgagggcgaacggctgtatctgtgggcgggagagtgcggggctggatcctag

SEQ ID NO: 214783 - DNA, 4320 bp, synthetic construct
  misc_feature 1..4320: note = Description of Artificial Sequence: Synthetic coding sequence
  source 1..4320: mol_type = other DNA
atggcggaagccggagacgctgccctctctgtggctgaatggctgagagccctgcacctggagcagtataccgggctctttgaacagcacgggctcgtatgggcgactgagtgccaggggcttagcgacactcgcctgatggacatgggtatgctgttacccggacacagaaggaggattctggctgggctgctaagggcacatacctcccccgcacccgcaccgaggccgaccccacgacccgtgcctatgaaacggcacatattccgcagtcctcccgtgcccgctacgcctcctgagcctctgcctaccaccactgaggacgaaggactccctgcagctcctcccatcccgccacgccgttcatgcctcccccctacatgtttcactacccctagtacagcggcacccgacccagtgttgccacccctgcccgctaaacgtcacttggctgagttatccgtgccccctgtcccccctcgcaccgggcctccgcgacttctggtctcacttccaaccaaggaagaggagtcccttcttccatcactaagtagtccgccacagcctcagtctgaagagccactgagtactcttccccaaggcccacctcagccaccatcaccacctccctgcccacccgagatacccccaaaacccgtgcgactttttccagagtttgatgattcagactacgacgaagttcctgaggaaggcccaggagccccagccagggtgatgacaaagaaggaggagcctcctccctcccgcgtgcctagggctgtgcgtgtagcttcgctactatctgaaggggaggaacttagcggagacgaccagggcgatgaggaggaggacgatcacgcatatgaaggcgtccctaatggtggctggcatacctcaagtttgtccctgtcactacccagtaccatagctgccccacacccaatggacggcccacctggcggttctactcccgtcactcccgtgatcaaggcgggttggcttgataaaaatcccccacaggggagctatatctatcagaagaggtgggtcagacttgacactgatcacctgagatatttcgactcaaataaggacgcttacagtaaacgctttatcagcgtggcctgcatcagccacgtcgccgctatcggcgaccaaaagttcgaagtcataacaaataatcgtacgtttgcctttagagccgagagcgacgtggagcgcaaggagtggatgcaagccctccagcaggctatggcggagcagcgggctagagccagactgtcgtcggcctatttgttaggcgtacctgggtcggagcagcccgacagagcaggtagtctagaactgagaggtttcaaaaataagttgtatgtggcagtggtgggcgataaggttcagttgtataaaaacctggaagaataccacctcggcataggcattacctttatcgacatgagcgttggaaacgtgaaggaggtggaccgcaggtcctttgatctgacgactccgtaccgaatattttcattttctgcagatagtgagctagaaaaagagcaatggcttgaagcgatgcagggcgctatcgcagaagctctgagcacgtctgaggttgccgaaagaatatgggcagctgcccctaacagattctgcgccgattgtggtgcgcctcagcctgactgggccagcatcaacctgtgtgtcgtcatttgcaagaggtgtgcaggggagcatcgtggattgggggctggtgtctctaaggtgcgcagtttaaagatggaccgcaaggtatggacagaaacattgattgagctctttttacagcttggcaatggtgctggcaacagattttgggccgcaaacgtgccaccttccgaggccctccaaccgtcatcctcaccaagcactcgccgatgccacctggaagcaaaataccgtgagggaaaataccgcagataccatcccctgtttggtaaccaggaggaacttgataaggccctatgcgcagctgtgacaactacagacctcgcagaaactcaggccctgctaggctgtggagccggtattaactgcttttccggggacccagaagcacccactcccctggccttggctgagcaggccggacagactttacagatggagtttctgcgcaacaaccgcactacggaagtcccacgcctggactcaatgaagccacttgagaaacattattcagtagtactgcctaccgtatcacacagtgggtttctgtacaagactgcgtccgcaggtaaactgctccaggacaggagggccagggaggagttttccaggagatggtgtgtgctgggagacggggtgctgagctacttcgagaatgaaagagccgttacacccaacggagagatccgtgcaagtgaaattgtgtgcttagctgtgccccctcctgacactcatgggtttgagcacaccttcgaggtctacactgaaggtgaaaggctctacctgttcggcctagaaagtgccgagcaggcgcacgaatgggtgaaatgtattgccaaggccttcgtgcccccactcgccgaggacctgctagctcgtgactttgaaaggttaggacggctgccctacaaagccggtctgagcctgcagcgtgctcaggagggatggttttctctgagcggctcagagttgcgcgctgtctttcctgaaggtccatgcgaggagcccctccagttacgaaaactgcaggagttgtccatacagggtgatagcgagaatcaagttctcgttcttgtagagcgtcgacgcactctctacatccaaggagagcgcaggctcgatttcatggggtggctcggagctattcagaaagcagcagccagcatgggcgacacactgagtgagcagcaattaggagattctgacataccagtcatcgtctaccgctgcgttgactatataacgcagtgtggcctgacctctgaaggcatttacaggaaatgtggccagacatccaagacccagcgcttgttagagagtttgcgccaagatgctcggagtgtccacctgaaagagggagaacagcatgttgatgacgtctcttcagccctgaagagatttctgcgcgacctgccagacggactgttcactagagctcagagactgacatggctggaggcttcagagattgaagacgaagaagagaaagtgtcgagataccgtgagctgcttgtgcgactgccacccgtcaaccgcgcaactgttaaggcactgatctctcacctctattgtgtccagtgtttttccgataccaaccagatgaacgtacacaatctagctatagtgttcggtccaaccctcttccagacagatggtcaagattataaggcaggcagagtggttgaagaccttataaaccattacgttgtcgtgtttagtgtagatgaggaggaactgcgcaagcaaagggaggaaataacggccatagtgaaaatgcgggttgctggaaccgccagcggcacacagcatgctggagattttatctgcactgtgtatttggaggaaaaaaaggcagagacagagcagcacataaaggtgccagctagcatgaccgcggaggagctaacactggaaattttggataggagaaatgttggcatcagagaaaaagactattggacatgtttcgaagttaacgagagagaagaggcggagcggccattacatttcgccgagaaagtgctgccaatattgcatggactcggcactgacagccacctggtggtcaaaaagcatcaggcaatggaggcaatgctactctacctcgcctcccgggtcggggacactaaacacggaatgatgaagtttcgcgaggatcgctcccttctcggccttggcctgccgtcaggaggctttcacgatagatacttcattctcaactcctcatgcctccgtctctataaagaggtccgctctcacagaccagaaaaagagtggcccattaagtcgctgaaggtgtaccttggagtaaagaaaaagttgcgcccaccaacctgctggggtttcaccgtggttcacgagacagaaaagcacgaaaaacagcaatggtacctgtgttgcgatacgcagatggagctgcgcgaatggtttgctaccttcctttttgtgcaacacgacgggctggtatggccgtccgaaccatctcgtgtgtcgcgcgcagtgcccgaggtgcgcctgggctcggtgagtctcatacccctccgaggcagcgaaaacgaaatgaggcggtctgtggccgcattcacagccgaccccctcagcctgctgaggaacgtgtag

SEQ ID NO: 214784 - DNA, 3633 bp, synthetic construct
  misc_feature 1..3633: note = Description of Artificial Sequence: Synthetic coding sequence
  source 1..3633: mol_type = other DNA
atgacactgtcagggagcagagggcaggaggagccgcctccatctagagtgcctcgagccgtgcgcgtggcaagcctgttatccgagggcgaagaattgtcgggagacgatcagggagatgaggaagaggacgatcatgcctacgaaggcgtgcccaatgggggatggcatacgagctcactcagcttatcactgccctcaactatagctgcaccacacccaatggacggccctccaggcggaagcacacccgtcacaccggtcataaaagcgggttggctggataaaaacccgccacaagggtcctatatctatcagaagagatgggtcaggctggacacggaccatctgagatacttcgactctaacaaagatgcttatagcaagcgctttatttctgtcgcctgcatctcccacgttgctgctatcggcgatcagaagttcgaagtgataaccaataacaggaccttcgcatttcgcgcagaaagtgacgtagaacgcaaggagtggatgcaggctctgcagcaggcgatggctgaacagagagctcgagctaggctgtctagcgcctatctcttaggggtgccgggttccgaacagccagacagagctgggtcccttgaactgcggggattcaaaaataaactgtacgtcgccgtcgtgggggataaggtgcagctctacaagaatctggaagaataccatcttggcatagggattacgtttatcgacatgtccgtcggcaacgtcaaggaggttgatcgaagatccttcgacttgaccactccctatcgtatttttagctttagtgccgacagcgagctggagaaagagcagtggctggaagctatgcagggtgctatcgccgaggctctttcaacctcggaagtagctgaacgaatctgggctgccgctcctaaccgcttttgcgctgattgtggggcacctcaacccgactgggcctctattaatttgtgtgttgttatttgcaaacggtgcgccggagagcatcgcggtcttggagccggtgtgtcgaaagttagaagtctcaagatggaccgaaaggtctggacagaaaccctcattgagttgtttctgcagctgggcaacggggctgggaatcggttctgggcggctaatgtccctcccagtgaagctctgcagccaagctctagtccaagcacccgaagatgccaccttgaggcaaaatacagggaggggaaatataggcgctaccatcctcttttcggcaatcaagaagaactggacaaggcgttgtgcgccgctgttactactacagacctcgcagagactcaggcactgctggggtgtggtgctggtatcaattgtttctccggcgatcccgaggcacccacccctttagctctagcagagcaggccggacagaccctgcaaatggagttcctacggaataaccggaccactgaagtgcccaggctcgattcgatgaaacccctcgagaagcactatagtgtggtcctcccaaccgtgtctcactccggattcctgtacaaaaccgcatccgccggtaagctcctccaagatcgacgagccagagaagaatttagccgcagatggtgcgtcttgggagacggggtgctgtcctacttcgagaatgaacgcgctgtgacgccaaacggcgaaattcgcgctagcgagatcgtgtgtctcgccgtaccacctcctgatacgcacggctttgaacacacattcgaagtctatactgagggggaacggctgtacctttttggactggaaagcgccgagcaagcacacgagtgggtcaaatgtatcgccaaagcatttgtgccgcctctggccgaagatctgttggctcgcgactttgaacgcctaggcaggctaccctacaaggccggactgtctctgcagcgggcacaagaaggctggttcagtctttccggaagcgaactccgggcagtttttccagaggggccatgcgaagaaccacttcaattgcgcaaactccaggagctctccattcaaggtgattccgagaaccaggttctggtgcttgtggaaagacgtcgcacactgtatatacagggagagcgcaggcttgactttatggggtggttaggggcaatccagaaagccgctgcaagtatgggcgacacactcagcgaacagcagttgggagacagcgacatacccgtgattgtgtatcgctgcgtcgactacatcacccagtgcggcttaacctcggaagggatctaccgtaagtgtggccagacctccaagacacagcggctgttagagtctcttaggcaggatgccaggtctgtgcatctgaaggagggcgagcagcatgtcgatgatgtgtcgtctgcattaaaaagattcctgagagacctacccgacggcctgttcacacgtgcccaacgactaacctggctcgaggcctcggagatcgaagatgaagaagagaaagtgtcccgctaccgcgaactgcttgttcggctgccaccagtgaatcgggctacagtgaaggccctcatttcacacctgtattgtgtgcagtgtttttcagatactaaccagatgaatgtgcataatctggcgattgtgtttggcccaactctcttccagaccgatggccaggattataaggccggtagggtcgtggaggacctgattaaccactacgttgttgttttctccgtagacgaggaagaactgcggaagcagcgggaggaaatcactgctatcgtgaagatgagagtagcaggaacagcctcaggaacccaacatgctggcgactttatatgtacggtttatctggaggagaaaaaggctgaaacagaacagcacatcaaagtacctgccagtatgactgcggaggagctcaccctggaaattctcgatagacgcaacgtaggaatccgcgaaaaagactactggacatgctttgaagtgaacgaacgtgaggaggcggagagaccactgcattttgctgagaaggtcttgcctattttgcatgggctgggaaccgactcccatctcgtggtcaaaaagcaccaggccatggaggccatgctgctctatcttgcgtccagggtgggagacactaaacacggaatgatgaaattcagggaggaccgatcactcctggggttaggcctgccgagcgggggtttccacgatcgctactttattctgaattcttcgtgtttgagactgtacaaagaggtacgtagccagcgaccgtggtcgggcgctcctgagactagccaccggccagaaaaagaatggcctatcaagtcactgaaggtgtatctcggagttaaaaagaagcttaggcccccaacctgctggggtttcacggtggtgcatgaaaccgaaaaacacgagaaacagcagtggtatctctgctgcgacacccagatggagctaagggaatggttcgctacctttctattcgtgcagcacgacggattagtgtggccttctgaacccagccgcgtttctagagcagtgcccgaagtcagacttggttcagtgtctctcattcctctcaggggaagcgagaatgagatgaggcgcagcgtggcggcattcaccgcggaccccctgtccctgctgcggaacgtgtag

SEQ ID NO: 214785 - DNA, 4353 bp, synthetic construct
  misc_feature 1..4353: note = Description of Artificial Sequence: Synthetic coding sequence
  source 1..4353: mol_type = other DNA
atggctgaggccggagacgccgctttaagtgtcgcagagtggttgcgcgctctccacctggaacagtataccggactgtttgaacagcacggacttgtctgggccacggaatgtcagggcctgagcgatactcgccttatggacatgggtatgctattgcctggccatcggcgtaggattcttgccggacttctgcgagctcatacctccccagctccagcaccaagacctacgcccagacccgtgccaatgaagcgtcatatattcaggtctccgccagtacccgctactccgcctgaacctctccctacaaccacagaggatgagggcctcccagccgcaccgcctatccctccccgaaggtcctgtttgccaccgacctgcttcactacccctagcactgctgcccctgaccccgtgcttcccccactgcctgccaaacggcacttagcagagctatcagtgcctcccgtaccacccaggaccggcccaccaaggctgctggtctccctcccaactaaggaagaggagtcgctgttgccttcactgtcaagcccgcctcagccccagtcagaggaaccgctgtccacccttccgcaggggcctcctcagccaccaagccctccaccatgccccccagagattcccccaaagcccgtgagactgtttccagagttcgacgattccgattacgacgaggttccggaagagggtcctggggctccggcacgtgttatgactaaaaaggaggaacctcctccatcccgggtgccgagggccgtaagggtggcctctttgctctcagagggagaagagctgtcaggcgacgaccagggtgatgaagaggaagatgaccatgcatacgagggagttccaaatggcggatggcatacctcatcgctgtccctcagccttccctctaccattgcggcaccacaccccatggacggaccaccgggtgggtccactcctgtgacgccggtgatcaaggccggatggttagataagaatcctccacaggggagctacatctaccagaagcgctgggtcagattggataccgatcacctgcggtattttgattcaaataaagatgcctactctaagcggttcatttccgtggcatgtatctctcacgtcgctgcaatcggtgatcagaaatttgaggtgatcactaacaaccgcacattcgcctttcgtgccgagtccgatgtggagcgaaaagagtggatgcaggccctccagcaggccatggcagagcagagagctcgtgccagactgtcctcggcctacctgctgggtgtgcccggttcagagcaacccgatcgggctggtagtctggagttacggggatttaagaacaagctctacgtagccgtggtgggggacaaagtccaactgtacaagaaccttgaagagtatcacctcggaattggtatcactttcattgacatgtccgttggcaacgtgaaggaagtcgatagacggtcattcgacctaacgacaccctataggatcttcagtttcagtgccgactccgagctagaaaaagagcagtggttggaggcgatgcaaggagcaatcgctgaggcactatctacatctgaggttgccgaacgaatatgggcagccgctcctaaccgtttctgtgccgactgtggagccccacagccggactgggctagcattaacctgtgtgtcgtcatctgtaagcgctgtgcgggagagcataggggactgggtgctggagtaagcaaggtccgaagcctgaaaatggacaggaaggtgtggaccgagacactgattgagttgtttctgcagctggggaatggtgccggtaacaggttctgggcagcgaatgttccaccatcagaggctttgcaaccaagttctagcccctctacgcgcaggtgtcatctggaggctaagtacagggaggggaagtatcgaaggtatcaccccctgtttgggaatcaggaagagcttgacaaggctttgtgtgcagcggttactacgaccgatctggcggaaactcaggccttgctgggatgtggggctggcattaattgtttttctggagatccagaggcaccaaccccgttagcactcgcggagcaggcagggcagacgcttcagatggagttcctcaggaacaaccgcacgaccgaggtgcctaggcttgactcaatgaagcctctggagaagcattattctgtagttttgccaaccgtttcccatagcggcttcctctacaagacggcgtcggccggtaaattgctccaggacaggagggcaagggaggagttttctagacgatggtgcgtgctcggagacggggtcctgagttacttcgagaatgagagagccgtcacacccaacggtgaaataagagcctcagagatcgtgtgtttagctgtgcctccacccgacacacacgggtttgagcacacattcgaagtatacaccgaaggggaacgactgtatttatttggtctggaaagcgccgagcaggcccacgagtgggtcaaatgcattgccaaggcttttgtgccacccttagccgaggacctgctcgcaagagactttgagaggctgggcagactgccctataaagcaggcctgtctcttcagcgtgcacaggagggttggttctccttgagcggttcggagttacgtgcagtttttccagaaggcccttgcgaagagcctctgcagttgcgtaaactccaggagctgtctattcagggtgattcagagaatcaagtgctagtcttagtcgagagacggcgaacactgtacatccagggcgagcgacggctggactttatgggctggctgggagcaattcagaaggccgcagcctccatgggcgataccctctccgagcaacagctgggcgattccgatataccagtgatcgtgtatcgctgcgtggactacataacacagtgtggcttaacctccgagggaatctacaggaaatgcggccagacaagtaagacacagcgattgttggagtctctgcggcaggacgcaagaagcgtgcatttgaaagagggcgagcagcatgtggacgacgtgtcttctgctctaaaaagattcctccgggacctccctgacgggctgtttaccagagcccagcgcctgacctggctggaagcgtctgaaatcgaggacgaagaggaaaaggtgagccggtatagggagctgctggtgcggctgccccctgtgaatcgggctaccgtgaaggctctgattagccatctctattgtgtgcagtgcttctccgatacgaatcagatgaatgtgcacaacttggctatcgtgtttggccctacactgtttcaaaccgacggacaggactacaaggcgggtagagtggtggaggacctgatcaaccactatgtagtcgtgttttcagtggacgaagaagaactgcgaaagcagcgcgaggaaatcacggccatcgtaaaaatgcgggtggcaggaacggccagcggcactcagcacgccggtgacttcatatgcaccgtctatttggaggagaaaaaggcggagaccgaacagcatattaaggtgccagccagcatgacagccgaggagctcactcttgagattttagatagacgaaatgtcggtatcagagaaaaagactattggacctgttttgaggtgaatgagcgcgaggaggccgaacgacccctgcacttcgccgagaaagtcttgccgattttgcacggattgggaactgattctcacctggtggttaaaaaacatcaggcaatggaagctatgctgctctacttggcatctcgtgtgggcgatacaaagcacgggatgatgaaattcagagaggataggtcgctgctggggctgggcctgccttcaggcggattccatgacaggtactttatcctgaactcttcctgcctccggctgtacaaagaagtgaggagtcagcggccatggtcaggcgctccagagacatcccaccgacctgaaaaagaatggcccataaagagtctaaaggtgtacctgggtgtaaaaaagaagctccgccctcccacatgttgggggttcactgtcgtccatgaaacagaaaaacatgaaaaacagcagtggtacctttgttgtgatacacaaatggagttgagggaatggttcgccacattcctctttgtacagcacgacgggctcgtctggccatcggaacccagccgtgtgagtcgggcagtgcctgaggttcgcctgggatctgtgtctttaattccccttcggggatccgagaatgagatgagacggtcagtcgccgcattcacggctgaccccctgtccctactgcgaaatgtgtag

SEQ ID NO: 214786 - DNA, 3402 bp, synthetic construct
  misc_feature 1..3402: note = Description of Artificial Sequence: Synthetic coding sequence
  source 1..3402: mol_type = other DNA
atgacgaagaaagaggagccccctccctccagggtgccacgagccgtgagagttgcctcacttctcagcgagggagaggaactgagcggggatgaccagggggacgaagaggaggatgatcacgcttacgaaggcgtcccaaacggtggatggcacacatcgtctctgtccctttcgcttccttcaactatcgccgcaccccacccaatggacggacctccaggcggatccacgccggtaacacccgttatcaaggccggatggctcgataagaatcccccacagggttcctacatctatcagaagagatgggtgcggttggataccgaccatctgcgctacttcgatagcaacaaagatgcatattcgaaaaggttcatatccgtggcgtgcatatcccatgtggcagctattggcgaccaaaaattcgaagtaatcactaacaataggacatttgcgttcagggccgaatccgatgttgagcgcaaagagtggatgcaggcactgcagcaggccatggcagaacagagagctagggctcggctaagttcagcctatctgctgggagttccaggcagcgagcagcccgatagagcgggttcactagaactgagaggattcaaaaacaagttatatgttgccgtcgttggcgacaaagtccagctgtacaagaacctcgaggagtatcacctgggcattggcataacgtttatcgacatgtccgtcggtaatgtgaaagaagtggaccgcagaagcttcgacctcacgactccatataggatttttagtttttctgctgacagtgagcttgagaaagagcagtggcttgaagctatgcagggagctattgcagaggccctgagtacatcagaagtcgctgaacggatatgggctgctgctccgaatcgcttttgtgccgactgcggggctcctcagccagattgggcctcaataaacctgtgtgtggtgatttgtaagaggtgcgctggcgagcaccggggtttgggcgcaggggtatcgaaggtacggtcgctgaagatggaccggaaggtctggaccgaaaccctcattgaagcattgtgcgcggcagtaactacgactgatcttgcggaaactcaggctcttctgggttgcggagcgggtatcaactgtttctctggagaccctgaagcccctactcctctggccctggccgaacaggcgggacagactctgcaaatggaattcctgcggaataatcggacaactgaggttcccagacttgacagtatgaaacccctggagaagcactatagtgtggtgctaccgacagtttctcattccggctttctgtacaaaaccgccagcgccggtaagcttctgcaagatcggcgagccagagaagaattcagccgcagatggtgtgttctcggggacggggttctttcttactttgagaacgagcgtgcggtaacgccaaatggcgaaatccgcgctagtgagattgtttgcctagcggtgccccctcccgatacccacggattcgaacatacctttgaggtgtacacagagggagaacgtctctatctgtttggcctcgaaagtgccgagcaggctcatgagtgggtcaaatgtattgccaaggccttcgtcccacccctggcggaggacctgctcgctcgggacttcgaacggctgggacggctgccatacaaagccggattaagtcttcaacgggctcaggaaggatggtttagcctgtccggctctgagctgagagccgtgttccccgagggcccatgcgaggaaccactgcagttgcgaaagctgcaggaactgtctatccaaggcgactctgaaaaccaggtgctcgtgctggttgaacgcaggcggaccctgtacatacagggggagaggcggctggactttatgggttggttgggagccatccagaaggcagccgcaagcatgggcgacacattgagtgagcagcagctgggcgattcagacataccagttatcgtgtaccgctgcgtggattatattacccagtgtggtcttacatctgaagggatctatcggaagtgcggccagacatcaaagacccagcggctcctagagtccttgagacaagacgccagatccgtgcatctgaaggagggagagcaacatgttgacgatgtgtcttcagccctgaaaaggttcttgcgggaccttccagacggtcttttcacacgagctcagcggcttacatggttagaagccagcgaaattgaggacgaggaggagaaagttagtcggtaccgtgaactgttggtgagactcccccctgtcaatagggctactgtgaaggccctgatctcccacctgtattgcgtgcagtgtttctcagacaccaaccagatgaacgtgcataatttggcgatcgtgtttggacccaccctcttccagacggatggccaggactacaaggctggccgtgtggttgaggacctgatcaatcactacgtagtggtgttttccgtggacgaagaagaactgaggaagcagagagaggagattaccgccattgtcaagatgagagttgctggaacagccagcggtacccaacatgcaggcgacttcatctgcacagtctatctggaggagaagaaagcggaaacagagcagcacatcaaggttccggcatctatgactgcagaagagctgacgttggagattctggacagacgcaacgttggcatccgggaaaaagactactggacttgtttcgaagttaatgagcgggaggaggctgagagaccattgcatttcgccgagaaagtgttacccatcctgcatggcttggggaccgacagtcatctggtggtgaaaaagcatcaggcaatggaggctatgctgctctacctggcgagtagagtgggcgacaccaaacatggaatgatgaagtttagggaggaccgctcccttctgggcttgggacttcccagtgggggattccatgaccgctacttcattctcaactcctcttgcctgcggctctacaaggaggtgaggtcccataggcccgaaaaagaatggccaatcaaatcactgaaggtatatcttggggtgaaaaagaagctgagaccccctacctgttggggcttcaccgtagtccatgagacggagaagcatgaaaaacaacagtggtatctgtgctgcgatacacaaatggaattgcgagagtggttcgcaacctttctgtttgtgcagcacgacggtcttgtgtggccgagtgaaccgtcaagggtctctagggcagttcccgaggtccgactcggcagcgtgagcctgatccccttaagaggaagtgagaatgagatgcggaggtctgtagccgcttttacggcagaccctttaagcctgcttaggaatgtgtag

SEQ ID NO: 214787 - DNA, 4320 bp, synthetic construct
  misc_feature 1..4320: note = Description of Artificial Sequence: Synthetic coding sequence
  source 1..4320: mol_type = other DNA
atggcagaggccggtgacgcggcattgtcagtggccgagtggcttagagccctgcacttagagcaatataccggactatttgaacagcatggcctcgtgtgggccactgagtgtcaagggctcagcgataccagactgatggacatggggatgctgctcccaggtcacaggcggcgtatactagccggtctcctgcgagcccatacgtctccggctcccgcaccacgcccaacccctaggcccgtcccaatgaagcgccacattttccgatctccgcctgtgcccgctacaccgccagaaccactgccaaccaccacagaggacgagggattgccagcggcaccaccaattccccctaggcgcagttgcttgcctcctacatgtttcaccactccgtccacggcggcacccgatcctgtgcttcccccactacctgctaagcgccacctggccgagctaagcgtgcctccagtcccgcctcggacaggtcctccaaggttgctcgtgtccctgcctacaaaggaggaagagagtctactgccaagcctgagttcgccgccacagcctcagtccgaagagcctctgagtacgctaccacagggcccaccccaaccgccttccccccctccatgcccgccagaaatcccacccaagcccgtcaggctcttcccggagtttgatgattcagattatgatgaagtgcctgaggaaggcccaggcgcacctgcaagggtcatgactaagaaggaggaacctcctccctctagagttccacgggcagtgcgcgtggcatctttattaagtgagggcgaggaactctcaggggatgaccagggggacgaggaagaggacgatcacgcctacgagggagttcctaacggcggttggcacacttccagcctcagtctctcactgccatcgaccattgccgctccgcaccctatggacggcccaccagggggatccactccagttaccccagtgataaaggcgggatggctggataagaacccacctcaagggtcctacatctaccagaagaggtgggtgcgccttgataccgatcatcttagatatttcgacagtaacaaagacgcctattctaagcgcttcatatcagtggcctgcatcagccacgtggcggctatcggggaccagaaattcgaggtgatcactaacaatagaaccttcgctttccgcgctgagtcggatgtcgagagaaaagagtggatgcaggccctgcagcaggccatggcagagcagcgggcacgagctcggttatcctctgcatatttactgggggtgcctggaagtgagcagcctgatcgtgccggtagcctggaattgagaggattcaagaataaactctacgtagctgtggttggagataaggtgcaactctataaaaatctggaagagtaccatttgggcatcggcatcacttttatcgatatgtcagtgggcaacgtgaaagaggtggatcgacgttcatttgacctcacaaccccctatcgaatcttctcttttagtgctgactcagagctcgagaaagagcagtggctcgaagccatgcagggcgcaatcgctgaagcactgtcgacttccgaggtggctgaacggatttgggccgcagccccaaacagattttgtgctgattgcggggcaccacagcccgattgggcgagtattaacctgtgtgtggttatatgtaagcggtgtgcaggagagcatcgcggattgggtgctggtgtctcaaaagtcagatctttaaaaatggataggaaggtgtggaccgagactctgatcgagctgtttctgcagctgggcaacggagccggaaaccgcttttgggcggctaacgttccaccttcggaggccctccagccatccagctcacccagtacacggaggtgccatctggaggccaaatacagagagggcaagtaccgacgttaccaccctttattcggcaaccaggaggagttggataaggcgctttgtgccgctgtcacaactacggacctggctgaaacccaggcactgctcggctgtggagccggaattaactgcttcagcggcgaccccgaagccccaacaccactcgctctggcagagcaggctggtcaaacactccaaatggagtttctaagaaacaatcgaacgaccgaggtccccagattagacagcatgaagcccctggagaaacactactccgtcgtccttccgaccgtctctcactctggattcctctacaagacagcttcagcgggaaagctgctccaggataggcgcgctcgagaagaattcagcaggcgctggtgcgtgctaggtgacggcgtgcttagttactttgagaatgagcgcgcagttacaccaaatggcgagatccgagctagcgaaatagtctgcttggccgtgccacccccagatacccatggcttcgaacacacctttgaagtctatactgagggggagcggttatatctgtttgggctggagtccgccgaacaggcccacgagtgggtgaagtgcatcgccaaagccttcgtaccccctttagctgaagacctgctggccagggattttgaaaggctcggtcgcctgccatacaaagccggactgtccctgcagcgcgctcaagaggggtggttcagtctaagtggaagcgagctgcgagctgtattcccagaaggcccatgcgaggaaccactgcaactgagaaagctccaggagctctctatccaaggcgactctgaaaaccaggtgctcgtgttggtcgaaagacgcaggaccctctacatacagggggaaaggaggttggatttcatgggttggttgggcgcaattcaaaaagccgctgcctcaatgggagatacactgagcgaacagcagcttggggactctgacatcccggtcatcgtgtatagatgcgtggattacattacccaatgtggcctgacatctgagggcatatataggaagtgtggacagacatcgaaaacacagaggttacttgaaagtctgcgtcaggatgcccgatcggttcacctgaaggagggtgaacagcatgtggatgatgtcagtagtgctcttaagcgctttttgcgagatctgccagatggcctcttcaccagagcccagaggctgacctggcttgaggctagtgagatagaggacgaggaagaaaaagtgtcacgctacagggagttgctcgtgaggttgcctcctgttaatagagcgacagtaaaggcactgattagccacctgtactgcgtgcaatgtttctcagataccaaccagatgaacgtgcataatctggcgatagtcttcgggccaaccctgtttcaaacggacggccaagattataaggccggtagggttgtggaggaccttatcaatcactatgtagtggtcttcagcgtggacgaagaggagctcagaaaacagagagaggagattacagccatcgtgaagatgcgagtcgccggaactgcatccggaacacagcacgctggcgacttcatttgcaccgtctatctggaagagaaaaaagccgaaactgagcagcatatcaaggtgccagcctcgatgaccgcggaagagcttacattagagattctggatcgcagaaatgtggggatcagagaaaaggactattggacatgttttgaggttaatgagcgggaagaagctgaacgccctctccatttcgctgagaaagtgctgccaattcttcacggcctgggcactgacagtcaccttgtcgtgaaaaagcaccaggccatggaggctatgctgctgtacctggcatcacgagtgggcgatacgaagcacgggatgatgaagttccgagaagatcggtccctgctgggcctgggcctcccctctggagggttccacgacagatacttcattctgaactccagttgtttgcgactgtataaagaggtccgctctcatagaccagagaaagagtggcccattaagtcacttaaggtttacttgggcgtcaagaaaaagctgcgccctcctacgtgttggggcttcacggtggtgcatgaaactgaaaagcacgagaaacagcaatggtacttgtgttgtgacactcagatggaacttcgggagtggttcgccacctttttgttcgtccagcacgacggcctggtgtggccatctgagccatctcgcgtgtcccgcgcagtgcccgaagtgcggctggggtctgtgagtctgataccattacgcggtagtgagaatgaaatgcgcagatcagttgccgcatttaccgccgatcctctctctcttctcaggaatgtgtag

SEQ ID NO: 214788 - DNA, 5115 bp, synthetic construct
  misc_feature 1..5115: note = Description of Artificial Sequence: Synthetic coding sequence
  source 1..5115: mol_type = other DNA
atgtcatcagtctccgaagttaacgtagacattaaggattttcttatgagcatcaacctggagcagtacttactacacttccacgaaagtggcttcacaaccgtgaaggactgcgccgcaattaacgacagccttctgcaaaaaataggaatctctccaactggccatcgacgccgaatcctcaagcaactacagataattctgtccaaaatgcaagacatccctatctacgccaacgtgcataaaaccaagaagaatgacgacccaagtaaagactaccacgttccttcctctgaccagaacatctgtatagaactgtctaactctgggtctgttcagacatctagccctccacagctggaaaccgtgcgaaaaaatttggaggactccgatgccagcgttgagcgttcacagtatccccaatcagacgataagctgagtcctcctaaacgcgactttccgacagcagaggaacctcacctaaatctgggttctctgaacgacagccttttcggatccgacaatatcaagatcgagagccttatcacaaaaaaaaccgtggatcacactgtggaagagcagcagacagaaaaagtaaagcttataacagaaaacttgtcaaagcttcccaatgcagatagcgagtgcctgagttttgtgggttgctcaaccagcggaacaaattcaggaaatggcaccaatggcttgctcgaaggctcacctcccagcccgtttttcaagttccaaggcgagatgatcgtcaatgacttgtatgtgccttccagtcccattctcgcgcctgttagaagccggagcaaactcgtgtctcggcctagcaggtctttcttactcagacatagaccagtacccgagatcccgggtagcaccaaaggcgtgagcgggagctactttcgagagaggcgtaatgtcgccacctctacagaaaaaagcgtagcatggcagaactccaacgaggaaaacagctcaagcatattcccgtatggcgagacctttctttttcaacgcctggaaaactcgaagaagaggagcatcaaaaacgagttcctgacccagggtgaagctctaaagggcgaggctgctaccgcaaccaactccttcattattaagtcaagcatatatgacaatagaaaggaaaaaatcagtgaagacaaggtggaagatatctggattcctcgggaggacaaaaataattttctcatcgatacggcaagcgagtctgaatattccacagtggaggaatgtttccaatctctgaggcgcaagaattctaaagccagcaagtcccggacccaaaaagccctgatcctcgattccgtcaaccggcattcctaccccctgtccagcacctcaggcaacgctgacagctcggctgtgtcatcacaagccatttccccctacgcatgcttttatggagcgtccgccaaaaaggtgaagagcggatggctggataagctctctcctcagggcaaacgtatgtttcagaaacgctgggtgaagttcgacggtctcagtatcagctactataacaatgagaaagaaatgtatagcaagggaatcatcccactgagcgccatcagcactgttagggtgcaaggggataacaaatttgaagtggtgaccacgcaaagaacgtttgttttccgcgttgagaaagaggaggagagaaatgattggatctccattcttttaaatgccctcaagtcccagtcgttgacgtctcagtcccaagcagtggtgacccctgagaagtgcgggtatctggaacttcggggatataaagccaaaattttcaccgttctgagtgggaatagtgtgtggctgtgtaagaacgagcaggatttcaagtcgggtctgggaataacaataatcccaatgaatgttgccaatgtgaagcaggtggatcgaactgtgaagcagagctttgaaattattacaccatacaggagcttcagcttcacagcagagaccgaaaaggagaaacaggactggattgaggccgtgcagcagagtatcgcggaaaccctgtcagattacgaggtggcagaaaagatttggttcaatgaaagcaaccgaagttgtgctgattgtaaagcacccgacccagattgggcatccatcaatctctgcgtggtaatctgtaaaaaatgtgctggccagcatcgctcactggggccaaaagactccaaggtcaggtccctgaagatggacgctagcatctggtccaacgagctcatcgagctctttattgtgattggaaacaaacgtgccaacgatttttgggccggaaatctacaaaaggatgaagaacttcacatggattcccctgtggagaaacgtaaaaactttatcacccagaagtacaaagaaggtaagtttagaaagactcttctcgcctcacttacgaaggaagagctcaataaggctctgtgcgctgcagtcgtgaagcccgacgtactggaaaccatggcgctgttgtttagtggggctgatgtcatgtgtgccactggtgatccagtccacagtacgccgtatttgctcgccaagaaggccggtcagtccttacaaatggaatttctctaccacaataaattctccgattttccgcagcatgacatacactcagaaggcgtgctctcccaggagtccagtcagtccacctttctctgtgatttcctgtaccaggcacctagcgccgcaagtaagctttcatctgaaaagaaattactcgaagaaaccaataaaaaatggtgcgtgctggaagggggattcctaagttactacgagaacgacaaaagtactacccctaatggaactattaatattaatgaagtcatctgtctggctatccataaggaggacttttatctgaacaccgggcctatatttatcttcgaaatctaccttcccagcgaacgcgtgttcctgtttggtgcagaaacgagccaggcccagcgcaagtggacagaagcgatcgctaagcactttgttccgctgttcgctgaaaacctgacagaagccgattatgacctcataggacagcttttctacaaagattgccacgcactggatcaatggaggaaaggctggtttgcgatggataaatcttcactacatttttgcctgcagatgcaagaggtgcagggtgatcgaatgcacctaaggcggctgcaagaattgactatcagtacaatggtacagaacggggaaaaattggacgtgttactgctggtggaaaaggggagaactctttacattcatgggcatacgaagctggacttcactgtttggcacacagctatagagaaagccgcaggtacagatggaaatgcattacaggaccaacaactttcaaagaatgacgttcccatcatcgtcaattcttgtatcgctttcgttactcagtatggcctgggctgtaagtatatctaccagaagaatggggaccccctccatatttcagagctcctggagtccttcaagaaagatgcacgatcgttcaagttgcgggcaggaaagcaccagctcgaggatgtgaccgccgtgctcaagagctttttgtctgacatcgacgacgccctgctgaccaaggagctttacccctattggattagcgccctggacactcaagacgataaagaaagaattaagaagtatggtgcatttatccgctctcttcccggtgtgaaccgtgccactcttgctgccatcatcgagcacctgtaccgggtccagaagtgctctgagatcaaccacatgaatgcccataacttagccctggtgtttagtagctgcttgtttcagaccaaaggccaaaccagtgaagaggttaacgtgattgaagatctcatcaataattatgttgagatctttgaagtcaaggaggatcaagtcaaacagatggatatcgaaaatagcttcatcacgaagtggaaggacacgcaggtttctcaggcaggagaccttcttattgaagtgtacgtggagaggaaagagccagactgcagtattattattcgcattagccctgttatggaagcggaggaactcactaatgatatattggcaatcaaaaatattatcccgaccaagggggacatctgggccacttttgaagtgatcgagaacgaggagcttgagaggccgcttcattataaggagaatgtgctcgagcaggtgctcagatggtctagcctggccgagcctggctctgcgtatctggtcgtcaaacgatttctcactgcagacaccatcaagcactgttccgacaggtccacactgggttcaattaaggagggtatactcaagatcaaagaggagcccagcaagattctcagcggtaacaaattccaagacaggtacttcgtgctcagagatgggtttctgttcctatataaagacgtcaaatcatccaagcacgacaaaatgttcagcctgagttcgatgaagttctaccgaggggtgaaaaaaaagatgaaaccccctacgtcttggggtctgacagcatattccgagaagcaccattggcacttgtgctgtgactctagtagaacccagaccgagtggatgacatcaattttcatcgctcagcatgagtatgatatctggcctccagcaggaaaggaacgcaaacgcagtattaccaaaaatcccaagatcggcggactgccactcattcccatccaacacgaggggaacgctactctggctaggaaaaacatagagagtgcgagagccgaactggagaggcttcgactatccgagaaatgcgataaagagtccgtggatagctcactgaaggagagagctagtatggtcgcccactgccttgagcacaaagacgataaactgcggaaccggcctcgcaagcaccgcagctttaattgcctggaggacaccgagcccgaagcgcctctggggcagcccaagggccacaagggcctcaagaccttgcgaaaaacagaggacaggaactccaaagccaccttggatagcgatcacaaactccccagccgcgtgatcgaggagctgaacgtggtgctgcaacgtagcagaaccctgccaaaggagctgcaggacgaacagatcttgaaatat

SEQ ID NO: 214789 - DNA, 144 bp, synthetic construct
  misc_feature 1..144: note = Description of Artificial Sequence: Synthetic coding sequence
  source 1..144: mol_type = other DNA
atgtcaagtgtttctgaagtgaatgttgacatcaaagactttctcatgagtatcaatctggaacagtacctgctccatttccacgaaagcggcttcacaactgtgaaggactgtgcagccatcaatgacagcctgctgcagtag

SEQ ID NO: 214790 - DNA, 3399 bp, synthetic construct
  misc_feature 1..3399: note = Description of Artificial Sequence: Synthetic coding sequence
  source 1..3399: mol_type = other DNA
atgagaagctcagccagccgtttgagctctttctcatcccgcgattccctctggaaccgaatgcccgatcaaattagcgtttccgaatttatagcggagactactgaagattacaattctcctactacctcctcctttaccacgcgacttcataattgcaggaacactgttacactgcttgaggaagctctcgaccaggaccgcactgccctgcagaaggtcaagaagtccgtgaaggcaatttataactcaggccaggaccacgtacaaaacgaggagaattacgcgcaagtcctggataaatttggcagcaatttcctctcaagggacaaccctgacctgggaacagccttcgtgaagttttctacgcttaccaaggaactgtccactctgctgaagaacctcttgcagggcttgtcacacaatgtgatcttcacattagactcactcttaaaaggggatctgaaaggggtcaaaggcgatctgaagaaaccttttgacaaggcctggaaggattatgaaacaaaattcacaaagatcgagaaggaaaaacgagaacatgcgaagcaacatggtatgatccggacagagattactggtgctgagatcgccgaggagatggagaaagaaagacgcttgtttcaattgcagatgtgcgagtacctgataaaggtgaatgaaatcaagaccaaaaaaggtgtcgacttgctacagaacctgattaagtactaccacgctcagtgcaacttcttccaggatggcctaaaaaccgcagacaagctgaaacaatacatagagaagctggcagcggatttgtacaacatcaagcagacccaggatgaggaaaagaagcagcttactgccctgcgggaccttatcaaaagctctttacaattggatcagaaggaggcacggcaagactcccaatccagacagggcggttattcaatgcatcagttgcagggaaataaagagtatggaagtgaaaagaaagggtacctacttaaaaaaagtgatggcatcaggaaggtttggcagcgcaggaaatgtagcgtgaaaaacggcatcctgaccataagccatgctactagcaatcggcaaccagcaaagcttaatctcctgacctgtcaggtcaaacctaatgctgaggacaaaaaaagctttgacctgatttctcataacagaacctaccacttccaagccgaggatgaacaggactacgtggcctggatatctgtgctgacaaactccaaggaggaagcactgaccatggcattcaggggggaacagagcgctggagagaactctcttgaagacctgaccaaggcaatcatcgaggatgttcagcggcttcccggaaatgatatctgttgtgactgtggctcttccgagcccacttggctgagcacaaacctggggatactgacatgcattgagtgttccggcatccacagagagatgggggtccatatcagcaggatacaatcactggagctagataagttagggacatccgaactactcttagccaagaatgttggcaacaacagctttaacgacattatggaagcaaatctgccatcaccttctccgaaacctacaccttctagtgatatgaccgtgcgtaaagaatatatcaccgccaaatatgtcgatcataggttctccagaaaaacctgctcgacatcgtcagctaagctcaatgagctgctcgaggccatcaaatctcgcgacctgttagccctgatccaggtgtatgcagagggtgtcgagctgatggaaccccttttggaaccaggtcaagagctaggagaaacagccttgcacctcgctgtgcgcactgccgatcagacgagtctgcaccttgtcgacttcctggttcagaactgtggaaatcttgataaacagaccgcattggggaataccgtgctgcactattgttccatgtattcaaagcctgagtgtctgaaactgttgctacggtctaagcccacggtggatattgtgaatcaggctggagaaaccgccctggacatcgcaaagcgcttgaaagctacacagtgtgaagacctgctctcccaagctaaatcggggaagtttaatccacatgtacacgtggagtatgagtggaatctacgccaggaagagatcgacgagagtgacgatgacctcgacgacaaaccatctcctattaaaaaagaaaggagtcccaggccacagtcattttgccatagctccagcattagccctcaggacaagttagcgttaccaggcttcagcactcctcgcgacaagcagcgactgtcctacggggcatttaccaatcagatattcgttagcacatccaccgactctccgactagcccgacaaccgaggctccacctttgccaccaagaaacgctggtaagggcccaaccggccctccgtccacccttcccctgtctacgcagacctcctcaggttcatccacacttagcaagaaacggccacccccacctccgcctggtcacaagaggacactgagcgacccgccttcccctctcccccatgggccaccgaataaaggtgccgtgccatggggaaacgacggtggacccagcagttccagcaagaccactaataaatttgagggtctgtcgcagcagagcagcacaagcagcgctaagacagctctaggaccccgtgtcctccctaaactccctcaaaaggttgccttaaggaagaccgatcatcttagtctggataaggctaccattccaccagaaattttccagaaaagctcccagcttgccgaactgccccaaaagcccccacctggtgacctgccacctaagccgactgaattagcccctaaaccacagatcggagacctgccgccaaagcccggtgaactacctcctaagcctcagctgggggacctgcccccaaagcctcagttaagcgacttgcctccaaaacctcaaatgaaagatctcccaccgaagcctcagttaggtgacctgctggctaagagccaaaccggggatgtttcccctaaggcgcagcagccctctgaggtgaccctgaagtcccatcctctcgacctctccccgaacgtgcagtcccgagatgcaatccaaaaacaggcttctgaggactcgaatgatctcacccctactcttccagaaaccccggtgcccctgcctagaaaaatcaacactgggaagaataaagttcgccgagtgaagacaatctatgactgccaggcagacaatgacgacgaactcacgttcatagaaggagaagtgatcatcgttacaggggaagaagaccaagaatggtggatcggacacatcgagggccagcccgagcggaaaggtgttttccccgtcagcttcgtgcacatcctgtctgattag

SEQ ID NO: 214791 - DNA, 3390 bp, synthetic construct
  misc_feature 1..3390: note = Description of Artificial Sequence: Synthetic coding sequence
  source 1..3390: mol_type = other DNA
atgaggagcagcgccagccggctgagctcttttagcagccgtgattctctttggaaccggatgccggaccagatatctgtgtccgagtttattgctgaaactaccgaagattacaatagcccaaccaccagctcgtttacaaccaggctccacaactgtcggaatactgttaccttactcgaagaagccctggatcaagatcgtacggcccttcagaaagttaaaaaatctgtgaaggctatatataatagcggccaggatcacgtgcaaaacgaggaaaactatgcccaggtgctcgacaagtttggtagcaatttcctttccagggacaaccccgatctgggtacagcctttgtaaagttctctacactgacaaaagaactttcgacgctactcaagaacctgctccagggcctctcacacaatgtgatcttcactctggacagtctcctgaaaggagacctgaagggcgttaagggcgaccttaagaagccttttgataaggcgtggaaggactacgaaacaaagttcactaagatcgagaaggaaaagagagaacatgctaagcaacatgggatgatccgcacggaaatcacaggggctgagattgcggaggagatggaaaaagaaaggcgcttgtttcagttgcagatgtgcgagtatctgattaaagttaatgaaattaagactaagaagggtgtggacctactgcagaatttaataaagtactatcacgcccaatgcaattttttccaagacgggctgaagacggctgacaagctaaagcagtacatcgagaaactagcggctgacctgtacaacattaaacaaacgcaggacgaagaaaagaaacaacttacagccctcagagatctcattaagtcttcactgcagctggaccaaaaagaggactcccagtccaggcaggggggatactccatgcatcagctccagggcaacaaggagtacggctctgagaagaaaggatatctgttgaaaaaatccgatggaattcgaaaggtgtggcaaaggagaaagtgttctgtgaaaaatgggatcctaactatttcccacgccacaagcaataggcagcccgctaagctgaaccttttgacttgccaggtaaaacccaatgctgaagacaagaagtccttcgatctgattagtcacaataggacataccactttcaggctgaggacgagcaggactatgttgcctggatctccgtcctgaccaactccaaggaggaggccttaaccatggcttttcgaggcgagcagtccgccggtgagaattctctggaagatctgaccaaggcgatcattgaagacgttcaaaggctccctggaaatgacatatgctgcgactgcggttcttctgagccaacttggcttagcacaaaccttggaattttaacgtgtatagagtgttccggcatccaccgcgagatgggcgttcacatatccagaatccaatctctggagctggataaactcggcacctctgagctgctccttgcaaagaacgtcggaaacaactcatttaatgatatcatggaggccaacctgcctagcccctctccaaagcccactcccagctcggacatgacagtcagaaaagaatatatcacagctaagtacgttgaccatagattctctaggaaaacgtgctctacgagcagtgcgaagctcaatgaactattagaggctataaagagcagagatctactggcattgatccaggtgtatgccgagggagtcgagctgatggaacccctgctggagccaggacaggagctgggggaaaccgccttacacctggctgtgcgcaccgcagaccagacatccctgcacctcgtggactttctggttcaaaattgtggtaacctggacaagcagacggcactcgggaacaccgtgctccactattgtagcatgtacagtaaacccgaatgcctgaaactgttacttaggtccaagccaactgtagacattgtgaaccaggctggcgagacagctttggacattgctaaaagactcaaagccacacagtgcgaggatttattgtctcaagccaaatcgggtaaatttaatcctcacgtccatgtggagtacgagtggaatctcagacaggaagagatcgatgaatccgatgacgacctcgatgataagccctcacctattaaaaaggagaggtcgcctagaccccagagcttttgtcatagcagctctattagtcctcaagacaaactcgccctccccggtttctcgacccctagagacaagcagcgattgtcatatggagcctttacaaaccagatttttgtttccacatccacagactctcctacaagcccgactaccgaagccccaccacttccaccgagaaatgcaggtaaaggcccaactggcccacccagtaccctgccgctgtctacccagacctcatccgggagcagcacgctctctaagaagcgacctcctccccctcctcccggacacaaaaggacacttagtgatccaccttcaccactgccacatggccctcctaacaagggggcagtaccgtggggaaatgatgggggaccaagcagttcctccaagaccaccaacaagttcgaggggctgtcccagcaaagctccactagcagtgcaaaaacggctctcggccctagagtcctgccaaagcttccccagaaagtggcactgcgtaagacagaccatttatccttagacaaagccacaattcctccggagatctttcagaaaagttctcagctcgcagagctgcctcagaagccccctccaggtgacctcccacctaagccgactgaacttgcgcctaaaccgcagatcggcgaccttccacccaaaccaggcgaattaccccctaagcctcaactcggtgatctccctccaaaaccccagctctctgatctccccccaaaaccccagatgaaggatctgcctccaaagcctcagttgggtgacttgcttgcgaagtctcagaccggggacgttagtcctaaggcccagcagccaagtgaggtgacccttaaatcccatccgttggatctgagtccaaatgtccagtctcgagacgccattcagaagcaggcctccgaggattccaacgatctcacgcccacccttcccgaaactccggtcccccttcctagaaaaatcaataccgggaaaaacaaagtgagaagggtcaagaccatctatgattgtcaggcagataacgacgacgagctcacgtttattgaaggcgaggttataattgttactggagaagaagaccaagaatggtggatcggacatatcgaaggccagcctgagagaaagggcgtattcccagtgagttttgttcatatactgtctgattag

SEQ ID NO: 214792 - DNA, 3390 bp, synthetic construct
  misc_feature 1..3390: note = Description of Artificial Sequence: Synthetic coding sequence
  source 1..3390: mol_type = other DNA
atgcgatcctctgcttccagactctccagcttttcgagtcgggacagcttatggaataggatgcccgaccagatttcggtgtctgaattcatcgccgaaaccaccgaggactataatagccctactactagctccttcactacccgattgcataactgccgaaatacagtgacacttttggaagaggcgctggaccaggatcggacagccctccagaaggtcaagaagtcggttaaagccatttataacagcggccaggaccacgtccagaatgaggaaaattacgcccaggtgttggacaagtttgggtccaatttcctgtcaagggataaccctgatctgggcaccgcattcgtgaaattcagcacactaactaaagagctgagcaccctgctgaagaacctcctccaaggactaagccacaatgtcattttcacattggacagcttgctgaaaggggacttgaagggggtgaagggcgatctaaagaagccctttgataaggcgtggaaggactatgagaccaaattcacaaagatcgagaaggagaagagggaacacgctaaacagcatgggatgattcgcactgaaatcactggcgcagaaatcgccgaggagatggagaaagagcgtcgactcttccagctccagatgtgcgagtatctgatcaaggtgaatgagatcaaaacgaaaaagggcgtagaccttcttcagaatctcataaaatattaccatgcccagtgcaactttttccaggacggactcaagacagcagacaagttgaagcagtatattgaaaagctggcagctgacctgtataatatcaagcagacccaggatgaagagaagaagcagctcactgccctgagggatcttattaagtcctcactgcagcttgaccagaaagaggactcacagagcaggcaggggggttattctatgcatcaactgcaggggaacaaggagtacggttccgagaagaaggggtacttgctaaagaaatccgatggcatacgcaaggtttggcagcggagaaagtgctccgtcaaaaacgggattctcactatttctcacgcaacctctaaccgccaaccggcaaaactgaacctgctcacctgtcaggtgaagcctaacgcagaggataaaaagtctttcgatctaatctcccacaatcggacctaccattttcaggcggaggatgagcaagactacgtggcatggattagtgtgctgaccaactctaaggaggaggcccttaccatggccttcagaggtgaacagagcgctggcgagaacagtttagaggacctgacgaaggctatcatcgaggacgtccaacgcctgcccggaaacgatatttgctgcgactgcggatcatccgagcccacatggctgtctaccaacctcggcatactaacttgcattgaatgttcgggtattcacagagaaatgggggtgcacatttcccgcatccagtcgttagaactggacaaactcggcacctccgagctgctccttgccaaaaacgtggggaacaatagcttcaatgacattatggaggcgaatctgccctctccgagtcctaaacctaccccctcttcagatatgaccgtccgcaaagagtatatcactgctaaatatgttgaccaccgcttcagccgcaagacttgctccaccagctccgcgaaattgaatgaattactagaggccatcaaatctagggacctcttggctcttattcaagtgtatgcggagggggtggaactgatggaaccgttgttagaaccgggacaggagcttggagagaccgccttgcacctggccgtgcggaccgccgaccagactagtctgcatttggtcgactttctggtacaaaattgtgggaacctggacaaacagactgccctcgggaacacggttctgcactattgctcgatgtatagtaaacccgagtgcctcaaactcttgctgcgttccaaaccgacagtcgacatcgtcaatcaggcaggtgagacagccttagatatcgccaagaggctgaaggctacccagtgtgaggatctgctaagccaggccaaatccggaaaatttaacccccatgtgcacgtagagtacgagtggaaccttagacaggaggaaatcgatgaaagtgacgacgacctagatgacaagccgtctccaatcaagaaggagagatcccctcggccacagagcttctgccacagttccagtatatccccccaggataaattagcactaccagggttttccacacctagagacaagcagcggctttcgtatggtgcattcactaaccaaatctttgtctccacctctaccgatagtcccacgtcgcctactactgaggctcctccacttcctccccgtaatgccggaaagggtccaactgggcctccttctactctgcccctctcaactcagaccagtagcgggagctccacactctctaaaaaacgccctcccccaccaccaccaggacacaagcggaccctctctgatcccccatcaccacttccccacggaccaccaaacaaaggggcagtgccatgggggaacgacggcggaccaagcagttctagtaagacaactaataaattcgaggggttgtcacagcaaagcagcacctcatcagccaagaccgccctagggccacgggtgctgcccaaacttccccagaaggtcgcactgcggaagaccgaccacctaagtctcgataaagctaccatccctccagaaattttccaaaagagtagccagctggctgagttgcctcaaaagccccctccaggagatctgcccccaaagcctactgaactggcccctaaaccgcaaatcggcgacctcccacccaaaccaggtgaattgcccccaaagccgcagctcggggatttacccccaaaacctcagctctctgacctgccgcctaagccgcagatgaaggatctgccaccaaagccccaactgggcgatttactggcaaaaagccaaacaggagatgtcagccctaaagctcagcagcctagtgaggtgactctgaagtcccacccactcgacctctcaccaaacgtgcagtcaagagacgccattcagaaacaggcttcagaggatagcaacgacctgactcccacacttcctgagacacctgtgcccctcccaagaaaaatcaataccggaaagaataaagtccgcagggttaaaacaatttatgactgtcaggccgataacgatgacgaactcacatttatcgagggggaagtgatcattgtaactggagaggaggaccaagaatggtggatcggacatattgaaggccagcctgagaggaaaggagtattcccagtgagctttgtgcacatcctatccgactag

SEQ ID NO: 214793 - DNA, 1065 bp, synthetic construct
  misc_feature 1..1065: note = Description of Artificial Sequence: Synthetic coding sequence
  source 1..1065: mol_type = other DNA
atgtccctgagggggtccctgtctagacttctccaaacccgcgtacattctattcttaagaaatcagtccactctgtggccgtgataggcgcacccttttcccagggccagaagcgcaagggcgtcgagcacgggcctgccgctataagggaggcagggcttatgaagaggctttcatcgctggggtgccatctgaaggatttcggagatctcagctttactccagtacccaaggacgacttatataacaacctgattgtaaaccctcggtctgtcggactggcaaatcaggaactggctgaggtggtcagccgggcagtctccgacggctactcttgtgtgacactgggtggtgaccatagcctggccatcgggaccatttctgggcacgctaggcactgcccagatttgtgtgtggtgtgggtggacgcacatgcggatataaacacacctctaacaacctctagcgggaacttacacgggcaaccagtgagtttccttttgagggaactgcaggataaagtaccacagctgcctggattttcgtggattaagccgtgtatatccagcgcatccatcgtgtacataggactgcgagacgtagacccccctgagcactttatcctgaaaaactacgacattcagtactttagtatgagggatattgatagactgggtatccagaaagtcatggagcgtacatttgatctgctgattggcaaaaggcaacggccaattcacctttcatttgacatcgacgcgtttgaccctacgctagctccagctactggaactccagtggtgggtggcctgacctatagagagggcatgtacatcgcagaggagatccataatacaggcctgctgtccgccctggacctggtggaggtgaacccgcagcttgccacctctgaggaggaggcaaaaacgaccgctaacctggccgtcgatgtcatcgcctctagtttcgggcagacgagggaaggcggtcatatcgtgtacgaccagctgccgacaccatccagcccagacgaatcagaaaaccaggccagggttaggatttag

SEQ ID NO: 214794 - DNA, 207 bp, synthetic construct
  misc_feature 1..207: note = Description of Artificial Sequence: Synthetic coding sequence
  source 1..207: mol_type = other DNA
atgaaattaaacgagaaatttagcgagggttggcgcaaacctaacgcctcgtggaaatcttcatgtagcaagaacagctccgatagagataaattgtctttgccgcacaagaaactggagcggggatcttggcgcgtatggcaaccccgtagtaccctgtgtcgaacactggacaaaacagaagaagagagggccaaaagagagtag

SEQ ID NO: 214795 - DNA, 429 bp, synthetic construct
  misc_feature 1..429: note = Description of Artificial Sequence: Synthetic coding sequence
  source 1..429: mol_type = other DNA
atgaagttgaacgaaaaattcagcgagggctggcgaaagccgaacgccagctggaaatcgtcctgtagtaagaatagctcggacagggacaaattaagcctcccacacaaaaagctcgagagaggcagttggcgggtatggcagcccaggtctaccctgtgtagaactctggacaaaacagaggaagagcgtgccaaacgagaggagctggagcgcatactggaggaaaacaatcggaagatcgcggaggctcaggcgaaactcgcggaagaacagctgagaatcgtggaagagcagagaaaaattcatgaagaacgcatgaagctcgagcaggagagacaaagacagcagaaagaagaacagaagatcattcttgggaaaggtaagagtaggcctaagttgagtttcagtctgaaaacccaggactag

SEQ ID NO: 214796 - DNA, 822 bp, synthetic construct
  misc_feature 1..822: note = Description of Artificial Sequence: Synthetic coding sequence
  source 1..822: mol_type = other DNA
atgggtcgttcaaggtctcggtcatcatcacgttccaagcacacaaagtcttctaagcataataaaaagaggagccgatctagaagtcgatctagagataaggagagagtacgaaaacgatctaagagcagggaatcaaagagaaacaggaggagagagtcccgctccagatcaaggtcaaccaacactgccgtcagccggagagagcgcgaccgcgagcgcgcttcttctcccccagacaggattgatatcttcggtagaactgtgtccaaacgcagttcactggacgagaagcagaagcgggaagaggaggagaaaaaggctgaattcgagcgtcaacgcaagattcgccagcaagagatcgaagagaagcttatagaagaagaaaccgctcgccgagtagaagagctggtggcaaagagggtggaagaggaactagagaaaaggaaggacgaaattgaacgcgaggtgctgagaagggtcgaggaggctaagagaattatggaaaaacagttgctggaagaacttgagcggcagcgacaagctgagctggcagctcaaaaggcccgagaggaggaagagcgcgctaaaagagaggaattagaaagaatcttggaggagaataatcgcaaaatagcggaggcccaggcaaagttagcagaggagcagctgcgcattgtcgaggagcagcgcaaaattcatgaagagcggatgaagctcgagcaagagcggcagagacagcagaaggaagaacaaaaaatcatccttggtaaaggaaaatcaagacccaagctgagttttagcctgaaaacccaggattag

SEQ ID NO: 214797 - DNA, 672 bp, synthetic construct
  misc_feature 1..672: note = Description of Artificial Sequence: Synthetic coding sequence
  source 1..672: mol_type = other DNA
atggggagatcaaggtcacggtcttcatctcggtcaaagcacacaaaatcttcgaagcacaacaaaaaaagggcctcctcccccccagatcgtatagacattttcggtcggaccgtgagcaaacgcagttcactcgatgagaagcagaaacgcgaggaggaggaaaaaaaagctgaattcgagcggcagcgcaaaattagacagcaggaaatcgaggagaagctcatagaagaagagactgccaggagagtggaggaactggtcgccaagagagtcgaagaggagctggaaaagagaaaggatgagattgaacgcgaggtgctccgacgcgtagaagaggccaagcgaattatggaaaaacagctgcttgaggagttagaaagacagagacaggccgagcttgctgctcagaaagcccgtgaagtcaccttaggcagactggagtcacgcgactccccctggcagaacttccagtgctgggtgctcccgccagcacagtttcggaagcggtggaacaccgactacttaattccgttctctagcaagctgaacatagctgccaaagtcaactttctggcatatagcgaagttctcaccgacaacctgaaagttgggagtttttacaaaacatactcccgtatcctcttcgacctgatggaactcgctatctag

SEQ ID NO: 214798 - DNA, 495 bp, synthetic construct
  misc_feature 1..495: note = Description of Artificial Sequence: Synthetic coding sequence
  source 1..495: mol_type = other DNA
atgccggacactatgctgccggcttgctttttagggctgctggctttctcaagcgcctgttactttcagaactgtcctcgaggaggtaagcgggctatgtccgatcttgagttaagacagtgtctcccttgtggcccaggaggcaagggaagatgctttggaccctctatctgctgcgccgacgagcttggctgctttgtcggcacagcggaagcattgagatgtcaggaggaaaactatcttccatccccgtgtcagagtggccagaaggcgtgtggcagcggcggaaggtgcgctgcattcggggtgtgctgcaatgacgagagctgtgtgacagaacctgagtgcagggagggctttcaccgcagggctcgagcctcagaccggtcaaatgccacacaactggacggtccggcaggggcattgctgttgcgattagtgcagttggctggggctccggaaccgttcgagccagcccaaccagacgcttattag

SEQ ID NO: 214799 - DNA, 1257 bp, synthetic construct
  misc_feature 1..1257: note = Description of Artificial Sequence: Synthetic coding sequence
  source 1..1257: mol_type = other DNA
atgcgcttaagtgcaggcccagacgccggtccctccggcaactcaagcccttggtggccgctcgccacaggtgcgggtaacactagtcgcgaggctgaggcgctgggtgagggaaatgggccacctcgtgacgttcgcaatgaggagctcgctaagctcgagatcgccgtgctggctgtgaccttcgcagtcgctgtgcttgggaacagctctgtcttgctggctctccaccgaacaccccgaaagacttcccgtatgcatctcttcatcaggcacctgtccttggcagacttggctgtggcattctttcaggttctgccacaaatgtgttgggacatcacctacaggttccgtggcccagactggctgtgccgagtggtgaagcatttacaagtttttggtatgtttgcctccgcctacatgcttgttgtcatgacagccgataggtacatcgcagtctgccatcctctgaagacactccagcaacctgcccgtcgatctcggcttatgatcgctgctgcatgggtactgagctttgtgcttagcacccctcagtatttcgtgttctccatgattgaagtcaataacgttacgaaggccagagactgctgggcaacttttatacagccatggggctcgcgcgcatatgtcacatggatgaccggaggcatttttgtcgctccggtggtcatcttaggtacatgctacggtttcatctgttacaacatttggtgtaatgtgcggggaaagacagcaagccgccagtctaagggtgccgagcaggctggggtcgcattccagaaaggatttctattggccccttgtgtttcttccgtgaagagtattagtcgcgcaaaaattcgcacggtgaagatgacatttgtcatcgtaacggcctatattgtgtgctgggctccctttttcattatccagatgtggtcggtgtgggatccaatgtctgtgtggaccgaatccgagaatcctacaattacaataacggcattgctcgggtcattgaactcatgctgtaatccttggatatatatgttcttcagcgggcatctacttcaggactgcgtccaaagcttcccctgttgtcagaacatgaaggagaagttcaataaagaagatactgactcaatgtctcgccgacaaaccttttattccaacaatagatcccctactaattccaccggaatgtggaaggactcccctaagtcttcaaagtctattaagtttatcccggtctcaacttag

SEQ ID NO: 214800 - DNA, 1275 bp, synthetic construct
  misc_feature 1..1275: note = Description of Artificial Sequence: Synthetic coding sequence
  source 1..1275: mol_type = other DNA
atggacagcgggcctctctgggatgctaatccaaccccaagagggacacttagtgctcccaacgctacgacaccctggctgggacgagacgaggagcttgccaaagtggagatcggcgtgctcgcgactgtactggttcttgccaccggaggcaacctagccgtgctcctcacactgggccaactcggtagaaaaaggagcaggatgcatcttttcgtgttgcatctggcactgactgacttggccgtggccctattccaggtcctcccccagcttctgtgggatatcacttacagattccagggaccagacctgctgtgtcgcgcagtgaagtacctgcaagtcttgtccatgttcgcctccacctacatgctgctggccatgacactagataggtatctcgcagtctgccatcctttacgctcactgcagcagcctggccagtctacctacctactcattgccgctccttggttgctcgccgcaatattctccttaccccaggtttttatctttagcctgcgcgaggtgatccagggttccggtgtactggattgctgggcagactttggttttccgtggggaccccgtgcctaccttacatggacaacccttgctatatttgtactgccagtgacgatgctgaccgcgtgttatagcctgatctgtcacgagatttgtaaaaatctcaaagttaaaacccaggcctggagagtcgggggtggcggatggagaacctgggaccgtccttcccctagtactcttgccgcaactacccggggtttaccatcaagggtgagttcaattaacactattagcagggctaagatccggaccgtgaaaatgactttcgtgatagtactagcatatattgcttgttgggccccattttttagcgtccagatgtggtctgtgtgggacaagaacgcacccgacgaggacagcactaacgtggcctttacaatttctatgctcctcgggaatttgaattcctgctgtaacccttggatttatatggggtttaactcccacctgctgcccagacccttgcgacacttggcatgttgtgggggtcctcagcccagaatgcgacgccgactgagcgatggatccctttcttcgcggcacactactctcttaaccagaagttcctgtcctgctacactctcactgagtctctcactgacactcagcggccgtcccagaccagaagaatccccgagggatctagagctggcagacggagagggaactgcagagacgatcatcttctag

SEQ ID NO: 214801 - DNA, 1116 bp, synthetic construct
  misc_feature 1..1116: note = Description of Artificial Sequence: Synthetic coding sequence
  source 1..1116: mol_type = other DNA
atgctcatggcatcaacaaccagtgccgtgcccggacaccctagcctcccgtcactcccgagcaattcttctcaggagcggccactagataccagggatcctctccttgccagggcggagctcgcgctgttgtctatcgttttcgtcgccgtcgccttaagcaatggactcgtgttagccgctctcgccaggagaggtagacgcggacactgggcaccaattcatgttttcattgggcacctgtgccttgctgacctcgccgtcgcacttttccaggttttgcctcagctggcttggaaggccaccgacaggtttcggggtccggatgctctgtgtcgcgcagtgaaatacctgcaaatggtcggaatgtacgcttcctcatacatgatcctggcaatgacactcgataggcaccgggctatttgtcggccaatgttggcatatcgtcatggttccggcgcacattggaatagacccgttttggtggcatgggccttttcgctcctgctgagcctcccccagctttttatcttcgctcagagaaatgtcgagggaggctccggggtcaccgactgctgggcctgctttgcagaaccctggggcagacggacatacgtgacgtggattgccctgatggttttcgtcgcccctaccctaggcattgctgcttgtcaggtcttgattttccgggaaattcacgcctccctcgtgcctggcccttccgagaggccaggagggagaagaaggggacgcagaactgggtccccgggtgagggcgctcacgtcagtgcagccgtagccaagacagttcggatgacactcgttatagttgtggtgtacgtgctgtgctgggcaccattcttcctcgttcaactgtgggccgcatgggatcctgaggcgccactcgagggggctccattcgtgctgctgatgctcttggcttcattaaattcttgcacaaacccgtggatctacgcttctttttcctcatccgttagctctgaactccggtccttgctctgttgcgcaagaggcaggactcccccatcacttgggcctcaggacgaaagttgtacaactgcatctagctccctggcgaaggatacttcctcttag

SEQ ID NO: 214802 - DNA, 1116 bp, synthetic construct
  misc_feature 1..1116: note = Description of Artificial Sequence: Synthetic coding sequence
  source 1..1116: mol_type = other DNA
atgttgatggcctcaactacctcagctgtgcctggacacccaagccttccaagtctgccaagtaattcatcgcaggaaaggccattggacacacgggatcccctcctggctcgcgctgagttggcccttttgtctatcgtgttcgtggcagtcgcgctttccaacggactggtcctggctgcactcgcgagacggggtagaagagggcactgggcccctatccacgtctttatagggcacctgtgccttgccgacctggccgtggccctctttcaagtgctgccccagctggcctggaaggccacagatcgctttagaggtcctgatgctctctgccgggctgtgaagtatctccagatggtgggtatgtacgcctcctcgtacatgatcctcgctatgactctggatagacacagagctatctgccgcccaatgctcgcctatcgacatggatctggagcccattggaataggccagtacttgtcgcatgggcattctctctgttgctctccttgccccagctttttattttcgcccagcggaacgtcgagggagggagcggcgttacggactgctgggcatgttttgcagagccttggggaaggagaacttacgtcacctggatcgcactgatggtgttcgtggcgcctaccttaggcattgcagcttgccaggtgttaatctttcgagaaatccacgcctccctcgtgcccggtccctctgaacggcctggaggccgaaggcggggacgaaggacagggtcaccaggcgagggggcacacgtgtcagcggcagtggctaagacagtgagaatgacacttgtaatcgttgtggtatatgtgctctgttgggctccatttttcttggtccagctctgggcagcatgggatcctgaggccccactggaaggggcacccttcgtcctcttgatgctgctagcttcactgaactcttgcaccaatccctggatctatgcgagcttttcgtcaagcgtttcttctgagctaaggagccttctgtgctgcgccagaggcagaacccccccatctctgggtccgcaagatgagtcatgtaccactgcgtctagttctctggccaaggacaccagttcttag

SEQ ID NO: 214803 - DNA, 930 bp, synthetic construct
  misc_feature 1..930: note = Description of Artificial Sequence: Synthetic coding sequence
  source 1..930: mol_type = other DNA
atgctgatggcttcgactacaagtgcagtgccaggacaccccagtttgccatctctgccaagtaacagttctcaggagcggcctcttgatacacgagaccctctgctggctcgcgcagaattggccctgctctccattgtgttcgtggctgttgccctgagcaatgggcttgttctggcagccctggcacgcagggggaggcgtggccactgggctccaatacatgtgtttattggacacctgtgcctggctgatctggcagtcgcgctatttcaagtgttgccacagctagcatggaaagccactgatagattcaggggtcccgatgccctgtgtcgcgcagtgaaatacctccagatggtgggcatgtatgcttctagctacatgatcttggccatgaccctggacagacatcgagctatctgcaggccaatgctggcctaccgccatggaagcggtgcgcattggaaccgccctgtgctggtcgcttgggctttttccttgctgctttcccttccacagcttttcatttttgcccagcgtaacgtcgaaggcggtagcggagtgacggattgttgggcgtgttttgccgaaccttggggccgacgcacgtatgtaacctggattgctctgatggtcttcgtggcccctacattgggaatcgccgcatgccaagttctcatatttcgcgagattcatgctagcttagtgcccggaccttctgagcggccaggtggcaggcgcagaggacgtcggacaggctccccaggggagggagcacacgtgtccgccgctgttgccaagactgtgcggatgactctggtcatcgtcgtggtgtacgtgctgtgctgggctcccttctttctcgtgcagctttgggctgcctgggatcctgaggctccgttagaaggagggtgttccagaggctag

SEQ ID NO: 214804 - DNA, 1005 bp, synthetic construct
  misc_feature 1..1005: note = Description of Artificial Sequence: Synthetic coding sequence
  source 1..1005: mol_type = other DNA
atgggaagacgctcctccgatacagaggaagagagccgcagcaaaagaaagaagaaacatcgcaggcgatctagttcctctagcagctccgactcccgaacctactcgagaaagaaaggaggccgaaagtcccgcagtaagtctcggagttggtccagggatctgcagcctcgcagccacagttacgaccgtaggcgcaggcatcgtagcagttctagctctagctatggttcccgcagaaaacggtcacggtctagatctcggggacgcggtaagagctaccgggtccagcgatcaagatcaaagtcacggacaagacgctctcggagcaggcccaggctgcggtcgcacagtagatcgagcgagagatcatcccatcggagaacaagaagcaggagcagggatcgcgagcgacggaagggtagagataaagagaaacgtgaaaaagaaaaagataaagggaaagataaggagctgcacaacatcaagagaggcgaatccgggaacataaaagcaggcctcgagcacctgccccctgcagagcaagcaaaagcaagactgcagctggtcctggaggccgctgccaaagccgatgaagccttgaaagccaaagagagaaatgaggaagaggccaaaagacggaaggaggaagaccaggctaccttggttgagcaggtaaagcgagttaaggagatcgaggctatcgagagcgacagctttgtgcagcagacctttcgctcgtctaaagaggtgaagaaatctgtcgaaccatcagaagtgaagcaggccactagtacctcaggtccagctagtgctgtcgccgatcctccgtcaacagagaaggaaatagacccgacaagtatccctactgcaattaagtatcaggacgacaatagtttggcacacccgaacctgttcatcgagaaggccgacgccgaagagaagtggtttaagcgcctgatcgcgctgcggcaggagcggctgatgggttctccggtcgcctag

SEQ ID NO: 214805 - DNA, 831 bp, synthetic construct
  misc_feature 1..831: note = Description of Artificial Sequence: Synthetic coding sequence
  source 1..831: mol_type = other DNA
atgggtagacgctcaagtgacacggaagaggagagccgaagcaagcgaaaaaagaagcatcgcaggcgctccagctctagctcaagtagcgattctcgcacttacagccggaaaaaaggcggaagaaaatcccgctcaaaatcccggtcatggtcccgggatttgcagcccaggtctcacagctacgatcgccgtagacgacaccgatcgtcctctagttcttcatatggttcccgacgaaagcgaagcagatcacgcagtaggggacgcggaaagagttatcgggtgcagcgaagccgaagtaaatcacgtacgcggagagagagcggaaatatcaaggcgggtctcgaacatctgcctcccgctgagcaagccaaagcccgactgcagctcgtcctcgaggccgctgctaaggcagacgaagccctcaaagctaaagaaaggaatgaggaggaggcaaaacggcgaaaagaagaggaccaggccacgttggttgaacaggtgaaaagggttaaagagatcgaggcaattgagtctgacagcttcgtgcagcaaacatttcggtcaagtaaggaagtcaaaaagtcagttgaacctagcgaggtaaagcaggcaacctcgactagcggacctgcatccgctgtagccgatcccccaagtaccgaaaaggagattgatcctacctctatccctacagccatcaaatatcaggatgacaattccttagcccatcccaatctgttcattgaaaaagcagacgctgaagaaaagtggtttaagcgcttgatcgcccttcggcaggaacgcctcatgggtagtcctgtagcctag

SEQ ID NO: 214806 - DNA, 831 bp, synthetic construct
  misc_feature 1..831: note = Description of Artificial Sequence: Synthetic coding sequence
  source 1..831: mol_type = other DNA
atgggtcggcgatcctccgataccgaagaggaatctcgctccaagaggaaaaaaaaacataggagacgatcctcgtctagcagctctagtgattcgagaacctactccaggaaaaaaggaggcaggaagtcccggagtaaaagcaggtcctggagtcgggatctgcagccgcgtagccattcctacgaccgtagacggaggcacaggagcagttctagcagcagctatgggtcaaggcggaaaaggagtagatcacggagcagggggcgtggtaagtcataccgggtgcagaggtccaggtcaaagagcaggactcggagagagtcaggaaatattaaagcaggactcgaacatctaccacctgccgaacaggccaaagcacggttacagcttgttctggaagctgcggctaaagccgatgaagccctcaaagccaaagaacgcaacgaggaagaggccaagcgtagaaaagaagaagatcaggcaactctagtagaacaggtgaagagggtgaaggagattgaagcaatagaaagcgattcatttgtacagcaaacatttagatcttcgaaagaagtgaaaaagagcgtcgaaccctctgaagtaaaacaggcgacaagcacctcaggaccagcgagcgctgtggccgacccgcctagcaccgagaaggagattgaccctacatctatacccaccgccataaagtaccaagacgataactcgctggctcacccaaacctcttcatcgaaaaggccgatgccgaggagaaatggttcaaaagactgatcgcccttcggcaagagaggctgatgggcagccccgtggcatag

SEQ ID NO: 214807 - DNA, 612 bp, synthetic construct
  misc_feature 1..612: note = Description of Artificial Sequence: Synthetic coding sequence
  source 1..612: mol_type = other DNA
atggggcgacgctcttcagacacggaggaagagtctcggagcaagcgcaagaagaaacaccgaaggaggagcagctcttcttccagctcagactcccgtacttatagtagaaagaaaggcggaagaaagagtcgcagcaaatcccgctcctggtctagggacctccagcctaggagccattcatacgacagaagacgccgtcatcgaagctcctccagctccagttatggcagccggaggaaacgctccagatcacgctcccgagggagagggaagagttatagagtgcaacgctctaggagcaagtcacgaacaaggcgtagcaggagtcggccacgccttcggtcccacagccggtcctccgaaagaagtagccacaggagaacacgttccaggtctcgggaccgggagaggcgtaaggggcgtgacaaggagaaacgtgaaaaagagaaagataagggcaaggataaagaactacacaacataaaaagaggggagtccggaaacataaaagccggattggaacacttgcccccagctgaacaggccaaggctcgactccaactcgtcctcgaggccgcagctaaagctgacgaggcgctgaaagcgtag

SEQ ID NO: 214808 - DNA, 585 bp, synthetic construct
  misc_feature 1..585: note = Description of Artificial Sequence: Synthetic coding sequence
  source 1..585: mol_type = other DNA
atgggtcgacggtcttccgatactgaggaagaatcacggtctaagcgaaaaaaaaagcaccgcaggaggagctctagctcctcttcaagtgactctaggacttattccagaaagaagggcggtcgcaagagtcgtagtaagtcgcgatcttggagcagagacctgcaaccacgcagccattcctatgatcggaggaggcggcatagatcctcttcctcttcatcctacggttcccgcaggaagaggtcacggtcgcgcagcaggggcaggggaaagtcgtatcgtgttcagcggagcagaagtaagtctagaactagaaggtctagaagccggccacgcctgcgctcccacagccgctcctccgaaaggagctctcacagacgtacgcgcagcaggtctcgggatcgcgaaaggagaaaaggtagagacaaggagaagcgtgagaaagagaaggacaaagggaaagacaaagaactgcataacattaagcgcggagaatcggggaacatcaaagctggactggagcatctgccgcctgctgagcaggcaaaggcacgactccagctggtcctcgaggcagcttag

SEQ ID NO: 214809 - DNA, 1005 bp, synthetic construct
  misc_feature 1..1005: note = Description of Artificial Sequence: Synthetic coding sequence
  source 1..1005: mol_type = other DNA
atgggcagaaggtcgtccgacacagaggaggagagcagatcgaagagaaaaaaaaagcatagaagacgatcgagctcctcttcttcgagcgacagtcgcacctattccagaaaaaaaggaggcagaaaatccaggtccaaaagcagatcatggtctcgcgacttacagccccgttcccactcttatgaccgaagacgaaggcataggagctcgtctagtagcagctatggaagccgcaggaaacgcagcagaagtcgttcccgtggaagaggcaagtcctacagggtgcagcgaagcagaagcaagtctagaaccaggaggagcagatcccgacctcgcctgagatcgcatagtcgcagttccgagcgttctagtcaccggagaactagaagccgctctagagacagagaacgtcggaagggtcgggacaaagagaaaagggaaaaagagaaggacaagggtaaagacaaagagttacataacatcaaacgcggagagtccggaaatatcaaggcagggttggagcatttaccacctgccgagcaggctaaagctcgtctgcagctcgtcctcgaagccgcagcaaaggccgatgaggctcttaaagcaaaggaacgaaacgaagaagaagctaagcggagaaaggaggaggatcaggccacgctggtagagcaggtgaaacgcgtgaaagagatagaggccatcgagtccgacagtttcgtccaacaaactttcaggtcgtccaaagaagtgaagaaaagcgtcgagccatcggaggtgaagcaggctacgtcaacctctgggcctgcgtcagctgtggctgacccgccatccaccgaaaaggaaattgatcccacatcaattcccaccgcaatcaagtatcaggatgacaactccctcgcacacccaaacctctttattgaaaaggccgacgccgaggaaaagtggttcaagagactgatcgccctgcggcaagagagattaatgggcagtcctgttgcttag

SEQ ID NO: 214810 - DNA, 498 bp, synthetic construct
  misc_feature 1..498: note = Description of Artificial Sequence: Synthetic coding sequence
  source 1..498: mol_type = other DNA
atggggcgtcggtctagcgataccgaggaggaatcacggtccaagagaaagaagaaacaccggagacgatcaagtagctcatcaagctctgattcgcggacttattccagaaagaagggcggacgtaagagccgcagcaagagtcgtagttggtcccgcgatctgcagccacgttcccacagttatgaccggagacgtcggcataggtcatcgtcaagttcaagttatggcagtcggcgtaagcggtcacgcagccgctcaaggggtcgtggcaagagttaccgggtccaaaggtcgagatcaaagagccgaacacggaggtctaggagccgcccaagacttcgcagtcactcacggtcttctgaaagaagctcgcataggcgaactcgttccagatcccgagaccgggaaagacggaagggaagggacaaagaaaaaagggaaaaggagaaggataaggggaaggacaaagagctacacaacataaaaagggggtag

SEQ ID NO: 214811 - DNA, 948 bp, synthetic construct
  misc_feature 1..948: note = Description of Artificial Sequence: Synthetic coding sequence
  source 1..948: mol_type = other DNA
atgaggaaccggatggccccagagaacccgcaacctgacccatttattaacaggaattacagtaacatgaaggtgatcccaccacaggaccctgcgtcgccgagcttcacccttttgtcaaagttagaatgctccggcaccgtaagtgcgtactgcagccttaatttgccaggttccaccgacccccctacttccgcatcccgggttgcagccaccacagctattagaagacggcacaaggaacgcacgagcttcacccaccaacagtatgaggagctggaggccttgttcagtcagacaatgtttcctgaccgaaatctgcaggaaaagttggccctacgcctggacctcccagaaagtactgtaaaagtctggttccggaatcgcagattcaaactgaaaaagcaacaacagcagcaatccgctaagcagcgtaatcagatacttccaagcaagaagaatgttcccacaagccccaggactagcccctctccgtacgcattcagcccggtgatctccgacttttattcttctctcccgtcccagcctctagatccgtcaaattgggcatggaacagtacttttactgagtcaagtacatctgacttccagatgcaggatacacagtgggagcgcctcgtggccagcgtacccgcactgtactcggacgcctatgatatctttcagataatagagctctataaccttcccgacgagaacgaaataagctccagtagttttcactgtctatatcagtatttgtcacccaccaaatatcaggttggcggacagggatcaagtctctcgatctttgcagggccagcggtcggcctgagtcccgctcagacatggcctaatatgacttcccaggccttcgaagcatattctttgactgatagcctggagttccagaaaactagcaatatggtggatctggggtttctctag

SEQ ID NO: 214812 - DNA, 4700 bp, synthetic construct
  misc_feature 1..4700: note = Description of Artificial Sequence: Synthetic coding sequence
  source 1..4700: mol_type = other DNA
atgacagctgacaaagataaagacaaagacaaagaaaaggaccgagatcgcgatagggaccgagagcgggaaaagagggacaaagctagggagtccgaaaacagcaggccacggagatcctgcaccctggagggcggtgcaaaaaactatgccgaatctgaccattctgaggacgaagataacgacaacaattcagccacagccgaagagtcaactaagaagaacaagaagaaacccccaaaaaaaaagtcacgctacgaaaggactgacacaggagagatcacatcttacattactgaggatgatgtggtgtatcgacctggggattgcgtctatatcgagtcacggaggccaaacactccatattttatttgctcaatccaagattttaagttagtacataattcacaggcctgttgccggtccccaacccccgcactatgcgatcctccggcatgctccctgcctgtagcttcccagcctccccagcacctgagtgaggccggacggggtcctgtcgggagtaagagagaccacctcctgatgaacgttaagtggtattataggcaatctgaggtgcctgatagcgtttatcagcatctggtccaggatcgacacaatgagaatgactccggacgggagctggtaattaccgatccagtgattaaaaatagagagttgttcattagcgactatgtagatacctatcacgcagccgctttgcgaggaaagtgcaatatcagtcacttttccgatatatttgctgccagggagtttaaagcccgtgtggacagtttcttttacatactgggatataaccctgagacaaggaggctcaatagcacacaaggcgagattagggtgggcccatctcaccaggctaaactcccagatctccagcctttcccctctccagatggggataccgttacccagcacgaagagctggtctggatgcctggcgtgaacgattgtgatttgctgatgtacttaagagcagctcggagcatggcagcattcgcagggatgtgcgatggagggtcaacggaggatgggtgtgtcgccgcttcaagagatgacacgactttaaatgcactgaacaccctgcatgagtcgggttacgatgcgggaaaggccttgcagagactcgttaaaaagcctgtgccaaaactgattgaaaaatgctggacagaagacgaggtgaaacgctttgtcaaaggcctcaggcagtacggtaagaactttttcaggattcgtaaggaactcctccctaataaagagactggagagttgatcacgttctactattactggaaaaaaacacctgaagctgcttcctcccgagctcaccgcagacatcgaaggcaagctgtgtttcgcagaatcaaaacacggacagcaagtacacccgtgaatacaccttctaggccgcctagttcagaatttttagacctaagctctgccagcgaagatgattttgattctgaggattctgaacaggagcttaaggggtatgcatgccgacattgttttacaacaacttctaaggactggcaccatggcggtcgtgagaatatcctactatgtacggattgtcggatacattttaaaaaatacggcgaactcccaccgattgagaaaccagtggatccacctcccttcatgttcaaacctgttaaagaggaagacgatggactcagtggcaagcatagcatgcggactagaaggtcccgtggctctatgagcacactacgctccggtcggaagaaacagccggcttccccggatggcagaaccagtccaattaatgaagacatacggagctcaggtcgcaattccccatcagcagcttcaacttcctctaatgatagcaaggccgaaactgtgaaaaagtccgcgaagaaggtcaaagaagaagcctctagccctttgaaatctaacaagcggcagcgcgaaaaggtggcctcagataccgaagaggcagaccggacatctagcaagaagacaaaaactcaggagatctcccggcctaattctcctagtgagggggagggcgagtcaagcgacagccgatccgtgaacgatgagggaagcagcgaccctaaggacatagaccaggacaatcgcagcacctcacctagtattccttccccccaagataacgagagtgatagcgattctagtgctcagcagcaaatgctgcaagctcagcccccagccctgcaggctccaacgggcgtgactccagcaccttcaagcgctccgccaggaaccccacaactgcccaccccaggcccaacaccatctgctactgcggttccgcctcagggtagtccaaccgcaagtcaggctcccaaccagccccaggctcccaccgctccagtaccgcacacccacatccagcaggctccagccttgcatccccaaagacctccaagcccacaccctccccctcatccgagcccccaccctccactgcaaccactgaccgggtccgcaggccagccaagcgcgcctagccatgcacaaccccctcttcacggtcagggccctcctgggcctcactcactgcaggctggacctctcctgcaacatcctgggccaccacagcctttcgggttgccacctcaggcgagtcaggggcaagcgccactcgggaccagccctgcggcagcctatccccacaccagtctacagctccccgcttctcagtcagcgctccagtcccaacagccgccacgggaacaaccactcccacctgcccctctcgccatgccccacatcaagcctcccccaacaacccccataccacagctcccagcccctcaggctcacaagcaccccccacatttgtccggcccttctccattctccatgaacgctaatttgccaccaccccctgcactgaaacccttgtcctctctgagcacccatcaccccccttctgcacatcccccacccttgcagctaatgccacagagtcaacctctccccagctccccagcacagccacccggactaacacagagtcagaacctgcctcctcctccagcttcccacccccctactggattgcatcaggtagcccctcaacccccattcgcacagcacccgttcgtgcctggagggcctcccccaatcacaccaccaacgtgtccgagtacatctactccgccagcgggtccgggaacaagcgcccagcctccctgttccggagcagctgcatccggtggcagtatcgccggtggaagtagttgccctctgcctactgtacagatcaaggaggaggctttggacgacgcagaagagccagagtctccacctcctccgcctaggagcccgtcacctgaacccacggtcgtcgacaccccatcccacgccagccagagcgccaggttctacaaacatctcgatcgcggatacaactcttgtgcgagaaccgatctctattttatgccccttgccggatccaagctcgctaagaagcgggaagaggccatcgaaaaagcaaaacgagaagccgaacagaaggcacgagaagagagggagcgagagaaagaaaaggagaaggagcgcgaacgggaaagagagagggagcgagaggcagagagagcagctaaagccagctcgagtgctcacgagggcagattaagtgatccccagctgtctggtcctggacatatgaggccttccttcgagccccctccaacgaccatcgctgccgtgcctccgtatattggacctgacactccagctcttcgaaccctgtccgagtacgccagacctcacgtaatgtccccaacaaacaggaatcatccgttttacatgcccctgaatccgaccgacccgttgctggcataccacatgcctggcctttataatgtggatccgacaataagggaacgggagctacgggagcgcgaaatacgcgaaagggaaatcagggaaagggagctcagagagcgaatgaaacctggatttgaagtaaagccgccagagttggatccactgcatccagccgcaaaccctatggagcactttgccagacacagtgcccttactatcccccctaccgccggtcctcatccctttgcctcattccaccctgggcttaatcctctcgagcgggaacggctggccttggccggacctcagttgcggcctgagatgtcttatcccgaccggctggcggcagagaggatacacgctgaaaggatggcatccctcacctctgacccactcgccagacttcagatgttcaatgtgacccctcatcatcatcagcactcccacattcattctcatctgcatctgcaccagcaagaccccctgcaccaaggatctgccggtccagtccaccctcttgtggaccccttgaccgccggaccccatctcgccaggtttccgtacccacccggtactctgcccaacccactccttggtcagccccctcacgaacatgagatgctccgacatcccgtttttggtacaccgtaccccagggatctgccaggcgctatcccaccgccaatgagtgccgctcaccagttacaggccatgcatgcccagagcgccgagctgcagcgcttagctatggagcagcagtggttacatggacaccctcatatgcacgggggacatttgccatcacaggaggactactactctcggctgaaaaaggagggcgataaacaattgta

SEQ ID NO: 214813 - DNA, 3897 bp, synthetic construct
  misc_feature 1..3897: note = Description of Artificial Sequence: Synthetic coding sequence
  source 1..3897: mol_type = other DNA
atggacgacccttttagtccctgtagacgcctaaatagcacacaaggcgaaatacgtgttgggccttcccaccaagcaaagctgcccgacctgcagcccttcccctctcctgacggcgacactgttacacaacatgaggagctggtttggatgcctggagtcaacgattgcgatctgcttatgtatttgcgcgctgcccgtagcatggctgcatttgctggaatgtgcgatggtggatcaaccgaggatggttgcgtggcggcttccagggacgataccacactcaacgccttaaacacattacacgagtccgggtacgatgcaggaaaggcactgcagaggcttgtgaagaagcctgtccccaaattgatcgaaaagtgttggacagaggacgaagtgaaacggtttgtgaagggactgcgacagtatgggaaaaactttttccgcattcggaaagaactactgccaaacaaagaaactggcgaactaattaccttctactattattggaaaaagacacccgaggctgcctcttctcgcgctcacaggcggcatagaaggcaggctgtattccgaaggatcaagacccgaaccgcttccaccccagtgaataccccgtctcggcctcccagcagcgagttcctcgacctgagctccgcatcagaagacgattttgattccgaggatagcgagcaagagttaaaggggtatgcatgccgtcactgcttcactactaccagtaaagattggcaccacggaggcagggagaacatactgctctgcacagactgtaggatccacttcaagaagtatggggagctcccccctattgaaaaacccgtggatccccctcccttcatgttcaagcccgtcaaggaggaagacgacggtctatctggcaagcactccatgagaacacgaagatcccgcggatccatgagtaccctgagaagcggacggaagaagcaacctgcttcacctgacggtagaacttcaccgattaacgaagatattagaagctccgggcgaaattctccatcagctgctagcactagttcaaatgactccaaggcagagactgtgaaaaagtctgccaagaaggttaaagaagaggcatcatccccactgaaaagcaataaaaggcagcgcgaaaaggtggcttcggacaccgaagaagccgataggaccagcagtaagaaaacaaaaacccaagagatctctcggcctaactctccctcagagggtgagggcgagtccagcgattctaggtcagtgaacgacgagggctcgtctgaccctaaggacatcgatcaggacaacaggagcacctcaccgtccataccatccccacaagataacgaaagcgatagcgattcttcagcgcagcagcagatgcttcaggcacagccacctgctctgcaggccccaacaggcgttactcccgcaccatcatccgcccctcctgggacacctcagctgcccactcccggtccaacaccgtctgcgacagccgtgccaccgcaaggctcacctacggcatctcaggccccaaatcagccacaggctccaactgcgcctgtcccacacacccacatccaacaggccccagcccttcatccacagaggcctccatccccccatcctccaccccacccgtccccccaccctcctctccagcccctgaccggctccgcaggacagccttccgccccttctcatgcacagcccccacttcatggtcaggggccacccggaccacactcactacaagcgggtccactccttcagcaccccggacccccacagccgtttgggctgcctccccaggcaagccaggggcaggccccactcggcaccagtccagcagccgcttaccctcacacctcattacaactcccagcgagccaatcagcccttcagtctcagcagcctcccagagaacagccccttcctcctgccccactcgcgatgcctcatattaagcccccacctaccacacctatcccacagttgcctgctccacaggcgcataaacaccctccgcacctgtccggtccctcccctttctcgatgaacgctaacctgccgccacctcccgctttgaaaccgctctcctcactgagtacccaccacccgccaagtgcacacccccctccactgcagttaatgccacagagtcagcccctgcctagctccccagctcaaccgcctggcctgacccagtctcaaaacctgccacctccacctgcatcccaccctcccactggtctgcatcaggtcgcacctcagccccctttcgcacagcacccttttgtgcccggaggcccacccccaattacaccacctacatgcccgtcgactagcactcccccagcaggtcccggtactagcgcacaacctccatgttctggtgctgccgcatccggtggaagcatcgctggtggctctagctgcccccttccaacggtccagattaaagaggaggctctggacgacgcagaagaacccgaaagccccccaccacctccacgttccccctcacctgaacccactgtcgtcgacacaccatcacacgcgagccagagcgccaggttttacaagcatctggacagaggttacaactcgtgtgcgaggacagatttatacttcatgccgctcgctggctcaaagctggccaagaaacgggaggaggctatcgagaaggccaaacgggaagcagagcaaaaggcgcgagaagagcgagagcgtgagaaggaaaaggagaaggagagagaacgggagcgagagcgtgagagagaagccgagcgagcagctaaggccagttcttccgcccacgagggaaggcttagtgatcctcagctgagcggcccaggccacatgaggccatccttcgagccccctcccactacaatcgctgccgtgcccccttatattggccctgacactccagccctcagaactctgtccgagtacgcacggcctcacgtgatgtcccccaccaaccgcaatcatcccttttatatgcctcttaaccctaccgaccccctactggcttatcatatgcctggactgtacaatgtggaccccacgattagagaaagagagttgcgcgagagagaaattagagaaagggagatacgcgaacgagaactgagggagcgaatgaaacccggattcgaagtcaaacctcccgagcttgaccccctgcaccctgccgctaacccgatggagcacttcgctcgccattcggctttgactatcccacccaccgcagggcctcacccattcgcaagctttcatccaggcctcaaccctcttgaacgagaacggctggcccttgcagggcctcaactccggcctgaaatgtcttatccagatcggctggccgcagagagaattcacgccgagagaatggcctctctgacctccgaccccctagccaggctgcagatgtttaacgtcaccccacatcatcaccagcatagccatattcacagtcacctacacctccatcaacaggacccccttcaccagggctcagccggacctgtccatccgctcgtggacccactcacagcagggcctcatctcgcaaggttcccgtatccccctggcaccctaccgaatcccttgctcggtcagcccccacacgagcacgaaatgttacggcaccccgtcttcggaactccctacccaagggatctcccaggcgcaatccccccacccatgtctgccgctcaccagttgcaggccatgcacgcacagtcagcagagctccaaagactcgctatggagcagcagtggttgcacggccacccacatatgcacgggggtcacctgccaagccaagaagattattactcccgactgaaaaaagaaggcgacaagcagctatag

SEQ ID NO: 214814 - DNA, 4701 bp, synthetic construct
  misc_feature 1..4701: note = Description of Artificial Sequence: Synthetic coding sequence
  source 1..4701: mol_type = other DNA
atgactgcggacaaagataaagacaaagacaaggaaaaagatagagatcgggatcgcgatagggagcgggaaaagagagacaaagctagagagtccgagaattcgcgaccacgccgatcttgcaccctagaaggaggcgcaaagaattatgcagagtctgaccacagtgaagatgaggataacgacaacaacagtgctaccgcggaagagagcacaaaaaaaaacaagaagaagccaccaaaaaagaagtccagatacgaacgtaccgacacaggtgaaattacgagttacattaccgaggacgatgtcgtgtatcggcctggagattgtgtctacatcgaatcccgacggccaaataccccttacttcatttgctctattcaggactttaagctggtgcacaacagccaggcgtgctgtaggtcccctacccccgctctgtgcgatccccctgcctgttctcttcctgtggcgagtcagcccccacagcatctcagcgaagctggacgaggccctgtgggcagcaaacgtgatcacctcttgatgaacgtcaagtggtactaccgccagagcgaggtgccagattctgtgtaccagcacctggttcaggaccggcacaacgagaatgattctggcagggaactcgttataaccgaccccgtgattaaaaacagggaactcttcatctcagactacgtagacacgtatcacgccgctgccctgaggggcaaatgcaacatttcacacttctccgatattttcgctgcgagagaatttaaagccagagtcgatagctttttctacattttgggctataaccccgaaacaaggcgccttaacagcacccagggcgagatccgggtcgggcctagccaccaagctaagctccccgacctgcagccattccccagtccagacggcgataccgtgacccagcacgaagagttagtgtggatgcctggagtgaacgattgtgatctcctcatgtacctgcgagcagctaggtccatggcagccttcgccggtatgtgtgacggagggtccaccgaggacgggtgtgtggcagcctcaagagatgacactaccctcaatgccctgaatactttacatgaaagtgggtatgatgccggtaaggccctgcagcgtctcgtgaaaaagccagtgcccaaactgatcgagaaatgctggactgaagatgaggtcaagaggtttgtgaaagggctccgccaatacggcaagaacttctttcgaataaggaaagaacttctgcccaacaaagagaccggcgagttaataacattttattactactggaagaagacacctgaagctgcctcttcccgagctcatcgtcgccaccggagacaagccgtgttcagacggatcaaaacaagaacagcgagcacaccagtgaataccccctcccgacctccttcgtccgagttcttggacctttccagcgccagtgaggacgatttcgacagtgaagactctgaacaagagctcaagggctatgcatgtagacactgttttacgacaacaagcaaagattggcatcacggagggagagagaatatcctcctatgtactgactgcaggatccatttcaagaaatacggtgagctgcctcccatagagaagcctgttgacccaccacctttcatgttcaaacctgttaaagaggaagatgatggccttagcgggaagcatagtatgcgcactcggagaagtcgcggtagcatgagtacactgaggagcgggcgaaagaagcaaccagctagtcctgatggcagaaccagccctataaacgaagatataaggtctagtggcaggaacagtccctcagccgctagcacatcttctaacgacagcaaagcggagactgtcaaaaaatctgccaaaaaggtaaaggaggaggccagttcacccctgaagagtaacaagagacagagggaaaaggtagctagcgacacggaggaggcagataggacatcatcgaagaagacaaagacgcaggagatttctcgcccaaattcaccaagcgaaggcgaaggggaatcaagcgattcaaggtctgtaaacgacgaagggagcagcgatccaaaggatatcgaccaggataatagatcaacaagccctagcatcccttcaccccaagataatgagagtgactccgactcttctgcacagcagcagatgctccaggctcagcctcctgccctccaggctcctactggcgtgacgcctgctccgtctagtgccccacctggcaccccacaactgccaacccccggtcctacgccgtctgccacggcagtacctccccagggctcacctaccgcgtcccaggcccctaaccagcctcaagcccctacagcacccgtgccccacacccatatccagcaggctccggctctgcacccacaaagaccaccaagtccacaccctccccctcacccctcgcctcacccccctctccagcccctcactggatcagccggtcagcctagcgctcccagtcatgcccaaccccctctgcacggccagggacctcctggaccccactctctgcaagccggaccacttctgcagcaccccggaccccctcagccctttgggcttcctccccaggcctctcagggacaagcacccctgggtactagtccagctgctgcatacccacacacgtcactccagctaccagcctcccagtcagctctccaatctcaacagcctcccagagagcagcccctcccccctgctcctctggctatgccgcatatcaaacctcctccaacaacacccatcccgcagctgccggcaccacaagcccacaagcatcccccacaccttagcgggccaagtcccttttctatgaatgctaacctgcctccaccacccgcactcaaaccattatcctccctgagcacacatcaccccccttccgcccaccctccccctctgcagcttatgccgcagagccagcccctgccctcctcacctgcccagccccctgggctgactcagagtcagaatctacctccccctcccgcttcccacccgccaacgggactgcaccaggtggctccgcaacctccctttgcgcagcatcccttcgtgcccggaggacctccgccaatcacaccccctacctgtcccagtaccagcacacctcccgctgggccaggaacttccgcacagccgccatgctcaggggctgcagcttccggcggatcaatcgccggtggctcctcatgtcccctgccaaccgtacagatcaaagaggaagcactcgacgatgccgaggagcccgagtcccctccgccaccaccaagaagccctagcccggagcctactgtcgtggatacaccatctcatgcctctcagagcgcccgtttctataaacacttagaccgtggctacaactcgtgtgctcgcactgatctatactttatgcctttggcagggagcaaattggccaaaaagagagaggaagcaattgaaaaggctaagagggaggccgagcagaaagctcgcgaagagagggagcgggaaaaggaaaaggaaaaagagagagaaagagaacgcgagcgggaaagggaagctgagcgcgctgccaaggcgagctcttccgcacacgaggggaggctgtccgatccacagctcagcggacccggacacatgcgacccagtttcgagccgccacctactactatcgctgcagttcctccctacatcggcccagacaccccagctctcaggacactgtcggagtacgctagaccacacgtgatgagtccaacaaatcggaatcaccccttctacatgcccctcaacccgaccgacccactgctggcgtaccatatgccaggtctgtacaatgtggaccctaccatcagggaaagggagctgagggagcgggagatccgggagagggaaattcgggagcgggagttaagggaacggatgaagccaggattcgaagtcaaacctcctgaacttgaccctctgcatcctgccgcaaaccccatggaacatttcgcccgtcactctgcactgacgatcccacctacggcaggaccccatcccttcgcatctttccatcccggtctcaatcccctcgagcgcgaaagactcgccctcgctggaccacagctgcggcctgaaatgagctaccccgatcgccttgcggcagagagaatccatgccgagcgtatggcgagcctcacatccgaccccttggcacggttgcagatgtttaatgtgactccacatcatcatcagcactcacacatacactcacaccttcacctgcatcaacaggatccactgcaccaaggaagcgctggccctgtacaccctctggtggaccctctcactgccggtccacacctagctcgctttccctaccctcctggaacattacccaatcccctcctgggccagccccctcatgagcacgagatgctgcgacatccagtgttcgggacaccctaccctcgggatctgcccggtgcaattcccccaccgatgagcgccgcacatcaacttcaagcaatgcacgcgcaatccgctgagctccagcgactggccatggaacagcagtggttgcacggtcacccacacatgcacggtgggcatcttccgtctcaggaagattactactcccgattgaaaaaggagggggacaaacagctttag

SEQ ID NO: 214815 - DNA, 3039 bp, synthetic construct
  misc_feature 1..3039: note = Description of Artificial Sequence: Synthetic coding sequence
  source 1..3039: mol_type = other DNA
atgtttaaacccgttaaagaggaggatgacggtctgagcggcaagcacagcatgcggaccagaagatcccggggatctatgtcgactcttcgtagtggtcgaaaaaaacaaccggcatccccggacggtcggactagccctataaacgaagacattcgttcctcgggcagaaactcaccctcggccgcatcaactagcagtaacgactcgaaagccgagaccgtgaaaaaatccgcgaagaaagtaaaagaggaggcaagcagtcccctcaagagtaacaaaaggcagcgtgagaaagtcgcctccgatacagaggaggccgaccgcacatcctccaagaagaccaaaacgcaggaaatcagtcggcctaattctccgtctgagggcgagggggagtctagcgacagcaggtcagtgaacgacgagggcagctccgacccaaaggacattgaccaggacaacaggtctacgagtccgagtatccccagcccacaggacaacgaatctgatagcgactcctctgcccagcagcagatgctgcaagcacagccaccagccttgcaagcaccgaccggggtgactccggcacctagtagcgccccacctggcactccacagctgcccacgccaggaccaacaccaagcgctactgccgtcccaccacagggatcaccgacagctagtcaagctcctaatcaaccacaagcaccgacagctcccgtaccccatacgcacatccagcaggctcccgctctccatccacagagaccaccctccccacacccaccaccccacccatcaccccatccaccactgcagccccttaccgggtccgccggtcaaccatctgccccttcccacgcccagcctccgttacacgggcaaggcccacctggccctcattcactgcaggcgggaccgctgctccagcaccccggaccccctcagccgttcggcctgccgcctcaggcatctcagggccaggcgccacttggcacgtctcctgccgctgcatacccccacacatctctgcagctccctgcttcacagtcagctctccagagccaacagccccctagggaacagcctctaccgcctgctccactagcaatgccacacatcaagcctccacctaccacccctattccgcagttgccggctccccaggctcataaacaccctccccacctgtctggccctagcccttttagcatgaacgccaacctgccgcctcctcccgcactcaagccgctgtcctccttaagcacacaccatccaccctctgctcatccccctccccttcagctgatgccacagtcccaaccactacctagtagtcccgcacaaccgccagggctgacccagtcccaaaacctgcccccaccacccgcttcacaccctcccaccggcttgcaccaggtggcccctcaacctcccttcgcacagcacccgtttgtaccagggggacctcccccaattaccccccctacttgtccctctacatctacccctcccgctggccctggcaccagcgcacagcccccttgctccggggcagccgcaagtggcggttcaattgccggaggctcctcatgtcctctaccgacagtgcagataaaggaggaggccctcgacgacgctgaggagccagaatcccctcccccacctcctcgttccccaagtcctgaaccgaccgttgttgacactccatctcacgcctcccagagtgcaagattttacaagcaccttgacaggggctataatagctgcgcccgaactgatttgtacttcatgcccctggctgggagtaagttggccaaaaagagggaagaggccattgagaaagcaaagcgagaggcagaacagaaagcgagagaggaaagggaacgcgagaaggaaaaggaaaaagagcgggagagggagagagaacgggagagagaggctgagagagcggctaaggcctcatcttcagctcatgaaggcagactttctgatccccagctgtctggacctgggcacatgagacccagctttgaaccccctccaactactatcgctgctgtccccccttacatcggccctgacacacccgctctcagaaccctgagtgagtatgcccgtcctcacgttatgtctcctactaataggaatcaccccttctatatgccactcaatcccaccgacccacttcttgcgtatcacatgccaggtctgtataacgtggacccaaccatcagagagcgggagttacgcgagagagagattcgggagcgggagattagagaacgtgagcttagggaaaggatgaaacctgggttcgaagtgaagcctcccgaacttgaccctcttcaccccgcagcaaacccgatggagcatttcgccaggcactccgccctcacaatccccccaaccgcgggacctcacccatttgcaagcttccaccctggccttaacccactcgagagggagagactagcgttagcaggccctcaattgaggcccgagatgtcctacccggacaggctcgccgctgaaagaatccatgccgagaggatggcttcccttacctccgatccgttggcgaggctgcagatgtttaatgtcaccccacaccaccaccaacattcccatatccatagtcacctccaccttcaccagcaggaccccctccatcaggggtctgccggtcctgtgcatcctttggtggaccctctcacagctggtcctcacttggccaggttcccttatccacctgggacactaccaaatcctctcctggggcagccaccccacgagcatgaaatgcttcggcatcctgtatttggcacaccctaccctcgagacctacctggggcaattcctcctcccatgtccgctgcccatcaattacaggccatgcatgcccagagtgctgagctacaacggctggccatggagcaacagtggttgcatgggcacccacatatgcatggcggacacctgccctctcaagaagattactactcgcgactgaagaaggaaggggataagcagctctag

SEQ ID NO: 214816 - DNA, 1953 bp, synthetic construct
  misc_feature 1..1953: note = Description of Artificial Sequence: Synthetic coding sequence
  source 1..1953: mol_type = other DNA
atggccagcggagaacattctcctgggagtggcgctgcgaggcgtccgctgcattccgcacaggctgtcgacgtagctagcgcttccaacttccgggcatttgagttattgcatcttcatctagatctccgagcagagttcggtccacccggtccaggggctggttctaggggcctaagtggcactgccgtgctcgacctgcgatgcctcgagcctgagggcgctgcggagttgcgactcgactcccacccctgtctggaggtgacggccgctgccctccgcagagagagacccggtagtgaggagccacctgccgaaccagttagcttctacactcagcccttctcccactacggacaggcgctctgcgtgagctttccacagccctgtcgtgccgctgagcggctccaggttctgctgacctaccgcgtcggggagggcccaggtgtctgctggttagctccagagcagaccgctggcaagaaaaaaccttttgtgtacacccaaggtcaagctgtgctcaatcgggcattttttccatgttttgacacgcctgctgtcaaatataaatacagcgccctgatagaagtgccggatggattcaccgctgtgatgagtgccagtacctgggaaaaaagaggcccaaataagttcttcttccagatgtgccagccaatacccagctatctgatcgctctggctattggagatcttgtcagtgctgaagtgggccctcgaagcagggtatgggccgaaccatgtctgattgatgcggctaaagaagaatacaacggagtgattgaggagttcctggccaccggcgagaaactttttggcccatatgtttggggacgttacgacctgctctttatgcctcctagtttccccttcggcggtatggaaaatccgtgcctgactttcgtcacaccatgtctccttgccggtgaccgatcactcgctgatgttattatccacgaaatctctcactcctggttcggaaatctggtgactaatgctaactggggcgagttctggctcaatgagggatttaccatgtacgcccagaggagaatttctacaatactgtttggagcggcttatacctgcctcgaggctgctacaggccgagctctgttgcgccagcatatggacatcacaggggaggagaatcctcttaataaactgcgtgtgaagatcgaaccaggggtggatcctgacgacacctataacgaaacgccatacgagaaaggcttttgcttcgtgagttacctggctcacctggtgggagatcaggatcagtttgactcattcctgaaggcatacgtacatgaattcaagtttaggtctatcctggctgacgactttttagatttttatctggaatactttcccgaattgaagaaaaagcgagtggacatcatcccgggattcgaatttgaccgatggctgaacactcctggatggccaccttacctgcctgacctttctccgggtgattccttaatgaagcctgccgaggaattggctcaactgtgggccgctgaggaactcgacatgaaggccatcgaggcggtcgcgattagtccctggaaaacttatcaactggtgtattttttggacaagatactacaaaagagtccactcccaccaggtaatgttaagaaactcggggatacatacccatccatcagcaatgcgagaaatgcagaactacggctgcgatggggtcagatagttctgaagaatgaccaccaggaggatttttggaaagttaaagaatttctccataatcagggaaagcagaaatacactctaccattgtatcatgcaatgatgggagggagtgaagtggcacaaactctcgccaaggagacatttgctagcaccgccagccagctgcattctaacgtggtaaactatgtacagcagatcgtggcacctaaaggatcttag

SEQ ID NO: 214817 - DNA, 1836 bp, synthetic construct
  misc_feature 1..1836: note = Description of Artificial Sequence: Synthetic coding sequence
  source 1..1836: mol_type = other DNA
atggcctctggagaacattcccctggcagcggggctgcccgtcggccattgcacagtgcccaggcagtcgacgtggcatctgcatcaaatttccgggctttcgagctgttacatctgcatctggacttgagggccgagttcggacctccagggccaggtgccggttcacgtggtctgagcgggactgcagtcctcgacctccgatgcctggagcctgaaggcgctgccgagctgagactcgattcacacccctgcttggaagtaaccgccgcagctctgcgtcgcgagcgccctggttcagaagagccgcctgctgaacctgtgagtttctacactcagccttttagtcactacgggcaagccctgtgtgtcagctttccccagccttgtcgcgcagctgagcggctgcaggtccttctcacataccgtgtgggcgaaggaccgggagtgtgctggctggcacctgagcaaacagctggaaagaaaaagcctttcgtgtatacacaagggcaagctgtcctgaatagagctttcttcccttgcttcgacacccccgcagtcaaatacaaatattcagcactcatcgaagtgccagatggctttactgctgtcatgtccgccagtacctgggagaaaaggggaccgaacaaatttttcttccagatgtgccagcctatcccctcctacctgattgcattggcgatcggagaccttgtgtccgcggaagtgggtccacgctacgacctgttgtttatgcctccaagctttccattcgggggaatggagaatccctgcttgacgttcgtgactccatgtttgctcgccggtgatcgcagtctggccgacgtcatcatccacgaaattagtcatagttggttcgggaatctggtgaccaacgccaactggggtgagttttggctgaacgaggggttcactatgtatgcacagagaagaatttcaaccattctattcggtgctgcatacacctgtctggaggcggcaactggtagggcactcctacgccagcacatggacatcaccggagaggaaaaccccttgaataagctacgcgtgaagatagagccaggggttgaccctgatgatacatacaacgaaactccatacgaaaagggattttgttttgtgtcataccttgctcacctggttggcgatcaagaccagttcgatagcttcttgaaggcttatgttcacgagtttaaatttcggagcattctggccgacgacttcctggacttttatctcgagtacttcccagagcttaagaagaagcgtgtggatattatacccggtttcgaattcgacaggtggctcaatacccctggttggccaccctacttgccggacctgagccctggcgacagcctcatgaagccagctgaggagctggcccaactctgggccgctgaagagctcgatatgaaggcaatcgaggcagtcgccatctccccctggaaaacataccagctcgtgtatttcctggacaaaatcttgcaaaagagccctctgccacctgggaatgtaaaaaaactcggcgacacataccctagcatcagcaatgcccgtaatgctgaactccggctcaggtggggccagatcgtcctcaagaacgatcaccaggaggacttttggaaagtgaaagagttcctgcataatcaaggcaaacagaaatacactctgcccctgtaccacgccatgatggggggtagcgaggttgcccagacgctcgccaaggaaactttcgcttctactgcaagccagcttcatagcaacgtggttaattatgtacaacaaatcgtagctcccaagggaagttag

SEQ ID NO: 214818 - DNA, 1035 bp, synthetic construct
  misc_feature 1..1035: note = Description of Artificial Sequence: Synthetic coding sequence
  source 1..1035: mol_type = other DNA
atgacctgctgttcctgcacaagcttgtctgctctgctagacttctgggctgaagtctgctggctggccccagagcagacagccggtaaaaagaaaccctttgtgtacacacagggtcaggccgtcctcaaccgtgcatttttcccatgcttcgatacacctgcagtgaagtacaaatactcagccctgattgaggtccctgacggctttacagctgtgatgtcagcgtcaacgtgggaaaaaagaggacctaacaaatttttcttccagatgtgccagcctatcccctcttatctgattgccttagctatcggagacctggtgagcgcagaagtgggacctaggagccgggtgtgggctgaaccgtgccttattgatgccgctaaagaggaatacaacggggtgatagaagaatttttagcaaccggcgagaaacttttcggtccctatgtgtggggcagatatgacttgctcttcatgccacccagctttcctttcggcggaatggagaatccttgccttacatttgtgaccccatgtctcttggccggagacaggtccctcgcagatgttataattcacgaaattagtcatagctggtttggcaatctggtaaccaacgctaactggggtgaattttggcttaacgagggcttcaccatgtatgcccagcggaggattagtacaatcctgttcggagccgcttacacttgcctggaggcggctaccggaagagctttgctgcgtcagcatatggacataaccggggaagagaatcccctgaataaactgagggtcaagatagagcctggggtggatcccgacgacacttataatgagacaccgtatgaaaaagggttctgtttcgtgtcctatttggcacacttggtgggggaccaggaccaatttgatagcttccttaaggcttacgtgcacgaattcaagttcaggtcgatcctggccgacgattttttggacttctatctagaatatttccctgagcttaagaaaaagagggtggacatcattccctag

SEQ ID NO: 214819 - DNA, 507 bp, synthetic construct
  misc_feature 1..507: note = Description of Artificial Sequence: Synthetic coding sequence
  source 1..507: mol_type = other DNA
ctgattgatgccgcaaaggaggagtataacggcgttattgaggaatttctggctactggcgagaaactgtttgggccatacgtctggggcagatatgacctcctgttcatgcctccctccttcccttttgggggaatggagaacccctgccttacatttgtgaccccatgcttacttgcaggcgaccgcagcctggcagatgtgatcattcatgagataagccacagctggtttggtaatttggttaccaacgccaattggggcgaattctggcttaacgaagggtttacaatgtacgcgcagaggcgaatttcaaccatactattcggagtagacccagatgacacttacaacgagaccccatacgagaagggtttctgcttcgtgagttaccttgcccatttagtgggcgaccaggaccaattcgacagctttctgaaggcctatgtgcacgaattcaagtttcggtctattttggcagatgactttcttgacttctacttatag

SEQ ID NO: 214820 - DNA, 1485 bp, synthetic construct
  misc_feature 1..1485: note = Description of Artificial Sequence: Synthetic coding sequence
  source 1..1485: mol_type = other DNA
atgtcggctaccaggagcgcttatatggaagaagaaggagtattccacttccatatggagcaccctgtgcctgcctatctggttgcgctggtcgccggtgatctgaaacctgccgatattggcccaaggtcacgtgtctgggcggaaccgtgtctcttgcccacagcgacttctaaactgagcggagctgtggagcagtggttgagtgccgctgagcgtctgtacggaccctacatgtggggtcggtacgacattgtgtttcttcctccttctttccccattgtggcaatggaaaatccatgcctgaccttcattataagcagcatcttggaaagtgacgaatttctcgtgatagatgtcattcatgaagtggcccattcttggttcggcaatgccgtaaccaacgcaacttgggaggaaatgtggctgagtgaaggactggcaacctacgctcagcgtcgtatcactaccgagacatacggcgcagcatttacatgtctcgagactgcatttcggctggatgcactgcacagacagatgaagttactgggagaagattctcccgttagcaaattgcaggtgaagttggagcccggtgtcaatccctcacacctcatgaatttgttcacatacgagaagggatattgcttcgtgtactacttgtctcagctatgcggcgaccctcagaggtttgacgattttctgagggcctatgtggaaaaatataaattcacaagtgtggttgcccaggacctcttggattcctttctttctttcttccccgaactaaaggagcaatctgtcgattgccgggcaggcctggaattcgagcgttggctgaacgctactggccctcccttggctgagccggatctctctcagggaagcagccttacccggcctgtggaggcactcttccaactatggactgcagagcctttggaccaggctgcagccagcgcttcagccatcgatatatctaagtggcgcacttttcaaaccgctttgttcctggatcggctactagacggatcgccactccctcaagaggtggtgatgtctctgagtaagtgctacagctctctcctggactcaatgaacgccgagattcggattcgctggctacagatagttgtgcggaatgattactatcccgacctccaccgcgtgagacgtttcctggaatctcagatgagtcgtatgtacacgattcctttgtacgaggatctttgcacaggggctctgaagtcctttgcactggaagtgttttaccagacacagggcagactgcatcctaatctaagacgcgctatccaacagatcctcagtcaggggctcgggagctctaccgagcccgcatctgagccgtctactgagttgggcaaggctgaggcagacaccgatagtgatgcccaggcactgctgctcggcgatgaagctccaagctcagccatttctctgcgggacgtcaatgtgtctgcttag

SEQ ID NO: 214821 - DNA, 1236 bp, synthetic construct
  misc_feature 1..1236: note = Description of Artificial Sequence: Synthetic coding sequence
  source 1..1236: mol_type = other DNA
atggaggttaatcccccaaaacaggagcatcttctcgctcttaaggttatgcgtctaactaaaccaactctgtttacgaacatccccgttacttgtgaggaaaaagacctccctggtgatctgtttaaccagctcatgcgggacgatccctctaccgtgaatggagctgaggtgcttatgttaggcgagatgctgacacttccacagaacttcggaaatatcttccttggtgaaactttttcttcatatatcagcgtgcataatgacagtaaccaagtggtcaaggacatcttggttaaagcggacctgcagacctcctctcagcgactgaacctcagcgccagcaacgccgctgtagccgagctcaaacctgactgctgcatagacgacgtgattcatcacgaagtcaaagaaataggtactcacatccttgtgtgcgcggtctcctataccacccaggccggagagaaaatgtacttcaggaaattcttcaagtttcaggttttgaagcctcttgatgtgaagacgaagttttacaacgcggagacagacgaggtcttcctggaagcccagatccagaacatgaccacatcccccatgtttatggaaaaggtcagtttagaacccagcatcatgtacaacgtgacggagctcaactccgtcagtcaggccggagagtgcgtatcaacatttggatcgagagcatatctccagcctatggatacaaggcaatacctctactgtttgaaacctaaaaatgagtttgctgagaaggccggtatcattaagggagtgaccgtgatcggaaagctggatattgtttggaagactaacctgggtgaaagaggcagactgcagacctcacagctccagcgcatggcaccaggctacggtgacgtacggttgtcactcgaggccattcctgacactgtcaatctcgaggagcccttccatattacctgcaagattaccaactgctcagaaagaacaatggacctggtactggaaatgtgtaacactaactctattcactggtgcggaatcagtgggcgtcagctgggcaaactgcacccatcaagctccttgtgcctggcccttacgttactcagttcagtgcagggactccaatcaatatcaggcctcagactaacagacacctttctgaaaagaacctacgagtatgacgatatcgcacaggtctgcgtggtgtcaagtgccatcaaggtggagagttag

SEQ ID NO: 214822 - DNA, 1365 bp, synthetic construct
  misc_feature 1..1365: note = Description of Artificial Sequence: Synthetic coding sequence
  source 1..1365: mol_type = other DNA
atgcacgtaggccacctccgcagtacgatcataggggagagtatctccaggctgttcgaattcgcgggttatgacgtattaaggctcaaccatgtcggagattggggaacacagttcggtatgcttatcgctcatctgcaagacaagtttcctgattacctgactgtgagtccgccaattggagatctgcaggtgttctataaagagagcaagaagcggttcgataccgaggaggagttcaaaaaaagagcctaccagtgcgtggtgctcctgcagggcaagaatccagacatcacgaaagcctggaaactgatctgtgatgtgtcaaggcaagagctcaataagatctatgatgctctagatgtctctttgatcgagcgaggggagagcttttatcaggatcggatgaatgacattgttaaggagttcgaggacaggggcttcgtgcaggttgacgatggcagaaagatcgtttttgtgccgggatgtagcatccctctcacaatcgtcaagtctgacggtggatacacatatgatacaagcgacctagccgcaatcaaacagcggctgttcgaagaaaaagcagacatgatcatttacgtggtcgataacggtcaatcggttcatttccagacaatcttcgctgccgcacagatgattggctggtacgatccaaaagttactagagtgttccacgcaggctttggggtcgtgctcggtgaagacaagaaaaagttcaagacaaggtctggagaaacagtgcggctgatggatctgcttggcgaaggcctcaaacgaagtatggataaactgaaggagaaagaacgagacaaggtcctgactgcggaggagcttaatgcagcacaaacctctgtggcgtatggctgtattaaatatgccgatcttagccataaccgattgaatgactatattttttcattcgataagatgctggacgacaggggcaacactgccgcttatttgctgtacgccttcaccagaatccgaagcattgcgagacttgccaatatcgatgaagagatgcttcagaaggccgctcgcgaaaccaagattcttcttgaccatgagaaggaatggaaactcggacggtgcattctgcgctttcctgaaatccttcagaagatcctcgatgatctgttcctacatactctatgtgactacatttacgagctcgcaaccgcttttactgagttctacgactcttgctactgcgtcgaaaaagatcgccagactggtaagatcctgaaagtgaacatgtggaggatgttgttatgcgaagccgtggctgccgtcatggccaaaggttttgacatattgggcatcaagcccgtgcagcggatgtag

SEQ ID NO: 214823 - DNA, 618 bp, synthetic construct
  misc_feature 1..618: note = Description of Artificial Sequence: Synthetic coding sequence
  source 1..618: mol_type = other DNA
tttcaaagtgttgagtcttccactagaaaactggaccatatcaacatctgttctagtaatttccccaagcgcagttttgctctcgtgacgcaagccggagtgcagtggcataatctagattccctgcagagccctccaccgggatttaagcgtttcccatgtctgtctctgccctcctcgtgggactgcagggaagttgcagatttccaactatcagtagatagtctgctcgagaaagacaacgatcattctcggccagacattcaagtgcaggcaaaacgccttgccgagaaattaagatgcgatacggtggtctccgaaatctcgacgggacaaaggacagtgaactttaagattaatcgcgagctgctgactaaaacagtgctgcagcaggtcatagaagacggttccaagtacgggctgaaaagcgagctcttttccggcctccctcagaagaagatcgtagtagagtttagctcccctaatgtcgccaaaaagttccatgtgggccacctgcggtccaccattataggaaattttatcgcgaacctgaaggaagccttgggccatcaggtgatcaggattaactatctgggcgactgggggatgcagttttag

SEQ ID NO: 214824 - DNA, 1737 bp, synthetic construct
  misc_feature 1..1737: note = Description of Artificial Sequence: Synthetic coding sequence
  source 1..1737: mol_type = other DNA
atggcctgtggctttcgccgagcgattgcctgccagctctctcgcgtgctgaacctcccacccgaaaatctaataacttcgattagcgccgtgccaatttcacagaaggaggaggtcgcagatttccaactcagcgtcgactctctactggagaaagacaatgaccactccaggcccgacatccaggtccaggccaagaggctcgccgagaagctgcggtgcgacacagtcgtgtctgagatctctaccggacagcgcactgtgaacttcaaaatcaatcgagagctgctgactaaaactgtacttcagcaagtcatcgaggacgggtccaagtacggtctgaagtcagagctgttttccggactccctcagaaaaaaatagtggtggagttctcttccccaaatgtagcaaagaagttccacgttggacacctgcgctccaccataatagggaacttcattgccaatctgaaagaggccctggggcaccaggtgattagaattaattatctgggcgattggggcatgcagttcggattgctaggaaccggtttccagctcttcgggtacgaggagaagctacagtcaaaccccctgcagcatctcttcgaggtgtacgtgcaggtcaataaggaggctgccgacgacaagagtgtcgctaaagcggcacaggagttcttccagaggctggagctgggggatgtgcaggctctgagcctctggcaaaaattcagggacctctcaatcgaggaatacatacgagtgtacaaacgcctcggcgtgtacttcgatgaatattctggagagagcttttacagagagaagtcacaggaagtgttgaagctcctggaatctaagggcctgctgctcaaaaccatcaagggtactgctgtagtggatctaagtggtaatggagatccaagcagcatttgtacggtgatgcgaagcgatggcacatctctttacgccactcgcgacctcgcagcagctatagatagaatggataaatacaacttcgacacaatgatctacgtcacggacaaaggccagaaaaaacacttccaacaggttttccagatgctgaagatcatgggatatgattgggccgagaggtgccagcacgtgccgtttggggtcgtccagggcatgaagacccgcaggggggatgtgacatttttagaagacgtgctgaacgagattcaactgcggatgttgcagaatatggccagcatcaagacaacaaaagagctcaagaatcctcaagagaccgccgaaagagtgggcttagcagccctgatcatccaggatttcaaaggcttgttgctgagtgactacaaattcagctgggatcgcgtgttccagagccgtggtgacacaggagtttttttgcagtacacccatgcaagattgcatagcctggaggagacgttcggttgtggatacctgaacgactttaataccgcctgcctccaagagccacagagtgtgagtattttacagcatctcctgagatttgatgaggtgttgtataaatcatcacaagatttccaaccacgccatattgtgtcttatctgctaactctttctcatctggccgcagtagctcataaaactcttcaaataaaggacagcccacccgaggttgccggagctcggcttcatttgtttaaggcggtgaggtctgtgctggcaaacggcatgaagctgttgggcatcacccccgtttgccgtatgtag

SEQ ID NO: 214825 - DNA, 621 bp, synthetic construct
  misc_feature 1..621: note = Description of Artificial Sequence: Synthetic coding sequence
  source 1..621: mol_type = other DNA
tagttccagtcagtggagtcgtctacccggaagctggatcatatcaacatctgctcttccaatttcccgaaacggtcattcgccctcgtcacacaggcaggcgtacagtggcacaacttggatagcctccagagtccgccaccaggatttaagagattcccttgcctgtccctgccatcttcttgggattgccgcgaggttgccgacttccagctttctgtcgattccctgctggagaaagacaacgaccactcccggccagacattcaggtccaggcaaagcgactggctgagaagcttcggtgcgacaccgtggtgtccgaaatctctacaggacaacggaccgtgaacttcaaaattaatagggagctcctaaccaagaccgtcctgcagcaagttatagaggacggcagtaagtacggtctcaagtccgagctgttcagcgggctgccacaaaagaagatcgtggtagagttcagctcacccaatgtggcaaagaaatttcatgtaggtcacctgcgctcgacaatcatcggcaatttcatcgccaacctaaaggaggctcttgggcatcaggtaattaggatcaattatctgggcgactgggggatgcaattctag

SEQ ID NO: 214826 - DNA, 1482 bp, synthetic construct
  misc_feature 1..1482: note = Description of Artificial Sequence: Synthetic coding sequence
  source 1..1482: mol_type = other DNA
atgagcgtggacatgaattcccaaggatcagactcaaatgaggaggactatgatccaaactgtgaagaagaggaggaggaggaggaggatgacccaggggatatcgaggattactacgtgggcgtggcctccgacgtcgaacagcagggggctgatgcattcgatccagaggagtatcagtttacctgtcttacgtataaagagtctgagggcgctctaaacgaacatatgacttccctggcatccgtccttaaggtatcccactcggtagccaagctcatcttggtgaatttccactggcaggtttcagagatcctggataggtataaaagtaacagtgctcagctcctggtggaggcccgagtgcagcctaacccatcaaaacacgttcccacatctcatccccctcatcactgcgctgtgtgcatgcaatttgtccgaaaagaaaacttgctgtcactcgcctgccaacaccagttctgtagatcctgctgggaacagcattgttcagttttggttaaggatggcgtcggtgttggcgtgtcctgtatggcacaggactgccccctgcgcacccccgaggactttgtttttcctctactccctaacgaggagcttcgcgagaagtaccggcgttacctttttcgtgactacgtggagtcacattatcagctgcaactatgtcctggtgcagattgtccaatggtcattcgagtccaggaaccccgagcaagaagggtgcagtgtaacagatgcaacgaggtgttttgttttaagtgcaggcagatgtatcatgccccaactgattgcgccacaatcagaaaatggttaactaaatgtgccgacgactcggagactgctaattatatcagtgcacataccaaagactgtcctaagtgtaacatttgcatcgagaaaaacggcggatgcaatcacatgcagtgcagcaagtgtaaacacgatttctgttggatgtgcttgggggactggaaaacccatggtagtgagtactacgaatgctcacggtacaaggagaatcccgacattgtcaatcagagccagcaagcacaagccagagaagcgctgaaaaaataccttttctattttgagcgctgggaaaaccataataaaagcctgcaactggaggcccaaacataccaacgaattcacgagaagatccaggaacgggtgatgaacaatctgggcacctggatcgactggcagtatttacagaacgccgctaagcttctggccaagtgcaggtacactctgcagtatacatatccatatgcgtattatatggagtctgggcctcggaagaagttattcgagtaccaacaggcgcaactggaggccgaaatcgagaatctgtcatggaaggtcgagcgggctgattcctatgatcgtggtgatttggagaatcaaatgcacattgctgagcaaaggcgtcggacgctgctcaaggactttcatgacacctag

SEQ ID NO: 214827 - DNA, 954 bp, synthetic construct
  misc_feature 1..954: note = Description of Artificial Sequence: Synthetic coding sequence
  source 1..954: mol_type = other DNA
ggaatcaccggggtttcctgcatggctcaagactgccctctgaggacccctgaggatttcgtatttcctcttctgccgaatgaagagctgcgcgagaaatacagacgctacctgtttagggactacgtggaatcacactatcagctgcagttgtgcccaggcgctgattgtcctatggtgattcgggtgcaagagccacgcgcacgcagagttcagtgcaatcgctgcaacgaggtgttctgtttcaagtgtcggcagatgtaccacgctcctacagactgcgccactatcaggaagtggctgacaaagtgtgccgacgacagcgagactgcgaattatattagtgctcacaccaaggattgtcccaaatgcaatatctgtattgaaaagaatgggggttgcaatcacatgcagtgctccaagtgtaagcacgatttctgctggatgtgcttaggtgactggaaaacccatggctccgaatactacgagtgcagtcgttataaggagaacccagacatcgtgaatcagtcacagcaggcccaggcccgtgaagctttgaagaaatacttattttacttcgaacgttgggagaaccataacaagtctcttcagctggaggcgcagacctaccaacgcatccatgagaaaatccaggaacgagtaatgaataatctcgggacttggatcgactggcagtatctacaaaatgctgctaagctgctagcaaagtgccggtatactctgcagtacacttacccctatgcttactatatggagtccgggccacgcaaaaagttgttcgagtaccagcaggctcagctagaggcggaaatcgaaaatctatcatggaaggtcgaacgggcagacagctacgataggggggacctggaaaaccaaatgcacatagctgaacagcggaggcgcactctcctcaaggacttccacgacacatag

SEQ ID NO: 214828 - DNA, 1233 bp, synthetic construct
  misc_feature 1..1233: note = Description of Artificial Sequence: Synthetic coding sequence
  source 1..1233: mol_type = other DNA
tcggtagacatgaacagtcagggaagtgatagtaatgaagaggactacgaccctaattgtgaggaagaggaggaggaagaggaagatgaccctggcgatattgaagattactacgtgggcgtagcatctgatgtggaacagcagggcgcagatgccttcgatcctgaagagtaccagttcacatgtctgacttacaaagagagcgaaggcgctctgaatgagcacatgacaagtctcgctagcgttttaaaagtaagtcatagcgttgccaagctcatcctcgtgaattttcactggcaggtgagtgaaattcttgaccgctacaaatccaatagcgcccagctgcttgtggaggctcgcgttcagccaaaccctagcaaacatgttccaaccagtcatccaccacaccactgcgctgtctgcatgcagttcgtgagaaaagagaaccttctgtcgctggcctgtcagcaccaattttgtaggtcctgctgggaacagcattgctctgtccttgttaaagacggggtgggagttggtgtgtcttgtatggcacaggactgcccattaaggaccccagaggactttgtttttcctcttctgcccaatgaggagcttcgggagaagtatcgaagatatctttttagggactacgtggagtctcactaccagctgcaactgtgccccggagcagactgccccatggtaattagggtccaggaaccgagagcaagaagagtacaatgtaatcggtgtaatgaagttttctgttttaaatgcaggcagatgtatcacgcacctactgactgcgcaactatacgaaagtggctgacaaagtgtgccgacgactcagaaactgccaattacataagcgcccacaccaaggattgccctaaatgtaacatctgtatcgagaagaatggcggatgcaatcacatgcagtgtagtaaatgtaagcacgatttttgctggatgtgcctaggggactggaagacacacggcagcgagtattacgaatgtagcagatataaggagaaccctgatatcgtcaaccagtcccaacaggcacaggcaagagaggccctgaaaaagtacctgttttatttcgaaaggctagaaaacttgtcgtggaaggtagaaagagcagactcttatgacaggggagacctcgagaatcagatgcacatagcagagcaaagaaggcgcactctgctcaaagatttccatgatacatag

SEQ ID NO: 214829 - DNA, 1482 bp, synthetic construct
  misc_feature 1..1482: note = Description of Artificial Sequence: Synthetic coding sequence
  source 1..1482: mol_type = other DNA
atgtcagtggatatgaatagtcagggttccgatagcaatgaggaagattacgatccaaactgtgaggaggaagaagaagaggaagaggacgatccaggagatatagaggactactacgtcggtgttgctagcgacgtcgaacagcagggggctgatgcttttgatccagaggaataccaattcacatgtctgacttacaaggaatcggagggggcactcaatgaacacatgacaagtcttgcctccgtcctcaaggtaagtcactcagtcgccaagcttatacttgtaaattttcattggcaggtgtctgaaatcctggaccggtacaagtcaaatagcgcacagctactggttgaggcaagagtgcagcctaatcccagcaagcacgtcccaacctctcatcctcctcaccactgcgccgtttgcatgcaatttgttcgaaaggagaacttgctctccctagcttgccaacaccagttctgcaggtcttgctgggaacagcactgtagtgtattggtgaaagatggggtgggcgtcggcgtttcctgcatggcacaggattgtcctctgcgcacgccagaggactttgtatttccactgcttcccaatgaagaattaagggaaaaatatcggcgatatctttttagagattacgtggagtcacactatcaactgcaactttgcccaggagcagactgcccgatggttatccgggtgcaggaacctcgcgcacggagagtccagtgtaatcgatgtaacgaagtattttgttttaagtgtcggcaaatgtaccacgctcccaccgattgtgctaccatccggaagtggcttaccaagtgcgctgatgattccgagaccgcaaactatattagcgctcatactaaagactgcccgaaatgcaatatctgcattgagaagaacggagggtgtaatcacatgcagtgctccaagtgcaagcatgacttttgctggatgtgcctaggtgactggaagactcacggttctgagtattatgaatgtagtcgttacaaagagaaccctgatattgtaaaccagtcccagcaggctcaggccagggaggcactgaagaagtacctcttctacttcgaaagatgggaaaaccacaacaaaagcttgcagctggaagctcagacctatcagcgaatccacgaaaagatacaggagagggtcatgaacaaccttggaacctggattgactggcagtatctccagaacgcggcaaaattgctggcaaagtgtaggtatactttacagtacacatacccctatgcatattacatggagtccggccctcggaaaaaactttttgagtatcaacaagcccagctggaggccgaaatcgaaaacctttcatggaaggtggagagggcggatagctacgaccggggtgacctggagaatcagatgcacattgccgaacaaaggcggcgtactctactgaaggatttccatgacacatag

SEQ ID NO: 214830 - DNA, 1584 bp, synthetic construct
  misc_feature 1..1584: note = Description of Artificial Sequence: Synthetic coding sequence
  source 1..1584: mol_type = other DNA
ttgagacgagcggcatcaggcccactcgctccttccctgccccctcctcgacctccaaggcgccatcagcctagcaatgccaaccggagatcctgggggggagcggctgccaggggagcaggggcaagacctgccagtggccatcagccagagccagagcgcgagccgggaccgagaaggccaagacctctgcccgcatccgcctcagtgcgtcgggctcctgcgcgaagggccatggactcagacgaggggtataattatgagttcgtgaatgaagtcattcaaaaccccgctacaatcaccaggatcttactaagccacttcaattgggacaaagaaaagctgatggaacggtacttcgacgggaacctagagaagcttttcgctgagtgtcacgtcatcaacccctctaaaaagtcacggacgcggcagatgaacactagatcttctgcacaggacatgccgtgtcagatctgctaccttaactaccctaattcctattttaccggactcgaatgcggccataaattttgtatgcagtgttggagcgagtatctgacaaccaagataatggaggagggtatgggacaaaccatctcatgccctgcccatgggtgcgatatactggtggatgacaacaccgtgatgcgattgattacagactccaaagtgaaactcaaataccagcacctgattacgaactctttcgtggaatgcaacaggctcttgaaatggtgcccagccccagattgccaccatgtggttaaagtacagtatcccgatgcaaagccagtgcgatgcaagtgtggcagacaattttgcttcaattgtggcgaaaactggcatgatcctgttaaatgcaagtggttaaagaaatggatcaaaaagtgcgatgatgatagcgaaacctctaactggatcgcggctaatacaaaagagtgtccaaaatgtcatgtgacaatcgagaaagatggaggttgtaaccacatggtgtgcagaaaccaaaattgcaaagctgagttctgctgggtctgcctgggtccatgggagcctcacggtagcgcatggtataattgcaaccgatacaacgaggacgatgctaaagctgcccgagatgcacaggaacgatcgagggcagctctgcagcgttacttattttattgcaaccgctatatgaaccatatgcagagcctacgcttcgagcataagctgtatgctcaggtaaagcagaagatggaggaaatgcaacaacacaacatgagttggatcgaagtgcagtttctgaagaaggctgtcgacgtcctatgccagtgccgggctaccctgatgtacacatacgtgtttgctttttacttaaaaaaaaataatcagtctatcatctttgaaaataatcaagcggacctcgagaacgccacggaagtgctgtcaggttacctggagcgagacatctcccaggacagtctgcaagatatcaagcagaaagtccaggataagtacagatattgcgaatcgaggcgcagggttttactgcaacatgtgcatgaagggtatgagaaggatctctgggagtacatcgaggattag

SEQ ID NO: 214831 - DNA, 1674 bp, synthetic construct
  misc_feature 1..1674: note = Description of Artificial Sequence: Synthetic coding sequence
  source 1..1674: mol_type = other DNA
atggactccgatgagggctacaattatgagtttgacgaggacgaagaatgcagcgaggaggatagcggcgctgaggaagaagaggacgaggacgatgacgagcctgatgatgacacgctggacttgggcgaagtggagttagtagaacctggtctcggcgtgggaggggaacgagatggcttattatgcggggagaccgggggaggcggaggctccgctctcggaccaggaggcggaggaggtggtgggggtggcggtgggggaggcggaccagggcatgagcaggaggaagattaccgttatgaagtgttgacggctgaacagatcctccaacatatggtcgaatgcatccgggaggtcaacgaagttatccagaatccagccaccatcaccagaatccttcttagccattttaattgggacaaagagaaattgatggagcgctatttcgacgggaatctggaaaagctctttgctgagtgccacgtgattaacccatctaaaaagagcagaaccagacagatgaacacacgaagcagcgctcaggatatgccctgtcagatctgctaccttaactatcctaacagttatttcacagggctagaatgcggccacaagttttgtatgcaatgttggagtgagtatttgacaaccaagattatggaagaggggatgggacagacaatctcctgtccagctcatggatgcgatattctcgtggacgataatactgttatgcgcttgatcactgactcaaaggtcaagcttaagtaccagcacctgattaccaactcatttgtggaatgcaaccggctgctcaaatggtgcccagctccagactgccaccacgtggttaaagtgcagtaccctgatgcaaagcccgttaggtgtaaatgtggcagacaattctgtttcaactgcggggaaaactggcatgaccccgtgaaatgcaaatggctgaaaaagtggataaaaaagtgcgacgatgatagcgagacgtcgaactggattgcggcaaatacaaaagagtgtccaaagtgtcacgtgaccattgaaaaggatggcggttgcaaccatatggtgtgcagaaaccagaactgtaaagccgagttctgctgggtgtgtcttggtccatgggagccacacgggtcagcctggtacaactgcaataggtacaacgaggacgacgccaaggcagcgagggacgctcaagaaaggagccgcgctgcgttgcaacgctatctcttctactgtaaccggtacatgaaccacatgcagagtcttaggttcgagcacaagttgtacgcacaagtgaaacagaaaatggaggagatgcagcagcataacatgagctggattgaagttcagtttctgaagaaagcggttgatgtgctgtgtcagtgccgagccacgctcatgtacacatatgtgttcgccttttacctcaagaagaacaatcaatccattatttttgagaataaccaggctgacctggaaaatgccacagaagttctgtcaggatacctggaaagggacatttcacaggatagccttcaggacatcaaacaaaaagtacaggacaagtataggtactgcgagtcccgacgacgggtcctactccagcacgtgcacgaggggtatgagaaagacctctgggagtatatcgaggattag

SEQ ID NO: 214832 - DNA, 1689 bp, synthetic construct
  misc_feature 1..1689: note = Description of Artificial Sequence: Synthetic coding sequence
  source 1..1689: mol_type = other DNA
atgagcaatcagtatcaagaggagggctgtagcgaaagaccggaatgcaagtccaaaagccctactctgctgtcctcatattgcattgactccatactcggcaggagatccccttgcaagatgagacttctgggcgctgcccaatcgctgccggctcctcttacatctcgcgcagatccagagaaggcagttcagggcagtcccaaatcaagttctgccccttttgaggcagagctgcacttgcctccgaagctcaggaggctctatggacccggaggtggcaggttattacaaggggctgctgcagctgccgctgctgccgcagcagcagcagccgctgccgctacagccactgccggtccgcgtggtgaagctccaccccctccccctcctacggcacggccaggagaacggccagacggagccggtgcggctgcagctgccgcagccgctgcagcggctgcctgggacactctgaagattagtcaggcaccacaggttagcatatccaggagcaaatcatatcgcgagaatggggcaccattcgtaccaccacccccagcccttgatgagcttggcggtcccggaggggtgacccacccagaagagagactcggggtcgccggaggtcccggatccgcacccgctgccggaggcggtaccggcactgaggacgacgaggaagagctactggaggatgaggaggatgaagacgaggaagaggaactgctcgaggacgacgaggaagagctcctggaagatgacgccagagcgctcttaaaggaaccccgacggtgtccagtggccgctactggggcagtagcagcggcagcagctgcagccgttgctacagaaggcggtgagttatcgccaaaagaagagttgttattacaccctgaggacgccgaaggcaaggatggcgaagatagcgtgtgtctttccgcaggcagtgattcagaagagggccttctgaaaagaaagcagcgaaggtaccgcactacgttcacttcttaccaattggaagagttggagcgggcattccagaaaacccactaccccgacgtgttcacccgcgaagaactggctatgaggctcgacctcactgaggccagggtgcaggtgtggtttcaaaacaggagagctaagtggcgcaagagagaaaaggccggtgcgcaaactcatccacctgggctgccttttccaggacccctttccgccacgcatccactgtctccctatctcgacgcgtcgccctttcctccacaccatcccgcacttgactccgcttggaccgctgcggctgctgctgctgctgccgcttttcccagcctacctccgccaccagggtccgctagcctccctccatctggcgctccactgggtcttagtacgttccttggggcagccgttttcaggcatccggcatttatttctcccgcttttggcaggctgtttagtactatggctcctctaaccagtgcaagtactgcggcagcgcttctgcggcagccgacacccgcagtcgagggggcagtcgctagtggcgctctagccgaccccgctaccgctgcggcagacaggcgtgcatcctctatagctgctctaaggctcaaggccaaggagcacgccgctcagctcactcagcttaatatcttgcccggaacctctactgggaaggaggtctgctag

SEQ ID NO: 214833 - DNA, 1032 bp, synthetic construct
  misc_feature 1..1032: note = Description of Artificial Sequence: Synthetic coding sequence
  source 1..1032: mol_type = other DNA
atgggaggacctcggggagccggttgggtagctgccggactcctgctcggggcaggcgcatgctactgtatctaccggttgacacggggtagaaggcggggtgatagggagctcgggattagatcatccaaatctgctggcgcactagaggagggaacaagtgagggtcagctgtgcggtcgctctgcgagaccgcaaactggaggcacatgggaaagccaatggagtaagacctcccagcccgaggacttaaccgatggttcttatgatgatgtgctaaacgcagaacagttgcaaaaactcctgtacctgctggagtccactgaggaccccgtgattatcgaaagggcccttatcaccctgggcaataatgccgcattctcggtgaatcaagctatcatccgggaactgggtggcatacccatcgtggctaataaaattaaccactccaaccagtcgatcaaggaaaaagctctcaatgccttgaataatttgtcagtgaacgtggagaatcagattaaaattaagatttatatctcccaagtttgcgaagacgtgtttagtgggccactgaactcagccgttcagctcgcgggtctgacactgctgaccaacatgaccgtgaccaacgaccatcagcacatgctccactcctacattacggacttgtttcaggtgttgctgaccgggaatggcaacaccaaggtccaagtgctcaagctgctactgaatttgtccgagaaccccgcaatgacggaggggctccttcgagcccaggtggactcatctttcctgagcctgtatgactcccatgtggctaaggagatcctgcttagggtcctgactttgttccagaacatcaagaactgcctaaaaattgaaggtcatctggcagttcagcctacttttacagaaggctctctgtttttcctcctccacggagaggagtgcgcgcagaaaatccgagctctggtggatcatcacgacgctgaagtcaaggaaaaagtggtcactatcatccccaagatatag

SEQ ID NO: 214834 - DNA, 855 bp, synthetic construct
  misc_feature 1..855: note = Description of Artificial Sequence: Synthetic coding sequence
  source 1..855: mol_type = other DNA
atgggaggaccgagaggagccggatgggtggcagcagggctactcttaggcgcaggcgcttgctattgcatctatcgccttacccgaggcagacgtcggggagatcgcgagctcggcatccggtctagcaagagtgctgaggacctcacagacgggtcctacgacgatgtcttaaatgctgagcagttgcagaagctgctttaccttctggagagcactgaggacccagtgatcattgagcgcgcactgatcaccctcgggaataacgcagccttctctgtgaaccaggccattatcagggaactcggagggattcccatcgtggcgaacaaaatcaaccactccaaccaatctatcaaagaaaaagcccttaatgccttgaacaatctgagcgtgaatgtggaaaaccaaattaagattaagatctacatttcccaggtatgtgaggatgtttttagtggccctctgaattctgcagttcagctggcaggattgacgctgttgactaatatgacggtcactaacgaccatcaacacatgctgcacagttatattacagatctgtttcaagtgctgctaaccggtaacggaaacaccaaagtcgatagcagctttttgtccctatacgatagtcatgttgccaaggaaatactcctgcgagtgttgactctgtttcaaaatatcaaaaactgcctaaaaattgagggacacctcgcagtccagcccacctttaccgaaggctccctgttctttctacttcacggggaagagtgtgctcagaagatccgggctcttgtcgaccaccacgacgcagaggtcaaagagaaggttgtcacaattattccgaaaatttag

SEQ ID NO: 214835 - DNA, 855 bp, synthetic construct
  misc_feature 1..855: note = Description of Artificial Sequence: Synthetic coding sequence
  source 1..855: mol_type = other DNA
atggggggacctagaggggcaggatgggtggctgccggtctcctcctgggcgcaggggcttgctactgtatctacagacttaccaggggcaggcggagaggcgaccgggagttgggcatccgctcctccaaatccgcaggggctctggaggaggggacatctgagggtcaattatgcggacgtagcgctaggccacagactggtggcacatgggaatctcaatggtcaaagacaagccagccagaagacttaaccgatggaagctatgacgatgtcttgaacgcagaacagctgcagaagctgttatacctgctggaaagcactgaggatcccgtcatcattgagagggctctgattacgctaggaaacaacgccgcttttagcgtgaaccaggccatcatccgcgagctcggcggtattcctattgtcgccaataagatcaaccattcaaatcagtcaataaaagaaaaggcattgaatgctctcaataacctctccgtgaatgtggagaatcaaataaagatcaaagttcaggtcctgaaactccttctgaacctttctgagaatccagctatgactgaggggctcctgcgggcacaggtggactctagctttctctctttgtacgactcccacgtagcgaaggagatcctcctgcgtgttcttacactctttcagaatattaaaaactgtctcaaaatagaaggccacctggctgtgcagccaaccttcaccgagggctctctcttttttctgttacatggcgaagagtgcgcccaaaagatccgtgccctcgtggaccaccacgatgccgaagtcaaggagaaagttgtcacaattattcctaagatctag

SEQ ID NO: 214836 - DNA, 927 bp, synthetic construct
  misc_feature 1..927: note = Description of Artificial Sequence: Synthetic coding sequence
  source 1..927: mol_type = other DNA
atggggggtcccagaggcgcaggatgggtggcagccggtctgctgttgggtgccggagcttgttactgcatatatcgcttgacccgtggacgcaggcgaggagatcgagaactcggtatccgcagctcaaagtctgccgaagacctgacagatggaagctatgatgacgtgctcaatgccgaacagcttcagaagcttctgtacctcctggagagcacggaggatcccgtaatcattgagagggcccttatcacacttggaaataatgctgcctttagcgtcaatcaggctattatcagggagctgggaggtattccgattgtagccaacaagattaaccattctaaccagagcattaaagaaaaggccctcaatgctctcaataatctctctgtcaatgtcgagaatcaaataaaaataaaaatatacatctcccaggtatgtgaagacgtattttcggggccactcaatagcgccgtgcaacttgctggccttacattgttgactaatatgacagtcactaatgatcatcaacacatgctgcactcttatattacagatttatttcaggtcctgttgactggcaatgggaacacgaaagttcaggtccttaaactcctcttaaacctgagtgagaacccagcgatgaccgaaggtctactacgagcgcaggtagatagctccttcctttccttatacgacagccatgtcgcgaaagagatcctgctccgcgttctgacgttgttccagaatatcaaaaattgtctgaagatagaaggacacctggctgtccaaccgacgttcactgagggctcactgtttttcctgctacatggcgaagaatgtgcccagaaaattcgcgctcttgtagatcatcatgacgctgaggtgaaagagaaggtggtgaccatcattcctaaaatttag

SEQ ID NO: 214837 - DNA, 750 bp, synthetic construct
  misc_feature 1..750: note = Description of Artificial Sequence: Synthetic coding sequence
  source 1..750: mol_type = other DNA
atgggtggacctcggggagcagggtgggtggccgcaggcctgctcctcggcgcaggcgcatgttactgcatctatcggttgacacgagggaggaggcgaggcgacagagagctgggcattagatcaagcaaatccgccgaggacctaacggacgggtcttatgatgatgttttgaacgcggagcagctacagaaactgctctatttactagaatcaactgaggaccctgtcataattgaacgcgctcttatcaccctgggcaacaacgccgctttctccgtgaatcaggccatcattcgggaactgggaggcataccaatagtagccaataagataaatcattcgaaccagagcattaaggaaaaagccctgaatgcgctcaacaatctttcggtaaacgtagaaaaccagattaaaattaaagttcaggtactgaagctgcttctgaacctatccgagaaccccgcaatgaccgaggggctgcttcgagcccaggtcgacagctcctttctcagcctatacgatagccacgtcgctaaggaaattctccttagggtgttgaccctgtttcagaatataaagaattgtctcaagatcgagggacacttggccgtgcagcccacgttcaccgaagggtctctattttttctcttacacggcgaggaatgcgcgcaaaaaatcagagctctcgttgatcatcacgacgccgaagtgaaagaaaaagtcgtcacaatcatccctaaaatctag

SEQ ID NO: 214838 - DNA, 678 bp, synthetic construct
  misc_feature 1..678: note = Description of Artificial Sequence: Synthetic coding sequence
  source 1..678: mol_type = other DNA
atgggcggacctagaggtgcaggctgggtggccgcaggtctcctgctgggagccggagcctgctattgtatttaccgactgacaagaggaaggcgtagaggcgatagagagctcggcattaggagcagcaaatctgcagaggatctgacggatgggtcctatgacgacgtgctgaatgccgaacagctccagaaattgctgtatctcttggagagtactgaggaccccgtgatcatcgagcgagccctgatcactttgggcaacaatgccgctttctctgtgaaccaggctatcatccgggaacttggaggcatccccatcgttgcaaacaaaataaatcatagtaaccagtccatcaaagaaaaagccctgaatgctctcaacaacttgtccgtaaatgtggagaatcagataaagattaaggtggactcctcttttttgtccctatatgactctcatgtcgctaaagaaattctcttacgagttctgaccttgtttcagaatattaaaaactgtctaaaaattgagggacacctggccgtgcagccaacattcactgagggctcgcttttttttctgctccatggggaggagtgtgcacaaaagatcagggccctcgtagaccatcacgatgccgaagttaaggaaaaagtggttacaatcatcccaaaaatctag

SEQ ID NO: 214839 - DNA, 1362 bp, synthetic construct
  misc_feature 1..1362: note = Description of Artificial Sequence: Synthetic coding sequence
  source 1..1362: mol_type = other DNA
atgggaagaacaagggaagcgggttgcgtagcagctggggtcgtgatcggagccggagcatgttattgtgtgtatcggctggcttggggacgcgacgagaacgaaaagatctgggacgaagacgaggagtcaactgatacgtccgaaattggtgtggagaccgttaaaggcgctaagacaaatgcaggtgccggaagcggcgcaaagttacagggcgattccgaagtgaaacccgaggtaagtctggggctagaggattgccctggtgtgaaggaaaaggcacattctggaagccattcaggcggaggcttggaggcaaaagctaaggccttgtttaacacccttaaggagcaagcctccgcaaaggctggaaagggggctcgagtaggcaccatctccggcaatagaaccttagcaccatcgctgccatgccccggaggtagaggcggaggctgccacccgactcgcagtggctccagggccggaggcagagccagcggaaaaagtaaggggaaggccagatcgaagtctactcgcgctcccgcaaccacctggcccgttcggcgaggcaagtttaacttcccatacaagatagacgatattctgtctgccccagatctgcagaaggtacttaatatcctggaacggaccaatgaccctttcattcaagaagtcgcgctggtgacgctggggaacaatgccgcatactccttcaaccaaaacgcgatccgcgaactcggaggggtccctatcatagcgaagctgattaaaacaaaagatccaatcattagagagaagacatacaatgccctgaacaatttgagcgtgaatgccgagaatcaggggaaaataaaaacatatattagccaggtgtgcgatgacacaatggtgtgtaggttggatagcgccgttcagatggccggactgcggttgctcaccaacatgaccgtgacaaaccactaccaacatttgctgagctactctttccccgatttcttcgccttacttttcctgggtaaccacttcaccaagattcagataatgaaactgataattaatttcaccgaaaatccagctatgacaagggaattggtgtcatgcaaggtgcctagcgaattgatttctctcttcaacaaagagtgggacagagagatcttgctgaacatcctgaccctgttcgagaacattaatgataacatcaaaaatgagggattggcttctagtaggaaggagtttagtaggagctcactctttttcttattcaaggagtccggcgtgtgcgtgaagaagattaaagcactggccaaccataacgacctggtcgtgaaagtgaaggtgttaaaggtactcaccaagctgtag

SEQ ID NO: 214840 - DNA, 477 bp, synthetic construct
  misc_feature 1..477: note = Description of Artificial Sequence: Synthetic coding sequence
  source 1..477: mol_type = other DNA
atggtttgtcgcttagatagcgccgtacagatggccggtctgcggttgctcaccaacatgactgtgacaaaccactaccagcatttactgtcttactccttcccagatttcttcgcactgctctttctaggcaatcacttcacaaaaatccagataatgaagctcatcataaacttcacagagaacccggctatgacacgtgaactcgtgagctgcaaagtaccctctgaactaatctctttgtttaataaagagtgggatcgtgaaatcctgctcaacatcttgaccctattcgagaatattaacgataatattaaaaatgaagggctggcctctagtcgtaaagaattttcaaggtcttcactgttcttcttgtttaaagagagtggagtctgtgttaagaagataaaggcgcttgctaaccacaatgacctggtggttaaggtgaaggtgctgaaagtgctcaccaaactgtag

SEQ ID NO: 214841 - DNA, 1899 bp, synthetic construct
  misc_feature 1..1899: note = Description of Artificial Sequence: Synthetic coding sequence
  source 1..1899: mol_type = other DNA
atgtcaagagttagggacgcgggatgtgtggctgcaggaatcgtaatcggggcaggggcttggtactgcgtgtacaagtatacccgagggcgagaccaaacaaagaagagaatggctaagccgaagaatagagcagtcgctggcaccggagcacgcgctagggccggtctcagagctggatttactattgatctgggcagtggcttttcacctccgacacctgtgcgcgctgaagccgaggaccgcgcacaggatgaggcttctgccctagatacggtcggcgctgaggccgttgctcccgcagccagtagcgcggaggcccagtctggagccggaagccaggcccaggaggccgatggcgcaggcgtcggacctaaagcggaatcggttgtcggtgcggctatggcctctgccatagcgcctcccccaggcgtgacagaagccctaggggcagccgaggctcccgctatggcaggtgctcccaaggtggccgaagctccacgggaggcggagacaagtagggccgcagtcccacccggaaccgtcgtgccaacagaggccgctgcaccgaccgaagtcacagagggacccggtgtggctgcacctacgaaagtggcagaggcacctggtgtagctagcccaaccgaagcggcagaggctcccgttcccgctacaccgacgggtgctgcggcacctacaggggctgccgaaagccctggcactagcgggtcacccagaacagctgtggtgcctggcacatcagcggctaagaaagcgacccccggtgcacacacaggcgcaattccgaaggctacctcggccaccggtgccgttccaaaggggggaggcaaaggagtgacccggagcaggaatgggggaaaaggaaaggggaagaaatccaaggtggaagttgacgaattgggtatgggttttcgccctggggacggggcagcagctgctgcggcagcgtctgcaaatgggggacaagccttcttggctgaagtaccggatagtgaggagggagaatccggatggaccgacacagagagcgattctgattctgaacccgaaacacagcgcagggggagagggaggcggccagtagccatgcagaagcggccattcccttatgagatcgacgagatcctcggggtgagggatctgcggaaggtcctggcacttcttcagaagtctgacgacccctttattcagcaagtcgctcttctgacactaagtaataacgcaaactactcgtgcaatcaggaaacgatacggaaactcgggggactgcctattattgccaatatgattaataagactgatcctcatattaaagagaaggcccttatggccatgaataacctgagcgaaaactatgagaaccagggcagactccaggtttatatgaacaaagttatggatgatattatggcctccaatctaaactcagcggtccaggtggttgggttgaaatttctgactaacatgaccataactaacgactatcagcacctgctggttaactcaatcgctaacttcttcaggctgctttcgcaggggggagggaagattaaggtagagattctgaagatcctgtcaaatttcgccgagaaccctgatatgctgaaaaagttactttctactcaggtccccgcttcgttttcgtctctctacaattcttatgtggagagcgaaattctgatcaacgccctcacactgttcgagatcatttacgacaatctaagagctgaggtgttcaactatcgcgagttcaacaaagggagcctgttctatctgtgtaccacctccggggtgtgcgtgaaaaaaatcagggctctagccaatcatcacgacctgttggtgaaagtgaaagtgatcaagctggtgaacaagttttag

SEQ ID NO: 214842 - DNA, 1899 bp, synthetic construct
  misc_feature 1..1899: note = Description of Artificial Sequence: Synthetic coding sequence
  source 1..1899: mol_type = other DNA
atgagccgcgtaagagacgccggatgtgttgcagctgggatcgtaatcggggcaggtgcatggtattgtgtctataagtatacccgcggacgcgatcagactaagaagagaatggctaagcctaagaatcgcgctgtagcaggaactggggcacgcgctagagccggactgagggctggatttacgatcgacttgggctccgggttttctccacctacgccggtcagagccgaggcagaggaccgggctcaggatgaagcatccgcactggacaccgttggcgctgaggccgtggctcccgctgccagctccgccgaggcccagtctggcgcaggcagccaagcccaggaggctgatggagctggggtggggcctaaagcagaaagtgttgtgggagccgcaatggcttctgcaatcgcccctccccctggtgtgaccgaagcacttggtgcagctgaggccccagctatggctggggctcccaaggtggcggaggcccctcgggaagccgagacatcaagagcagccgtgccccctggcactgtcgtacctaccgaggcggctgctcccaccgaagtgaccgagggaccgggagttgcagccccaacaaaagtggcagaagctcccggagtcgcatctccaaccgaggcggctgaagctccagttccagcaacacctacaggagctgcagcaccaacaggtgctgctgagagcccagggacatcaggatcccctagaacagcggtggtgccagggacatctgccgcaaagaaagcgacccctggggcacacacgggtgccatcccaaaagcaacctccgcaactggagccgtgcccaaaggtgggggtaagggggttactaggtctcggaacggcggtaaaggcaagggcaaaaaatctaaggttgaggtggacgaattgggcatgggatttaggccaggcgatggcgctgccgcagctgccgctgcctccgctaatggcggacaggcatttctggcagaggtaccagattcagaagagggggagtctggctggacggacactgaatctgactcggactccgagccagaaacacagcgtcgcggaaggggtcgcagacctgtggccatgcagaagcgccctttcccctacgaaatcgacgaaatcttgggcgttagggacctgcgcaaggtcctggccctgttgcagaagtcggacgaccccttcattcagcaggtagccttgcttaccctttcaaataatgcaaactacagctgtaatcaagagaccattagaaagctaggaggcttacccataattgccaatatgattaataaaactgatccacatattaaagaaaaggccctgatggcgatgaacaacctgtctgaaaactacgagaatcagggccgtctccaagtctatatgaacaaagtgatggacgatataatggcctcgaatctcaacagtgccgtccaagtggttggcctgaagttcctgacaaacatgaccatcactaacgattaccagcatctgctcgtgaacagcattgcgaactttttccggctgctgtctcaaggagggggtaagatcaaggtggagattctcaagatcctttccaacttcgcagagaacccagacatgctgaagaaacttttgagtacgcaggtgccagctagcttttcctcactgtacaatagttacgtggagtccgagatattaattaatgccctcactctttttgagatcatctacgataatttacgggctgaagtcttcaattaccgcgagtttaacaaaggaagcctgttctatctttgtacaactagcggtgtatgcgtgaaaaagatccgggcacttgcgaatcatcacgacttgctggttaaggttaaggtaattaaactggtgaataaattttag

SEQ ID NO: 214843 - DNA, 1899 bp, synthetic construct
  misc_feature 1..1899: note = Description of Artificial Sequence: Synthetic coding sequence
  source 1..1899: mol_type = other DNA
atgagccgggtgagggacgccggatgtgtggccgcaggcatagtcattggcgctggtgcgtggtactgcgtgtataagtatactcggggacgggaccagacgaaaaaacgtatggctaaaccgaagaacagggccgtagccggaaccggagctagggccagagccggtctccgcgcaggctttacaatagatctcggcagtggtttcagtcctccaacacccgtaagagccgaggccgaggatcgtgcccaggacgaggcatccgccctagataccgtaggcgctgaggcagtcgccccagccgcaagttctgcagaagcacagtctggagcaggatcacaagctcaggaagctgacggcgcaggcgtgggccctaaagcggaatccgtggttggggctgccatggcttctgctattgctcctccccctggggtaacagaggccctgggtgccgcagaggcaccagccatggctggcgcaccaaaagtggccgaggcacctagagaggcagagaccagcagggccgcagtgcctcctggaacggtcgttccaaccgaagcagccgctcccactgaggttaccgagggacctggtgtagccgctcctacaaaagttgccgaagcaccaggtgtggcctcccctaccgaggccgcagaggccccagtgcctgcgactcccaccggagccgctgcccctactggcgcagcagaatcacctgggacctccgggtctcccagaaccgcagttgtgcctggaacctccgctgcaaagaaggcaaccccgggagcacacactggggctattcccaaagctaccagcgctacgggagcagtaccgaaagggggaggaaaaggggtcacccgctctaggaatgggggaaaagggaaaggcaaaaagtctaaagtcgaagtggacgagcttgggatgggctttaggcccggagacggggctgccgctgccgcagccgctagcgctaacggtgggcaagcttttctcgctgaagtgccggatagcgaggagggagaatctgggtggactgacaccgaatctgactccgactcagagcccgagacccagcggagaggtagaggtagacgtcccgttgcgatgcagaaacgtccttttccctacgaaattgacgagattctcggcgtgagggacttgcggaaggtgctggccctgttgcaaaaatccgacgatccattcatccagcaagttgctcttctgactcttagtaataatgctaattactcatgtaaccaggaaacaattcggaaactggggggtctacctattatcgcaaacatgattaacaaaacagaccctcatatcaaagagaaggccctcatggccatgaataacttaagtgaaaactacgaaaaccaaggtcgcttgcaggtctatatgaataaggtgatggatgatatcatggccagtaacctgaatagtgctgtgcaggtcgtgggtctgaagtttcttacaaatatgaccataacaaatgattaccaacatctcctcgttaatagcatcgcgaatttctttcggttactttcacaggggggaggaaaaatcaaggtggagatcttaaaaatcctgtccaacttcgccgagaacccggatatgcttaaaaagcttttatcaacccaggtgcccgctagcttctcatccctgtacaactcctatgtggaatccgaaatactaattaacgcactaacgctgttcgagataatatatgacaaccttcgggcagaggtttttaattatcgcgagttcaataaaggctcactcttctacctttgtaccacctctggcgtctgtgtaaagaagatccgagccctggcgaaccatcatgatctattggtgaaggtgaaggtcatcaagctggtcaataagttctag

SEQ ID NO: 214844 - DNA, 504 bp, synthetic construct
  misc_feature 1..504: note = Description of Artificial Sequence: Synthetic coding sequence
  source 1..504: mol_type = other DNA
atgtcccgggtcagggatgccggttgtgtggcagcaggcattgtgatcggcgctggggcatggtactgcgtttacaaatacacacgcggaagggaccagaccaaaaagcgtatggctaaacccaagaacagggctgtcgccggaaccggagcgagagctcgggcaggactgcgagcaggtttcacaatcgatcttgggtcggggttttcaccacccacaccggtcagggctgaagctgaggaccgtgcccaagacgaggcatccgctctcgatacagtcggggctgaagccgtggctccagccgcttctagcgcagaggcccagtcaggagccggatcccaagctcaggaggcagatggtgcgggtgtgggcccaaaggctgagtcagtggtcggcgcagcaatggcctcagctattgccccacccccaggcgtgaccgaggctctgggcgctgctgaggcccctgcaatggccggtgcacctaaggtggccgaggcgccatag

SEQ ID NO: 214845 - DNA, 189 bp, synthetic construct
  misc_feature 1..189: note = Description of Artificial Sequence: Synthetic coding sequence
  source 1..189: mol_type = other DNA
atgtctcgcgtcagggatgccggatgcgtcgccgctggcatagtaatcggcgctggagcgtggtattgcgtgtataaatacactagaggtcgagaccagacaaagaagcgtatggccaagcccaaaaaccgcgctgtcgcaggcacaggagccagagctcgcgcaggacttcgcgcagggttcacgtag

SEQ ID NO: 214846 - DNA, 498 bp, synthetic construct
  misc_feature 1..498: note = Description of Artificial Sequence: Synthetic coding sequence
  source 1..498: mol_type = other DNA
atgagtagggttcgagatgccggatgcgttgcggcaggtatcgttattggcgcaggcgcttggtactgcgtgtacaagtatacccgtgggagggatcagaccaaaaagcggatggctaagcccaagaatcgtgccgtggccggaacaggtgcgcgtgctagggccggactaagggcagggttcactatagacctaggtagcgggtttagcccccctacgcccgtcagggctgaggcggaagatcgggctcaggacgaagcctctgccctggatacagtcggggctgaggctgtagcgccagcagcttcgtctgcagaagcccaatcgggagctggatcacaggcacaggaggccgatggtgccggagttggaccaaaagccgaaagcgtggtgggcgcagctatggcttcagccattgcccctcctccaggtgtgactgaggcgttgggcgctgcagaggcccctgcgatggccggagccccaaaggtcgcagaatag

SEQ ID NO: 214847 - DNA, 318 bp, synthetic construct
  misc_feature 1..318: note = Description of Artificial Sequence: Synthetic coding sequence
  source 1..318: mol_type = other DNA
atgtctcgcgtgagagatgccggatgtgtagccgctggaattgtgatcggcgcaggcgcatggtattgtgtgtataaatacactcggggtcgagaccagactaagaagcggatggccaagccaaagaaccgcgcagtcgcagggacaggcgcacgggctcgggcaggattgagagccggattcaccatcgatctgggatcaggcttctcaccaccgacacctgtgcgcgcagaagctgaggaccgtgcacaggacgaagcatccgctctcgacactgttggtgcagaggccgtggccccagccgcatcctcagcatag

SEQ ID NO: 214848 - DNA, 282 bp, synthetic construct
  misc_feature 1..282: note = Description of Artificial Sequence: Synthetic coding sequence
  source 1..282: mol_type = other DNA
atgagtcgcgtccgcgacgccggatgcgttgctgccggaatcgtgatcggggctggggcttggtactgcgtctacaagtacacccgcggaagagatcaaacgaagaaaaggatggcaaaaccaaaaaatcgcgcagtagcaggcactggggctcgtgcccgtgctggccttcgcgcaggatttactatcgacctcgggagcggtttttcccctcccacaccagtcagggcggaagcggaggaccgagcccaggacgaggcaagtgctttggacactgtgtag

SEQ ID NO: 214849 - DNA, 1140 bp, synthetic construct
  misc_feature 1..1140: note = Description of Artificial Sequence: Synthetic coding sequence
  source 1..1140: mol_type = other DNA
atggggtatgccaggaaggtcggctgggtgacagcgggtttggttatcggagccggagcctgttactgcatctaccgacttactaggggaagaaagcagaataaagaaaagatggcagagggtggcagtggtgatgtggacgatgctggtgactgttccggggcaagatataacgactggagcgatgacgacgacgacagcaacgagtccaaatctattgtgtggtaccccccttgggcacgcatcggtacagaggccggaacccgggctagagccagagcaagggccagggccacacgggctcgacgtgcggtgcagaagcgggcatctcctaatagcgatgatactgtcctctcaccacaggaattgcagaaagtgctgtgtcttgtggagatgagtgaaaaaccttatatccttgaggccgctctcattgctctgggcaacaatgcggcatatgctttcaatcgggacattatcagggatctcgggggtctgcctatagttgctaagattttgaatacgcgcgaccccatcgtgaaggagaaggcacttatcgtgctgaacaaccttagtgttaatgccgaaaaccagcggaggctcaaggtatatatgaatcaagtgtgtgacgatacgatcacctcccggttgaactcctctgtgcagctggcgggtctgcgcctgcttactaatatgactgtgacaaatgagtaccagcacatgctggcaaattccatctccgatttttttagacttttcagcgcaggaaatgaggagactaaactgcaagtgttgaaactgctcctcaatctagccgagaacccggctatgacaagggagttgctgcgggcacaagttcctagctccttggggagtctgttcaataaaaaggagaataaagaggttatcctgaagctgcttgtaattttcgagaatatcaacgataacttcaagtgggaggagaacgagccaacccaaaaccagtttggcgagggcagcctattctttttcctgaaagagttccaagtgtgcgccgacaaagtcctagggatcgagtcccatcacgatttcctggtgaaagtgaaagtaggtaagttcatggccaagctggcagaacatatgttcccaaagagtcaggaatag

SEQ ID NO: 214850 - DNA, 1140 bp, synthetic construct
  misc_feature 1..1140: note = Description of Artificial Sequence: Synthetic coding sequence
  source 1..1140: mol_type = other DNA
atgggatacgctcgtaaagtcggatgggtgaccgctggccttgtaatcggagctggggcatgttactgtatttatcgactgacgagaggccgtaaacaaaacaaggaaaaaatggctgaagggggatctggcgacgtcgatgatgccggagactgtagcggggctagatataatgactggtccgatgatgacgacgactctaacgagagtaaaagtatcgtgtggtaccccccttgggccaggatcgggacggaagctggaactagagctagagctcgggcaagggccagggccactagagcacgcagagctgtgcagaagagggcttctccgaactctgatgacaccgtgctcagcccccaagagcttcagaaagtcctgtgcctggttgaaatgtcagaaaagccatatatcctggaggccgcactaattgctctgggcaacaacgcagcttacgcgttcaaccgagatataatacgcgacctggggggtctccctatcgtggctaagattttgaacaccagggatcccatagtgaaagagaaagccctgatcgtcttaaacaatctgtcagtaaatgctgagaatcaaaggcgcctaaaagtatacatgaatcaggtgtgcgacgacacgattactagccgattgaacagctccgtccagttagccggtctgcggcttttgacaaacatgaccgttaccaatgagtatcagcatatgctggccaatagcatttccgatttcttcagactgttttctgccggaaatgaggagacaaaattgcaggtcctcaagcttctactaaacctcgcggagaaccccgctatgacaagggaacttctgagagcacaggtgccatcctccctcggaagtttgttcaataagaaggaaaacaaggaagttatcctgaagttacttgtcattttcgagaacataaacgacaacttcaaatgggaagaaaatgaacccactcaaaaccagtttggcgaagggagtctcttctttttcctcaaggaatttcaagtgtgcgccgacaaggtcctaggtatcgagagtcaccatgattttctggtgaaggtcaaagtgggaaagttcatggcaaagctggcagaacatatgtttccaaagagccaggagtag

SEQ ID NO: 214851 - DNA, 2889 bp, synthetic construct
  misc_feature 1..2889: note = Description of Artificial Sequence: Synthetic coding sequence
  source 1..2889: mol_type = other DNA
atggaggattgcaacgtgcacagcgccgcttccatcctcgcttctgtgaaggagcaggaggctcgatttgagaggctgacaagagccctggagcaggaaaggcggcacgtcgccctgcaactggagcgtgcacaacaacctggcatggtgtctggaggaatgggatccggacagcctcttcccatggcatggcagcagctggtgctgcaggagcagtctccaggatcccaggctagcttagccaccatgcccgaagcgccagacgtgctggaagagaccgttaccgttgaggaggatccagggaccccaacaagtcacgtatctatcgtgacttccgaggacggcaccacaaggcgcactgagacgaaagtcaccaaaacagtaaaaacggtcaccacccggaccgtccgccaagtgcccgttggacctgacggtctccccctacttgatggaggtccccctttaggacccttcgcggatggagctttggatcgtcattttctgcttagaggcggagggcctgtagccacactttcacgggcttacttaagttcaggagggggtttccctgagggacctgagcctagagacagtccctcttacggttcactcagtcgcggactgggcatgcgcccacctcgcgctgggccattgggccctgggcctggcgacggatgctttaccctcccaggccacagggaagccttcccagtgggcccagagcccggacctcccggtggacgttccctgccagaacgatttcaggccgaaccttatgggttggaggatgatactcggagcttggccgcagacgacgagggagggccagaactggagcccgactatggaaccgcgacgagacggcgaccagagtgcgggaggggcctacacaccagggcttacgaagacacagccgacgatggcggagagctcgcagatgagcgccctgcatttccaatggtgacagccccacttgcacaacctgagaggggctctatggggagcctggatcggctggtcagaagaagccctagcgttgactcggcacgaaaagagcctagatggcgggatcccgagcttcctgaggtgctggcaatgttacgccatcccgtggatcccgtgaaggccaatgcagccgcttatctgcagcatctttgtttcgagaatgagggcgtcaaaaggagggtccggcagttacgaggattgccactgctcgtcgcattattggatcaccctagagccgaagtgcgaaggagggcatgtggcgctctacgaaatttgagctacggcagagacacagacaataaggccgctataagggactgcgggggagtcccggcactggtgcggctgctgagggccgctagggacaatgaggtccgcgaactggtgacaggcaccctgtggaacttgagctcgtacgagccattgaaaatggtgatcattgaccacgggctccagacgcttactcacgaagtaatcgtgccccattccgggtgggaaagggagccaaatgaggatagcaagccccgtgatgcagagtggaccaccgtgtttaagaacacgtcaggatgtcttcgaaatgtgagctcagacggcgctgaagcaaggcggaggcttcgggaatgtgagggcctggtggatgccctgctgcacgccctgcagtctgccgtaggaagaaaggatactgataataagtccgtggaaaactgcgtgtgcattatgcgaaatctctcctatcatgttcataaagaagtccccggtgctgatcggtaccaggaagccgagcctgggccactgggtagcgctgtcgggagtcagagaaggagaagagatgatgcgtcctgtttcggcggtaaaaaggcaaaagaggagtggtttcaccagggtaagaaggatggggagatggataggaattttgataccctggatctccccaaaaggaccgaagcagcaaaagggttcgagctgctgtaccagccggaagtagtgaggctttacctgagtctgctaaccgagagtcgcaattttaacactttggaagctgccgctggtgcccttcaaaatctctcagctggcaactggatgtgggccacttacattcgagcgacagtcaggaaggagcggggtttgccagtgctcgttgaacttctgcaatccgagacagataaagtcgtaagagcggtggccatcgccttgcgaaatctatcattagaccgcaggaataaggacctcatcggtagctatgccatggctgagctcgtgaggaatgtgcgcaacgcccaggcaccacctcgaccgggagcatgtctcgaggaggacactgttgtggccgttcttaatactattcatgagatcgtcagcgatagcctggataacgctcggtccctgctgcaggctagaggtgtgccggctctggtggcactggtcgctagtagccagtctgtgagggaagcaaaagcagcctcccatgtgttacagaccgtttggagctacaaagaactgcgcggaactctccagaaggatggatggaccaaggcgagattccaatccgcagcagccactgctaaggggccaaaaggcgcactgtcgccaggcggtttcgatgacagcactctcccactcgtggacaaaagcctcgagggagaaaagacagggtctcgggacgtgatcccaatggatgctttgggcccagatgggtactccactgtcgaccgcagggagagacggcctcgcggagcatcctctgctggagaagccagcgaaaaggaacccctgaagctcgatcccagtcggaaagcgcctcccccagggccttcaagaccagcagtccgtctggtggatgccgtaggtgatgcaaaaccgcagcctgtggatagctgggtgtag

SEQ ID NO: 214852 - DNA, 2700 bp, synthetic construct
  misc_feature 1..2700: note = Description of Artificial Sequence: Synthetic coding sequence
  source 1..2700: mol_type = other DNA
atgcctgctgagctcagacaagaacagtctcctggctctcaggcctcactcgcaactatgcctgaggccccagacgtgctggaggagactgtgacagtggaagaagatccaggtacaccaaccagccacgtgagtattgtaacaagtgaagacgggacaacaagacgtaccgagacgaaggtgaccaaaaccgtgaaaacagtgactacaagaacagtgaggcaggttccagtcgggcctgatggtttgccactgctggacggcggtccccctcttgggccattcgccgatggcgcattggatagacatttcctactgcggggtggcggacctgtagccacgttgtcccgggcttacttaagtagtggcggtggcttccctgagggcccagaacccagagattcaccgtcctatggaagcctgagtagaggacttgggatgcgcccacccagagcaggccctctggggccaggacccggtgacgggtgcttcacacttccaggccatcgagaggctttcccagtggggcctgagcccggaccacctggcggacggtcattacccgagcgatttcaggccgagccttatgggctggaggacgatacacgttcattggccgctgacgatgaaggcggaccagagctggaacccgactacggcaccgctacacgcaggcgacctgaatgcggcagagggttgcacactagagcctatgaggatactgcagatgacgggggagagctagcagacgagcgccctgcttttcccatggtaacagctccactggctcagccagaacgaggctccatgggcagcctcgacagactggtgcgccgttccccaagcgttgactctgcaaggaaagaacctcgctggagggaccctgagttgcccgaggtacttgccatgcttcgccatccagtggatccagtcaaagccaatgccgcagcttatctccagcatctgtgtttcgagaacgagggcgtgaagaggcgcgtccggcagttacgtggtctacccctgctggtggctttgctggatcatcctagggccgaagtgcgccgtcgcgcatgcggagccctgaggaacctcagttacgggagagacaccgacaataaagctgccataagagactgcggtggggtgccagccctggtgcggctgctccgggcagctcgcgataacgaagtgcgtgagctcgtcactgggacactctggaatctttccagctacgagccactgaagatggtcatcatagatcatgggttgcaaaccttaacccatgaggtgatagttccccattctggttgggagcgcgaaccaaacgaagattcaaaaccaagggatgctgagtggacaactgtgtttaaaaacacaagcggctgtttgaggaacgtgagctcagatggggctgaagcacgaaggcggcttcgggagtgcgagggcctggtcgacgcattactgcacgcgctgcaatccgctgtaggacggaaagacactgataacaaaagcgtagagaactgtgtctgtattatgcggaacttgagctaccacgttcacaaagaagtgccaggagccgatagatatcaggaggcagagcctgggcctctggggagcgctgtgggatctcagcgaaggcggagagatgacgcatcctgcttcggaggcaagaaggctaaggaggagtggtttcaccagggaaaaaaagacggggagatggatcggaattttgacaccctggatttgcctaaacggacagaagccgcaaagggttttgagctgctatatcaaccagaggtcgtcaggttgtatctgtcgcttctaaccgaaagcaggaattttaacacactggaagctgcagcgggtgcattgcagaacctctccgccggaaactggatgtgggcaacgtatatacgtgcgaccgtccgtaaagagcggggtctgcctgtcttggtggagttactacagtccgaaaccgacaaagtagttcgggctgtggccatcgcgttacgaaacctgagcctggacagacgcaacaaggacctgatcggcagttatgccatggctgagctcgtccggaatgttagaaacgcgcaggctcccccacgcccaggagcttgtctggaggaggacaccgttgtggcggtgcttaatacaatccacgaaatagtgagcgatagtcttgacaatgctcggtcactcttgcaggccagaggggtcccagctctggtggcacttgtcgcgtcatcacagagtgtccgcgaagcgaaagccgcttcccatgtcctccaaacagtttggagctataaggagcttagaggcaccctccaaaaagatggttggacgaaggcaagatttcagtcagccgctgcaacggccaaggggcctaagggcgctcttagccccggaggatttgatgacagtaccctgcccctggtcgacaagagtcttgagggggaaaaaactgggtcccgggacgtgatccccatggatgcccttggtcctgacggatattcaacagtggaccgtagagaacggaggccacgtggggcttcctccgccggtgaagcttcagagaaggaacccctcaagctggatccatcccggaaggctccacctcccggtccgagccggccagctgtgcggctggtggacgctgtcggagatgcaaagccacagccagtggactcgtgggtctag

SEQ ID NO: 214853 - DNA, 2700 bp, synthetic construct
  misc_feature 1..2700: note = Description of Artificial Sequence: Synthetic coding sequence
  source 1..2700: mol_type = other DNA
atgcctgctgagctgaggcaggaacagtctcctgggagccaggcaagcctggctaccatgcctgaagcaccagacgtcttggaggagacagtgactgttgaggaagatcccggtaccccgacatcacatgtgtcaatcgttacttcagaggatggtacgacaagacggactgagaccaaggtaaccaagactgtcaagactgttaccacaaggacggtgcggcaggttcctgtgggacccgatggcctacctctgctggacggaggcccacccttgggcccatttgcagacggagccctggaccggcattttctgctgagagggggtgggccagttgctacgctcagtagggcttatcttagctcagggggaggctttcccgaaggcccagagcctcgggatagcccaagctacggatccctgtctaggggcctggggatgcgtccgccaagagctggacccctgggtccgggtcctggagacggctgttttacactgccaggtcatagggaagccttccctgtcggcccagaacctggccctccaggcggacgctctctgcctgagcggtttcaagcagagccgtatgggctggaggacgatactcgcagcctggctgcagacgacgaagggggtccggaactggagccagactatgggactgctaccagaagacgccctgaatgtggaagaggcttacacacccgggcatacgaggacacggctgacgacggtggcgaacttgccgatgaacggcctgctttcccaatggtgaccgcaccactcgcccagccagagcggggttctatgggatctcttgaccgactggtgcggcgaagtccttccgtggatagtgcgagaaaagagccacgctggcgcgatccggaactgccggaggtgctcgcgatgctccgacatcctgtggatccagtcaaagcaaacgccgctgcctacctgcagcatctttgcttcgagaatgaaggagtgaagcgccgtgttagacagttgcgaggtcttcccctgctggtggctttgctcgatcatcccagagccgaagtgagacgcagagcctgtggcgcactaaggaacctttcctacggtcgggacaccgacaataaagcggcaatcagggactgcgggggagtgcccgctttagtaaggctgctgagggctgccagggacaatgaggtgagggagctggtgaccgggaccctgtggaatctgtcctcttatgaaccactcaagatggttatcatcgaccatggcctgcaaactctgacccacgaagtgattgtgcctcactccggatgggaaagagagcctaacgaagacagtaagcctcgagatgctgagtggacgaccgtgtttaaaaacacatctggctgtctgcgcaatgtgagttctgacggagcagaggccagacgtcgtctgagggagtgtgaaggcttggtggatgcgctgctgcacgcccttcaatctgcagtcggacggaaggacacggacaataaaagcgttgagaactgcgtctgtattatgaggaatttgtcttatcacgtccacaaagaggtgccgggtgcagataggtaccaggaggctgagcccggtcctctgggcagcgctgtgggatcccagcgacgtaggagggacgacgcctcttgttttgggggaaagaaagctaaagaagagtggttccaccaagggaaaaaggacggtgaaatggaccggaattttgacactctcgacctgccaaaaaggacagaggccgcaaaggggttcgagctcctctatcagcctgaggtcgttaggctttatctctccctgctcaccgagtctcggaatttcaacactctagaggccgcagctggtgccctgcagaatctttccgccggaaactggatgtgggctacatacatccgcgcaacagttagaaaagagcgtgggctacctgtactggtggagctgctgcagtcagaaactgataaagtcgtgagggctgtggccatcgccctgagaaacctgagtctcgataggcgcaacaaagacctcatcggatcctacgccatggccgagctggtgagaaatgtgcgaaatgcacaggcgccaccgagaccaggcgcttgcctagaggaagacactgtagtcgccgtcctgaataccatccacgagatcgtgtccgactctttagacaatgccaggtctcttctgcaggcacgaggggttcccgctctggtggccctcgtagcctcttctcagtcagtcagggaggccaaggctgcaagtcacgtactgcagactgtgtggtcttataaagagctacggggtactctgcagaaagacgggtggacaaaggcacgctttcagtcggcagccgctaccgcaaaagggcctaagggcgctttgagccccggtgggttcgatgatagcaccctcccccttgttgacaagtcacttgagggagagaagacgggtagccgggatgtcatcccaatggacgccctcggtcccgatggttactccacagtcgacaggcgggagcgcaggccgcgaggggcatcttccgccggagaggcctccgaaaaggaaccccttaaactcgatcctagcagaaaagcaccaccacctgggccttcccgcccagccgtgcggctcgtagacgctgtgggtgacgccaaaccccaacctgtggactcttgggtctag

SEQ ID NO: 214854 - DNA, 2871 bp, synthetic construct
  misc_feature 1..2871: note = Description of Artificial Sequence: Synthetic coding sequence
  source 1..2871: mol_type = other DNA
atggaggactgcaatgtgcattccgcggctagcatacttgcttcagtgaaggagcaagaggcccgatttgagcgcctcacccgcgcactggagcaggaaaggcgccacgtggctctccagttggagagagcccagcaaccgggtatggtgtcaggaggaatggggagcgggcagccactgccaatggcctggcagcagctcgtacttcaggaacagtctcctggctctcaagcatctctggccacgatgcccgaagcgccagacgtgctagaagagaccgtcacagtggaagaagaccctggcacgcccacttctcatgttagcatcgtgacctcagaggacgggaccacccgccgaactgagactaaagttactaaaacagttaaaaccgtgaccacccgcacagtgcggcaagtcccggttggccctgacgggcttcctcttctcgacggtgggcctcctctaggtccgttcgccgatggcgcactggatagacatttcctgttacgcggtggcggtcctgtagccaccctgtcccgtgcatatctttctagtggcggtggcttccccgaaggtccagagcccagagatagcccatcatacggttccctgagccggggactcgggatgaggccccctcgcgctggcccactgggtcctggacctggcgacggatgcttcactctgcccggtcatagagaagcatttccagttggccctgagcccggtccacctggcggacggtcacttcctgaaaggttccaggccgaaccatatgggctggaggacgatactcggagtctggcagctgacgatgaaggtggccctgagctagagccagattatggtaccgcaaccagaagacgaccagagtgcggcagaggcttgcataccagagcctacgaagatactgctgatgatggcggtgagctagccgatgagaggccagcttttcctatggtgacggctccgcttgcccaaccagaaagggggtccatgggctccctggacagacttgtccgacgcagcccctcggtggacagtgcacgcaaagagcccagatggcgggaccccgagctgcctgaggtgcttgccatgctcaggcatccagtggaccctgtgaaagcaaatgccgcagcatacttgcagcatttgtgttttgaaaatgaaggcgtgaagcgcagagtccgccagttgcggggattgccccttttggtggcactattggatcacccacgagctgaagtgagacgaagggcatgcggcgcattgcgcaacctctcctatggacgtgacactgacaataaggctgctatccgagattgtggcggagtcccggctctcgtgcggcttctgcgagctgctcgggacaacgaagtgcgtgaactcgttacaggcacgctctggaatctcagctcctacgagcccctcaagatggtgatcatagaccacggcctgcagactctcactcacgaggtcatcgttccccatagcgggtgggagcgagagccaaatgaagacagcaaacctagggacgcggagtggaccacagtttttaagaacacatccgggtgcttgcgcaacgtctctagtgacggagctgaagcccgacggagactgcgcgaatgcgagggactggtggacgcattgcttcatgctctccaatccgccgtcggaaggaaggataccgacaacaagagcgtcgaaaattgtgtgtgcataatgagaaacttgtcataccacgtgcataaggaggtccccggtgccgacagataccaagaggcggaacccggacccctgggtagtgcggtcggaagccaacgtaggcgacgggacgatgcgtcctgttttggtgggaaaaaagcaaaaggcaagaaagatggtgaaatggaccgcaactttgacacactagacctgcccaagagaaccgaggccgctaaaggctttgaactgctgtatcagccagaggtagttagattatacctcagtctgctcaccgagagcaggaactttaacacactggaagctgccgctggcgctctgcaaaatctttctgctggcaattggatgtgggccacttatatccgggctacagtgagaaaagagcggggactcccggtgctggtcgagctcctgcagagcgagactgataaagtggtgcgggctgtcgcgattgccctgagaaatctgagtttagataggcgaaacaaagatttgattgggtcttacgctatggccgagctggtgaggaacgtccgcaatgctcaggcccctcccaggccaggggcatgtctcgaggaagacactgtcgtggctgtgcttaacacaatccatgagatagtgtctgattctctcgataatgcccgtagcctacttcaggctaggggagtgcccgcactggtggctctcgtggccagctctcagtctgtccgggaggccaaggcagcttcacatgtcttacagaccgtgtggagttacaaagagttgaggggcacactgcagaaggatggctggactaaggcgcgatttcagtccgcagccgctaccgccaagggtcccaagggcgctctctccccaggagggtttgatgacagtaccctgccactggttgataagtctctagagggggagaagactggaagcagagacgtgatccccatggacgctctgggccctgacggctacagtacagtggatcgcagagaacgacgaccgagaggcgctagtagtgcgggtgaagctagcgagaaagagccactgaaattggaccccagtagaaaggctccgcctccaggcccatcacgaccggctgtgaggctggtggacgcagtcggtgacgcaaaacctcaaccagtggactcttgggtgtag

SEQ ID NO: 214855 - DNA, 2682 bp, synthetic construct
  misc_feature 1..2682: note = Description of Artificial Sequence: Synthetic coding sequence
  source 1..2682: mol_type = other DNA
atgcccgcagaactgagacaggaacaatctcccggatcacaggcatctctcgctacgatgcccgaagccccagatgttctagaagaaaccgtgactgtggaagaggatcccggtacgccaacctcccacgtgagtatcgtcacctccgaagatggtacgacccgccgtactgagaccaaggtgactaagaccgtgaaaacagttactacaagaaccgtgagacaggtgccagtgggtccagatgggctgccactgcttgacgggggacccccattgggaccctttgcagacggcgcactggatcgccacttcttgctgaggggtggaggtcccgtggccacactttcaagagcctatttgtctagcgggggagggtttccagagggacctgagccacgagactccccaagttatggtagcttgagtcgtggcctggggatgcgacccccaagggcaggtccgctcgggccaggtcctggagacgggtgtttcaccctgccaggtcatcgggaggctttccccgttgggcctgaacctggtccccctgggggaagatcccttcccgagcggttccaggccgaaccctatggcctcgaggacgacactcgtagcctggctgctgacgacgaaggagggcctgaattagagccggactatggcaccgccactcggcgaagaccggagtgtggcaggggtctccatactcgcgcttatgaggacactgctgacgatggcggtgagcttgccgacgaacgccctgcattccccatggttaccgccccactcgctcagcccgaacgcggaagcatgggttcactcgataggctcgttaggcgctcaccctcagtggactccgccagaaaggaaccacggtggagagaccccgagctgcctgaggtcctggcaatgctgcgacatccggtggacccagtgaaggccaacgcggctgcgtacttacagcatttatgctttgaaaacgagggcgtgaaaaggagggtacgtcagcttcgaggtctgcctttgctggtagcactgctggaccaccctcgtgccgaagtccgcagaagggcgtgcggagcattgcgcaatttgtcttatgggagggatactgacaacaaggcagccatacgcgattgtggaggggtgcccgctcttgtaaggctcctgcgagcagctcgggataatgaagtccgtgagctcgtgaccggaaccctgtggaatctttcctcctacgagcccctaaagatggtgattatagatcacgggctccagactctgacccatgaggtgatagtgccacacagcgggtgggaacgtgagccaaatgaggactcaaagccgagggacgcagaatggacaacagtgttcaaaaacaccagtggctgcctgcgcaatgtcagtagtgacggcgcagaagcgagacgacgactgagggagtgcgagggcttggtcgacgctcttcttcacgctttacagtcagccgtgggcagaaaggacaccgacaataagagcgtggagaactgcgtatgcatcatgcgcaacttatcatatcacgtgcataaggaggtcccgggtgccgatcgatatcaggaagcggaacctgggcctctcggatcagctgtcgggagccagaggcggagacgtgacgacgcgtcgtgtttcggtgggaaaaaagcgaagggtaaaaaagatggagagatggataggaacttcgatacgctggatctacccaagcgcaccgaggccgcaaagggtttcgaactgctgtatcagcctgaagtcgtgagactctacctctctctgttaactgaatcacgaaattttaacaccctggaagccgcagccggtgccctacagaacctgtccgcaggtaactggatgtgggcaacctacatccgcgcaactgtgcggaaggagcggggtttgcccgtgttggtggaactgctgcagagtgagaccgataaagtggtgagagccgtggcaatcgctctcaggaacctcagtctggaccggaggaataaggacctcatcggctcttacgccatggcggaactcgtgcgcaacgttagaaatgcccaagcccctccaagaccgggtgcctgcttggaagaagacaccgtcgtggccgtacttaatactatccacgagattgttagtgattccctggacaacgctcgaagcctgctgcaagctcgaggagttcctgcactggtggccctggtagcgtctagccagtcagttcgagaggcaaaagctgcctcccatgtcctgcagacagtttggtcttataaggagcttcgaggcactttgcaaaaggacggatggacgaaggcacggttccagagtgccgctgcgacagccaagggacccaagggcgcacttagccccggaggattcgatgacagtacactccccctggtggacaagtccctggaaggggaaaaaactggctcccgagacgtcatccccatggatgccctgggaccagatggctattctactgttgatagaagagagcgtcgacctaggggagcatcaagtgctggtgaggctagcgagaaggaaccactaaaattggatccttctcgaaaagcccctccaccaggccctagtaggccagcagtgagactggtcgatgccgtgggcgacgcaaagcctcagccagtggactcttgggtgtag

SEQ ID NO: 214856 - DNA, 1131 bp, synthetic construct
  misc_feature 1..1131: note = Description of Artificial Sequence: Synthetic coding sequence
  source 1..1131: mol_type = other DNA
atggaatcctacgacatcatcgccaatcaacctgtggtcatagacaatggatcaggggttataaaggccggatttgctggggaccagatcccaaaatattgttttcccaactatgtgggacggccaaagcatatgagggtgatggccggagctctggaaggagacctgtttataggtcccaaggccgaagaacaccgtggtctcctcaccattcgctacccgatggagcatggtgtggtgcgggactggaatgacatggagcggatatggcagtacgtgtacagtaaggaccagttgcagactttctccgaagagcaccccgtcctgcttaccgaggccccactcaatccatcaaaaaatagagaaaaggcagccgaggtgtttttcgagacttttaacgtgccagcactgttcatatccatgcaggctgtgttgagtctgtatgctactgggcgaactaccggtgtagtccttgactccggggatggcgtgacccacgctgtcccaatttacgagggcttcgccatgccccatagtatcatgcgggtggacatagctggacgggatgtgagtaggtatctgaggcttcttctccggaaggagggggtggatttccatacgtcagccgagtttgaggttgttcggaccattaaagaacgggcttgttatctgagcattaacccacaaaaggatgaagcacttgagacagagaaggtgcagtacacactgccagatggaagcaccctcgacgttggacccgctagattcagggcccctgagctcctatttcagcccgatctagtgggcgacgagagtgaaggcttacatgaagtggtcgccttcgccattcacaagagtgacatggatctgagacgcactctgttcgcgaatatcgtgctgagcgggggttccaccctgttcaaaggatttggagaccggctgttgtccgaggtcaagaaactcgcccctaaagacattaaaatcaagatttctgcaccgcaggaaaggctgtactcgacctggatcggcggaagcatcctggcttcacttgacacattcaagaaaatgtgggtatcgaagaaggaatacgaggaagatgggtctcgagccattcatcggaaaaccttttag

SEQ ID NO: 214857 - DNA, 1167 bp, synthetic construct
  misc_feature 1..1167: note = Description of Artificial Sequence: Synthetic coding sequence
  source 1..1167: mol_type = other DNA
atgagtaaggtgtttaagaaaacttccagtaacgggaagctcagtatatatctgggaaagagagatttcgttgatcatgtagacacagtagaacctatcgatggtgtagtgctggttgaccctgaatatctgaaatgtcggaagctatttgtcatgctcacatgcgcttttcgctatggcagagacgacttggaggtgatcggcctgacgtttaggaaggatctctatgtgcagactctgcaggttgtgcctgctgagtcgagcagtccacaggggcctctgactgtgctccaggagagattactgcacaaactgggggacaatgcgtatcctttcacgctacaaatggttaccaacctgccatgtagtgttacactccagccgggaccagaggacgctggaaagccatgtggaatagattttgaggtcaagtccttctgcgctgagaaccccgaagagaccgtgagtaagcgcgactatgtgaggctggtagttcgaaaggtgcagtttgcacccccagaggccggacccggtccctcggctcagaccattcgcagattcttactttccgcacagcctctccaactacaggcatggatggatcgagaggtccactatcatggggagccaattagtgttaatgtgtcaatcaacaactgtacgaataaggtcatcaagaaaattaaaatttcagtggatcaaatcactgacgtggtgctgtatagcttagacaaatacactaagaccgtcttcattcaggaatttactgagaccgtggctgctaactcctctttctcccagagcttcgccgtcacccccattctggcagcatcctgccagaaaaggggtctggcactggacgggaaactgaaacatgaggatacaaaccttgcctcaagcaccatcatccgtcctggcatggacaaggagctcctcgggatcttggtctcatataaggtgcgagtgaacctgatggtgtcttgtgggggaattctcggcgaccttacggcgagcgatgtaggcgtggaattgcccctggtgctcatccaccctaagcctagccacgaagccgcatcatcagaggacatcgtgatcgaggagtttacacgaaagggcgaggaagagtcacaaaaggcagtagaggcagaaggagacgaaggcagttag

SEQ ID NO: 214858 - DNA, 1167 bp, synthetic construct
  misc_feature 1..1167: note = Description of Artificial Sequence: Synthetic coding sequence
  source 1..1167: mol_type = other DNA
atgagtaaggtatttaagaagacctcatcaaacggtaagctgagtatctatcttggaaagcgtgacttcgtggatcacgttgacacggtggagccaatcgacggtgtggtgctggtcgaccctgaatacttaaaatgtcgcaagctgttcgtgatgctcacttgcgcatttcgctacggccgtgatgacctagaggttatcggactcacctttaggaaggacctatacgtccagacactgcaggtggttccagcagagagttcttcaccccagggaccgctgaccgtgttacaggaacgcctccttcataagctaggggataacgcttatccttttacccttcaaatggttaccaacctgccgtgttctgtgaccctgcagccgggacccgaagacgcaggcaagccttgtggaattgatttcgaagtaaagagcttctgtgccgagaaccctgaggagactgtatcaaaacgggattatgttagattggttgttagaaaggtgcagtttgcccctcctgaggctggcccaggccctagcgcccagactattagacgcttcctgctgagtgcccagcctctgcagctgcaggcctggatggacagagaagtgcattatcatggcgaacccatctccgtgaacgtctcaatcaacaactgcacaaataaagtcatcaaaaaaatcaagatctctgtggaccagattactgacgtcgttctctattctctcgataagtacacgaaaacagtcttcatccaggagtttacagagaccgtggcagccaattcttctttttcacaatcctttgccgtgactcccatcctggccgctagttgccagaagcgtggattggcattagatgggaaactgaagcatgaagataccaacctggcaagctctaccatcatccggccaggtatggacaaggagctgctgggaattctcgtgtcttacaaggtgagggtcaacctcatggtatcctgtggaggcatcttgggcgacctgactgcctccgacgttggagtggaactacctttagtgttgatccatccaaaaccatcacatgcctctgcttcttctgaagacatcgtgatagaggagttcacccgcaagggagaagaggagtcccagaaagcagtggaggccgaaggggacgaaggctcctag

SEQ ID NO: 214859 - DNA, 1080 bp, synthetic construct
  misc_feature 1..1080: note = Description of Artificial Sequence: Synthetic coding sequence
  source 1..1080: mol_type = other DNA
atgtcaaaggtgttcaaaaagactagctccaacggcaagctttctatctaccttggcaagagggactttgtcgatcacgtggacactgtggagcctatcgatggagtggttctggtggaccccgaatacctgaagtgccgcaaactattcgtcatgctcacttgcgcattccggtatggtcgcgatgaccttgaagtcattggcctcacattccggaaggatttgtatgttcaaacccttcaagtggtccctgctgagagtagctcaccccaaggccctctcaccgtgctgcaggaaagactgcttcacaagctcggcgacaacgcctacccctttaccctgcaaatggtgactaatttgccttgttcggtcacattgcaacccggacccgaagatgctggaaaaccatgcggtattgactttgaagtgaaatccttttgcgctgagaaccctgaggagaccgtaagcaagcgtgactatgtcagattggtagtgagaaaggtccagtttgccccacccgaagccggaccaggaccttcagctcagaccatacgtcggttcctgctgagtgctcagcccctgcagctgcaggcctggatggacagggaggttcactatcacggtgagccaatttcagtcaatgtctccattaacaactgcaccaataaagtgatcaagaaaatcaagattagcgtggatcagatcacggacgttgttctatactccctggataagtatacaaaaacagtatttattcaggaattcacggagaccgtggccgctaatagcagcttctctcagtctttcgctgttactcccattcttgccgcttcctgtcaaaagagagggctggccctggatggcaaactaaagcatgaggatactaatctggctagcagtaccatcattagacctggtatggataaagaactcctcggcattcttgtgtcatacaaggtgcgggtgaatctgatggtatcctgtgggggaatccttggcgatctgacggctagtgatgtgggagtggagctgccactcgtgctgattcaccccaagcccagccacgaggccgcacggtag

SEQ ID NO: 214860 - DNA, 993 bp, synthetic construct
  misc_feature 1..993: note = Description of Artificial Sequence: Synthetic coding sequence
  source 1..993: mol_type = other DNA
atgggcgagaaaccaggtacaagggtgttcaagaagagctccccaaactgtaaactaacagtctatctcggcaagcgcgacttcgtcgatcacctcgacaaagttgacccagtggatggcgttgtccttgttgaccccgattacctgaaagacagaaaggtgttcgtcactctcacctgtgccttccgctacgggagggaggatctcgatgttctgggcctgtctttcaggaaagacttgttcatagccacatatcaggctttcccccctgttccgaaccctcctcgaccccctacccggctgcaggaccgtttacttcggaaactgggccagcacgcacatccttttttctttaccatccctcagaaccttccatgctctgtgacactgcagcctgggcctgaggataccggtaaagcctgcggcgtggactttgagataagggccttttgtgccaagtctctggaagaaaagtcccacaaacggaacagtgttaggttggtgatcagaaaggtccaatttgctcctgagaaaccagggccacagcctagcgctgagacaactagacattttcttatgtccgatcgcagccttcacctcgaggccagcttggacaaggaactgtactatcacggcgagcccctgaatgttaatgtacatgtgactaataatagcacgaagaccgttaaaaaaattaaagtcagtgtgcggcaatacgcagacatttgtttgttctctaccgcacaatacaaatgccctgtggcccagcttgaacaggatgaccagagggagggcggatgccagcaaggcggagccggaaaccccggagtcctgcagggtcagggtgaggcgggtggcgtttccagacgcggatgcctatgcggtgcggcattttgctcctatgctccgcaggcccctcgacctcaccctcctccccagacgccagtaagtagaagcggtgatcggtgtccctgtgggcatcagccccactag

SEQ ID NO: 214861 - DNA, 1245 bp, synthetic construct
  misc_feature 1..1245: note = Description of Artificial Sequence: Synthetic coding sequence
  source 1..1245: mol_type = other DNA
atggtgcttggcaaagttaagtccttaacaatatctttcgactgtttgaacgactcgaacgtgcctgtgtacagcagtggtgacacagtgagcgggagggtgaacctggaggtaaccggcgaaattagggttaaaagtctcaagatccacgcccgtggtcacgccaaggtcaggtggacagagtcccgaaacgccggaagcaatacagcctatacccaaaactacacagaagaggtggagtattttaaccacaaagatatcctgatagggcatgagagggatgatgataactcagaggaaggattccacactattcactcaggcagacacgagtacgctttctccttcgagctgccacagacacccctcgcaaccagtttcgaaggcaggcacggcagtgtgaggtactgggtgaaggcagagttgcatcgtccatggcttctgcctgttaagctaaaaaaggagtttactgtattcgagcatatagatattaacacacccagtttgctaagcccccaggccggaaccaaagagaaaaccttgtgttgctggttctgtacatccggccctatttcgctgagtgcaaaaatcgaaagaaaagggtatacgccaggcgaatccatccagatttttgctgagatagagaactgctcttcacgtatggtagtgcccaaagccgctatttaccagacgcaggccttctacgcaaagggaaagatgaaagaggtgaagcagttggtcgcaaatcttagaggtgaatccctctctagcggtaaaaccgaaacctggaacgggaagttgcttaagatacctccagtatcgccctctattctggattgtagcatcatccgcgttgaatactctctcatggtctacgtagatatcccgggtgccatggacctatttctgaatcttcctttggtgatcggaacaatacccctccacccgttcgggagcaggacgtcttctgtgtcatctcaatgtagcatgaacatgaattggttgagcctaagcctgccggagcggccagaggcccctccgagctatgcggaggttgtgactgaagaacagagacgtaataatctcgccccagtttctgcatgcgacgattttgagcgagccctgcagggaccactctttgcctatatacaggagtttagatttctcccaccccctctgtactctgaaatcgatccaaacccagaccagtcagctgatgaccgcccttcctgtccctcacgttag

SEQ ID NO: 214862 - DNA, 1233 bp, synthetic construct
  misc_feature 1..1233: note = Description of Artificial Sequence: Synthetic coding sequence
  source 1..1233: mol_type = other DNA
atgggcgacaaggggacccgggtgtttaagaaagcctcccctaacggtaagctgaccgtctatctcggtaaaagggattttgtcgatcacatcgacttagtggatcccgtcgatggcgtagtcttggtggatccggaatacctcaaagaacgcagagtgtacgtgacattgacgtgcgctttccgatatggacgagaggatctggatgtgctgggtctaacgttcaggaaggatctctttgtggccaatgtccagagttttccacccgcacccgaagataagaagcctttaacgcggcttcaggaacgattaatcaagaaactaggtgagcatgcctacccttttacattcgaaatcccccctaacctaccctgttctgtgaccctgcaaccaggacccgaggacacgggaaaggcctgtggggtggattatgaagtgaaagccttctgtgctgagaacctggaggaaaagatccacaaaagaaacagcgttcgactggttatccggaaggtgcaatatgctccggagcggcctggaccacagcccacagcagagacgaccaggcagttcctgatgagtgacaagcccctacacctcgaagcaagcctggacaaagaaatctactaccacggcgaaccaatttcggtcaacgttcacgtgaccaacaatactaataaaacagtcaagaaaataaagatttcggtgcgtcagtacgccgacatctgcctgtttaataccgctcagtataagtgtccagtggcaatggaggaggcggatgacacagttgcgcctagcagcaccttctgtaaggtgtacaccctgacaccctttctcgccaacaatagggaaaagagggggttggccctcgacggaaagttaaaacatgaagatacaaacttagcaagttccaccctcctgcgcgagggcgcaaatcgcgaaatactgggaattattgtgtcatacaaagtgaaggtgaagctcgttgtgtcacggggtggggacgttgctgtcgaactgccattcacactgatgcaccccaaacccaaggaggagcctccccatcgcgaggtcccggaaaacgagactccagtggacacaaatctcatagaactagatactaacgacgatgacatcgtgttcgaggactttgctcgacagaggctgaagggcatgaaggatgataaggaggaggaagaggatggcactggttctccgcagcttaataatcgctag

SEQ ID NO: 214863 - DNA, 1257 bp, synthetic construct
  misc_feature 1..1257: note = Description of Artificial Sequence: Synthetic coding sequence
  source 1..1257: mol_type = other DNA
atgggggataagggcaccagagtgtttaagaaagcaagcccaaacggtaaactgaccgtgtatctcggaaaacgagattttgtggaccacattgacctggtagatcccgttgacggagtggtgttggtagatcctgagtatttaaaggagagaagagtttatgtgacattgacgtgcgcatttagatatggccgagaagacctcgacgttttaggccttacttttcgaaaagacttgtttgtcgcaaacgtgcaaagttttcctccggctcctgaagataaaaaaccacttacacgtttgcaagagcggctcattaagaaactgggagagcacgcttatccttttacttttgaaataccccctaacctcccttgcagcgtaacactgcaacccggacctgaagacactggtaaagcttgcggcgtcgattatgaggttaaagcattttgtgcagaaaatctagaggagaaaattcataagaggaactcggtaaggctcgtgatacgaaaagtccagtatgctcccgaacgacctggacctcagcctaccgcggaaaccaccagacaattcctgatgagcgacaaacccctccacctcgaagcctcacttgacaaggaaatctactaccatggagagcccataagtgttaatgtgcacgtcacaaacaataccaataaaactgttaaaaaaatcaaaatcagtgtgaggcagtacgcagacatatgcctgtttaatactgctcaatacaaatgtcccgtggcaatggaggaagccgacgacacagtggccccaagtagcactttttgtaaggtttacaccctcacacccttcttggccaacaacagagagaagcgcggattggccctggacggtaaactcaaacatgaagacaccaacctcgcatcgtctactctgctgcgggagggagcgaaccgggagattcttggcattattgtctcttacaaggtgaaagtaaaactagttgtgtccaggggcggactcctgagaggactgtgcttttctgatgtagcggtcgagctcccctttacgttaatgcatccaaaacctaaggaagagcccccacacagagaggttccggagaacgagactccagtcgacactaatctgatcgagttggataccaatgacgatgacattgtgttcgaggattttgccagacaaagactgaaaggtatgaaggatgacaaagaggaggaggaggatggaactggctctccacagctcaacaataggtag

SEQ ID NO: 214864 - DNA, 1257 bp, synthetic construct
  misc_feature 1..1257: note = Description of Artificial Sequence: Synthetic coding sequence
  source 1..1257: mol_type = other DNA
atgggagacaaaggcacccgcgtttttaagaaggcatcacccaacggcaagctgacagtttacctcggaaagcgcgattttgtcgatcacatagacctggtagacccggtggacggagtggtgttggtggaccccgaatatttgaaggaaaggcgcgtgtacgtgaccttgacatgcgccttcagatatggtcgggaggatcttgacgtgctgggactcaccttcagaaaggacttatttgtcgctaacgtccagtcctttccgccagccccagaggacaaaaaacctctgacaaggctacaggagaggctgattaagaaattaggcgaacacgcatacccctttactttcgagatccctccaaacctgccttgttccgttactctgcagcctggacctgaagatacagggaaagcctgtggagtggactatgaagtgaaggctttttgcgcggagaaccttgaggaaaagatccacaaaaggaactctgttagactggtaatacggaaggtgcagtatgcgcctgagcgccctgggccacagcccactgcagaaaccacacgccagttcctgatgtcagacaaacctctgcacctcgaagcctctctggataaagagatttattaccacggcgagcctattagcgtgaacgtgcacgtgactaacaataccaacaaaacagttaaaaaaatcaaaatctctgtccgccaatacgcagacatctgtttattcaacacagcccagtacaagtgtcctgtggccatggaggaagcagatgacacagtcgcacccagctcaactttctgcaaagtgtataccttgacaccatttctggccaacaatagggagaaaagaggcctcgcactggacggtaagctaaaacacgaggatacgaacctggccagtagtacccttctgcgggagggtgccaacagagaaatcctgggaatcatcgtttcttataaagtgaaggtgaaactcgttgtatcacgcggagggctgcttggcgatctggccagcagcgatgtggcagtagaactgccattcaccctcatgcacccgaagcccaaagaagagccaccccacagggaggtcccagaaaatgaaaccccggttgataccaatctgattgaacttgatacaaatgatgacgatatagtatttgaggattttgccaggcagaggctgaaaggaatgaaagatgataaggaagaggaggaggacggcacaggatccccccagctaaacaacaggtag

SEQ ID NO: 214865 - DNA, 1230 bp, synthetic construct
  misc_feature 1..1230: note = Description of Artificial Sequence: Synthetic coding sequence
  source 1..1230: mol_type = other DNA
atgggtgagaaacccggaacccgggtttttaaaaagtcttctcctaattgcaagctcactgtgtatctgggaaaaagagactttgttgaccacttggataaggtcgacccggtggacggcgtagtgctcgttgatcccgactatctgaaggatcggaaggttttcgtaactttaacatgcgccttcagatacggacgcgaagatttagatgtcctcggtcttagctttcggaaagacctttttatcgccacttatcaggccttccctcctgtgccaaaccctccccgacctcccacacgcctgcaggaccggcttctacggaaactgggacagcacgcacatccgtttttctttaccattcctcagaacttgccctgcagtgttacactgcagccgggtccagaagatacaggcaaggcatgcggagtggatttcgagatacgcgctttctgcgctaagtcgctggaggagaagtctcacaaacgcaattcggtgaggctcgtgatcagaaaagttcagttcgcccctgagaagccaggaccacagccctctgctgaaacgactagacacttcctgatgtctgaccggtcgttacatctcgaagctagcctcgacaaggagctctattatcacggagaacctttaaatgttaacgtgcacgtgaccaataattctacgaaaacagttaagaagatcaaagtctctgtacgtcagtacgctgatatctgcctgttctccaccgcgcagtataaatgccccgtggcccagttagagcaggatgatcaggtcagtccaagctctaccttttgtaaagtatacaccattacgcctctattatcggataatcgcgaaaagagagggttggctctcgacggtaaattaaaacatgaggataccaacctggccagttctacaatcgtgaaggagggggctaataaggaagtcctcggtatactggtctcctaccgcgtgaaggtgaagctggtggtgagcagggggggagatgtgtccgtggaattgccctttgtgctgatgcaccccaaaccacacgaccatatccccctgcccaggccccagagcgcagcccctgaaacagacgtccccgtagacaccaaccttattgaatttgatactaattatgccacagacgacgacatcgtatttgaggatttcgcaagacttcggctgaaaggcatgaaggacgatgactacgatgaccagctttgttag

SEQ ID NO: 214866 - DNA, 1185 bp, synthetic construct
  misc_feature 1..1185: note = Description of Artificial Sequence: Synthetic coding sequence
  source 1..1185: mol_type = other DNA
atgggcgagaaacccggaaccagggtttttaaaaagtcctctcccaactgtaaactaaccgtgtatctcggcaaaagagacttcgtcgatcatctggacaaagtggaccctgttgttttcgtgacactgacatgtgcttttaggtatggaagagaggacttagatgtactaggactctcttttaggaaagacctgttcattgcaacctatcaggctttccccccagtgccaaatcctccgcgacctcctactagactgcaggaccgtctgctgaggaaactggggcagcatgcccatccttttttcttcacaattccccagaacctcccctgttccgtcacgttgcagccaggacctgaagataccgggaaagcctgcggcgtcgacttcgaaattcgcgcattttgtgccaaaagtctagaggagaagtctcataagcgcaactccgttagactggtgattaggaaggtgcaattcgcgccagaaaaacctggtccacaaccaagcgccgaaacaacgaggcactttctgatgtctgatcgctctctgcatctggaggcttcccttgacaaggaactctattatcatggcgagcccctgaatgtgaacgtccatgtgaccaataacagcactaagactgtgaagaagattaaggtgtcggtacgtcagtatgccgacatctgcctgttctccacagcacagtacaagtgtccagtcgcgcaactggaacaagacgaccaagtgagtccctccagtactttctgcaaagtttataccattacaccactgctatccgataaccgtgagaaacggggtcttgccctagatggcaagctgaagcacgaggacacaaatcttgcatcatcaaccatagtgaaggaaggagccaataaggaagtgcttggcatactggtctcttatagggtaaaggtgaaactcgtggtgtcgagagggggtgatgtttctgttgagctgccgtttgtgctcatgcaccccaaaccccatgaccatatccccctacccagaccccagtcagcagcgcctgagacagatgtaccagtggatacaaacttgattgaatttgataccaattacgccactgatgatgatatcgtattcgaggactttgcccgacttagactaaagggaatgaaggatgatgattacgacgaccaactgtgttag

SEQ ID NO: 214867 - DNA, 1266 bp, synthetic construct
  misc_feature 1..1266: note = Description of Artificial Sequence: Synthetic coding sequence
  source 1..1266: mol_type = other DNA
atgggcgaaaagcccggaactcgggtatttaagaagtcttcacctaattgtaaacttacagtgtacctgggtaaaagggacttcgttgaccaccttgacaaggtcgaccccgtggatggcgttgtcctggtggaccccgactacttgaaggatagaaaagtttttgttaccctaacttgcgctttccgctacgggcgtgaggacctcgacgtccttgggctttcctttagaaaagacttattcattgctacgtaccaggcctttccacccgtgccaaatcccccacgtccgcctacaagacttcaggataggctcttaaggaagctgggtcagcacgcccatccttttttttttaccatccctcagaacttgccgtgtagtgtgacgttgcagccaggacccgaagataccggtaaagcctgcggggtggactttgaaatccgagccttctgcgccaaaagtctggaggaaaaatcccataagcgcaattccgtgcgtctagtgatccgaaaagtgcaatttgcgccagagaagcccggaccacagccgagcgccgagactaccaggcactttctcatgtccgacaggagtctacatctcgaggcgagcctggataaggaactgtactaccacggcgagccactgaacgtcaatgttcatgtgaccaacaatagcacaaaaactgtcaaaaagattaaggtgtctgttaggcagtacgctgatatctgccttttcagcacagcacagtataaatgccctgtcgcccaactggagcaggatgatcaggtctctccctcctcaactttttgtaaagtctataccatcaccccactgttaagtgataaccgggagaaaagaggcttggctctagatgggaaactcaagcacgaggatactaatttggcttctagcaccatagtgaaagagggggctaacaaggaagttctggggattctggtgtcgtaccgcgtgaaggtaaagctagtggtcagtagaggcggagacgttagcgtagagctccccttcgtgctgatgcatccaaaaccccatgaccatatacctcttccacgcccacagagtgccccaacccctacgccacccctacctgttcctcccgcagccccagaaacagatgtgccggtcgacactaatctaatcgaattcgacactaactatgctactgacgatgatatcgtgtttgaagacttcgccaggctgcgcctcaaaggaatgaaggatgatgactacgatgaccagctttgttag

SEQ ID NO: 214868 - DNA, 1233 bp, synthetic construct
  misc_feature 1..1233: note = Description of Artificial Sequence: Synthetic coding sequence
  source 1..1233: mol_type = other DNA
gcagccaatcgtgccggaggcggtcgcgcacatcatggcggtgagactagggatcagttgacagtgtatctcggcaaacgtgatttcgttgaccatttagacaaagtggacccagtggacggggtcgtactggtggaccctgattatctgaaggatcggaaggtgttcgtgacactcacttgcgcatttagatacggaagagaggatttggatgtgcttggcttatcattcagaaaggatttattcattgcaacctaccaggctttccctccagtgccaaatcctcctcgccctccaaccaggttacaggatcggctgctccggaaactcggccagcacgctcacccattctttttcaccataccacagaacttaccctgctcagtgactctccaacccggtcctgaagacactggtaaggcctgtggagtggactttgaaatccgcgctttttgcgcaaaatcgctcgaagagaaatcccataagcgaaattcagtccggctggtgatacgtaaagtccagtttgctccagagaaaccgggaccacagccttccgccgagaccactagacactttctcatgagcgacagatcattgcaccttgaggcttccttggataaggaactctattatcacggcgagccgctgaacgtaaatgtccacgtgaccaacaacagcactaagactgtcaaaaagatcaaggtttccgtgaggcaatacgccgacatttgcctgttctccacagcacaatataagtgtcctgtcgctcaactcgagcaggatgaccaggtttctcccagtagcactttctgtaaagtgtacactatcacacccctccttagcgacaatagagagaaaagaggattagcccttgacggcaagctaaaacatgaggataccaacctggcttcctcgaccattgtgaaagagggcgctaacaaggaggtgctcggaatcctggtctcctatagagtgaaagtgaagctggtagtctcccgcggtggagatgtgtctgttgagctgccatttgtcctgatgcatccaaaacctcatgaccatatccctttacctcgccctcagtccgccgctccggagactgacgtacctgtggacaccaacttgatcgaatttgatacaaactatgctacggacgatgacatcgtgttcgaggacttcgcgcgtctgaggctcaagggaatgaaagatgacgactatgacgaccaactttgttag

SEQ ID NO: 214869 - DNA, 1047 bp, synthetic construct
  misc_feature 1..1047: note = Description of Artificial Sequence: Synthetic coding sequence
  source 1..1047: mol_type = other DNA
atggccgcaggggttgctggatggggtgtcgaagcagaggaattcgaggatgcaccagatgtagaacctctggagcctaccctaagtaatattatagagcaacggagtctgaagtggatcttcgtgggtggaaagggtggtgttggtaagaccacttgcagttgctctcttgcggtacagctgagcaagggccgagagagcgtgctgatcatcagtactgaccccgctcataacatcagcgatgccttcgatcagaagttctccaaggtgcccaccaaggtgaagggatacgataatttgttcgctatggagatagaccccagcttaggggtggcagaacttcctgacgaatttttcgaggaagataatatgctgtccatgggtaagaagatgatgcaggaagctatgtctgccttccccggaattgacgaagcgatgtcttacgctgaggttatgcggttggtaaaaggaatgaatttttctgtggtcgtatttgacacggcacctaccggacacaccctgaggctgctgaactttccgaccatcgttgaacgtgggttagggagactcatgcagattaagaaccagatttcgccgttcatctcacagatgtgcaacatgctgggactcggtgacatgaacgccgaccagttggcgtctaaactggaggagactctccccgtgatacggagcgtgtctgagcagtttaaggatcccgagcagaccacattcatctgcgtctgtattgcggagttcctgtcactgtacgaaacagaacgtctgatccaggagctggccaaatgtaagatcgacactcacaacatcatagtgaaccagctggtctttccagatcctgagaagccctgcaagatgtgtgaagcgaggcataaaatacaagccaagtatttggaccagatggaagatctgtacgaggattttcacatcgtcaaactgccactgctcccacatgaggtgcgcggtgcagataaggtaaataccttttccgctctgctgcttgaaccatacaaacccccttccgcccagtag

SEQ ID NO: 214870 - DNA, 1047 bp, synthetic construct
  misc_feature 1..1047: note = Description of Artificial Sequence: Synthetic coding sequence
  source 1..1047: mol_type = other DNA
atggcagccggagtcgctgggtggggcgttgaagccgaggagtttgaggacgctcccgacgtggagcccctggagcctacactgtccaatatcattgagcagaggagcctaaaatggatatttgtgggaggcaaaggaggagtgggcaagactacctgcagctgctcattggctgttcagctctccaaaggcagagagtcagtactgatcatttccacggaccccgctcataacatctccgacgcattcgatcagaaattcagcaaagtaccaacgaaagtgaagggctatgataatttatttgccatggagattgacccttctctgggggtggccgaactcccggacgagttcttcgaggaggacaatatgctgtctatgggcaagaaaatgatgcaggaagctatgtcagcattccctgggatagacgaggctatgtcctacgcagaggtgatgcgcctagtgaagggaatgaatttttccgtcgtagttttcgatacggcccctacaggccacacactccggctgcttaactttcctaccattgttgaacggggactggggcgactcatgcaaatcaaaaaccagatctccccattcatatcccagatgtgcaacatgctgggactgggcgacatgaatgctgaccagctcgcctccaagctggaagaaacgctgcctgtaatacggtctgtgtcagagcagtttaaagatcctgaacagaccacttttatctgtgtgtgcatagctgagttcttatcattgtatgagaccgaaaggctgatccaggaactagccaaatgcaaaattgacacccataatatcatcgtgaatcagttagttttcccagatcctgagaaaccttgcaagatgtgcgaggctagacacaagatccaagctaaatacttagaccagatggaggatctgtacgaggactttcatatcgttaaattacctctgttgccacacgaagttagaggggcagataaggttaataccttcagcgcccttttgttagaaccatataaacctccgtctgctcagtag

SEQ ID NO: 214871 - DNA, 1128 bp, synthetic construct
  misc_feature 1..1128: note = Description of Artificial Sequence: Synthetic coding sequence
  source 1..1128: mol_type = other DNA
atggcagccctcagggatgccgagattcagaaggatgtgcagacctactatggtcaggtgctcaaacggtctgccgacctgcagactaatggctgtgtgactactgcacggccagtccctaagcacattcgggaagcactgcagaacgtccatgaagaagtcgctctgagatactacggatgcggtctcgttattccagaacatctcgaaaactgctggatcctcgatctgggatctggatccggaagagactgttatgtcctttctcagctggtgggagagaagggccacgtgaccggcatagatatgactaaggggcaggtcgaggtggccgagaagtacctagattaccatatggagaaatacggctttcaggcgtccaatgtcaccttcatccacggctacattgaaaagcttggggaggcgggtatcaaaaatgaaagccatgatatcgtggtctctaattgcgttattaatttagtgcccgataagcagcaggtactccaagaagcataccgggtgctgaagcacgggggtgagctgtacttttctgacgtgtatacgtccctggaacttccggaggagatccggacacacaaagtcctgtggggcgaatgccttgggggagccctgtactggaaggagctggctgtgctggcccagaagatcggattttgtccaccacggcttgtgacagccaaccttattaccatccaaaacaaggaattagaaagggttatcggggactgccgattcgtttctgctacatttagactcttcaagcattcaaaaaccgggcctactaagagatgtcaggttatctacaatgggggtatcacggggcatgaaaaagagttgatgttcgacgcgaattttaccttcaaggaaggagagatcgttgaggtggatgaagaaaccgccgcaatcctcaagaatagtaggttcgcccaggatttcctcatccgacctataggtgagaagcttcctacatccggcggatgttctgctttggagctgaaggatattattactgaccctttcaagctggccgaggaatccgacagcatgaaaagcagatgtgtccctgacgctgcagggggatgctgtggaaccaaaaaatcatgctag

SEQ ID NO: 214872 - DNA, 816 bp, synthetic construct
  misc_feature 1..816: note = Description of Artificial Sequence: Synthetic coding sequence
  source 1..816: mol_type = other DNA
atgggcaatggcggacggtcggggctccaacagggcaagggcaatgtggatggggtggctgctacgcctacagcggcatctgcgagttgccagtacaggtgcatagaatgtaaccaggaagcaaaagaactgtaccgcgactataatcatggggttttaaagataaccatctgcaagtcttgccagaaaccggtagataagtacatcgaatacgaccctgtcatcatcctgatcaatgctatattgtgtaaggctcaggcctaccgccatatcctcttcaacacccagatcaatatccatgggaaactgtgcattttttgcctattgtgcgaggcctatctgaggtggtggcaactccaggattctaatcaaaacaccgccccagatgacctgatccggtatgctaaggagtgggacttctacaggatgttcgccatcgccgctctggagcagacagcctacttcatcggcatctttaccttcctctgggtggaaagacctatgacggccaaaaagaaaccaaattttatcctgctcctaaaggctcttcttctgagctcctacggcaagttgctgcttattcctgcagtcatttgggagcatgattacacatctgtgtgcctcaagctgatcaaggtcttcgtgctgacaagtaactttcaagctatccgggtaaccttaaacattaatagaaagctctcttttcttgcagtgctgtcaggtcttctactcgaaagcatcatggtgtacttctttcaatcaatggagtgggatgtggggtcagactacgcgattttcaagtctcaggacttctag

SEQ ID NO: 214873 - DNA, 807 bp, synthetic construct
  misc_feature 1..807: note = Description of Artificial Sequence: Synthetic coding sequence
  source 1..807: mol_type = other DNA
tagggtcgcagtggactgcagcaaggtaagggtaacgttgacggcgtagccgctactccaactgccgctagtgccagctgtcagtaccggtgcattgagtgcaaccaggaggctaaagagctgtatcgagattataaccacggcgtgttgaaaattaccatatgtaagtcctgccaaaagccggtggataagtacatagagtacgaccctgtcatcatcctcattaatgcaatactgtgtaaagctcaggcctaccgacacatcttgtttaacacccagatcaacattcatggcaagttgtgcatcttctgccttctttgcgaggcttacctgagatggtggcaacttcaggactcaaatcagaataccgcccctgacgacttgattcggtatgcaaaagagtgggatttttatcgtatgtttgctatagccgcacttgagcagacagcttattttattggaatttttaccttcctttgggtggagcgtcccatgaccgctaagaagaaacctaacttcatactgcttttaaaggccctgctcctctctagttacgggaagctgctcctgatccccgcagtgatatgggagcacgattatacgtccgtgtgcctaaaactcatcaaggtgtttgttctaactagcaatttccaggcgatccgggtaacacttaatattaatagaaaactctccttcctagccgttctctcaggcttgttgctggagagcattatggtgtacttttttcaaagcatggaatgggacgtggggtcagattacgctatcttcaagagccaggacttttag

SEQ ID NO: 214874 - DNA, 2547 bp, synthetic construct
  misc_feature 1..2547: note = Description of Artificial Sequence: Synthetic coding sequence
  source 1..2547: mol_type = other DNA
atgaatagcagttctgcgaacatcacctatgctagtagaaaacgccgtaaacctgtgcagaaaaccgtgaagcccataccagccgagggcattaagtctaatccctcgaagcggcaccgtgatcggttgaacactgaactagacaggctggcgtcactcctccccttcccccaggacgtgatcaataagttagataaattatccgtgctgcgcctttcagtatcttacctgcgtgccaaatccttctttgacgtcgccctgaagagctctcccaccgagagaaacggagggcaggataattgtcgggcagccaactttagggaaggcctgaacctccaggagggggagtttctgcttcaggctttgaacggatttgtgttggtcgttaccacagatgctctggtattttatgcctccagtaccatccaggactacctcgggtttcaacagagtgatgtgattcatcaatccgtttatgaactcatacacactgaggaccgtgccgagttccagcgacagctgcactgggcgctgaatccatcacagtgtacagagagtgggcaaggaattgaagaggcgactggacttccccaaacagtcgtatgctataatcctgaccaaattccccctgaaaacagcccgctgatggagagatgtttcatttgccgactccggtgtctgctggataacagttcaggctttctcgcaatgaactttcaaggaaaattaaagtacctacacggacagaaaaagaaggggaaggatggctcaatactgcccccacagctcgctttattcgccatagcaactcccctgcagccaccctccattctagagattaggaccaaaaactttatctttagaacgaagcacaaactcgactttacccccatcgggtgcgacgctaagggacggattgtgcttggctacaccgaggctgagctgtgcaccagaggctccggatatcagtttatccacgcagctgacatgctgtattgtgccgaatcccacatccggatgatcaaaacaggcgagagcggaatgatagtttttagactgctgactaagaataacaggtggacctgggtgcagtctaacgcccgtctgctgtataaaaatggcaggcccgactacataattgtcacgcagcgcccattgaccgacgaggagggtacagaacatctgagaaaaagaaataccaaactccctttcatgttcactaccggggaggccgtcctttatgaggctacgaaccctttccctgcaattatggacccattgcctctgaggactaagaacggaactagcggcaaggattctgccacaacaagcactctgtctaaggacagcttgaaccctagcagcctcctggcagcgatgatgcaacaagatgaatctatttatctatacccagcttcatcaacctcctctaccgcgccatttgagaacaatttcttcaatgaatcaatgaatgaatgcagaaactggcaggataatactgcccctatgggaaatgacaccatcttgaaacacgagcagattgaccagccacaggacgtcaactcctttgccggtgggcatccgggactcttccaagattcaaagaactccgatctgtactcgatcatgaaaaatttgggcatcgactttgaggacatcaggcatatgcagaatgagaagttcttcaggaacgacttctcaggggaagttgacttccgggacattgacctgaccgacgagatactcacatacgttcaagactcactgagcaagagtccgtttataccttcagactaccaacagcagcagtctctggctctcaactcttcttgtatggttcaggaacatctgcacttggagcagcaacagcagcatcatcagaaacaggttgtcgtggaaccccaacaacagttgtgtcagaagatgaaacacatgcaggtgaacggcatgttcgagaattggaacagcaatcagtttgtgccattcaactgtccacagcaggatccacagcagtacaacgtttttacggaccttcacggaattagccaggagtttccctataaatccgagatggactctatgccctacacacagaacttcatcagttgtaatcaaccagtgctgccccagcactcaaaatgcaccgagctggattatcccatgggcagcttcgagcccagcccttatcctaccacatcaagcttggaagacttcgtgacatgcctgcagctgccagaaaaccagaagcacggcttgaacccacagtccgccatcatcaccccccagacctgctacgccggagcggtgtcaatgtaccagtgccaaccggagccccagcatacgcacgtggggcagatgcagtacaacccggtgctccccggtcaacaagctttcctcaataagtttcagaatggggtattgaacgagacctacccagccgagttgaacaatatcaataacactcagacaaccactcacctgcagcccttacatcaccctagtgaggctcgccctttccccgatttaacttctagcgggtttctctag

SEQ ID NO: 214875 - DNA, 2547 bp, synthetic construct
  misc_feature 1..2547: note = Description of Artificial Sequence: Synthetic coding sequence
  source 1..2547: mol_type = other DNA
atgaatagttcctccgccaatattacatatgcctctcggaaacggaggaagccggttcagaaaaccgtcaaacccatccctgctgaaggcattaaaagcaacccatccaaacggcatagagatcggttgaacaccgagttagatagactggcctctctgctcccttttccccaggatgtgattaataaacttgacaagctgtcagtgcttaggctgtctgtctcttacctcagagccaagagtttcttcgatgtcgcgctaaagtcctcccctacagaacgcaacggagggcaggacaactgcagagccgctaactttcgtgagggattaaatctgcaggagggtgaattcttactgcaggctttgaacgggttcgtattggtagtgactacagacgctctggtgttctacgcttcttccaccattcaggattatcttggctttcaacagtcagatgtgatccatcagtccgtatatgagttgatccacactgaggatagggcggaattccaaaggcaattgcattgggcgcttaatccttcccagtgcacggaatccggccagggtattgaagaggcaaccgggttaccccaaacggtcgtgtgctataaccccgatcagattccacccgagaacagtcctctgatggaacgatgtttcatttgtcggctcagatgtcttctggacaactcaagcgggttcctggcaatgaacttccagggaaaactgaaatatctgcacggacagaagaaaaagggcaaagatggtagcatactgccaccacagctggcgctcttcgccatagctactccattgcaacctcccagcatcttagagattcgcacaaagaatttcatctttaggacgaaacataagctagacttcacacccattggctgtgatgcaaaaggaagaatcgttctggggtacaccgaggctgagctgtgtaccaggggcagcggatatcagtttatccacgctgccgacatgttgtattgcgccgaatctcatatccggatgatcaaaactggtgagagtggcatgattgtcttccgcctgctcacaaaaaataacagatggacctgggtacagtccaacgcacggctactttacaaaaacgggaggcccgattatattattgtgacccaaaggcctcttactgatgaggaaggtactgagcatctcaggaagaggaatacaaagctgcccttcatgttcaccaccggagaggcagttctgtatgaggccactaaccccttccccgcaatcatggatcctctgcctctgaggacaaagaacggcacatccggtaaggacagcgcgaccaccagcactctgagtaaagactccctcaacccgagttcactgctcgccgctatgatgcagcaggatgaatccatctatctgtaccctgcatcatctacaagttctaccgcaccgtttgagaacaacttttttaatgagagcatgaacgagtgtaggaactggcaagataataccgcacctatggggaacgataccattctgaagcacgagcaaatcgaccagccgcaggatgtgaattcattcgccggaggtcacccagggctgtttcaggatagcaagaactccgacctatacagtataatgaaaaacttgggaatcgacttcgaagacatacgtcacatgcagaacgagaagttcttcagaaacgacttttctggcgaagtggatttccgggacattgacctgaccgacgagatcctgacctacgtgcaagacagtctgagcaagtcacccttcattccttctgactatcagcagcaacagtctctggctctgaactcgagttgtatggtacaggaacacctccatttggaacagcagcagcagcaccaccaaaagcaggtggtcgtggagccccagcagcaactgtgtcagaagatgaaacacatgcaagtgaatggcatgttcgaaaactggaacagtaatcaattcgtgcccttcaactgtccacagcaggatccccagcaatataacgtctttaccgacttgcatggcatatcccaggaatttccttacaagagtgagatggacagtatgccatacactcagaattttataagttgcaatcagccagtgctaccccagcactccaaatgcacggaactggactaccctatgggctcattcgaacctagcccttaccccacaacatcttccctggaagatttcgtgacgtgcctgcagctccctgaaaatcagaagcatggcctgaacccccagtccgcaatcatcacccctcagacttgttacgctggggctgtgtctatgtatcagtgtcagcctgagccccagcacactcacgtggggcagatgcagtacaacccagttctacccggtcagcaagcgttcctgaacaagttccagaacggagtgttaaacgagacctatcctgcggaactgaataatataaataacactcagaccacaacacacctgcagcccctccatcaccccagtgaagctcgcccttttcctgacctgactagctcaggatttctctag

SEQ ID NO: 214876 - DNA, 993 bp, synthetic construct
  misc_feature 1..993: note = Description of Artificial Sequence: Synthetic coding sequence
  source 1..993: mol_type = other DNA
atggctgatattatagccagactcagggaagacggaatccagaagcgggtcatccaggaaggacggggtgagctgcccgattttcaggacggtaccaaggcaacgtttcactatcgaacgctgcacagcgatgacgaaggtacggtgctggatgattccagagcgagaggaaagccgatggagttaatcattgggaaaaaattcaagctgccagtttgggaaaccatcgtgtgtaccatgagggagggagaaattgctcagttcctgtgcgacatcaagcatgtggtcctgtatccactggtggctaaaagcctgcgcaatatcgctgtgggcaaagaccccctcgagggccaacggcactgctgcggggtcgcccagatgagggaacactcttcgctcgggcacgccgacctcgacgctttacagcagaaccctcagcctctgattttccacatggagatgttgaaggtcgaatcacccggaacgtaccaacaggacccttgggccatgacagacgaagagaaagctaaggccgtccctctaatccaccaagaaggaaatcggttatatagggaaggccacgtgaaagaagcagccgctaagtattacgacgccattgcctgcctgaagaacctccagatgaaagaacagcccggatcccccgaatggattcagcttgaccagcagattacccccctgctgctaaactactgccaatgtaagttggtggtcgaagaatattacgaggttctcgaccactgtagctctattctcaacaaatatgatgacaacgtcaaggcctacttcaagcgcggtaaagcccatgcagctgtttggaacgcgcaggaagcccaagcagatttcgcaaaagttctggaacttgaccctgctctggctcccgttgtcagtcgtgaactccaggcactggaggcgagaatccgacagaaggacgaagaggataaggcccgttttaggggaattttttctcattag

SEQ ID NO: 214877 - DNA, 966 bp, synthetic construct
  misc_feature 1..966: note = Description of Artificial Sequence: Synthetic coding sequence
  source 1..966: mol_type = other DNA
atggacgctgccctgctgctgaatgtagaaggggtgaaaaagacgatcctacacgggggaacaggcgagttacctaattttatcactggtagtcgcgtcatatttcattttcggactatgaaatgcgatgaggagaggacagtcattgatgactctagacaggtggggcagcccatgcatattattatcggcaacatgttcaaactggaggtctgggagatcctccttacatccatgcgcgtacacgaggtggccgagttctggtgcgacacgatcgtggacgccccttcagattatcaacgggagacttggaatctgagcaaccacgagaagatgaaggctgttcccgttctgcatggcgagggaaatcgcttgtttaaactcggaaggtatgaagaggcctccagtaaatatcaagaggctatcatctgtctcaggaatctgcaaaccaaagagaagccctgggaggtgcagtggctgaagctggaaaaaatgatcaatacgcttatcctgaactactgccaatgtctgctgaaaaaggaagagtactacgaagtgttagagcacacatctgacattctcaggcatcatcctggaatcgttaaagcctattacgtgagggcaagagcccacgccgaggtctggaacgaggctgaagctaaagctgatcttcagaaggtgctcgagcttgagccgagtatgcaaaaagctgttagaagagaattgagactgctagagaaccgtatggcagagaaacaggaggaagagcgtttgagatgtaggaatatgttgtcacaaggtgccacgcagcctccggctgaacctcccacagaaccgcctgcacaaagctccactgagccacccgctgagcctcccactgcaccgtcagcagagttatccgcaggccctccagcagaacccgcaactgagccccctccctcgcctgggcatagtctccagcactag

SEQ ID NO: 214878 - DNA, 975 bp, synthetic construct
  misc_feature 1..975: note = Description of Artificial Sequence: Synthetic coding sequence
  source 1..975: mol_type = other DNA
atggacgcagccctcttgctcaacgtagaaggtgtcaagaagacaattttacatggtggcacaggagagctgcctaatttcataacaggaagtcgccacaccggagtgtatcccattctgtctaggtcactgcgacagatggctcagggcaaagacccaaccgagtggcacgtccacacctgtggtttggcaaacatgtttgcttaccacaccttgggctacgaggatctcgacgaattgcagaaggagcctcagccattggtgttcgtcatcgagcttctccaagttgacgcaccgagtgactaccagcgggagacatggaacctttccaatcacgagaagatgaaggccgtgccggtgctgcacggggagggcaatcgcttattcaagttgggtagatacgaggaggctagctctaaatatcaggaagccatcatctgcctgcggaatttgcagactaaagagaaaccgtgggaggtacaatggttgaaacttgagaaaatgatcaatacgttgattctgaactattgccaatgtctgctgaagaaagaagaatattatgaggtgcttgaacacacgtcagatatcctgcggcatcaccccggaatcgtcaaggcatactacgtgagggcccgagcccacgctgaagtgtggaatgaggctgaagccaaagccgaccttcagaaggtgctcgagttggagccctctatgcagaaagccgtgcgcagggagcttcgtctactcgaaaaccgcatggccgagaagcaagaagaggaacgccttcggtgtcgcaacatgttatctcagggcgcaactcaacctcccgctgaaccaccaacagaacctcctgcgcagtcctctactgagccccctgccgaaccccctacagccccatctgccgagctcagcgcaggccctcccgctgaacctgctacagagccacccccatcacctggccactcactgcagcactag

SEQ ID NO: 214879 - DNA, 1155 bp, synthetic construct
  misc_feature 1..1155: note = Description of Artificial Sequence: Synthetic coding sequence
  source 1..1155: mol_type = other DNA
atggacgccgcactgcttctgaacgttgaaggagtcaagaagaccattctccacgggggtacaggagagttaccgaacttcatcactggcagccgggtgattttccatttcaggaccatgaaatgcgacgaagagcgcacggtaatcgacgactcccggcaagtgggccagcccatgcacatcattataggtaatatgttcaagctcgaggtttgggagatcctcctgacaagcatgagagttcatgaggttgcagagttttggtgtgataccatccacaccggcgtatatcctatactcagccgctctttaaggcagatggcgcaaggcaaggatccaactgaatggcatgtgcatacatgtggcctggctaacatgttcgcctaccatactctgggctatgaagacttggatgaactgcaaaaggagccccagccactcgtgttcgtgatcgagctgcttcaggtcgatgcaccttcagattaccagagggagacttggaacttgagcaaccacgaaaagatgaaggctgtgcctgtcttacacggcgagggaaacaggttattcaagttaggaagatatgaagaggcctctagcaagtaccaggaagccataatctgcctgcgcaacctgcagacgaaggaaaagccttgggaggtgcaatggctaaagttggagaaaatgatcaatacactgatactgaactattgtcaatgtttactaaagaaggaggaatactacgaagtgctcgagcacacatccgacatattacgtcaccatcccggaattgtgaaagcctactacgtgagggcgagggcccatgccgaggtatggaacgaagctgaggccaaagccgatctgcagaaagtcctggaactcgagccctctatgcagaaggcggtccggagggagttacgcctgttggagaacaggatggcagagaagcaagaagaggagaggctgcgctgccggaatatgctaagtcagggagccacccaaccacccgcagagccccctaccgagccccctgcccaatcatccacagagccgccagctgaacctcccacagcaccttctgctgagctatctgccggacctccagctgaacctgccacggagccaccccctagccctgggcactctttgcagcattag

SEQ ID NO: 214880 - DNA, 981 bp, synthetic construct
  misc_feature 1..981: note = Description of Artificial Sequence: Synthetic coding sequence
  source 1..981: mol_type = other DNA
atggacgcagctttgctgttgaacgtggaaggggtcaagaaaaccatccttcacggaggtaccggcgaactgcccaattttattacaggcagccgtgttatatttcactttcgaaccatgaagtgcgatgaggagcgtactgtcattgacgattccagacaagtgggccaaccaatgcatatcataatagggaacatgtttaagttggaggtttgggaaatactccttacgtcaatgagagtccacgaggttgccgagttttggtgcgataccattcacaccggtgtataccccattctgtcccggagtctgcgccagatggcacagggtaaagacccaactgagtggcatgtgcacacctgtggtcttgccaacatgtttgcttaccacactctcggctacgaagatctcgatgagctgcaaaaggaaccccagcccctggtgttcgtgatcgaattactccaggtggacgctccatccgattatcagagagagacatggaatctgagcaaccatgagaagatgaaagcagtgcccgtcctgcacggagaggggaatcgcttgtttaagctggggcgatatgaggaagcttcaagcaaataccaggaggcaataatttgtctgcgcaacttacaaacaaaggaaaaaccctgggaggtgcagtggcttaagctggagaagatgattaacactttgatcctgaattattgccagtgtcttcttaagaaggaggagtattacgaggtgctggagcacaccagtgatatcctgcgccaccatccgggtattgtgaaagcctattatgtaagggcaagagcacacgctgaagtatggaatgaagccgaggctaaggctgatctccaaaaggtcttggagctggaaccttcgatgcagaaggccgtgaggcgggaacttcgtttactggagaatgcttggcgacgttctcgccgtcgctcaggctgcgcagccggtacatgttag

SEQ ID NO: 214881 - DNA, 975 bp, synthetic construct
  misc_feature 1..975: note = Description of Artificial Sequence: Synthetic coding sequence
  source 1..975: mol_type = other DNA
atggatgctgccctcctgctgaatgtcgaaggagtgaagaaaaccattctacacgggggaaccggggaattgccaaatttcattaccggaagccggcacactggtgtgtatcctatactctctcgctccctgagacagatggctcaaggtaaggacccaactgagtggcacgtgcacacctgcggccttgccaacatgtttgcctatcacaccctgggatatgaggaccttgatgaactgcagaaagaaccacagcctctggtcttcgtcatcgaattactgcaagtggacgcaccctcagactaccagagggagacctggaatctgtcaaatcatgagaaaatgaaagccgtgccagtcctccacggggaaggtaaccgtttgtttaagctggggaggtatgaagaggcatcatcgaagtatcaggaagcaatcatctgcctcaggaatctccaaacaaaggagaaaccgtgggaagttcaatggcttaaactggagaaaatgatcaacactctaatccttaattactgccaatgtctgctgaaaaaagaggagtactacgaagtattggagcatacatcggatatcctcaggcatcatccaggcatagtgaaggcctattatgtgagagcgagggcgcatgccgaggtatggaatgaggcagaggctaaggctgatctgcagaaagtgctggaattggaacccagtatgcaaaaagccgtgcgacgggagcttcgactactggagaaccggatggcagagaaacaggaggaagaacgcctgcgatgcaggaacatgctatctcaaggtgcaacccagccaccagccgaacctcccaccgagcctccagcccaatcgtccactgagcccccagcggagccccctaccgcgcctagtgcagagctcagtgcgggaccaccagctgagcccgctactgagccacctcccagccccggacattcgctccaacattag

SEQ ID NO: 214882 - DNA, 1251 bp, synthetic construct
  misc_feature 1..1251: note = Description of Artificial Sequence: Synthetic coding sequence
  source 1..1251: mol_type = other DNA
atggcagccaccacagcaaatcccgaaatgacgtctgacgtcccgtcacttggtcccgctatcgcaagtggtaacagcggacctggcatccaaggaggcggagccattgtgcagcgggcaattaaaaggcgccctggactggatttcgacgacgacggagaaggaaacagtaaattcctgaggtgtgatgatgaccaaatgtctaacgataaggaaagattcgctcgatccgacgacgaacagtccagcgccgacaaggagagactggccagggaaaaccactccgagattgagagacgaagacggaataaaatgacagcctatattactgaattaagcgacatggtgccgacctgctccgcacttgcgagaaaaccagataagctaaccatcctccgcatggccgtttcgcacatgaagagtctgagaggaacaggcaacactagtactgacggttcttataagcctagctttttaaccgatcaggagctgaaacatctgattctcgaggcagcagacgggttcctttttatcgtctcttgcgagactggcagggttgtgtacgtttctgatagcgttacccccgtcctaaaccagccccagtctgaatggttcggttctaccctttacgaccaggtccacccagacgatgtggacaaactgcgtgagcagctgagtactagcgaaaatgccctcacaggcagaatcctggaccttaagactgggacagtgaaaaaagaaggacaacagtcaagtatgagaatgtgtatgggctcccgacgcagcttcatttgtcgtatgcgttgtggtagtagtagtgtggaccctgtttcagtgaacagactgtcgttcgtgcggaaccgctgtcgaaatgggctgggatcagtgaaggacggtgagccccatttcgtggttgtacattgtactgggtatatcaaagcctggccaccagccggagtctctctcccagacgatgacccagaagcgggacaggggtccaagttttgcctggttgccatcggacgacttcaggtgacttcctcccctaattgcaccgatatgtcaaatgtctgccagcccactgagttcatctcccgacacaacatagaaggaatctttaccttcgtggaccacagatgcgttgcaactgtagggtatcagccccaagagttgctggggaaaaacatcgttgagttttgtcacccagaagatcagcagcttctgcgagattcctttcaacaagaactgtag

SEQ ID NO: 214883 - DNA, 2223 bp, synthetic construct
  misc_feature 1..2223: note = Description of Artificial Sequence: Synthetic coding sequence
  source 1..2223: mol_type = other DNA
atgtatcaccactgggtacagccactcccactagagacactagatttggagttcaaagtcgaggaaccactgagccgcggactcttaagtggcgaccaggcgggactgaagtacctactgttggcattcctcaggctggatttcgacgacgacggtgaaggaaatagcaaattcctgcgctgcgacgatgaccagatgtcaaacgataaggaacgatttgcaagggagaatcactctgagatcgagagaagacgcaggaacaagatgaccgcttatatcacagagctcagtgacatggttccaacgtgcagcgcattagccagaaagcccgataagctgaccatcctgagaatggcagtgagtcacatgaagagcctgagaggaaccggtaatacatccaccgacggatcttacaagccgtcctttctgaccgaccaggagttgaaacaccttatcttggaagcggcagacggcttcctgttcatagtgtcatgcgagactggccgagtcgtgtacgtgtccgactcagtcaccccagtgcttaatcaaccacagtccgaatggtttggttccaccctgtatgaccaggtgcatccagatgacgtcgacaagcttcgagaacagctaagcacgagtgagaatgcattgactggcaggatactagatctgaagaccggcaccgtaaaaaaggaaggccagcagtcatcaatgcggatgtgcatgggctcaagacggagttttatttgccgaatgaggtgtgggtcttcttctgttgatcccgtttcagtgaaccggctttcttttgtccggaacagatgcagaaacggccttggatccgtgaaagacggggagccccatttcgtggttgtgcactgcaccgggtacattaaggcctggcccccagctggagtcagtctgccagacgacgaccccgaggctggccagggatctaaattctgtctggtcgctataggacgactccaggttacttcctctccgaattgcactgacatgtcaaacgtatgtcagccgacagagttcatcagcagacacaacattgaggggattttcacctttgtggatcacagatgcgtcgccacagtcggctatcagccacaggaactgctcggtaagaacatcgtggagttctgtcaccctgaagaccaacagctgctgcgagattcattccaacaagtggttaaattaaaagggcaggtcctcagcgttatgttccgtttccgtagcaaaaaccaggagtggttgtggatgcgcacatcatcatttacctttcagaatccctactccgacgagattgagtatatcatttgcactaatactaacgtgaagccgctgacctacaggcaacagcagcaacagacggagctggacatggtgccaggtcgcgatggactggctagctataatcatagtcaggtagtacagccggtcaccactaccggaccggagcattccaaacccctggagaagtccgatggtctatttgcacaggaccgagatccacggttctcagaaatctatcacaatataaacgcagatcaaagcaaagggataagctcgagcaccgtcccagccacgcagcagttgttctcccagggaaatacatttccacccacgcccagaccggctgaaaactttcgcaatagtggactcgcgccaccagtgactattgtgcagccgtccgcaagtgccggacaaatgctagcacagatttccaggcattctaatcccacccaaggggcaacgccaacctggacccccactacacgaagtggattctctgcgcaggtggcaacccaagccaccgctaagacccggaccagtcagttcggagtgggcagtttccagacacccagttcttttagctccatgtctctgccaggggctcctacagccagccccggtgccgctgcttacccctccctgaccaataggggatcgaatttcgctcctgagacagggcagactgcgggtcaattccagactaggaccgcagaaggagtcggtgtgtggcctcagtggcagggacagcagccccaccaccgctcgtcaagctctgagcagcacgtgcaacagccccctgcacagcagccgggtcagcctgaagtgtttcaggaaatgctttccatgttgggggatcagtccaatagttataataatgaggagtttccagacctgacaatgttcccgccattttccgagtag

SEQ ID NO: 214884 - DNA, 1251 bp, synthetic construct
  misc_feature 1..1251: note = Description of Artificial Sequence: Synthetic coding sequence
  source 1..1251: mol_type = other DNA
atggccgctaccacggccaaccctgagatgaccagcgacgtgccctccctgggtcccgctatcgcgtcaggaaattccgggccaggaattcaagggggtggcgcaattgtccagcgggctatcaaacggcgacctggcctcgactttgatgacgacggagagggtaattcgaaatttcttcgctgtgatgatgaccagatgtccaatgataaagaaaggtttgccagatctgacgacgagcagagctctgcagacaaggaaagacttgctcgagagaatcacagcgagatcgaaaggcggcgtcgaaacaaaatgaccgcatacattaccgagttgagcgatatggtccctacttgctctgctctcgccagaaagccagacaagctaaccatccttcggatggcggttagccacatgaagagcctccgaggcacaggaaacactagtaccgatggatcatataagccttccttcctcacggatcaggagctcaaacatctcatcttagaagctgcagatgggttcctgttcattgtgtcctgtgagacaggaagggtggtatatgtgtccgactcagttactcccgtgttgaatcagccgcaatccgagtggttcggatccacgctctatgatcaggtccacccagacgacgtggataaactgcgcgaacagctgtccacttccgaaaacgctctgactggtagaatcctcgacctgaagacaggtacagtgaaaaaggaggggcagcagtcatccatgcgtatgtgtatgggcagtcgcaggtcttttatctgtcggatgagatgcggcagctcctctgtggatcccgtctccgttaaccgactgtcgtttgtgaggaatcggtgtagaaatggcctcgggtcagtgaaggacggggagccccacttcgtagtggtgcactgtacaggctacatcaaagcatggccgcctgccggagttagtctgcccgacgacgaccccgaagcaggccaggggtccaaattttgcctcgtcgcaattggacgcctgcaggtgacctcctccccaaattgtaccgatatgtctaatgtctgccaacctaccgagttcatcagcagacacaatatagagggcatctttacttttgtcgaccacagatgtgtagcaacagttgggtaccagccacaggagttgcttgggaaaaatatcgttgaattttgtcaccccgaagaccaacaactcctcagagactcgtttcagcaggaactgtag

SEQ ID NO: 214885 - DNA, 2325 bp, synthetic construct
  misc_feature 1..2325: note = Description of Artificial Sequence: Synthetic coding sequence
  source 1..2325: mol_type = other DNA
atggctgcgaccacagccaacccagagatgacatctgacgtaccttcattgggaccggctatcgcttccggcaactcaggtcccggaattcagggagggggtgcaatcgtgcaacgtgctattaaacgccgtccagggctggattttgacgacgacggggagggaaactctaagttcctgcgatgtgatgatgatcagatgagtaacgacaaagagcggttcgccagggagaaccattcagagattgagaggcgtaggcgaaacaagatgaccgcctatatcactgagctgagtgacatggtgccgacctgtagcgccctggcccgtaaacctgacaaactcacgatcctccgaatggcagtcagtcatatgaaaagcctccggggaactggtaacacgtccacggacggatcatacaagcccagctttctcacagatcaggagttgaagcacctgatcttagaggccgctgatggattcctgtttattgtcagttgcgagacaggtcgtgtcgtgtatgtctcagacagcgtgacccccgtcttaaatcaaccacaaagtgaatggttcggttctacgctctatgatcaggtgcatcccgatgacgtggacaagctgcgagagcaactgtccacctccgagaatgcactgaccggacgcatactggatctgaagacaggcaccgtcaagaaggaaggtcaacagagttcgatgcgaatgtgcatgggatctaggaggagctttatttgtcgaatgcgatgcggcagtagctctgtcgatcctgtcagcgtcaaccgcctgtcattcgtcagaaatcgctgtaggaacggccttggttctgtcaaagatggggagccacacttcgttgtcgttcattgcacagggtatattaaggcatggccacccgcaggcgtctcacttcccgatgacgatcccgaagctggacaaggctctaaattctgcctggtggccatcggtcgcctgcaggtaaccagcagccctaattgtactgacatgagtaacgtatgccagcccactgaattcatcagtaggcacaatatagagggtatatttacctttgtcgatcacaggtgtgtcgctactgttgggtatcagccacaggagctcctgggaaaaaatattgtggagttctgccatccggaagaccaacagctactcagggactcatttcagcaggtggtaaaactgaaagggcaggttctgtccgtgatgtttagattccggtctaaaaatcaggagtggctttggatgcggacttctagctttacctttcagaatccttacagcgatgagatagaatatattatttgcactaacacaaacgtaaaaaactcctctcaggagccaagaccaactttgagcaataccatccagaggccgcagcttggcccaacggccaacctgcctctggaaatggggtctggccagctcgctccaagacagcagcagcagcagaccgaattggacatggtacctggacgggacggtctcgcctcatataaccattctcaagtggtacagcctgtcaccaccactggtcctgaacattctaaaccattagagaagagtgatggtctttttgcccaggaccgagatccccgattttcagagatttaccataatataaacgcggaccagtctaagggaatttcatcatcgaccgtgccagcgactcaacagcttttctcacaaggcaatacgttccctcccacaccacgtccggcagaaaattttaggaacagcggcctagctccccctgtcactatagtgcagccaagcgcatctgccggacagatgctcgcgcagatcagtaggcatagcaaccctacccagggtgctactcccacatggactcccacgacacgttctgggttcagcgctcaacaggtagccacacaggctacagccaaaacccgtacctctcagtttggggtcggctctttccaaaccccctcctctttttcttccatgagcctgccgggagcgccaactgccagccctggggctgcggcttacccttcattaaccaatcgaggtagcaatttcgccccagagacgggccagactgctggacagtttcaaactcgcactgcagagggagttggagtgtggccccagtggcagggccaacagccacatcacagaagtagcagcagcgagcagcatgttcagcagcctccagctcagcagcctggccagcctgaagtgttccaggaaatgctttcaatgttaggagatcaatccaactcatacaataacgaggagtttcccgacctcactatgttccctccgttctccgaatag

SEQ ID NO: 214886 - DNA, 2328 bp, synthetic construct
  misc_feature 1..2328: note = Description of Artificial Sequence: Synthetic coding sequence
  source 1..2328: mol_type = other DNA
atgacttccgacgtcccctctctggggcctgctatcgcttccgggaactcaggcccaggcatacagggtggcggtgccatcgtgcagcgggctatcaagaggaggcctggtttggactttgatgatgatggcgaaggcaacagcaagttcctacgctgcgatgatgatcagatgagcaacgacaaagagcgttttgcaaggagtgatgatgaacaatcttctgccgacaaagagcggctggctagggaaaaccatagtgaaatcgagagacggagacgtaataagatgactgcatatatcactgagctttcagatatggtgcccacttgctcagctctcgcacggaagccagataaactgacaatcttgcgaatggccgtaagtcacatgaaatcccttcggggaacagggaatacatccacggacggctcttataagccctcatttctgaccgaccaagagctaaaacatttgatcctggaggccgcagacggatttttgtttatcgtctcgtgtgagaccggccgagttgtgtatgtgtctgattcagttactcctgtgttaaatcagccccagtccgagtggtttggctcgacgctgtacgaccaggtccatcccgatgacgtggataaactcagggagcaattatctactagtgaaaatgcactgactggacggatactggatctgaagaccggaaccgtgaaaaaggagggacaacagagttccatgaggatgtgcatgggaagtcgcagatcctttatctgtcgaatgagatgtggttcctcaagcgtggaccccgttagcgtgaataggttgagttttgttaggaacagatgtagaaatggtctgggatccgtaaaggacggcgagcctcattttgtcgtcgtccattgcactgggtacatcaaagcatggcctcctgccgacgatgatcccgaggccggacaggggagtaagttctgccttgtcgccatcggacgcctccaggtgacaagtagtccaaactgcacggatatgagtaatgtttgccagccgaccgagttcatatcccggcataatatcgagggcatcttcacttttgttgatcaccgctgcgttgcaacagtggggtatcaacctcaggaattactgggcaaaaatatcgtcgagttttgccatcctgaggaccaacagttactgagggattcattccagcaggtggttaagctcaagggacaggtgttgtccgtgatgttcaggtttcgcagtaaaaaccaggagtggctgtggatgaggacctctagtttcaccttccaaaatccttactcggatgaaatagagtatatcatctgcacgaacacaaacgtcaaaaactcttcgcaggagccgagaccgaccttgtctaataccatccagcggcctcagcttgggcctaccgctaatttgccactcgaaatgggctccggccagctggcccctcggcagcagcagcaacagacagaactcgatatggtccctggtagggacggccttgcttcatacaatcacagtcaggttgtgcagcccgtcaccacaacagggcctgagcatagcaagcctctggaaaagtctgacggtctgttcgctcaggaccgcgatcccagatttagcgaaatatatcacaatatcaatgctgaccagtctaaggggattagctccagcactgtgcccgcaacccagcaactcttctcacaaggtaacaccttccctccgaccccacggccagcggaaaattttaggaattctggccttgccccacctgtcacaatcgtgcagcccagcgcctccgcaggccagatgcttgctcagatatccagacattccaaccccacccagggggctacaccgacatggactccgactacaaggagtggtttctctgcccagcaggtagcaacacaggcaaccgcaaagacgagaacatctcagtttggggtgggtagctttcagacacctagcagcttttcatcaatgagtcttccgggagcacctacagcctccccaggcgcagccgcttacccatctttaactaatagaggttctaatttcgccccagagacagggcagactgcgggacagtttcagactagaacagctgagggagttggggtctggcctcagtggcaagggcagcagccccatcacagaagcagtagttccgagcagcatgtccagcagcccccagcacagcaaccgggacagccggaagtctttcaggagatgttatccatgttaggtgatcagagcaacagctacaataacgaggagttccccgacctcacaatgttccctcccttctctgagtag

SEQ ID NO: 214887 - DNA, 1428 bp, synthetic construct
  misc_feature 1..1428: note = Description of Artificial Sequence: Synthetic coding sequence
  source 1..1428: mol_type = other DNA
atgagcgccaccgccgctgctcggaagagaggcaaaccagcatctggagcaggtgccggagccggtgctggaaagcggaggaggaaggccgatagtgctggagataggggcaagtccaaggggggtggtaagatgaatgaagagatctcatccgactcggagagcgagagcctggcgccacggaagcccgaggaagaagaggaagaagagttggaggagactgcccaggagaagaaattgagattggctaagttgtacttggaacagcttcgccagcaggaagaagagaaggccgaggcaagggccttcgaggaggaccaggtcgccggtcggctcaaggaggacgtgctcgaacagcgaggcagacttcagaaacttgttgcaaaagagatccaggcacccgcatctgcagacatcagagtcctgcgtgggcaccagctgtccattacctgcctagtcgtgacacctgacgactccgccatattttccgcagccaaggactgcagtatcatcaaatggtcggtggaaagtggtaggaaactccacgtgatccctcgggcaaaaaaaggagcggaagggaagcctcctggccatagctcacacgtcctgtgtatggctatcagttcagacggcaaatatctggcctctggcgacaggtcaaaactgattctcatttgggaggcacagtcatgtcagcacctttacacatttactggtcacagggatgctgtttctgggcttgcttttcgacgaggtacccatcaactttactccacctcacatgacagatccgtgaaagtgtggaacgtcgctgaaaactcctacgtagaaaccctgtttggacatcaagacgctgttgccgctctcgatgcattgtcaagggagtgctgtgtcaccgccggaggcagagatggcacggttagagtttggaaaataccagaagaatcccagctggtgttttacggccatcagggatctatcgactgtattcaccttatcaacgaggaacatatggtctctggagcggatgacggcagcgtggcactatgggggctctctaaaaagaggcctctcgcgctgcagcgcgaggcccacggcctgagaggagagccaggccttgaacagcctttctggatctctagtgtagccgcactgctcaacactgatctcgtggcaacaggctcccactccagttgtgtcaggctgtggcagtgtggcgaaggatttcgccagctggatctgctttgtgatataccgctggtgggattcattaacagcttaaagtttagtagctctggcgatttcttagtcgccggagtagggcaagagcatagattaggacgttggtggcggattaaggaggctagaaattctgtctgtattatccccctgcggcgagtcccagtgccaccagcagcgggttcatag

SEQ ID NO: 214888 - DNA, 2154 bp, synthetic construct
  misc_feature 1..2154: note = Description of Artificial Sequence: Synthetic coding sequence
  source 1..2154: mol_type = other DNA
atggctacacctgccgcagtcaatccgccagaaatggcctcggatattcctggcagtgtgaccctgcccgtggccccaatggccgctactggccaggtcagaatggccggagctatgccggctagaggaggcaagcggaggtccggcatggattttgacgacgaggacggcgagggtccgtctaaattttccagggagaatcactccgaaattgaacggaggcgcagaaataagatgacccagtacatcacagagctgagtgacatggtgccaacctgctccgcattggccagaaagcccgataagctcacaatcctcagaatggccgtttctcacatgaaaagtatgcgcggaacagggaacaagagcaccgacggcgcttataaaccttctttcctgaccgagcaggagctgaaacatctgatattggaagcagccgatggatttctttttgtggtggctgcagagacaggaagggtgatttatgtgtccgactccgtgacacccgtactgaatcaacctcagtccgaatggttcgggtcaacactgtatgaacaagttcaccccgacgatgtagaaaaactgagagagcagctgtgcacaagcgaaaactccatgaccggccgtattctagatcttaaaactggcactgtcaagaaggagggccagcagtccagcatgagaatgtgtatgggttcaaggaggtcttttatctgtcgtatgcggtgtggtaacgcccctcttgatcacctcccactgaacagaattaccacaatgcgcaagcggttccgcaatgggctcgggccagttaaagaaggtgaagcccagtatgcggtggtgcactgcaccggatatatcaaagcctggcctccagctggcatgacaatccccgaggaggacgccgatgtgggccaggggtcgaaatactgcttggttgcaatcggacggctccaagttacttcctcgcctgtctgcatggatatgaatgggatgtccgtccccaccgagttcctctccaggcacaattctgatgggatcattacgtttgttgacccaagatgtatctcagttataggctaccagccgcaggatttgttagggaaagacattctggaattctgccaccccgaggaccaaagccacctgagagaatctttccagcaagtggtcaaactcaaaggacaggtgttaagtgtgatgtacagattccgcacaaaaaacagggaatggatgcttattcgcacctcttctttcacattccagaacccatatagtgacgagattgaatatattatttgcactaacacaaatgttaagcagctacagcaacaacaggccgagttggaagtgcatcaacgagatggcctgtcctcctacgacctgtcccaggtgcctgtgcccaacctgcctgctggggtgcatgaagctggcaagtccgtcgaaaaggccgacgcgatctttagccaggaaagggatccaaggttcgcagaaatgttcgccggaatctctgcctccgagaaaaaaatgatgagttctgcctcggcagcagggacccagcagatttacagccagggctctccttttccctccggtcactccgggaaagccttttccagcagtgtcgtacatgtgccaggggtgaacgacatacagtccagttcaagcaccggacaaaacatgtctcaaatttctcgccagctgaatcaatcccaggtggcgtggacgggcagtcgcccaccctttcccggtcagcagatcccaagccagagcagcaaaactcagagtagtccgtttggaatcgggactagccatacgtatcccgcagacccaagtagctattcccccctgagttctcccgctactagttccccctctggcaacgcttatagcagtctggccaataggacaccaggttttgccgaatcagggcagtcatccggtcagttccaggggaggccgtcggaggtgtggagccagtggcagtctcaacaccacggacagcagtctggggagcagcactctcaccaacagccaggacaaacagaagtctttcaggatatgttacctatgcccggagacccaacacaggggacaggcaattataacatcgaggactttgcagatctcggcatgtttccccctttcagcgagtag

SEQ ID NO: 214889 - DNA, 2118 bp, synthetic construct
  misc_feature 1..2118: note = Description of Artificial Sequence: Synthetic coding sequence
  source 1..2118: mol_type = other DNA
atggcaagtgacattcccggttcggtaactctgcctgtggcgcctatggcagccaccggtcaagtgcggatggcaggtgcaatgcctgctagagggggaaagagacgcagcggaatggactttgatgacgaagacggagagggaccctcaaaattttcacgagagaatcatagcgagatcgagaggcgccgtcgtaataagatgacccagtatattacagagctgtcagacatggtcccaacatgttccgcgctcgccagaaagccagacaaactcactattttgagaatggcagtcagccacatgaagtcaatgcgcggaactgggaataagtcgaccgatggagcatataaacccagcttcttaacagaacaggaactcaagcatctcattctagaagccgcagatggtttcttgtttgtggttgccgctgagactggcagggtcatctatgtgtctgactctgtgacccccgtgctaaaccagcctcaatctgagtggttcggtagcaccctctacgaacaggtgcaccctgacgatgtagaaaagcttcgtgagcaactatgtacttctgagaatagcatgactggacgaatcctagacttgaaaactggtacagtcaaaaaggaaggacagcagtcatccatgcgcatgtgcatgggttctagacgctccttcatttgtaggatgagatgtggcaatgcaccgcttgaccacctacctctgaatcgaattacaaccatgagaaaacggttccgcaatggactgggcccagtgaaagagggagaggcacagtacgcagtggtgcattgcacaggatatatcaaggcatggcctccagccggaatgacaatacctgaggaggatgcagacgtgggccagggatccaagtattgtctggtggccataggaagactgcaagttaccagctctccagtttgtatggatatgaatggtatgagcgttcctacagagttcctgagccgccataattcggacggtatcataacatttgttgatccaaggtgtatttctgtcatcggttaccagcctcaggacctcctggggaaagatatccttgaattctgccaccctgaagaccagagtcacctacgcgagtcctttcagcaagtggtcaagctcaaagggcaagtgctctccgtaatgtatcgcttcagaacgaagaaccgcgagtggatgctcattcgcacctcaagtttcactttccaaaatccctactctgatgaaattgaatacatcatatgtacaaacacaaacgtcaagcaacttcaacagcaacaagccgagttggaagtgcatcagcgagacggtctttcttcatatgatctatcgcaagtgcctgttcctaacctgcctgctggggtgcacgaagcgggaaaatctgtcgaaaaggctgatgccatctttagccaggaacgggatccaagattcgcggagatgttcgcaggcatctctgcaagtgagaagaagatgatgagttcagcatctgccgcaggcacacagcaaatctattcccagggttctccgttcccatccggacattccggaaaggccttttcttcgagcgttgtgcacgtgcccggagtaaacgacatccagtcttccagctctaccgggcagaacatgtcacaaatcagtcgccagctgaaccagtcccaagtggcctggaccgggagtaggcccccatttccgggtcagcaaatacccagtcagtcatccaaaactcagtcatctccttttggtataggtacctcacatacttaccccgcagacccttcaagttattcccctctctcgtctccggctacaagttcaccatccggaaacgcctactcctctctggccaatcgtacacctggtttcgccgaatcgggacagagcagtgggcagttccaaggacgcccatcagaggtctggtctcagtggcagagccagcaccatgggcagcaatcaggagagcagcactctcaccaacaacccggacagactgaagtatttcaggatatgctcccgatgcccggtgatccacgaaacgagtggtggtcaccccattcacgacagcattttcgtcagcccatttcatacgccaggatgtag

SEQ ID NO: 214890 - DNA, 2121 bp, synthetic construct
  misc_feature 1..2121: note = Description of Artificial Sequence: Synthetic coding sequence
  source 1..2121: mol_type = other DNA
atggctagcgatattccgggatccgtgacgctgcctgtggctcccatggctgcgaccgggcaagtgcgcatggccggagcaatgcccgctagagggggaaaacggcgaagcggcatggacttcgacgacgaagatggggaaggaccctccaagtttagtagagaaaaccacagcgagatcgaaaggcggaggagaaataaaatgactcagtatattactgagttgtcagacatggtcccaacttgttccgcattagcccgaaagccggacaaactgaccatcctgcgaatggctgtctcacacatgaaaagtatgcgagggacagggaacaagagtaccgacggggcatacaagccaagtttcttgactgagcaggaacttaaacatctgatcctcgaggctgccgatgggttcctctttgtggtggctgccgaaacagggagagtcatctatgtctccgattccgttacccccgtgctgaatcagccccagagcgagtggttcggctctaccctttacgaacaggtgcaccctgacgacgtggagaaactgagagagcagctgtgcacctcagagaacagcatgaccggtaggattttagacctcaagactggcaccgttaagaaggaaggccaacaatcttctatgagaatgtgcatggggagtagacgatcatttatttgccgaatgcggtgtgggaatgcgccactggatcatctgccactgaaccggatcaccacgatgagaaagcgatttcggaacgggctcggacctgtgaaggagggggaggcccagtacgctgtggtccattgcacaggctacattaaagcctggccccctgccggtatgacaatcccggaggaggacgcggacgtgggccagggctccaagtactgcctcgtggccatcgggaggctgcaagtgacaagctctcccgtctgcatggatatgaacggcatgagtgttccaactgagtttttatccagacacaattccgacggcattattacgttcgtcgatcccaggtgtataagcgtgatcggataccagccgcaggatctcttgggaaaagatattctcgagttctgtcaccccgaagatcagtctcatttacgggagagctttcaacaggtagtcaaactaaaaggtcaggtgttaagcgtcatgtatcggtttagaacaaaaaaccgagagtggatgcttatcaggaccagttccttcacctttcagaacccgtatagtgatgagattgagtatattatctgcacgaataccaatgtgaaacagctccagcaacagcaggctgaattagaggtgcaccagcgcgatgggctcagtagctatgacttgagccaagtccctgtcccgaaccttccagctggcgttcatgaggcgggaaaatcagtcgaaaaggcggacgcaatctttagtcaagagcgcgaccccagatttgccgaaatgttcgctggaattagcgcttcagagaaaaagatgatgtccagcgcgagcgctgccggaactcagcagatctacagccagggcagcccatttccttctggccatagcggcaaggccttttcatcatcagttgtgcacgtacctggcgtgaacgacatccagtcttcttcatctacaggtcagaatatgtcgcagatctcacgccagctgaatcagtctcaggtggcttggacgggttctcgtcccccatttccaggtcagcagataccttcacagagtagtaaaactcagagcagtcccttcggaattggaactagccatacgtaccctgccgatccgagctcttattctccactgtcttcccccgctacatcctcaccttctggtaatgcctacagtagtctggccaaccggacgcccggattcgcagaatccggccagtcttctgggcagttccagggaaggccaagcgaggtctggagtcaatggcagtcacagcatcacggacagcagtctggggaacagcattctcatcaacagcccggacagaccgaagtattccaggatatgctccccatgcccggagacccaacgcagggcaccgggaactacaacatcgaagatttcgcggacttgggaatgttccccccattttcagagtag

SEQ ID NO: 214891 - DNA, 2121 bp, synthetic construct
  misc_feature 1..2121: note = Description of Artificial Sequence: Synthetic coding sequence
  source 1..2121: mol_type = other DNA
atggcgtctgacatccctggttcagtgacgttacccgtggctcctatggcggcaacaggacaggtgcggatggccggtgccatgcccgctcgaggaggcaaaaggcgaagcgggatggatttcgatgatgaagacggagagggacctagcaaatttagtagagagaatcacagcgagatcgagcgcagacgcagaaacaagatgacccagtacattaccgaactttccgacatggtacccacatgtagtgcacttgctcggaaacctgacaaactgactatcctgagaatggcggtgtcccatatgaagtccatgcgagggactggaaataaaagtacggatggcgcttataagccctcctttctgaccgagcaggagctaaagcatctgatcctggaggccgctgacggatttctttttgtggtcgcggctgagaccgggagggtgatctacgtctctgattctgtcaccccagtgcttaatcaaccgcagagtgagtggttcggctcgactctatatgagcaggtgcatccagatgatgtggagaagcttcgggaacaactctgtactagcgagaattcaatgaccggacgaatcctggacctgaagaccggcaccgtgaagaaggaaggtcagcagtctagtatgaggatgtgtatgggtagtagacggtcctttatttgcagaatgagatgtggtaacgcccctctggatcacctgccactcaataggatcacgaccatgcggaagcgcttccggaatggcttaggccctgtaaaagaaggagaggcccagtacgcagtcgttcactgtaccgggtacattaaggcatggccacccgctggaatgaccattcccgaggaggacgccgacgtggggcagggatccaaatactgtctggttgctatcggcagactccaggtgacttcatcaccagtgtgcatggatatgaacggaatgtcggtgcccactgaatttttatccaggcacaattcggatgggattattacttttgtggatcctaggtgtatctcagtgatcggatatcaaccccaggacctgctcggcaaggatattctggagttctgtcatccagaggatcagagtcacctgagggagtctttccaacaggtggtcaaactcaagggacaggtcctctccgtaatgtaccgctttcggacgaaaaacagagagtggatgctgattcgcacatcaagttttacgtttcagaatccatactccgacgagatcgaatacatcatatgcaccaataccaatgtcaaacaactgcagcagcagcaggccgaactggaggtccatcaacgggacggcctgtcatcatacgatcttagtcaggtgcccgtacccaatctgcccgcaggtgtacatgaggccggaaaatccgtcgagaaagctgacgccatcttcagccaggaacgtgacccaagattcgccgaaatgtttgcaggcatctcagctagtgagaaaaaaatgatgtcctctgcctctgctgccggaacccagcagatatattcccaggggagtccttttccaagtggacactccggcaaggcgttttctagcagcgttgtgcacgtccctggcgtcaatgacatacagagttcatctagcaccggacagaatatgtcccagatttctagacagctgaaccagagtcaagtggcctggactggctcgagacctcctttccccggtcagcagattccatctcagtcttccaagacccaaagctctcctttcggaatcgggacgtcccacacgtaccccgctgacccttcaagctatagccccttaagctcacctgcgaccagcagtccctccggtaacgcctactcgtctctggctaacagaacccccggattcgctgagagcggtcagtctagcgggcaattccaaggacgcccttcagaggtatggagccagtggcaaagtcagcaccatggtcaacagagtggcgagcaacacagccaccagcaaccaggacaaaccgaggtgttccaagacatgttgccaatgcccggagaccctactcaaggaactggtaactacaacatcgaagatttcgctgacctcggtatgttccctcccttttcggagtag

SEQ ID NO: 214892 - DNA, 1701 bp, synthetic construct
  misc_feature 1..1701: note = Description of Artificial Sequence: Synthetic coding sequence
  source 1..1701: mol_type = other DNA
atggccaccccagccgctgtgaacccaccagagatggcgtctgacatccctggtagtgttaccctccccgtggcgccaatggctgcgactgggcaagttcgtatggcaggagctatgccggcaagaggtggaaagcgcaggtctggtatggatttcgacgacgaggacggggaaggtcctagcaaattttcgagagaaaatcattccgagattgagcgacgacggagaaataaaatgactcagtatatcaccgagctttctgatatggtgcctacttgtagtgcacttgctcgcaagcccgacaagctaactatcctgcgcatggccgtaagccatatgaaatctatgcgcggaactgggaacaaaagcacggatggagcctacaaaccttctttcctgactgagcaggaactgaaacacttgatcctggaagctgccgatgggtttctcttcgttgtggccgctgaaacgggcagagtcatctatgtatctgatagcgtgacacctgtgctgaaccaaccacaatcggagtggtttggatccacactctatgaacaggttcacccagacgacgtggaaaagctgagggagcagctctgtacctccgaaaacagtatgacagggaggattttagacctgaagaccgggaccgttaagaaggaaggccaacagtcctccatgaggatgtgcatggggtcccgccgaagcttcatttgtcgcatgcgttgtggcaatgctcctctggatcacttgccactgaatagaatcacaacaatgcgcaagaggtttagaaatggactcgggcctgtcaaggaaggcgaagcccagtacgcggtggtgcactgtaccgggtatatcaaagcctggccccctgctgggatgacaataccagaagaagacgccgacgtgggtcagggatctaaatactgtctcgtagccatcggcagactgcaggtgacttcctcccccgtttgcatggatatgaacggaatgtcagtacctaccgagtttttgtccaggcataattctgacggtataattacttttgttgatcccagatgtatcagcgtcattgggtaccagcctcaggacttgctgggtaaagatattttggagttttgccatcccgaggaccagagccatctgcgagaatccttccagcaggtcgttaaacttaagggacaggtgctgagcgtgatgtacagattccgcaccaagaacagagaatggatgctcatccgcacgagctcctttaccttccagaacccgtattctgacgaaatcgaatacattatttgtactaataccaatgttaagcaactgcagcagcagcaggcggaattggaagttcaccagagggatggactatcctcatacgacctctcacaggtgccagtgcccaatctacctgctggagtgcacgaggcaggtaaaagcgttgaaaaggctgatgccatctttagtcaagagcgggacccaagattcgcagaaatgtttgcaggcatttcagcaagcgagaaaaaaatgatgtcatctgcgtccgccgcaggcacccagcagatttattcacaaggtagccccttcccttccggtcactccggtaaagcattttccagcagcgtggtgcatgttcctggagtcaacgacatccagagttctagtagcaccggacagaacatgagtcagatatcaggttcctag

SEQ ID NO: 214893 - DNA, 2160 bp, synthetic construct
  misc_feature 1..2160: note = Description of Artificial Sequence: Synthetic coding sequence
  source 1..2160: mol_type = other DNA
atgcctagaactatgattccacctggggaatgcacgtacgctggacgaaagcgcaggagaccgctccagaaacagcggccagcagtgggcgcagagaaatccaaccctagtaaacgacaccgggaccgcttgaatgcagagttagatcaccttgccagtctcctccctttccccccagatatcatctctaaactggacaaactgagcgtactgagactctcggttagctatctccgggtgaagtcttttttccaagtggttcaagagcagtctagcagacagccagcagctggggctccatcccccggtgattcctgtccactggctggaagcgctgtgttagaggggcgattgctgctcgaaagtttaaatggatttgccttggtagtgtctgccgaaggaaccatattttacgcctcagctacgatcgtagactatctcggcttccaccagactgacgttatgcatcagaatatttacgattacattcatgttgatgacaggcaagacttttgtcggcagctccattgggccatggaccctccccaagtcgtctttggccagcccccacctctggagaccggggatgacgctattttgggcaggctgcttagggcacaagagtgggggacagggactccaaccgaatactctgcttttctgacgcggtgcttcatttgccgagtaagatgtctgcttgactctacgtcaggattcctcgccagagggtcccaggcctggcaattaaggctgtgctgtcccgagcctctgatgacgatgcagtttcagggcaagttgaagttcctgttcggccagaaaaagaaggcaccaagtggtgccatgcttccaccgcgtttgagccttttctgcattgcagcgccagtcctgctgccgtctgcggctgagatgaaaatgcggagcgcactgctccgtgccaaaccacgagcagacacagccgcaactgcagacgcaaaggtgaaggcgactacatccctttgcgagtccgaattgcacggaaaacctaattactcagctggcaggtcctccagagagtcgggtgtcttagtcctgcgagagcaaaccgatgccggacgatgggcccaagtccctgcgagggctccctgcctttgtttaagaggcggacccgatctagtcctggatcctaagggaggttcaggagacagggaggaagagcaacatcgaatgctctcaagagccagtggggttacaggaagacgagaaacaccgggtcctacaaagcccctgccctggacagccggtaagcacagcgaagacggcgctcgtcctcgacttcagccgagtaagaatgatcctccaagcctccgcccaatgccacgaggctcctgtttgccttgcccctgtgtgcaggggacctttcgaaactctcctatctcacacccaccttctcccagtcccagcgcctactcctcaagaacctctcgccctatgcgcgacgttggcgaggaccaggtacatcctccactctgccactttccgcagagaagccttcaacatcagctgccccagcccggagcgcagcgttttgccacccgcggttatccaatggaagatatgaagctgcagggtgtccccatgccaccaggcgacctgtgtggccctaccctcctgctcgatgtgtcgataaagatggaaaaagatagtggatgtgagggggcagccgacggctgcgtgccctcccaggtgtggttgggtgcctccgacaggtcgcacccagcgacattccctactaggatgcacctgaaaacagagcccgatagccggcagcaggtgtatattagtcacctaggccatggagtaagaggagcccagccccatggacgggcaaccgcaggcagatctcgcgagctcacaccatttcaccctgctcattgcgcctgtctagaacccacagatgggctgccacagtcagagccccctcatcagctgtgcgccaggggaagaggggaacagtcttgtacctgtagagctgcggaagctgcacctgtggtcaaacgcgagcccctggacagccctcagtgggccactcactcacagggaatggtgcctgggatgctgccaaagtcagccctggcaaccctagtgccaccacaggcttctggctgtaccttcctgccttag

SEQ ID NO: 214894 - DNA, 2106 bp, synthetic construct
  misc_feature 1..2106: note = Description of Artificial Sequence: Synthetic coding sequence
  source 1..2106: mol_type = other DNA
atgccacgaacaatgatcccccctggagagtgtacttacgctggcagaaaacgtagacgcccactccaaaagcaacgtcccgctgttggtgcagaaaaaagcaatccatcaaagagacacagagacaggctgaacgcagagctcgatcatctcgcatctttgctgccttttcccccagatattattagtaagctcgataaactatccgtgttgaggttgtccgtaagctacctgcgcgttaagagctttttccaggtcgtgcaggaacagtcgtcccgccagcctgctgctggggcaccatctcccggagatagttgtcctctggcaggaagcgcggtactggaaggtaggctgctgctggagagcttgaacggctttgcactggtggtttccgcggagggcacgatattttacgccagcgccactatcgtggactatctgggcttccaccaaacggatgtgatgcaccaaaatatttatgattacatccatgtggacgacagacaggacttttgccggcaactgcactgggccatggaccctccacaggtggtgtttggccagcctcccccactcgaaaccggcgacgatgccatcctgggacgacttcttagggcccaggagtggggtactgggactcctactgaatattcagccttcctgacacgatgtttcatctgtagagtgagatgcctgttggactccacaagcggcttcctgactatgcagttccagggcaaattgaaattcctcttcggccagaagaaaaaagctcctagcggagccatgttgccaccacggctgagtttgttttgcatcgccgcacccgttttgctgccctctgcagctgaaatgaaaatgcggtcagctttgctccgagcaaagccccgtgctgacacagccgcaactgctgatgccaaggttaaggcaaccacttctttgtgcgaatccgaactgcatggaaaacctaactacagcgctgggagatcttccagagagtcaggggtcctcgtgttgcgcgagcagaccgacgcgggaagatgggctcaggtccctgctcgtgcgccatgtttgtgcttgagggggggtccagatctcgtgctggacccgaagggagggtctggggacagagaagaggagcagcatcgtatgttgagcagagcatctggcgtaaccgggagacgcgagaccccgggtcccactaagcctctgccctggaccgccggaaaacactctgaggacggagcacgccctaggttgcaacctagcaagaacgatccaccatctctgcgccctatgccacgcggttcttgcctaccatgtccttgcgttcagggaacatttaggaacagtcctatttcccatcctccttcaccaagtccgtccgcctattcatctagaacctccagacccatgagggacgtgggagaagaccaagtgcatcccccactgtgtcatttcccgcaaaggtccctccagcaccagctgccccagccaggtgcgcagaggtttgctacaagaggctaccctatggaggatatgaagctgcagggtgtgcctatgccccctggcgatctgtgcggacctacactgttactggacgtctcaatcaagatggagaaggattctggatgtgagggcgcagcggacgggtgtgtcccctcccaagtatggttgggagcgagtgataggagccatccagctaccttccccacccggatgcatctgaagactgaacccgatagtagacaacaggtttacatctcccacttgggacacggtgtgcgcggagctcaaccccacggtcgagcgaccgccggacgtagtcgtgagctcacaccattccaccctgcgcactgtgcctgtttggagccaaccgacggactgcctcaatccgagccaccacatcagctgtgtgccagggggaggggtgaacagtcctgtacctgtagggcagccgaggcagcacccgtggtgaagcgagagcctctagactctcctcagtgggctactcactcccagggcatggtgcccggtatgctgccaaagagtgctctcgccacccttgttcccccacaggcgtcagggtgtaccttcttgccttag

SEQ ID NO: 214895 - DNA, 2205 bp, synthetic construct
  misc_feature 1..2205: note = Description of Artificial Sequence: Synthetic coding sequence
  source 1..2205: mol_type = other DNA
atgtctggattcgacgatccagggattttttattctgactcctttggcggtgatgcccaagctgatgaaggccaagcaaggaagtcacagttgcagaggcgatttaaggagtttctccggcagtatagggtcgggaccgaccgaactgggttcaccttcaaatatcgagatgagttgaagcgccattacaacttaggggagtactggatagaagtggaaatggaagacctcgcctcctttgatgaggatctcgctgactacctctacaagcagccagccgagcacctgcagctgcttgaggaggcagcaaaggaagtggcagacgaagtgactaggccgagaccctcaggagaggaagtcctgcaagatatccaggtcatgctgaagtccgatgcatcgccctccagcattagatcactaaaatccgacatgatgtctcatctggtgaagatccccggaatcatcatagccgcatcagctgtcagggccaaggctactagaatttctattcagtgcaggtcttgtaggaataccctcactaatatcgctatgcgccctggtctggaagggtacgcgttacccaggaaatgtaacacggatcaggctgggagaccaaagtgcccccttgatccttacttcatcatgccagacaagtgcaaatgcgtggacttccagacccttaaattgcaagagctcccagatgctgtgccacatggcgaaatgccacggcacatgcagctgtactgtgacagatatctgtgcgacaaggtcgtgcccggaaacagagttactatcatgggcatttactctattaaaaagttcggtttgactacttctcgtggccgagatcgcgtcggggtcgggattcggtcgtcatacattcgcgttctggggatacaggtcgataccgacggctccggacgcagttttgccggagctgtgtccccacaggaggaggaggagttccgtcgattggcggcattaccaaatgtgtacgaagtgattagcaagtctatcgcgccttccatttttggcggaaccgatatgaaaaaagccattgcgtgtctgttgttcggcggatcaaggaagcggctacccgacggcctgaccaggcgaggagacatcaacctgctcatgttgggcgaccccggtactgctaagagtcaactactcaagttcgtggagaagtgcagtcctattggcgtgtatacatccgggaaaggatcttctgccgctggcctgaccgcatccgtaatgcgtgatccctcctccaggaattttattatggaaggcggagcgatggttttagctgatggaggagtcgtttgcatagatgagttcgataagatgagagaagacgacagagtggctatccatgaggccatggaacagcagacaatttctatcgcaaaagccggtatcacaaccactctaaattcccgatgctcagtgttggcggctgccaacagtgtgttcggccgttgggatgagaccaaaggtgaggacaacattgacttcatgcccacaattctctccaggtttgatatgattttcatcgtaaaagatgaacataacgaggagagggacgtgatgctagctaagcatgtaatcacattacatgtgagcgctcttactcaaacacaggccgtggaaggagagatcgatttggctaaacttaagaagtttatcgcatactgtagggtgaagtgtgggccacggctatctgccgaggcagctgaaaaattgaaaaatagatacatcatcatgcgatccggcgctagacagcatgaaagagacagcgacaggagaagctccattcccattactgtgagacagctggaagccattgtccggattgccgaagccttgtccaagatgaaactccaaccctttgcaacagaagctgacgtggaggaggcactccggctgttccaggtctctactctggatgctgcgctttcaggaaccctttcaggcgtggagggctttacatcccaggaggaccaggagatgctcagtaggatcgaaaagcagttgaaacgacgttttgcaattgggtcacaggtgtcggagcactctattatcaaggatttcactaagcagaaatacccagagcatgctattcacaaggtgctacaactgatgctccgcaggggcgagatccagcatcggatgcagagaaaggttctgtaccggctcaagtag

SEQ ID NO: 214896 - DNA, 1530 bp, synthetic construct
  misc_feature 1..1530: note = Description of Artificial Sequence: Synthetic coding sequence
  source 1..1530: mol_type = other DNA
atgtcgatgggcgctccgagatcattactcttggcacttgcggcagggctggccgtggctagaccccctaacatcgttctcatcttcgccgatgatttaggatatggcgatctcggctgttacgggcatccatcttccacaactccaaacctcgatcagctggcagcaggaggacttagattcaccgatttttatgtccctgtgagcttgtgtaccccttcgcgtgcagctctgcttaccgggagactccctgtccgaatgggaatgtatcctggcgtgctggtgccaagctcacgcggagggcttcctctcgaagaggtgacggtagcagaggtgttggccgcacgaggatacctaacggggatggccggaaagtggcatctaggtgtggggcctgaaggggcttttctgccgcctcaccaggggttccatagatttctgggtataccttattcccacgatcagggaccctgtcaaaacttaacttgcttcccacctgcaacaccgtgcgatggtggctgcgatcaagggctggtgcctatcccactccttgctaatcttagcgtggaggctcagcctccatggttgccaggattggaggcacgatacatggcattcgcgcatgatttaatggcagatgcccagagacaggacagaccatttttcctctattatgccagtcaccacacacattaccctcagttttctggacaaagtttcgcagagaggtccgggagggggccattcggagactcgttgatggagctcgatgctgcagtcggtacccttatgacagcgatcggcgatctaggccttctggaggagacactggttatcttcactgccgataatggccctgagaccatgcgaatgtctagagggggttgttccgggctgttgagatgcgggaaaggcacaacatatgaaggaggggtcagggaacctgcccttgccttttggcctggccacatcgcccctggggtgacacacgaattagcttccagtctggacctgctccctactcttgctgctcttgctggtgcccctctgcccaacgtcactcttgacggatttgatctcagccccctcctcctaggcacgggaaaatcaccgagacagtccctcttcttttatccatcttatcctgacgaagtccggggtgtgttcgctgtccggaccggaaaatataaggcccatttcttcacgcagggcagcgctcattctgatacgaccgctgatccagcctgtcacgcctcttcgtcactgactgctcacgaacctccactgctttacgacctgtccaaggacccaggcgagaactataacctgctcggaggggtagctggcgctaccccagaggtgttgcaggcattgaagcagcttcagctgctgaaggcacagttggacgccgcagtcactttcggcccttcccaggtggccaggggggaagatcctgcgctacagatctgctgccatccgggatgcaccccacggcctgcttgctgtcactgccccgacccccacgcctag

SEQ ID NO: 214897 - DNA, 1530 bp, synthetic construct
  misc_feature 1..1530: note = Description of Artificial Sequence: Synthetic coding sequence
  source 1..1530: mol_type = other DNA
atgagcatgggcgctcccagatctctgctgctggccctggcagccggtctggctgttgcccgaccacccaacattgtgttaatattcgccgatgacctggggtatggggacctgggctgctatgggcaccctagttccaccacccccaacctggaccaactcgccgcaggaggcttgcgctttaccgatttttatgtgccagtatctttgtgtacccccagcagagccgcattgttaacgggacgtctcccagttaggatgggaatgtacccgggagtgctcgttccttctagtagaggcggattacctctcgaagaggtcaccgtcgccgaagtcctcgcagccaggggatacctcaccggtatggcgggaaaatggcacctgggggtcggccctgagggagcgttccttcccccacatcaggggtttcataggttcctgggcataccctatagccacgaccaaggaccatgccagaacctgacatgcttccctcctgctaccccctgcgatggcggatgtgatcaagggcttgtccctattcccctgttagctaacttatccgtcgaggcacagcccccttggctccccggtctggaggctcgctatatggcgtttgcccacgatctgatggcagacgcacaacggcaggataggcctttcttcctgtactacgcatcacaccacacccattacccacagtttagcgggcagagtttcgcagaacgttcaggcagaggacctttcggcgatagtttgatggagctggacgctgccgtgggtacactaatgactgccattggcgacctgggattactggaagaaaccctagttatatttaccgctgacaatggaccagaaactatgaggatgtcacggggtggctgtagcggtttgttgagatgtggcaaaggaacaacatacgaaggtggcgtccgcgagcccgctcttgctttctggccgggtcacattgccccaggagttacccatgagctcgcttcttctctggacctcttgcccaccctcgccgcactcgccggagcgccactgcccaacgtcaccctggatgggtttgacctctccccccttctgctgggcactggaaagtcccctaggcagtccttgttcttttatccttcgtacccagatgaagtgcgaggagtgtttgcagtaaggaccggtaagtacaaggcccactttttcacccaggggtctgcccattccgacaccaccgcagaccctgcctgccacgcctcctcatccctgactgctcacgaaccgccactgctatacgatctgagtaaggaccctggcgaaaactataatctacttggcggagttgcaggagctacccccgaggtgctgcaagccctgaaacaactacagttactcaaggcacagctggacgccgctgttactttcggaccaagtcaagtagccaggggtgaggaccccgcactgcagatctgctgccatcccggatgcacccccaggccagcctgttgtcactgcccagatcctcacgcctag

SEQ ID NO: 214898 - DNA, 1530 bp, synthetic construct
  misc_feature 1..1530: note = Description of Artificial Sequence: Synthetic coding sequence
  source 1..1530: mol_type = other DNA
atgtctatgggagcacctcgcagcctgcttctggccctggccgctgggctggcggtcgctcgccctcctaacattgttctgatttttgccgatgacctaggctacggagacctagggtgctacggccacccaagctcgactacacccaatctggatcaactcgctgccggtggactccggttcactgacttctatgtgccagtgtcactctgtacaccttccagagctgcccttctgacgggtcgattgcccgtgaggatgggaatgtatccaggggtccttgtgccttcctcccgtggcggattaccacttgaggaggtaacagtggcagaggttctggcagcaagagggtacctgaccggcatggcaggcaaatggcatcttggggtgggcccagaaggagcattcctccctccgcaccagggcttccatagattcctggggatcccctactcacacgatcaaggaccatgtcagaatctgacttgttttcccccagccaccccctgtgacggaggatgcgaccagggcctggtaccgatcccgctgctcgcaaatttgtccgtggaagcccaaccaccttggctgcctgggcttgaggcccgatatatggcgtttgcgcacgatctcatggcggatgcacagcggcaggatagacccttctttttgtattatgcatcccaccacacccactacccacaattctcaggtcagtcgtttgccgagaggagtggcagaggcccttttggtgactccttgatggaactcgacgccgcagttggaactctgatgaccgcaataggagacctgggtctcctggaggagactctggtgatctttacagccgataatggccctgagactatgagaatgtctagaggcggatgctcaggcctgttgcgctgtgggaagggcacaacttatgaggggggagtgcgggaaccagccctggccttctggcctggccacattgccccaggagtaactcatgaactcgcttctagcctggatctcctgcccaccctcgcggcactagctggcgcacccctgccaaacgtcactctggacggctttgacctgtccccactactgctaggcacaggaaagagcccgcgacagtccctgtttttttacccaagctatccagatgaggtgaggggagtgttcgcagtcagaacgggaaagtataaggcccacttcttcacccagggatctgcacatagtgatacgactgcagatccagcctgccatgcctccagttcacttaccgcgcacgagcccccattgctgtatgatctctcgaaagacccaggcgagaattataatctcctcggtggcgttgcaggggcaactcccgaagttttgcaggctctcaagcaactccaactcctgaaggctcagctggacgctgcggtgacgttcggtccatctcaggtcgcaaggggggaggaccccgctctccagatctgctgtcatcccggatgcacaccacgaccagcatgctgtcattgccccgacccccacgcctag

SEQ ID NO: 214899 - DNA, 1272 bp, synthetic construct
  misc_feature 1..1272: note = Description of Artificial Sequence: Synthetic coding sequence
  source 1..1272: mol_type = other DNA
atgggcatgtacccgggagtcttagtaccctcaagcaggggaggacttccgctggaggaagtgaccgtagcggaggtgttggctgcccgtggatacttaacaggaatggctggcaagtggcacctgggagttggccctgagggagcttttctgcctccgcaccaaggttttcataggttcctggggatcccctatagccatgatcaaggaccctgtcagaatctgacctgctttccccctgcaactccctgtgatggcggatgcgaccaggggcttgttccgattcctctgctcgccaacctgtcagtggaagcacagcccccttggctaccgggattggaggcgaggtacatggccttcgcgcatgacctaatggcagacgcgcaacgtcaggatagacctttcttcctgtactacgcctcccaccacactcactaccctcagttcagtgggcagtcttttgccgaacggagtgggcgtggcccattcggcgatagcctcatggaattggatgctgccgttggtaccctcatgacagctatcggagatctgggacttttggaggaaacgttggttatctttaccgcagacaatggcccagagacaatgagaatgtcaaggggtgggtgctctggcctgctcagatgcgggaaagggactacttacgaaggtggagtacgtgaaccagcactggcgttttggcctggccacatcgcgcctggtgtgacacacgaactggcctctagtctcgatctactgcccactctggccgcactcgccggtgctcccctgcccaacgtcaccctagatggctttgatctcagccctttgctgctcggcaccggaaagagccccagacagtccctctttttctacccaagttacccagatgaagtgagaggagtgtttgccgtgcgaacaggcaagtacaaggcgcacttcttcacccaagggagcgcccacagtgacacaaccgctgaccccgcatgccacgcttcatcttctctgaccgctcatgagcccccattgctgtacgaccttagtaaagatcccggtgagaattataacttgctcggtggcgtagctggggctactcctgaggtgctgcaggcgttgaaacagctccagttgctgaaggcccagctagatgccgctgtcacgttcggtcccagccaagtcgctagaggggaggacccagctcttcagatttgttgtcatcccggatgtactccaaggcctgcttgttgtcattgcccagatccacacgcatag

SEQ ID NO: 214900 - DNA, 1524 bp, synthetic construct
  misc_feature 1..1524: note = Description of Artificial Sequence: Synthetic coding sequence
  source 1..1524: mol_type = other DNA
atgggcgctcccaggtctcttctgctggctctcgctgcaggcttggccgtcgccaggcctccgaatattgtgctgattttcgcagacgacctcggatatggagatctgggctgttacgggcatccctcaagcactaccccaaatctcgatcaattggctgctggaggcctgaggttcaccgacttttacgttcctgtgtccttgtgtaccccctcccgggctgccctgctgactggtcgactcccagtacggatgggaatgtaccccggagtcctcgtcccatcaagcagaggaggtctgcccctcgaggaggtaactgtggcagaggtcctcgcagcgaggggctacttgactggcatggccggtaagtggcatcttggggtaggccctgagggcgctttcctaccgcctcatcagggcttccacagattccttgggattccttactctcacgatcaaggcccttgtcagaatctcacatgcttcccccctgctaccccctgcgacggaggttgcgaccagggactggtgccgatccctctgctcgcaaacctgagcgtcgaagcacagcccccttggctacctggtttggaagctcggtacatggctttcgcacacgatttgatggctgatgcccaacgccaggaccgtcccttcttcctctattacgcctcacaccacactcattatccccagttctcagggcagagtttcgccgagaggtccggtcgaggcccttttggcgattcgctcatggaattagacgcagccgtgggtacattaatgaccgccataggcgacctggggctactcgaggagacattggtcatctttactgctgacaacggacccgaaactatgcggatgagccgcggaggctgctctggactcctaagatgcggcaagggaacgacatacgaagggggtgtccgcgagccagccctcgccttctggccaggccacatcgcccctggggtcactcacgaactggcatcatctctggaccttctgcctactctggcagcgcttgcgggtgctcctctgcccaatgtcaccctggatgggtttgacttgtcccccctgctgttaggaaccgggaagtctcctcgccaaagtctctttttctatccatcctacccagacgaagttaggggcgtgttcgccgtgcggactgggaagtataaagcccacttcttcacccagggctccgcacactccgacacaacagctgacccggcatgtcacgcctcctcaagtttaacagctcatgaacctcccctgctgtacgacttgtccaaagatcctggtgaaaattacaatttgctgggaggcgtggcaggcgctacacctgaagttctgcaagctctgaaacagttgcagctgcttaaggcccagctggacgccgcagttacgtttggcccttcacaggtggctcggggtgaagaccccgcattgcaaatctgttgccatccaggttgtacccccagacccgcatgttgtcattgccccgatccccacgcatag

SEQ ID NO: 214901 - DNA, 1524 bp, synthetic construct
  misc_feature 1..1524: note = Description of Artificial Sequence: Synthetic coding sequence
  source 1..1524: mol_type = other DNA
atgggtgcaccgcgatccttattgctagccctcgctgctggacttgcagtggcccgtcctcccaatattgttcttatatttgccgatgatctgggctatggcgatctgggctgttatgggcatccttccagtactacccctaaccttgaccagttggcagcaggaggcctgagattcactgatttctacgtgccagtctctctatgcaccccctctagggcagcattattaacaggtaggctccctgttcggatgggcatgtatcctggagttctggttccctcatccaggggaggactgccactcgaagaggtgactgtggctgaggtacttgccgctcgcggatacctaacgggcatggcaggaaaatggcaccttggcgttggtcctgaaggtgctttcttgcctccacaccagggctttcacagattccttgggattccatattcgcacgatcagggaccgtgtcaaaatctcacatgttttcctccagctactccttgcgacggagggtgcgaccaagggctggtgcccattccactcctcgctaatctctcagtggaggcccaaccaccctggctgccgggactggaggccaggtacatggcttttgctcacgacctgatggccgatgcacagcggcaggaccgaccatttttcctctactacgcttcccaccacactcattatcctcaattttctggccaatccttcgctgagcgaagtggaaggggaccctttggggattcgcttatggaactcgacgctgcagtgggcacactgatgactgctattggggatttgggtttactggaagagactctcgtgatcttcactgcagacaatggtcccgagaccatgcggatgtcacgcggtgggtgttctggcctccttcggtgtggcaaagggactacatacgagggcggagtgagggagcctgcattggctttctggccagggcatatcgcacccggagtcactcacgaacttgctagctctttggatctgttgcccacgctcgcagcccttgctggagccccactgccaaatgttaccctggacgggtttgatctgagcccacttctacttggcacaggcaagtcccccaggcaaagtctgtttttctacccgtcttaccccgacgaggtcaggggggtgttcgccgtgcgcaccggcaaatataaggcccacttctttacccaagggtcagcccactctgacactacagctgatccagcgtgccacgcaagcagttcgttaacagcacacgagccacccttattgtacgatttgtccaaagacccgggagagaactacaacctgctaggcggtgtggccggagctaccccagaggtgctccaggccctcaagcagttgcagctgctcaaggcccaactggacgccgctgtaaccttcggcccatcccaagtagccagaggcgaagatcccgctctccagatatgttgccatccgggttgtaccccccgacccgcttgttgccactgtccagatccccacgcctag

SEQ ID NO: 214902 - DNA, 1782 bp, synthetic construct
  misc_feature 1..1782: note = Description of Artificial Sequence: Synthetic coding sequence
  source 1..1782: mol_type = other DNA
atgcgatccgcggcacggagaggccgtgctgcccctgccgctcgcgactctctccctgttctgttgtttctgtgcttgttgctaaagacctgtgagcccaagacagccaatgctttcaagcctaacattctgctgatcatggccgacgatttaggcaccggagatttagggtgctacggaaataatactctacgaacaccaaatatcgaccagcttgctgaggagggggtcagacttacacaacatttggccgctgcgccactgtgcacaccaagccgagccgcatttctgactggacggcatagctttcgatctggcatggacgctagtaatggctatcgcgctctgcagtggaatgcaggatccggcggactgcccgagaatgaaacaacgtttgcccgtatcctccagcagcacggttacgcgacggggctcattggtaaatggcaccagggcgtaaattgcgcgtcgaggggtgaccactgccatcatccactcaaccacgggtttgactacttttatggcatgcctttcacgcttacaaatgactgcgatcctggccgaccacccgaggttgacgctgcactgagagcccaactctggggctatacccagttcctcgccctggggatcctgaccttagcagccggacaaacatgtgggttcttctctgtctctgctcgcgctgtgactggcatggcgggtgtgggatgcctcttctttatctcttggtatagctcctttggatttgtgaggagatggaattgcatcctgatgcgcaatcatgacgtgacagagcagccaatggtgctcgaaaagacagcctccctgatgctgaaggaggcggtatcctatattgagaggcataagcatggtccttttctcctgtttctgagcctgcttcacgtacacataccccttgttactacttctgcattcctgggaaagtcccaacacggactgtatggcgataatgtggaggagatggattggctgatcggtaaagtgctgaatgcgatcgaggacaacggcctaaaaaatagtacgttcacatactttacctcggatcatgggggacacctggaggccagagatggccactcacaactgggaggctggaatggaatctataagggtgggaaaggaatgggcggttgggaaggcggtattcgtgtcccaggaatatttcactggcctggtgtgctgcccgcaggcagagtaattggcgagccaacatcattgatggacgttttcccaactgtggtccaactcgtcggtggtgaagtgccgcaagaccgggtaattgatggccactcccttgtgcctttactgcagggagcagaggcacggagtgcacacgaatttctgttccattactgcggacaacacctgcacgcagccagatggcaccagaaagactctggctcagtgtggaaagtccactacacaactcctcagttccacccagagggtgccggagcctgctacgggaggggcgtttgcccatgtagtggcgaaggtgttacccatcaccgaccccctcttctctttgatctatcgcgagatccttctgaggctcgtccgctgactcctgattccgaacccctctatcatgcggttattgcgagggtaggggcagcagtgtcagagcaccggcagactctgagccctgtgccccagcagtttagcatgtccaacatactctggaagccctggctacagccatgctgcggccacttccccttctgcagctgccatgaggatggcgacggcaccccttag

SEQ ID NO: 214903 - DNA, 1770 bp, synthetic construct
  misc_feature 1..1770: note = Description of Artificial Sequence: Synthetic coding sequence
  source 1..1770: mol_type = other DNA
atgctccacttgcaccactcctgtctgtgctttaggtcctggctacccgctatgctagccgtcctgctgagcctcgccccaagtgcctcctctgatatctccgccagccgcccaaatatcctccttttgatggctgatgacttgggaatcggagatattgggtgctacgggaacaacaccatgagaactccaaatatcgaccggctcgccgaagatggggtaaagctgactcaacacatctccgcggcaagcctgtgtactccgtcaagggcagcattcctgacaggcaggtaccctgtacggtctggcatggtcagctccatcggttatagggtgctgcagtggacaggggcaagtggcggacttcccacgaacgagacgacattcgccaagattctaaaagagaaagggtacgcaaccggtctcattggtaaatggcatctcgggctcaattgcgaatccgcttcagatcattgccatcaccctctccaccacggtttcgaccacttttacggcatgccattttccttaatgggcgattgcgccagatgggaactctcagagaagagagtaaatctagaacagaaactgaacttccttttccaggtgctggcccttgtggcccttactctggttgcaggcaagcttacacacctgattcccgtgtcttggatgcctgtcatctggtccgccttgtctgccgtactgctgctggcatctagctacttcgtcggcgcattgattgtccatgccgactgcttcctgatgcgcaatcataccataaccgagcagcccatgtgttttcagaggactacgcccctgatactgcaggaggtagcgtcctttttaaagcgcaataagcatgggccatttctccttttcgtgagtttcttgcatgtgcatatacccctaatcactatggaaaatttccttggcaagtcattacacgggctgtacggggataatgtcgaggaaatggactggatggtgggtagaattttggacaccctggacgtcgaggggctttccaactccaccctcatatatttcactagcgaccacgggggatcactcgagaatcagttgggcaatactcaatacggcggttggaacggtatttacaagggcggtaaaggtatgggagggtgggagggtgggattagggttcccggaatcttccggtggcccggagtgctgccagccggaagggtgattggcgaaccaacctccctcatggatgtctttcctacggtggtacgcctggccggtggggaggtccctcaagacagagtgatcgacggacaagatttgctgcctctactgttaggcacagcccaacactctgaccacgaattccttatgcattattgcgaacggttcctgcacgctgcccgatggcaccaaagagacaggggcaccatgtggaaggtccatttcgtaacccctgtgtttcaaccagaaggagccggagcatgctatggccgtaaagtgtgcccatgtttcggagagaaggtcgtgcatcacgaccctccgctgctcttcgatctgtcacgcgatccctccgaaactcatattctcacaccggcatctgagcccgttttttatcaggtcatggaaagagtgcagcaggctgtgtgggagcatcagcggacattatcaccagtgcccctgcaactcgaccgtctgggaaatatctggagaccatggctacaaccatgctgtggcccttttcccctgtgttggtgcctacgcgaggacgatccacagtag

SEQ ID NO: 214904 - DNA, 537 bp, synthetic construct
  misc_feature 1..537: note = Description of Artificial Sequence: Synthetic coding sequence
  source 1..537: mol_type = other DNA
atgctccacctacaccactcttgcctgtgtttccgtagctggctgcccgctatgttggccgtgcttttgtcacttgcacccagcgcctccagtgacatctccgcctcccggccaaacattctgcttctcatggccgacgatctgggaataggagatataggttgctacggtaacaacacaatgcggacgccaaatattgataggcttgccgaggatggggtcaaacttacccagcatatcagcgctgccagcctttgtacaccaagccgcgcagcgttcttgacgggaaggtaccccgttcggtccggcatggttagctcaatcggatatagggtcttgcagtggacgggcgctagcgggggactccctacaaacgaaactaccttcgccaagatcctaaaagagaagggttacgccaccggactgattgggaaatggcacttgggcctgaactgcgaatccgcctccgaccattgccaccaccctctgcatcatggattcgatcacttttatggcatgcccttctctctgatgtag

SEQ ID NO: 214905 - DNA, 1635 bp, synthetic construct
  misc_feature 1..1635: note = Description of Artificial Sequence: Synthetic coding sequence
  source 1..1635: mol_type = other DNA
atgagcggatcaagagagcgagacaacatgctgcacttgcaccactcgtggaccccaaacatcgatcgactggccgaggatggtgtcaaacttacccagcacatttctgcagctagtctttgcaccccgagccgcgctgcattcctgaccggaaggtatccagtgaggtcaggaatggtcagtagcatcggttatagagtgctccagtggaccggcgcttcgggcggtctgccaactaatgagactaccttcgctaagatcttgaaagagaaaggatatgccaccggactgatcgggaaatggcaccttggacttaactgcgaatcagcatctgatcactgtcaccaccctctacaccacggcttcgaccatttttatggaatgccattctctctgatgggagattgcgccagatgggagctgtctgagaagcgcgtaaatcttgaacagaaattaaactttctgtttcaggtgttggctttggttgctctcaccctggtagccggtaaattaactcaccttatccccgtatcctggatgccagtcatatggtccgcactaagcgccgttctgctgctggcgtcctcttattttgtcggcgcattgattgtgcatgccgactgctttctgatgagaaaccacacaataaccgagcagcccatgtgctttcagcgaactaccccactgatcctccaagaagttgcttcatttctcaagcgcaacaagcatgggccttttctgttattcgtctcctttctacacgtgcatatccctcttattacaatggaaaactttcttggcaagtctctccatggtttatacggagacaacgttgaagaaatggattggatggtcggaagaattctggatactcttgatgtggaaggcttatccaatagtaccttaatatatttcacctcagatcacggcggtagcctggaaaaccagcttggaaatactcagtacggaggctggaacggtatttacaaaggcggaaaagggatgggcggatgggaaggtgggattcgagtcccgggtatattccgctggccgggagtgctacccgctggtagggtcattggtgaacctaccagcttaatggacgtgtttccaaccgtagtgagacttgccggaggggaggtcccacaggaccgtgttatcgacgggcaggacctattgcctctcctgctcgggacagctcagcattctgatcatgaattcttaatgcattactgcgaaagattcctccacgccgcaagatggcatcaaagagacaggggcaccatgtggaaggtgcacttcgtaacgccagtattccagcccgaaggcgcaggggcatgttacggcagaaaggtatgtccctgcttcggcgagaaagtggtgcaccacgatcctcctctcctgttcgatctctctagggatccgagtgaaactcatatacttactcctgcgagcgaaccagtgttttatcaggtcatggaaagggttcaacaggctgtttgggaacatcaaaggaccctgtctccagttccacttcaactggacaggcttggaaacatatggcgcccatggctccaaccttgttgtgggcctttcccactgtgctggtgcctgcgggaggatgatcctcagtag

SEQ ID NO: 214906 - DNA, 1845 bp, synthetic construct
  misc_feature 1..1845: note = Description of Artificial Sequence: Synthetic coding sequence
  source 1..1845: mol_type = other DNA
atgcggcctgttataaatagatgtgcccctggtagcctagacctaatgcttccacaggcagctagcgagggtatcgtctttcacagtctgcagatttccctgtgctttcgctcatggctcccagctatgctggccgtgctcttgtccttggcccctagcgccagctccgatatcagtgcttcgaggcctaacattcttctgcttatggcagacgatttagggatcggtgacatcggttgctacggcaacaacacaatgcgtacacctaatattgacagactcgccgaagacggcgtaaaacttacacagcatatcagcgctgcctctctatgcacgccatccagggcagcctttctaactgggagataccccgtccgctctggaatggtctcctcaattggctatcgtgtacttcagtggactggcgctagtgggggactcccaacgaacgagacaactttcgctaagatcctcaaggagaagggatatgctaccggcctgataggcaagtggcacctcgggctcaactgtgagagtgcctccgatcactgtcaccaccctctccatcatgggtttgaccacttctatgggatgcccttctctctgatgggagactgtgcacgatgggagttatcggagaaacgcgtgaatctggaacagaagctgaacttcctttttcaggtgcttgcactggtggcactcactcttgttgcgggaaagctgactcacctgatccccgtgtcatggatgcccgtgatctggtcagcgttgagcgccgtcctgctgctcgcttcatcgtattttgtcggcgctctgatcgtccatgcggactgttttttaatgaggaaccatactatcactgagcagccaatgtgcttccagagaactaccccattgatcttgcaggaggtggcgtcttttctcaagaggaataagcatggacccttcctgttattcgtgagcttccttcatgtgcacataccactgattactatggagaattttttgggcaaaagtctgcacggtctgtatggcgataacgtggaagagatggattggatggtaggtcgaattttggacacactagatgttgagggcctgagcaattccaccctcatctacttcacaagcgatcatggcggaagcctggagaaccagttaggcaacactcagtacgggggttggaacggaatctataaaggaggaaagggcatgggcggatgggagggcggaattcgagttcccggaatctttcgctggcctggagtgctgccggctgggagggtcatcggggaacccacctcgctgatggatgtttttcctactgtggtccgactcgccggaggcgaagtcccacaggacagagtcatcgacggccaggacctactgccccttttactcggcacggcccaacattctgaccatgagttcctgatgcattattgtgaaaggttcctccacgctgccaggtggcaccagcgagataggggcaccatgtggaaggtgcattttgtgacgccagtgtttcaacctgagggagcgggagcgtgttacggcagaaaggtgtgcccctgctttggggagaaggtagtgcaccacgatcccccattgctcttcgacctgtcccgcgacccctcagagacccacatcctgactccagcttccgaaccagttttttaccaggttatggaacgcgttcagcaggcggtctgggagcaccagcgtacactcagccctgtgcctctgcaacttgatagactcggaaacatctggcggccttggctgcagccatgctgtgggcctttccctctttgctggtgcctgagagaggatgatccgcaatag

SEQ ID NO: 214907 - DNA, 1773 bp, synthetic construct
  misc_feature 1..1773: note = Description of Artificial Sequence: Synthetic coding sequence
  source 1..1773: mol_type = other DNA
atgcggccacggaggcccctcgtgtttatgtctcttgtatgtgccttgcttaatacatgccaggcacatcgagtgcacgatgacaagcctaatatcgtcctgattatggttgacgatctcggtattggggacctaggctgttacgggaacgataccatgaggacaccccacatcgaccggctggccagagaaggagtgcgattgacacagcatatctccgctgcctcactatgctcaccatcgcgatcagcctttctgactgggagatacccaatcaggagcggaatggttagtagcggaaacaggagggttatccagaaccttgccgtgcccgctggactgcccctgaacgagactacccttgctgctcttctgaagaaacagggatactccactggcctgatcggtaagtggcatcaaggactcaattgtgattctcgttccgaccagtgccatcatccatacaattatggatttgattattattatgggatgcctttcacattggtggacagctgctggcccgaccctagcaggaacacagaactagcattcgagtctcaactctggctgtgtgtgcaattagtggccattgccattttaaccttgaccttcgggaagctctcaggctgggtgtccgttccttggctgctaatctttagcatgatactgttcatatttctcctgggatacgcatggttcagcagccacacatcccctctctattgggattgcctcctgatgaggggccatgagatcactgaacaacccatgaaggctgaacgcgcagggtcaatcatggtgaaggaggctatctcctttctggagcggcactctaaggaaacattcctcctgtttttttcttttctccatgtgcatacgcccctccccacaaccgacgacttcactgggacgtccaaacacgggctctatggcgacaatgtggaggagatggacagtatggtcggcaagatcttggatgccattgatgatttcggcctgcggaacaacactttagtttattttacctcggaccacggcggtcacctggaggcaagacgcggacacgcacagcttggtggttggaacggaatttacaaaggcggaaaaggaatgggtggctgggaaggcggtattcgggttcctggcattgtgcgatggcctggtaaggtgcctgccggtcgcctcataaaagaacccacatctctaatggacatccttcccaccgtggcatccgtatcgggaggttccctccctcaggaccgcgtaattgacggcagggatctgatgccgctgctccagggcaatgtccgccactcagagcatgagttcttgtttcattactgcggatcctacctgcacgccgtcaggtggataccaaaggacgactctggaagcgtgtggaaggcccattatgtcactcctgtgttccagcctcctgcctcaggcggttgctatgttacgtctctgtgtaggtgtttcggcgaacaggtcacttatcacaacccaccacttctattcgatctgtccagagacccgtcagaaagcactcccctgactcctgccacagaacccctgcatgactttgtgattaagaaggtagccaatgccctcaaagagcatcaggagacgattgtccccgtaacctaccagctctccgagctaaatcagggtcgaacatggctcaaaccctgctgtggcgtctttccattttgtctctgtgacaaagaagaagaagtgtcacaaccaagaggaccaaatgaaaaacggtag

SEQ ID NO: 214908 - DNA, 1773 bp, synthetic construct
  misc_feature 1..1773: note = Description of Artificial Sequence: Synthetic coding sequence
  source 1..1773: mol_type = other DNA
atgagacctcggcgacctctggttttcatgtctctcgtctgcgctttgttgaacacttgccaggcccaccgcgttcacgatgataagcctaacatcgttctgatcatggttgacgatcttggaattggggatctggggtgctatggcaacgacaccatgaggacgccacatatcgacaggctggcccgagagggagttcggctgacccagcatatttcagccgcatcactgtgtagcccctcacggtcggcatttctcaccgggcgttatccgataaggtcaggcatggtgagctcgggcaatagacgggtgattcaaaaccttgctgtaccagctggactccctctgaacgagacaaccttagcagccctgcttaaaaagcaagggtacagcacagggctcattggcaaatggcaccaggggcttaattgcgacagcaggtcagaccaatgccatcacccttacaactatggatttgactattactacggtatgccattcacattggtggattcttgctggcctgacccaagccgaaataccgagctagcctttgaatcccagctgtggctgtgcgtccaactggtggctattgctattctcaccttgacctttggtaaactcagcgggtgggtcagcgtcccttggctgctgatattctcaatgatcttgttcatttttctgctgggatacgcctggttctcctctcacacaagccccctctactgggattgcttactgatgcggggacacgagatcaccgaacagcccatgaaagcggaaagagccggaagcatcatggtgaaggaagcaattagtttcttagaacgccacagtaaagagacatttttgctgttcttttcctttctgcacgtgcatacgcctctccctacaactgatgattttaccggtactagcaagcatggcctgtacggagataatgttgaagagatggattcaatggtaggaaaaatcctggacgctatcgacgacttcggcctgcgaaacaacaccctggtgtactttacttcggatcacggtggacatctggaggctagacgaggtcacgctcagcttggcggatggaatggcatttataagggtgggaagggtatgggcggttgggagggcggaatccgagtgcctggcatcgttagatggcccggtaaagtgccagctggccgactgattaaagaacctaccagcctcatggacattcttcctaccgtggcaagcgttagcggcggtagcctaccgcaggaccgcgtgattgacggccgagatttaatgccgcttttgcagggcaatgtgagacactcggagcacgagtttctgtttcattactgtggctcctatcttcatgccgtcaggtggattccaaaagatgacagtggctctgtatggaaggcccactacgtcacaccagtgtttcagccaccagcctctggagggtgttatgttactagcctgtgtcggtgctttggtgaacaggtgacttaccataatccaccccttcttttcgacctttcaagggacccctccgaaagtacgcctctgactccagccacggagcccctccatgactttgtgattaaaaaggtggccaacgccctgaaagagcatcaggagaccattgttcccgtcacataccagctctctgaacttaaccagggtagaacctggctgaagccctgttgtggcgtcttccctttctgtctgtgtgacaaggaggaggaggtaagtcagccaaggggccctaatgagaagagatag

SEQ ID NO: 214909 - DNA, 1773 bp, synthetic construct
  misc_feature 1..1773: note = Description of Artificial Sequence: Synthetic coding sequence
  source 1..1773: mol_type = other DNA
atgcgccctaggcgtcctctggtttttatgagtcttgtatgcgccctcctcaacacttgtcaagcacatcgggtacatgatgacaaaccaaatatcgtactgatcatggtggatgacctggggataggcgacctcggctgttatggcaacgataccatgcgcaccccacatattgatcgcttagcccgtgagggagtgcgtctgactcagcatatcagcgctgcctcactgtgctccccttccaggtccgcattcctgaccggcaggtaccctatccggagtggcatggtcagttccggcaatcgcagagtcatccaaaatctggccgtgcccgcaggtcttccactgaacgagacaaccctggcagcgcttctgaaaaagcagggctatagcactgggttgatagggaaatggcaccagggtctcaattgcgattcccggagcgatcaatgtcaccacccgtacaactacggcttcgactattattacgggatgcctttcaccttagtggattcatgctggcccgacccttctaggaatactgagttggctttcgaatcacagctgtggctgtgtgtgcagctggtcgccattgccatcctcactttaacatttgggaagttaagcggctgggtttccgtcccctggctcctcatctttagcatgatcctgttcatcttcctattgggctatgcgtggttttcctctcataccagccctctgtattgggactgtctgctgatgaggggacacgaaataaccgagcagcctatgaaagcagaaagggccggaagtattatggtgaaagaggccatctcttttcttgaacggcatagcaaggaaacattccttttattcttctcctttctccacgtccatacgccactccctaccacggacgactttactgggaccagtaagcacggcctgtatggagacaatgttgaagagatggactccatggtcggcaaaatcctggacgctatcgatgacttcggcctcagaaacaataccctcgtgtattttacctccgaccatggagggcacctcgaggccaggcgaggccatgcccagctcggagggtggaacgggatctacaagggaggaaaaggtatggggggatgggaaggaggcattcgtgtgccaggaattgtgaggtggcctggaaaagtccctgctggtagacttatcaaagaacctaccagtcttatggatattctgcccacggtagcttccgtttctggcggaagcttgccacaagaccgcgtcattgatgggagagacctaatgccgctcttgcaggggaacgtgcggcactctgagcacgagtttctgtttcactactgtggtagctacctgcatgcagtgcggtggattcctaaggacgacagcgggtctgtgtggaaggcccattacgttacccctgtgttccagccacctgcctccggcggatgctatgtgacctcactgtgccgatgtttcggagaacaggtaacttaccataacccgccactcctttttgatctgagtcgggatccaagcgaatcgactcccttaacacccgctaccgagccactccacgacttcgtcattaaaaaggttgcgaacgccctgaaggagcaccaagagacaattgtccccgttacatatcagttgtctgaactgaatcagggacggacttggctgaaaccatgttgcggcgtatttcctttttgcttgtgcgataaggaagaggaggtatctcagccgagaggtccgaatgagaagcgctag

SEQ ID NO: 214910 - DNA, 1689 bp, synthetic construct
  misc_feature 1..1689: note = Description of Artificial Sequence: Synthetic coding sequence
  source 1..1689: mol_type = other DNA
atgacaaggaacgcgagacctaacattgtcctgttaatggcggatgacttaggcgtgggcgatctgtgttgctatggcaacaattctgtctcgacaccaaatattgacagactggcttctgagggggtgcggctcacccagcacctggccgctgccagcatgtgtaccccttcacgcgcagcttttcttactggtaggtatcccatacggagcggcatggtttccgcatacaacttgaacagagcctttacctggctcgggggttccgggggtctgcccactaatgaaaccaccttcgcgaaacttctgcagcatagagggtaccggacgggattgattgggaagtggcacctgggcctgagctgcgctagtcgaaatgaccactgttatcatccactcaaccacggcttccattatttctacggtgtcccatttggcctcttgtcagactgtcaagccagtaagactcctgagttacaccgctggctgcgcataaaactctggatatccacggtggcacttgctcttgtgccttttctgctgctcatcccgaagtttgcaaggtggtttagcgtgccttggaaggtcattttcgtctttgctctcttggcgttcttgttcttcacgtcatggtacagttcctatggatttacacggagatggaactgtattctgatgagaaatcacgagatcatccaacagcctatgaaagaagaaaaggtggccagtctgatgctgaaagaggcgctagctttcatcgagagatataaaagggagccattcctgctgttttttagctttctgcacgtgcacactcctctgattagtaagaagaagtttgtcgggagatctaagtacggacggtatggcgataatgtcgaagaaatggactggatggtcggaaagatcttggatgcactggaccaggagagattggctaaccacacgctggtttacttcacgtctgataatggcggtcatcttgagcccttggatggtgccgtacagctaggcggatggaacgggatctacaaaggaggcaaaggcatgggcggttgggagggaggcatcagggtgcctggtattttcaggtggcccagcgtgttggaggcaggcagagtgatcaacgagcctacttcactgatggacatctaccccaccctcagttatataggtggtgggatcctgtcccaggatagagtgattgacgggcagaacctgatgcctcttttagaaggaagggcgtcccacagcgatcacgagtttctctttcattattgtggtgtttacctgcacaccgttcgctggcaccagaaggactgcgctactgtatggaaagctcattacgtgacccctaagttctaccctgagggcactggggcatgctatggctcaggaatctgctcatgcagtggtgacgtgacgtaccatgacccaccgctgttattcgatatcagccgggatccgagtgaggcactgccactaaaccccgataacgagcctttattcgacagcgttataaagaaaatggaggcggctatccgcgagcaccggagaaccttaacgcccgtcccacagcagttcagcgtatttaacacaatttggaagccctggctgcagccatgctgcgggacatttcctttctgcggatgcgacaaggaagatgacatcctaccaatggccccttag

SEQ ID NO: 214911 - DNA, 1710 bp, synthetic construct
  misc_feature 1..1710: note = Description of Artificial Sequence: Synthetic coding sequence
  source 1..1710: mol_type = other DNA
atgcacacccttactggcttttcactggtatcactgctgtcgttcgggtacttaagttgggactgggcgaagccctcatttgtggcagacggaccgggtgaggctggggagcaacccagcgccgctccaccccaaccaccacatatcatcttcatcttaaccgacgaccaaggctaccacgatgttggctaccatgggagcgacattgagacccctactctggaccggctagccgctaagggcgttaagctggagaattattacattcagccaatttgtactcctagtagaagccagctgctgactggcaggtatcagattcacaccgggctccaacattctattataagaccacagcaaccaaactgtctgccgctcgatcaggtgactcttcctcagaaactgcaggaagctgggtactctacccatatggttggcaagtggcaccttggtttttatagaaaagagtgcctgcccaccaggaggggtttcgataccttcctcggctcactcacaggcaacgttgactactacacgtacgataactgtgacgggcctggggtgtgtggtttcgacctgcacgaaggggaaaacgtagcctggggcctgtcggggcagtacagtactatgctgtatgcccagcgtgcttcacatatcctcgcctcgcactcaccccagcgccctcttttcctgtatgttgcgttccaggcagttcacactcccctacaaagtccccgtgagtatctgtacaggtatagaacaatgggaaacgttgccaggagaaaatatgcagcaatggtgacctgtatggacgaggcagtgagaaacataacctgggccctgaagcgatacggtttttacaataattccgtgatcatttttagcagtgacaatggagggcagacattttcaggtggtagtaattggccccttagaggtagaaaaggaacctattgggaaggaggagtcaggggcttagggttcgtgcattctcccctgttaaagcggaaacagcgaacttcgcgcgctctgatgcacatcacggactggtaccctacattggtgggcctcgcgggtggcaccacttcagcagctgatgggcttgatggatatgatgtttggccggcaatttccgaaggcagggcttctcctcgaactgagatcctgcacaacatagaccccctttataaccacgcccagcacggctcgttagaggggggatttggcatctggaatactgccgtgcaggcagctatcagggtcggagaatggaagctgctgaccggggacccagggtacggagactggattcccccacagaccctggcaactttccctggtagttggtggaatctcgagcggatggccagcgtccggcaggctgtgtggctcttcaatattagtgcagacccctatgagcgcgaggatctagccggacagcggcctgacgtggtgcggaccttgctcgccagattggccgagtacaacaggaccgctatccccgtcaggtacccagcggagaatcctagggcgcatccagacttcaatggcggtgcttgggggccttgggccagcgacgaggaggaagaagaagaagaaggcagggcacgttcattctcaaggggacggcgtaaaaagaaatgcaagatatgtaagctccgatcattctttcgtaagttgaacacacgactgatgagccagcgcatctag

SEQ ID NO: 214912 - DNA, 261 bp, synthetic construct
  misc_feature 1..261: note = Description of Artificial Sequence: Synthetic coding sequence
  source 1..261: mol_type = other DNA
atggttggcaagtggcatttgggattttatcggaaggagtgtttgcccaccagaaggggatttgatacattcttagggagccttactggcaatgttgactactacacatatgacaattgcgacgggccaggcgtctgcgggttcgatctgcacgaaggggagaacgtcgcctggggcttaagcggccaatacagcactatgctgtacgcacaaagagcctcccatatccttgccagtcattctccgcagagacctttgtag

SEQ ID NO: 214913 - DNA, 1281 bp, synthetic construct
  misc_feature 1..1281: note = Description of Artificial Sequence: Synthetic coding sequence
  source 1..1281: mol_type = other DNA
atggttgggaagtggcatcttggcttctatcgcaaagaatgcctgccgacacgccgtggtttcgacacttttctgggaagtctgacgggcaacgttgactattacacatacgacaactgcgatgggcctggagtgtgtgggttcgaccttcacgagggcgagaacgtggcgtgggggctgagtgggcagtattccacaatgctctatgcccagagagctagtcacattttggcttcccacagtccccagaggcccttgtttctttacgtggcttttcaggccgtgcacacacctctacagagcccccgagagtatctgtatcggtaccggaccatgggtaatgtggcacgaaggaaatatgcagccatggtaacctgtatggatgaggctgtgcgcaacataacttgggccctgaagcgatacggattctacaataatagcgttattattttcagttctgataacggtggacagacgttctccgggggaagcaactggcctttgaggggtaggaaaggtacgtattgggaaggaggagtaagggggctgggattcgttcactcccccctgctaaagcgcaaacagaggacgtcacgagcactcatgcatattactgactggtacccaacactggtgggcctggcaggtggtaccaccagcgctgccgacggcctggacggttatgacgtttggcctgcaatttctgaagggagggcctccccacgcaccgagatcctccataacattgaccctctgtataatcacgcccagcatgggtccctggagggaggattcgggatctggaataccgccgtgcaagctgcaataagagtgggcgagtggaagcttttgaccggtgaccctggctacggggactggatccctccgcagacattagcaacctttcctgggtcttggtggaaccttgagcgaatggccagcgtccgccaagccgtgtggctttttaacatctcagccgacccctatgaacgcgaagatcttgcagggcaacgcccagatgtcgttagaaccctgctcgcaaggctcgcggagtacaatcgcaccgcaatccccgtaagatatcccgcagagaacccacgcgctcatcctgacttcaatggcggagcctgggggccttgggcatccgacgaagaagaagaggaggaagaaggacgagcacgcagcttttccaggggacggagaaagaagaaatgtaagatttgtaaacttagatcattctttaggaagcttaacacgcggcttatgagccagcggatctag

SEQ ID NO: 214914 - DNA, 1800 bp, synthetic construct
  misc_feature 1..1800: note = Description of Artificial Sequence: Synthetic coding sequence
  source 1..1800: mol_type = other DNA
atggctccacgcggttgcgccggacaccctcccccaccatcccctcaggcgtgcgtctgtcccggtaagatgctggccatgggagcccttgcgggattctggattctgtgtctgcttacctacggatatctgtcatggggccaagctctggaggaagaagaggaaggagcactcctggctcaagccggtgagaagcttgaacctagtacaacttcaactagtcagccacatctgatcttcatcctcgcggatgatcagggtttccgcgacgtcggctatcatgggtcagagattaaaacgcccacactggataagttggctgccgagggtgtgaagctggaaaactactatgtgcagcccatctgtaccccttctaggagccagtttatcactgggaaatatcaaatccataccggtctccagcacagcatcatccgccctacacaaccgaactgcctccccctagataacgccacgctgccacagaaactcaaggaagtgggatactcgactcacatggttggaaagtggcacttgggcttttatcgcaaagaatgcatgcccactaggagagggtttgataccttcttcggaagcttactgggatccggtgattactacacccactacaagtgtgacagtcctggtatgtgtgggtatgatctctacgagaacgataatgccgcttgggactacgataatggcatatacagtacacagatgtacacacaacgggtacagcagatcctcgcttcacacaaccccaccaaacctatattcctgtatatagcttaccaggctgtgcatagcccgcttcaggctcccggaagatatttcgaacattataggagcattattaatattaatagaaggagatatgctgccatgctgtcatgcctcgacgaggccataaataatgtgactttggccctcaagacgtacgggttttataataatagtatcatcatatactcttctgataatggcggacaacccaccgccggtggttctaactggccactccgtggttccaaggggacctattgggaaggtggaattcgtgcagtagggtttgtgcactcccccctcttgaagaacaagggaaccgtgtgcaaagagctggtgcacattaccgattggtatcctaccctgatatcgctcgccgaaggacaaatcgacgaggacatacaactggacggctacgacatatgggaaaccatttctgagggcctacggtctcccagagtcgacatccttcataacatcgatcctatctacacaaaggcaaagaatgggagctgggcagcaggctatgggatctggaacaccgccatccagtcagctattcgggtgcagcattggaagctcctgacggggaacccaggctatagtgattgggtgcctccgcagagcttctccaacttaggccctaataggtggcacaacgagagaattaccctgtctaccggcaaaagcgtttggctattcaatatcactgcagacccctatgagcgtgtcgatctgagtaacaggtaccccggtatcgtcaagaagctattaagaaggctgtcccagttcaacaaaactgccgtgccagtgagatatcctcccaaggatcctaggtctaacccaaggctgaacggaggagtgtggggaccctggtataaggaagagactaaaaaaaaaaaaccctccaagaaccaggcagagaagaagcagaagaaaagcaagaaaaagaagaagaaacagcaaaaggccgtttcaggatccacttgccactcaggggtgacctgtggctag

SEQ ID NO: 214915 - DNA, 1791 bp, synthetic construct
  misc_feature 1..1791: note = Description of Artificial Sequence: Synthetic coding sequence
  source 1..1791: mol_type = other DNA
atggcgcctagggggtgtgccggtcatccccctccccctagcccccaggcatgtgtttgcccgggtaagatgctggctatgggtgccttagcaggattttggatcctttgcttattgacttacgggtacctgagctgggggcaggcattagaggaggaggaagagggagcacttctggctcaggccggagaaaaactggagccaagcaccacgtccacctctcaacctcacctgatatttattttagcggatgaccaaggatttcgcgatgttggctaccatggaagcgaaattaagactccaacactggataagttggcagctgagggagtgaaactcgaaaactattacgtgcagccaatttgcacgccatctaggtcgcagtttattacgggtaagtatcagattcatactggtctgcagcactcgataatcagacctacccagcccaattgtcttcctctagacaacgccactttgccccagaagctcaaggaggtagggtactccacacatatggtgggcaagtggcatctcgggttctatcggaaggagtgtatgcctacccggaggggtttcgatactttctttggatccctgctgggctctggggattattacacccactataagtgcgatagcccaggcatgtgtggatacgacctgtatgagaatgataatgccgcttgggattacgacaacggcatctactccacgcagatgtatactcagagagtgcagcagatcctggccagtcataacccaacgaagccaattttcttgtacatcgcctaccaagccgtccatagccctctccaagccccaggccgttatttcgaacattaccgtagtatcattaacatcaaccgacggaggtatgcagcaatgctctcttgtttggatgaggccattaacaacgttaccctggcattgaagacctatggattttacaataactctattataatctactcttcagataacggcggacagccaacagccggtggtagcaactggcctctcaggggtagtaaaggaacttattgggaaggtgggattcgggctgttggttttgttcatagccccctcctaaaaaataaaggtaccgtgtgcaaagagcttgtccacattacagactggtaccctactctgatttctttagcagagggtcagattgacgaggacatccaactggatggttacgatatctgggaaactattagtgaaggcctcaggagcccacgcgtagatattctgcataatatcgaccctatttatactaaggcgaaaaatggctcttgggccgctggctatggtatctggaatacggccatccagtcggctattagggtgcagcattggaaattactcacagggaatcccggatactccgattgggttccaccacagagtttctctaacctcggccctaatcgatggcacaatgagagaattacactttccaccggtaagtccgtctggctgttcaacatcaccgctgacccttacgagcgggtagatctgtctaacagatatccaggcattgtaaagaaactactgagaaggctctcccagttcaataagacagcggtgccagttcgctatccgccaaaagaccctcgttcaaaccctagattaaatgggggtgtgtgggggccttggtataaggaggaaaccaaaaaaaagaagcccagtaagaatcaggcagaaaaaaaacaaaagaagagcaagaaaaagaagaaaaagcaacagaaggccgtgtcaggtaagcccgcaaacctcgccagatag

SEQ ID NO: 214916 - DNA, 507 bp, synthetic construct
  misc_feature 1..507: note = Description of Artificial Sequence: Synthetic coding sequence
  source 1..507: mol_type = other DNA
atggcacccggacagcaagcaatgggtagtggtacactgcagtcctcccagccaagtgagtgttccactggtttactaacgggcaatcccggttattctgattgggtccctccacaaagttttagcaacctgggacctaataggtggcataacgaacggataacgctttccacagggaagtctgtttggctcttcaacatcacagccgatccttacgagcgggtcgatctcagcaatcgttacccgggtatcgtaaagaaactgctgagacgactgtctcagtttaacaagacagctgtgccggtcagatatccgcctaaagaccctcgcagtaacccgagactgaacggcggagtctggggcccttggtacaaggaggagactaaaaaaaaaaagccttctaagaaccaagccgaaaaaaaacagaagaaatcgaagaaaaagaaaaaaaaacaacagaaggccgtgtcagggtccacttgccattcgggagtaacctgcggctag

SEQ ID NO: 214917 - DNA, 1611 bp, synthetic construct
  misc_feature 1..1611: note = Description of Artificial Sequence: Synthetic coding sequence
  source 1..1611: mol_type = other DNA
atgttgttattgtgggtttctgtcgttgcagcattggcactcgctgttttggccccaggcgctggcgagcagaggcggagggctgcaaaggcccctaacgttgtactggtggtttctgactcatttgatggccgtcttactttccaccccggttcccaggttgttaagcttccctttatcaacttcatgaagacccgcggaacgagctttctgaatgcgtatactaatagtcccatctgctgcccatctagagctgctatgtggtccggcctgttcacgcaccttacagagagctggaataactttaagggactcgacccaaattacaccacatggatggatgtgatggagcggcacggttacagaacacagaagttcggaaaacttgactataccagcggacatcactctatatctaaccgcgtagaggcctggactagggatgtggctttcttgctgcgacaggaggggcgtcctatggtgaatcttatccggaatcgaacaaaagttcgggttatggagcgcgactggcaaaacaccgataaagctgtgaattggcttcgcaaagaggccatcaactatactgaaccattcgttatctatctgggccttaatctgcctcacccgtatccctcccctagctctggtgaaaacttcggcagcagtacgttccacacctctttgtactggctcgagaaggtatcacacgacgcaataaaaatccccaagtggtcacccctgagcgagatgcaccccgtggactattacagcagttacactaaaaactgcaccggaaggtttacaaagaaggagatcaagaatataagagccttttactatgccatgtgcgctgaaaccgacgccatgttaggagagataatcttagcactccaccagttagatctcctacagaagaccattgtgatttactccagtgatcacggagaactcgctatggaacaccgacaattctataaaatgagcatgtacgaagcatcagcccacgtccctctcctcatgatgggcccaggcattaaggcaggcctacaggtcagtaacgttgtctctttagtggatatatatcccaccatgctggatattgccggtattcctctgcctcagaacctgtcaggatactcgctgctgcctctttcgtctgaaaccttcaagaacgagcacaaggtgaaaaacctccatcctccctggattctgtccgaattccacggatgcaatgtgaacgcaagtacctatatgctgaggacaaaccactggaaatatatcgcctactcagacggggctagtatcctgccacagctcttcgatctcagtagcgatcccgatgagctgacaaatgtggccgtaaaattccccgagatcacatactcactagatcaaaaattacactccatcatcaattatcctaaagtctcggcaagcgtgcaccagtacaataaagagcaattcatcaaatggaaacagtccatcggacagaactactctaacgttatcgcgaatctgcggtggcaccaagattggcagaaagaacccaggaaatacgagaacgcgattgatcagtggctgaagacccacatgaatcccagagctgtctag

SEQ ID NO: 214918 - DNA, 561 bp, synthetic construct
  misc_feature 1..561: note = Description of Artificial Sequence: Synthetic coding sequence
  source 1..561: mol_type = other DNA
atgcttctcttatgggtgtcggttgtggctgctctggctctggccgtactggcccctggggcaggagagcagagacgacgagccgcaaaagcccctaacgtggtacttgtggttagcgacagttttgacggaaggttgacttttcaccctggctctcaggtcgtgaagctgccattcatcaattttatgaaaacccgcggaacctcatttcttaatgcttacacaaactcccctatctgttgcccttcccgagctgctatgtggagcggattgttcactcacctgactgaatcttggaacaacttcaaggggctggacccaaactacacaacttggatggatgtcatggaaagacacggctataggacacaaaagttcggcaaacttgattacacctcaggacatcattcaattagcaatagagtcgaggcctggacccgcgacgtcgcgttcctcctgcgacaggaaggcaggccaatggtgaatttaattagaaacagaacgaaggtgagagtaatggagcgcgactggcaaaataccgataaagctgttacaggatag

SEQ ID NO: 214919 - DNA, 1275 bp, synthetic construct
  misc_feature 1..1275: note = Description of Artificial Sequence: Synthetic coding sequence
  source 1..1275: mol_type = other DNA
atgtggggctgctgcgtctgtggagccttgtttgagggccagaggctgcggcttttgcgcgcaccgggagatggcttgtctagccccttcaccgtggtgagtaggaagtggcacttgggccaccacggttcgtatcacccaaacttcaggggctttgactactattttggaataccatactcacacgatatgggatgcaccgatacccccggatacaaccatcccccatgccctgcctgtcctcagggtgatggaccatcccgcaatttacagagagactgttatactgatgtggctctcccactttacgagaacttaaacatcgtggagcaaccagtgaacttgtccagtctcgctcagaagtacgccgagaaagcgacgcagtttatacaaagagcttctacgagtggccgaccttttctgctctacgtggccctggctcatatgcatgttcccctgcctgtgacccagctccctgctgctccacgcggacgctctctctatggtgccggtctatgggaaatggattctctggtgggccagatcaaggacaaggtggatcatacggtgaaagagaacacattcctgtggttcaccggcgacaacgggccatgggcacagaaatgcgagctggccggtagtgtggggccattcaccggattttggcagactcgccaaggcggtagccctgcgaaacagactacttgggaagggggtcatagagtcccagctctcgcctactggcccggacgcgttccggtcaacgtaaccagcactgctctgctctccgtgctggacatattccccacggtagtggcccttgcacaggcctcactgccccaaggacgaagattcgatggagtggatgtttccgaagtgcttttcggtcgcagccagccaggccatagagttctcttccacccaaattctggcgctgcaggggaattcggggcactccagactgtgcggctcgagaggtacaaagctttttacatcacaggcggagcccgtgcgtgcgacgggagcaccggtcctgagctgcagcacaaatttcccctgatattcaacctggaagacgatactgccgaagctgtgcctctggagaggggaggggctgagtatcaggcggtcctgcctgaggtgcgcaaggtattggctgacgtgttacaggacattgccaacgataatattagcagtgctgattacacacaggacccgtcagttacgccttgctgtaatccataccagattgcctgccgctgccaggcggcttag

SEQ ID NO: 214920 - DNA, 1578 bp, synthetic construct
  misc_feature 1..1578: note = Description of Artificial Sequence: Synthetic coding sequence
  source 1..1578: mol_type = other DNA
atgggatggcttttcctgaaagtgttgctggccggtgtctctttctccggtttcttgtaccctttggtggacttctgtatttcgggcaagacaaggggacagaagcctaactttgtcataattctagccgatgatatgggctggggggaccttggggctaattgggccgaaaccaaagataccgctaatctggataaaatggcttctgagggaatgcggttcgtcgacttccacgccgcagcctccacctgcagccctagccgggcttcgcttcttacgggtcgcttgggactgcgcaacggggtcaccagaaacttcgcagtgacatcagtgggcggacttcctctgaatgaaacaacgctggctgaggtgctccagcaggccggatatgttacgggcatcatcggaaagtggcatcttggccaccacggatcctatcatcctaacttccgtggcttcgactattactttgggattccctatagtcacgacatgggatgcaccgataccccgggatacaatcaccctccttgccctgcttgccctcaaggcgacggtccctcccgcaatctgcagcgagactgttataccgatgtggcccttccgctgtacgaaaatcttaacattgtggagcaacctgtgaacctctctagcttggctcagaagtacgctgaaaaggctacccagtttatacaacgggcatctacctccggcaggccctttctgctgtatgtagcactggcccacatgcacgttcccctgccagtgacccagctgccagctgctccacgcggacggagtctgtatggtgccggtctctgggaaatggactcattggtggggcagattaaggataaagtagaccacaccgtgaaggagaacacatttctctggttcactggcgacaatggcccttgggctcaaaagtgtgagctggcagggtcagtggggcctttcaccgggttttggcagacccgtcaaggtgggagccctgctaagcagaccacctgggaaggagggcacagagtgccggctctggcatactggccgggacgcgtgcccgtgaacgtgacatccaccgccctgctgtcagtgctggacatttttccaacagttgtagccctggcccaggcctcccttccccaaggtcgacgattcgacggcgtggatgtgagtgaggtgctctttggacgcagccaaccaggacaccgcgtgctttttcacccgaatagcggggctgctggtgagttcggcgctctccagactgtgcgtctggaacgctataaagctttttacatcacaggcggtgccagggcctgcgacggctccactggtccagaacttcagcacaaattcccacttatcttcaatctcgaggacgacaccgcggaggccgtcccgctggaacgaggcggagccgaataccaggccgtcctgcccgaagttcggaaagtgctggctgacgtgttgcaagatattgccaatgacaacatttcttcagccgactacacccaggacccatctgtgactccatgctgtaatccttaccagattgcctgccgatgccaggctgcatag

SEQ ID NO: 214921 - DNA, 747 bp, synthetic construct
  misc_feature 1..747: note = Description of Artificial Sequence: Synthetic coding sequence
  source 1..747: mol_type = other DNA
atgaccaaaacctcgacctgtatctatcactttcttgtcctcagctggtacactttcttgaattattacatctctcaggagggtaaggatgaggttaagcctaaaatcttggccaatggagctagatggaagtatatgaccctcttaaatctgctgaagaacaggactgctggtttcgacatttaccaacccggatcatttcgacagttgctgcaaaccattttctacggtgttacctgtcttgacgacgttctcaaacggacaaagggcggaaaggacataaagttcctaacagctttccgcgacttgctgttcaccacattagcattcccagtgtcgacctttgtcttcctagcgttttggatcctgttcctgtataaccgggatttgatctaccccaaagtcttggacaccgtgattccagtgtggttgaaccacgccatgcacacatttatttttccaatcaccctggctgaagtggttcttcggccacactcatacccctctaaaaaaacaggcctgactctcctcgcggcagctagtatcgcctacatctctaggatactgtggctttatttcgagaccggaacatgggtttaccccgtgttcgccaaattgtcactgctgggcctagccgctttctttagcctctcttatgttttcatcgcaagcatatatctgcttggagaaaaactcaaccactggaagtggggagatatgagacagccacgaaagaagcgtaagtag

SEQ ID NO: 214922 - DNA, 609 bp, synthetic construct
  misc_feature 1..609: note = Description of Artificial Sequence: Synthetic coding sequence
  source 1..609: mol_type = other DNA
atggctaaagtgtcggttctgaacgtggccgtgctggaaaatccgagccccttccacagccctttccggttcgagatctctttcgagtgttctgaggcactcgccgacgatctcgaatggaagataatctatgttggctcagccgagtcagaggaattcgaccaaatcctggatagcgtcctggttggacctgtaccagcaggcagacatatgttcgtatttcaggccgacgccccaaacccttcacttattcctgagaccgacgcagttggtgtaactgtagtcctgattacctgtacctaccatggtcaagagtttatccgggtcggatattatgtcaataacgagtatctgaaccctgagctacgcgaaaacccacccatgaagccggacttctctcagttgcagcggaatatcttagcatcgaaccccagggtgaccagatttcatatcaattgggataacaatatggataggctcgaggctattgagacccaagatccgtcattgggatgcggcctgcctctgaattgcactcccattaagggattaggattaccaggttgtattccaggtctcctgcctgagaactccatggactgtatctag

SEQ ID NO: 214923 - DNA, 1506 bp, synthetic construct
  misc_feature 1..1506: note = Description of Artificial Sequence: Synthetic coding sequence
  source 1..1506: mol_type = other DNA
atggacacacaggcaggctcagtggatgaggagaatgggaggcagcttggggaagtcgaacttcagtgcggtatttgcaccaaatggtttactgctgatacgtttgggatcgacacctcgtcatgcctaccctttatgaccaattatagctttcactgcaatgtgtgccaccacagcggtaacacgtatttcctcagaaagcaggctaatctgaaggagatgtgcttgtcggccctggctaacctgacttggcagagtagaacccaagatgaacaccctaaaactatgttcagcaaggacaaagacatcattcccttcatcgataaatattgggagtgtatgacaacaaggcagaggcctggcaagatgacttggcccaataatattgtgaagaccatgtccaaggaacgcgatgtcttcctggtcaaagagcaccccgatccgggaagtaaagaccctgaagaggactatccaaaatttggcctgctcgatcaggatctgagtaatattggccctgcttatgacaaccagaagcaatcttctgcagtgtctacctcaggcaatctgaacggtggaatcgcagcagggtcttccggaaaaggaagaggcgctaaaaggaaacagcaggatgggggaacaacaggtaccacgaagaaggccagatccgaccctcttttttcagcccagcggctgcctccccacgggtatcctttggaacacccattcaacaaggacggctatagatacattctggccgagccagaccctcatgcccctgatccggaaaagctagagcttgactgttgggcgggaaagcctatacccggagacctgtaccgcgcatgtttgtacgagcgggtccttctggctctccatgatagggctccccagctgaaaatctctgacgaccgcttgaccgtggtcggcgagaagggctattccatggtgcgagcctctcatggtgtgcgcaaaggggcttggtacttcgaaataactgtcgacgagatgcccccagacacagccgctcggctaggatggtctcagccattaggaaacctgcaggcccctttagggtacgacaaattctcatactcgtggagaagcaagaaaggaacaaaattccaccagtccattggtaagcattatagcagtggctacgggcagggggatgtgctgggattctacattaacctgcccgaggataccgaaacagcaaagagtctgcccgatacgtacaaagataaggcgctcatcaagttcaaatcctatctgtactttgaagagaaagacttcgtagataaggctgaaaaatcgctcaagcagacgcctcatagcgaggtgtcaatcaactttgggccatgcttcaagtatcctcctaaggacctaacttaccgtccaatgagtgatatggggtggggtgcagtagtggagcacaccttggcagatgtgctttatcacgtcgaaacggaagtcgatggtagacgttcacccccatgggagccatag

SEQ ID NO: 214924 - DNA, 1887 bp, synthetic construct
  misc_feature 1..1887: note = Description of Artificial Sequence: Synthetic coding sequence
  source 1..1887: mol_type = other DNA
atggcagctgcgggagctgggccaggacaagaagcaggagcgggacctggccctggggctgtggccaatgccacgggtgccgaagagggagaaatgaagccagttgctgccggagccgcagcaccccctggcgaggggatatctgcggcacccactgtggagccctctagcggagaggcagaaggaggcgaggccaatctagtcgatgtgagtggcggactagagacagaaagttccaatggcaaggacacactggagggcgcaggcgacacctccgaagtgatggacacacaggctgggtctgtcgatgaagaaaacggcaggcagctgggcgaagtcgagctccagtgcggaatctgtacgaaatggtttaccgctgatacatttgggattgacacctcatcatgtctgcccttcatgacaaactactcttttcactgtaacgtatgccatcactccgggaatacctactttctgaggaaacaggccaaccttaaggaaatgtgtctgagcgcccttgccaatctcacttggcagagtcgaactcaggatgagcatcctaaaacaatgttctccaaagataaggatatcattccatttatcgataagtattgggaatgtatgacaacaaggcagagacctggcaagatgacttggcccaacaatatagtcaaaaccatgtccaaggagagggatgtgtttctggtgaaggagcatccagaccctggttctaaagaccccgaagaggattacccaaagttcggactcctcgaccaggacctctccaatatcggccctgcctacgataaccagaagcaaagctcagcagtgtccacatctggaaatctgaatgggggaattgccgcaggttcctctggtaaagggagaggcgctaagaggaaacagcaggacggaggcacgacaggcacaaccaagaaggccaggagcgatccactgttttcagctcagagactgccccctcacggctatcctctggagcacccctttaataaagatggctaccggtacattttggctgaaccggatccccatgcgcctgacccagagaagttggaattagactgctgggcaggcaagcctatcccgggagatctgtacagggcctgcctttatgaacgcgtccttctcgctctgcacgaccgcgcaccccagctgaagatctccgatgaccgtttgacagtggtcggcgagaagggctactctatggttcgagcaagtcacggtgttcgaaaaggtgcctggtatttcgagattactgtggacgagatgcctccagacactgcggcacgtctaggctggagccaacccctgggtaatctccaagctcctctcggatatgacaaattctcatactcatggaggtcaaaaaaaggcaccaaattccaccaatcaatcgggaaacactactcctctggctatggacagggcgatgtccttggattttatataaacctccctgaggatacagaaacggcaaagtctcttccggacacctataaggacaaggctttgatcaagtttaagagctacctgtacttcgaggaaaaggattttgtggacaaggccgaaaagagccttaagcagaccccgcatagcgagattattttttacaagaacggcgtaaaccagggcgtagcctataaagatatattcgagggcgtttactttcctgcaatatccctctacaaatcttgtacagtctctattaacttcggtccatgctttaaatacccaccaaaggatttaacctacagacccatgagtgatatgggttggggtgccgttgtggagcatacactggctgacgtgctgtatcatgtcgagaccgaggtagacggccgaaggtcccctccatgggagccctag

SEQ ID NO: 214925 - DNA, 1605 bp, synthetic construct
  misc_feature 1..1605: note = Description of Artificial Sequence: Synthetic coding sequence
  source 1..1605: mol_type = other DNA
atggacactcaggccggttcagtggatgaagaaaacggaagacaactgggcgaggtcgaactgcaatgtggtatttgtaccaagtggttcaccgccgatacgttcggcatcgacacatcttcatgcctgcctttcatgacaaactacagttttcactgtaacgtgtgtcaccattcaggcaacacctattttcttcggaagcaggccaatctgaaagaaatgtgtcttagtgccctcgctaatctgacatggcagtcaagaacccaagacgaacatccaaagacaatgttctctaaagacaaggatattattccctttatcgataaatattgggaatgcatgaccacccggcagcgccctggcaagatgacatggccaaataacatcgtcaaaactatgagtaaggaaagggatgtcttcttggtcaaggagcaccccgatcctggatcgaaagacccagaagaggactaccctaagttcggcctcctcgatcaggacctatcgaacatcgggcctgcatatgataaccagaaacagagcagcgccgtttcgacatcgggcaacctgaatggaggcattgcagccggatccagcggcaagggcagaggcgctaagcggaagcagcaagacggcggaacaacaggcactacgaagaaagcaagatcagatcccctgttctccgcccagcggttgcctccacacgggtaccccctagaacatcctttcaacaaagatggctacagatacattctggctgagcctgacccgcacgctcccgatccggaaaaactggaacttgattgttgggccggtaagcccatccccggtgatctgtaccgcgcttgcctctatgaacgggttttactggctctgcacgatagggcccctcaactcaagatctccgacgatcgattgaccgtggtgggtgagaaaggttactcgatggtccgagccagtcacggcgtacggaagggagcctggtatttcgagattacagtggatgagatgcccccagacacggccgctaggctcggttggtcgcaacccttgggcaacctgcaggcccctttgggatatgataaattcagttactcatggcggtctaagaaggggactaagttccaccagagtatcgggaagcactatagcagtgggtatggtcaaggagatgtgctgggcttctatataaacctcccagaagatacagaaacagcgaagtctctgcccgatacttacaaggataaggccttgatcaagtttaagagctatctgtattttgaagagaaggactttgtggacaaagccgagaagtcactgaagcagacaccccattcggagataatcttctataagaatggcgtgaaccagggagtagcctacaaggatatctttgagggagtctattttccggcaatcagcctgtataagtcctgcactgtgtcgattaatttcggcccatgtttcaaatacccgcctaaggacctaacatatcgacctatgtctgatatggggtggggagcagtcgttgagcacacactggcagatgtactgtaccatgtggaaacagaagttgatggcagaaggtcacctccttgggagccatag

SEQ ID NO: 214926 - DNA, 1506 bp, synthetic construct
  misc_feature 1..1506: note = Description of Artificial Sequence: Synthetic coding sequence
  source 1..1506: mol_type = other DNA
atggatacccaggccggatctgtagatgaagaaaacggccgacaattgggagaggttgaactgcagtgtgggatctgcactaaatggtttaccgcggacacattcgggattgacacatccagttgcctgccctttatgaccaactactctttccattgtaatgtgtgtcaccactccggcaacacatactttctgaggaaacaagcaaacctgaaagagatgtgcctttcagcccttgcaaatcttacatggcaatctcgaacacaagacgagcacccaaaaactatgttctccaaagataaggatataattccgtttatcgataagtactgggagtgtatgaccacacggcaaagaccgggaaagatgacttggcctaataacatcgttaaaaccatgagtaaggaaagagacgtgttcctcgtaaaggaacatccagatcccggatccaaggacccggaggaggattaccccaaattcgggctattagaccaggacttatccaacatcggccctgcctatgacaatcaaaagcagtcatccgcagtctcgaccagtgggaacttgaatgggggaatagccgctggctccagcggtaaaggcagaggcgcaaagcgtaagcaacaagacggagggaccactggtacaaccaaaaaggccagatcagacccattgttttctgcacagaggctgcctccgcacggatatccgctggagcaccccttcaataaggatggatataggtacatcttggcagagccagacccacacgctcccgatccagaaaagctggaattggactgctgggcaggcaagcccatccccggagacctctatcgagcgtgcctctacgaacgggtcctactcgccctgcatgatcgcgcaccccagcttaaaatcagcgacgatcggctgacagtggtcggagagaaggggtattctatggtaagggccagccatggtgtgagaaaaggtgcatggtacttcgagatcactgtggacgagatgccaccggacaccgctgctagactggggtggtcccagcccctgggcaatcttcaagctcccctggggtacgacaaattctcctacagttggaggagtaaaaagggcacaaaatttcaccaatctatcggcaaacattatagcagcggctatggacagggcgatgttttagggttttacatcaatttgcccgaggatacggagaccgcgaagagtctccccgacacatataaagataaagcccttattaagtttaagtcctatctttacttcgaggaaaaggattttgtcgataaagccgaaaagagtctgaaacagaccccccactccgaagtgtcgatcaacttcggcccttgttttaaatacccgcctaaagatcttacctaccgcccaatgagcgacatgggttggggcgctgtggtcgagcacactcttgccgatgtattgtaccacgtcgagacagaagtagacggaagaaggtcccccccatgggaaccctag

SEQ ID NO: 214927 - DNA, 1470 bp, synthetic construct
  misc_feature 1..1470: note = Description of Artificial Sequence: Synthetic coding sequence
  source 1..1470: mol_type = other DNA
atgacaaattacagctttcactgcaacgtctgccaccactctggtaatacatactttctccgcaagcaggctaacctgaaagagatgtgcctgtcagctctggccaatctgacatggcagagtaggacccaggatgagcacccaaagactatgttcagcaaggacaaggatatcatccctttcatagataaatactgggagtgtatgacgactcgtcaacgccctgggaagatgacttggcccaacaacatcgtcaaaacgatgtctaaagaaagggacgtctttctggtcaaggagcatcctgaccccggttccaaagaccctgaggaagactatcctaagttcggactgctagaccaggatctgtcaaacattgggccagcgtatgacaaccagaaacagagtagcgctgtgagcacttcagggaacttaaatgggggaatcgccgcaggcagctccgggaagggacgcggagcgaagcgaaagcaacaggatgggggaaccacgggcacaacgaagaaggctagatccgatccactgttctctgcacagagactccccccacacggttatcctttagagcacccttttaacaaggacggttaccgatatatacttgccgagcccgaccctcacgcacctgaccccgagaaactggaattggactgctgggctgggaaaccgattcccggtgacctgtaccgcgcttgcttgtacgaaagagtgctactcgcattacatgaccgagcaccacagctgaagattagcgatgataggttaactgtggtgggcgagaaaggatattccatggtgagagcgtcacatggggtaaggaagggcgcttggtactttgagatcaccgtggacgaaatgccacccgataccgccgctcgactgggttggagtcagccactgggcaacttacaggctcctttgggctacgataaattcagttacagttggagaagcaaaaaaggaactaagtttcaccagtcaatcgggaaacactactcatctgggtacggccagggcgatgtcctcggattctacatcaatctcccagaggacactgaaacagctaagtctttacccgatacttataaagacaaggcactcattaaatttaaaagctacctctactttgaggaaaaggacttcgttgataaggccgagaaaagcctcaagcagaccccacatagcgaaattatcttttacaagaacggcgtgaaccagggcgtggcatataaggatatcttcgagggcgtctacttccccgctattagcctgtacaagtcttgcacagtatctatcaatttcggcccatgcttcaagtatccacccaaggatctaacctataggccaatgtcggacatgggctggggcgcagttgtggagcataccctcgccgatgtgctgtatcacgtcgagacagaggtggatggaaggcggtctcccccatgggaaccatag

SEQ ID NO: 214928 - DNA, 876 bp, synthetic construct
  misc_feature 1..876: note = Description of Artificial Sequence: Synthetic coding sequence
  source 1..876: mol_type = other DNA
atgaccaaggaataccaagacttgcaacacttagacaacgaagagagtgaccatcaccagctaaggaaagggcctcccccaccccagcccctgctccagcgcttgtgctccgggccaagactactgctgctgagcctgggactgtccttactgctgctggtggtggtgtgtgtgataggcagccagaacagccagttgcaggaggagctaagggggttaagagaaacgtttagcaactttaccgcctccactgaagcccaggttaaagggttaagcacgcagggcggtaatgtcgggaggaagatgaagagcctagagagtcagctggagaagcagcagaaggacctgtctgaggatcatagcagcctactgctgcatgtcaaacaattcgtttctgatcttcgatccctctcctgtcagatggcggcacttcagggaaacgggtctgagcgcacttgctgtcctgtgaattgggtcgaacatgagcggagctgctactggttctcacgcagtgggaaagcctgggctgacgccgataattactgtcggctggaggacgctcacttggtagtagtgacctcttgggaagagcaaaagttcgtgcagcaccatataggccctgtcaatacatggatgggccttcatgaccagaatggaccttggaaatgggtagacggaacagactacgagaccgggtttaagaattggaggccggagcagcccgacgattggtacggacatggcttagggggaggtgaggattgcgcccacttcacagacgatggccgatggaacgatgatgtgtgccagcggccataccggtgggtgtgcgagaccgaacttgacaaggcttctcaggagccaccccttttatag

SEQ ID NO: 214929 - DNA, 759 bp, synthetic construct
  misc_feature 1..759: note = Description of Artificial Sequence: Synthetic coding sequence
  source 1..759: mol_type = other DNA
atgacaaaggaataccaggatttacagcacttagacaacgaagaatctgatcaccatcagctcaggaaggactcgcagctgcaggaagagcttaggggactgagggagacattctctaattttacagcctccacagaggctcaggtcaagggactgtctacacaaggcggtaatgtgggtcggaagatgaagtcattggaaagccagttagagaaacagcagaaagacttaagcgaggatcacagcagcctgttgctccacgtcaagcagtttgtgtccgatttgcgcagcctcagttgtcagatggccgctctgcagggaaacggctccgagcgcacgtgttgtcctgtgaattgggtggaacacgagcgcagctgctactggtttagtcgctcagggaaggcctgggcagacgcagataactattgtcgcctcgaagatgcccatctggtggtggtgacatcttgggaagagcagaaatttgtgcagcatcatatcggccctgttaatacatggatgggcctccacgaccagaatgggccttggaagtgggtggacggaaccgactacgagacgggattcaagaattggagacccgaacagccagacgactggtatggtcacggcctgggcggaggcgaggactgcgcccattttaccgatgacgggagatggaacgatgacgtctgccaacgtccctacagatgggtttgtgagacagaactcgacaaggccagccaggaacctccccttctctag

SEQ ID NO: 214930 - DNA, 759 bp, synthetic construct
  misc_feature 1..759: note = Description of Artificial Sequence: Synthetic coding sequence
  source 1..759: mol_type = other DNA
atgacaaaggagtatcaggaccttcagcatttggacaacgaggaaagtgaccaccaccaactgcgcaaagactcccaactgcaggaagaattaaggggcctgcgagaaaccttttccaatttcactgctagcacggaagcacaggttaagggcctctcaacgcaaggtggcaacgttggccgaaaaatgaaatcactggaatcccaactcgagaagcagcagaaggatctttcagaagaccattcctctcttctcctccacgtcaaacagttcgtctctgacttgcgctccttgagttgtcaaatggctgcccttcagggtaatgggagtgagagaacatgttgcccggtgaactgggtggagcatgagcgtagttgctactggttctcccgctcagggaaggcatgggctgacgcagacaactactgccggctcgaggacgcccacttggtggtggtcacctcatgggaagaacagaagtttgtgcagcatcatattggaccggttaacacatggatggggctgcatgaccagaatggcccatggaagtgggtcgatggaaccgattatgagaccgggtttaaaaattggaggcccgaacaaccggacgactggtatggtcacggactgggcggaggcgaggactgtgcgcacttcacagatgatggacggtggaacgacgatgtctgtcagcgcccatataggtgggtttgtgaaaccgaacttgataaagcttcccaagagcctcctctgttgtag

SEQ ID NO: 214931 - DNA, 5679 bp, synthetic construct
  misc_feature 1..5679: note = Description of Artificial Sequence: Synthetic coding sequence
  source 1..5679: mol_type = other DNA
atggccaatcgtagggtcggacgcggttgctgggaggtcagcccgaccgagcggaggcctcccgctggcctgcggggaccagccgcagaggaagaggcgtcatcccctcctgtccttagcctgtctcatttttgccggtcgcccttcctttgtttcggcgatgtgctgctgggtgcgagccgcacgctgagtctggcactggataaccccaacgaagaggtggcagaggtcaaaatctcccatttccctgccgcagatctcgggttctcagtttctcagaggtgcttcgtgctgcagccaaaggaaaagatcgtcattagcgtgaactggacacctttaaaggagggtcgcgtcagagagataatgacatttctggtaaatgacgtgctgaaacaccaggcaattctgttaggcaatgccgaggaacagaagaagaaaaagcgcagcctgtgggacactataaagaaaaagaagattagcgcaagtacaagccacaacagacgcgtgtcaaatattcagaatgttaataagactttctctgtgtcccagaaggtggatagagtcaggtcacccctgcaagcatgcgagaaccttgccatgaacgaggggggtcctcccacagagaacaatagtctcatccttgaggagaataaaatccccatttcccccatctctccagcgtttaacgaatgccacggagcaacctgcctgccccttagcgttagacggtccaccacatattcgtccctgcacgcaagtgaaaacagagaactgctaaacgtgcactccgctaatgtcagtaaagtctctttcaacgagaaggcggttacagagacgagtttcaactcggtcaatgttaatggccagagaggtgaaaactcgaagttgagcctgactcccaattgttcttctactctgaatatcactcagtctcagattcattttctgagtcccgatagtttcgtgaacaactcacatggagccaacaatgaactggaacttgtgacctgcctcagcagcgatatgttcatgaaagataattctcagccagttcacctcgaatcaacaattgcacacgaaatctaccaaaagatccttagtcctgattcattcattaaggacaactacggactgaatcaggatctggaatctgaatccgtgaatccaattctaagtcccaaccagtttctcaaggataatatggcatacatgtgcacctcacaacagacctgtaaagtgccactctctaatgaaaactcccaagtgcctcagtcccccgaggactggcggaagtctgaggtttcacccagaatccccgaatgtcagggatctaagagtcccaaggcaatatttgaggagctggtggagatgaagtcgaattactactcttttattaaacaaaacaatcctaagtttagcgcggtacaggatattagctcccactctcacaacaagcagcccaagaggaggcctatcctaagcgccaccgtgaccaaacgcaaggccacctgcacgcgggagaaccagacggaaataaataaaccaaaggccaaaaggtgcctgaattcagccgtgggggagcatgaaaaggttatcaacaaccagaaggaaaaggaggactttcacagttatctacctattatcgatccgatcctgagcaagagtaagtcttataagaacgaggtgaccccctcctctactacggccagcgtcgccagaaagcggaaaagcgatggatcaatggaggacgccaatgtcagagtcgccatcaccgagcataccgaggtccgtgaaatcaagaggattcacttttccccatcagaaccaaaaactagcgcagtcaagaaaacaaaaaacgtcacaaccccgatttcaaagagaattagcaaccgggagaagctgaacctaaaaaaaaaaaccgatctgagcatttttcggactcctattagtaagaccaataagcgcactaaacccatcattgcagtcgcccagtccagcctgactttcattaagcctctgaaaactgacattcctcgccacccaatgccatttgcggctaaaaacatgttctatgacgagagatggaaagagaaacaggagcaggggttcacatggtggctcaactttattctgacacccgatgatttcaccgtcaagactaatatatccgaggttaatgccgcaacactgcttcttggcatagaaaaccagcacaagatctcagttccccgtgccccaacaaaggaggaaatgtctctgcgggcatacaccgctcgctgccgcctcaatagactgaggcgggcagcctgtcgtctcttcacctcagaaaagatggttaaggctatcaaaaagttagagattgaaatagaagcaagacggttaatcgtccggaaagatcggcacctctggaaggacgtaggagagcggcagaaggtgctaaactggctgctcagttacaatcccctttggctgcggataggcctggagactacatacggcgaactgatatccttagaagataactcagacgtgacgggtctagcaatgtttatcctgaacagactgctttggaaccccgatattgcggcagaatataggcatcctacagtgccccacttgtaccgggacggtcatgaagaagcgctgagtaaattcacccttaaaaaacttctgctgctcgtgtgtttcctggattacgccaaaatatcaaggctaattgatcacgacccttgcctgttttgcaaagacgctgagttcaaggccagcaaggagatacttttggccttctctcgggacttcctgtccggtgagggcgatctgtcacgtcacctcgggctgctcggcctccccgtgaaccatgtgcaaactcccttcgacgagttcgatttcgccgtcacgaacttggccgtggacttgcagtgcggcgtgcgactggtcagaacaatggaacttctaacacagaactgggacctcagcaagaagctccgcatcccggctatttccaggttacagaagatgcacaacgtcgatatagtgctgcaggtgctgaaatctagaggaatcgaactctctgacgaacacggcaacacaatattatcaaaagacattgtggacagacatagggagaaaactttacggttgctgtggaaaatcgcattcgcctttcaggttgatatctcactgaacttagatcagctgaaagaagaaatagctttcttgaagcatacaaaaagtatcaagaagaccattagtctgctctcttgtcattctgacgatttaataaataagaaaaaaggaaagagagattccgggtccttcgagcagtattccgagaatatcaagttgctgatggactgggtcaacgccgtttgtgcattttacaacaaaaaggtggaaaacttcacagtgtcattttccgatggcagagtgctctgttacttgatacatcactaccatccctgctacgtgccctttgatgctatttgtcaaaggacaacccagacagttgaatgcacacagaccggatctgtggtgctcaatagcagctcagaatccgacgactctagcctcgatatgtcactaaaggcattcgatcatgaaaatactagcgaactgtataaggaactcttggagaacgagaagaaaaactttcacctagtgcgatcagctgttcgagacctgggcggaatcccagccatgattaatcattccgatatgtctaacacaatcccggacgagaaagtcgtcatcacctatctttcctttttatgcgccaggctgttggacctgagaaaagagatccgcgctgcgcgactaatccagactacgtggcgcaagtacaagctcaaaacggacctcaaacgacaccaggaaagagagaaggccgctcgcatcattcagctggctgtgataaacttcctggcgaaacagcgtctgcggaagagggtcaatgcagccttggtgatccagaagtactggcgcagagtgcttgcgcagcgaaaattgctgatgctgaagaaagaaaaactggagaaagttcaaaacaaagccgctagtcttattcaggccatgtggagaaggtacagggctaaaaagtatctctgtaaggtgaaagcagcctgcaagatacaggcctggtacaggtgctggcgagcacacaaggagtacctggcaattcttaaggccgtgaaaattatacagggctgtttttataccaagctggagaggactcggttcctcaatgtccgggcttcagcaatcataattcagagaaaatggagagctattctaccagcaaaaatagcccacgagcactttttgatgataaagagacatagggcggcatgtctaattcaagcccattatagaggctataaagggagacaggtcttcttacggcaaaaatctgccgcactgataattcagaagtatataagggccagggaagctggaaagcacgaaaggatcaaatacatcgaattcaagaagtctacagtcatcttacaagcactcgtccgcggttggctcgtgcggaagagatttctggagcagcgcgctaagatcaggttgctgcatttcacagcggcagcttattaccatctgaatgctgtgcgcatacagagggcttataaactctatctcgctgtgaaaaacgccaataaacaagttaattcagtgatttgtatccagcggtggtttcgggcacgtcttcaggaaaaacgctttattcagaagtatcattctattaaaaaaatcgagcacgaaggccaggagtgtctgagccagcgcaatcgtgcagcatcagttatacaaaaggctgtcaggcatttcctgcttcgcaagaaacaggagaagttcacctctgggatcattaagatccaggccctctggcgtggatattcatggcgtaaaaagaacgattgtaccaagattaaggccatcaggctgtcccttcaggtggtgaacagagagattcgcgaagaaaacaagttgtataagcgcacagctctggcactgcattacttgctcacatacaagcacctgagcgcgattctcgaagcgcttaaacacctggaggtcgtgacgaggcttagcccactgtgttgtgaaaacatggctcagagtggcgcaatttcaaagatctttgtcctgatccgaagctgcaacagatcaattccctgcatggaggtaataagatacgctgttcaggtactgttgaatgtttcaaaatatgagaagacaacctctgctgtctatgacgtggagaactgtattgatatactgctcgaactgctgcagatctatcgggagaagcctggcaataaagttgcagataagggagggtccatctttacaaagacttgttgcttactggcgatcttactgaaaaccacaaaccgcgcttctgatgtaagatcccggtcgaaagtcgtggaccggatttacagtctgtacaagctcacagctcataaacataaaatgaacactgaaaggatcctctataaacagaagaaaaatagttcaatttccatacccttcatccctgaaactcccgtccgcacaaggatcgtttcccggcttaagcccgactgggtgctccggcgagataatatggaggagataaccaatcctctgcaggctatacagatggtgatggacacattgggtataccctactac

SEQ ID NO: 214932 - DNA, 4170 bp, synthetic construct
  misc_feature 1..4170: note = Description of Artificial Sequence: Synthetic coding sequence
  source 1..4170: mol_type = other DNA
atggctaaccggagagtgggaagaggctgttgggaggtttcaccgactgaacgcaggccccctgcaggtctgcgtgggccagcagccgaggaagaagcatctagtcctcctgttctgtccctttcacacttctgccggagtccttttctctgctttggcgatgtgcttctgggtgcttctaggactctgtccctggccttggataaccctaacgaggaagtggccgaggtaaagatcagtcattttccggctgctgacctgggcttttcagtgagccagcgttgttttgtgctgcagccaaaagagaagattgtgatctccgttaattggacaccactcaaggaaggacgtgtgcgtgaaattatgacatttctggttaatgatgtcctgaagcaccaggctatcctgctcggtaacgcagaggaacagaagaagaaaaaacgttctctctgggataccatcaaaaagaaaaaaatctctgcttccaccagtcataacagacgggttagtaacattcagaacgtgaataaaactttcagcgtctcccagaaagtggataggaggtacaggcaacaaacctatttcaataaacttaaaaagataaccaagaccgtccagcaacggtactgggcaatgaaggagcggaacatacagttccaaaggtacaataaacttagacactcagtcatttacattcaagcaatttttcgtggaaagaaggcccgtaggcatctgaagatgatgcacattgctgctacgctgatccaacgccgtttcaggacactgatgatgcgtaggagattcctgagtctgaaaaagaccgctatcttgattcagagaaagtatcgcgcacacctgtgtacaaagcaccatctgcagttcttgcaggtccagaatgccgtgatcaagatacaaagcagctatagacgttggatgattcgtaagcggatgcgggagatgcacagggcggcaaccttcattcagtcaacctttagaatgcatagattgcatatgagatatcaggcactcaaacaggcctctgttgtaatacaacagcaataccaggccaatagggcagccaagttacagagacaacattacctccgtcagcgtcacagcgctgtgatactacaggctgctttccgtggtatgaagacccggcgacacctgaaatcaatgcacagtagcgccacactgatacagtcgcgatttagaagtctgctggttcggcgtcggttcatcagcttgaaaaaggctactatattcgtacaacgaaagtacagagctacaatttgtgccaagcataaattgtaccagttcctccacctgagaaaagcagcaatcaccattcaaagcagctaccgacggcttatggtgaagaagaaactacaggagatgcaaagagccgcagtgctaatccaagccacctttcgtatgtaccggacttatatcacatttcagacttggaagcacgcatccattttaatacagcagcactaccgaacataccgtgctgccaaacttcagcgcgagaactatatacggcaatggcactctgcggtagtgattcaggcggcttataagggtatgaaggcgaggcaactgttgagggaaaaacacaaggcaagcattgtaattcaatccacctaccgtatgtacaggcaatactgtttctaccagaaacttcagtgggctacaaaaattatccaggagaagtatagagcaaataagaagaagcagaaggtgttccagcataatgaattgaaaaaagaaacgtgcgtacaggccggatttcaggacatgaacataaagaaacagatccaggagcagcaccaggccgcaattatcattcagaaacattgcaaggcttttaagattcgtaaacactacttgcatctgagagccaccgtggtttcgatccagcgccgatatcgcaagttaaccgctgtgcgcactcaggccgttatttgtatccaatcttattatcgtggattcaaggtccgtaaggacatccaaaacatgcaccgggcagctactttgattcagtctttctaccggatgcaccgcgcaaaggtggattatgaaaccaagaagactgcgatcgtggtgatccaaaactattatagactctatgttcgtgtgaagacagagaggaagaatttcctcgctgttcagaagagcgtgagaaccatacaggccgcttttagaggtatgaaagttaggcaaaaattgaagaacgtgtctgaggaaaagatggcagcgatagtcaaccagagcgcactgtgttgctaccgatccaagacccagtacgaggctgttcagtcagaaggagtaatgatacaggaatggtacaaggcttccgggctggcgtgctctcaggaggcagagtaccattctcagagcagagccgcagttactatccagaaagcattttgtcggatggtgacccggaaacttgagactcagaagtgcgccgctctgaggatccagttttttcttcagatggcagtctacagacgaagattcgtgcaacagaaaagggcggcaattacactccaacactactttaggacctggcagactagaaagcagttccttctgtatagaaaggcggcagtcgtactgcagaaccactatcgggctttcctcagcgctaagcaccagcgccaggtatacttacaaatacggagcagcgtgattattatccaggccaggtctaaaggttttattcagaagcgaaagtttcaggaaattaagaacagtaccatcaagatccaggcaatgtggcggaggtatagagcaaaaaaatatttgtgtaaggtgaaagcagcttgcaagatacaagcgtggtaccgatgttggagggcccataaagaatacttggcgatcttaaaagctgtaaagattatccagggatgcttttatacaaagctcgagcgtacccggtttcttaacgtgagggccagcgctataatcattcaacggaaatggagggccatcctacctgctaagattgcgcacgagcatttccttatgatcaaacgacatagggcggcatgcctgatccaggcccattacagaggttataagggcagacaggtgttccttaggcagaagagtgctgccctgatcattcaaaagtacattcgcgcaagggaggccggtaaacacgaaaggatcaagtacatcgaattcaaaaaatccactgtcatccttcaagccctggtgagaggctggctggttaggaaaagattcctggagcagcgtgcaaagattaggctgcttcacttcacagcagccgcttattaccacctcaatgctgtgaggattcaaagggcctataagctctacctggccgttaagaacgcaaacaagcaggtaaatagtgtcatatgcattcagaggtggttccgcgctaggcttcaggagaagaggttcatccagaagtaccactcaatcaaaaagatcgagcatgaaggccaggagtgtctctctcagagaaatagagccgcaagcgtcattcagaaggctgtgcgccactttctgctccggaagaagcaggaaaaattcacctctggcataatcaagattcaggctctgtggaggggatacagctggcgtaagaagaatgactgtactaagatcaaggcgatacggctgagcctgcaggtggtgaatagggagattagagaggaaaataagctgtacaagcggactgccctggccctgcactatctgctcacctataagcatctgtcagctatcttagaggctctcaagcatcttgaggtggttacccgactctcgcccttatgttgtgaaaatatggcgcagagcggggcaatcagcaaaatttttgtcttaataaggagctgtaaccgtagtattccgtgtatggaggtgattcgctacgctgtgcaggttctgctgaacgtgtcaaaatatgagaagactacatcagcggtgtacgacgtggaaaattgtattgatatcctgttggaattgcttcaaatctaccgcgagaagcctgggaacaaagtggctgataaaggcggaagcatcttcacaaaaacatgttgtctgctggccatccttcttaaaacaactaaccgggcatctgtatctatcagccaactcccattctttaaaattatctttttgtggtcttag

SEQ ID NO: 214933 - DNA, 3429 bp, synthetic construct
  misc_feature 1..3429: note = Description of Artificial Sequence: Synthetic coding sequence
  source 1..3429: mol_type = other DNA
atgtccctgcgggcatacactgctaggtgcagactgaaccgtctgagacgggctgcttgcagactgtttacatccgaaaagatggtcaaagcaatcaagaaactggagatcgagattgaggcccgacgactcatagtgcgaaaagaccggcacctatggaaagatgttggggaacgtcagaaggtcctcaactggctcttaagctataacccgctttggctcagaatcggcctggagaccacctacggcgaactgattagcctcgaggacaactccgacgttactgggctggctatgttcatcctcaatcgcttgctgtggaacccagacattgctgcagagtaccgtcaccccactgtcccacacctgtacagggatggacacgaggaagctctgagcaaatttactctcaaaaaactattactgttggtctgttttctcgattacgccaagatctcaagacttattgatcacgacccttgtctcttttgtaaagacgccgagtttaaggcctctaaggaaattcttctggccttttcccgagacttcctcagcggagagggcgacttgagccgtcatttgggattgctcggtctacccgtgaaccacgttcaaactccatttgatgagttcgactttgccgttaccaacctcgccgtggacctacaatgtggcgtccgactggtccgtaccatggagctgttgacccaaaattgggatttgtcaaagaagctgaggattcccgctatatcgcgcctgcagaagatgcacaacgtggatattgttctccaggtgctgaagtcacgcggtatcgaactcagcgatgagcatggcaataccatcctgtcaaaagacattgtcgatcgacatagggaaaagacgctacggctcctctggaagattgcatttgcctttcaagtggatatttcactgaacttagatcaactgaaagaagaaatcgcttttcttaaacataccaaatcaataaaaaaaaccatttcactcctgtcttgtcactccgatgatctgataaacaagaagaaagggaagagagactctgggagcttcgaacagtatagtgaaaatatcaagcttctcatggactgggtaaatgctgtatgcgctttctataataagaaagtggagaatttcaccgtatccttctccgatgggagggtgctatgttaccttattcaccattatcatccttgttatgtacctttcgatgcaatctgccaacgcaccacccagaccgtggaatgtacgcaaactggatcggtcgtcctgaactccagcagcgaatccgacgactcctctctggacatgagcttgaaagcgtttgatcatgaaaatacttctgagctgtataaggagctactggaaaatgaaaaaaaaaattttcatctcgtgagaagcgcagtgcgcgacttgggcggaatccccgcaatgatcaaccactcagatatgtctaacactatacctgatgagaaggttgttataacctacctgagttttctctgtgctcgcctgcttgacctgaggaaagaaattcgcgcagccagattgatccagaccacatggagaaagtacaagctgaaaactgatctaaaaaggcaccaggaaagagaaaaagctgctaggattatacagcttgccgtaattaactttctggccaagcagagactgaggaaacgtgtcaacgctgctctagtgattcagaaatactggagacgggtgctagctcagcgaaaacttctgatgttgaaaaaggagaaacttgagaaggttcagaacaaggcggctagccttattcaggcgatgtggcggaggtaccgggctaagaaatacctgtgtaaggtgaaggccgcatgcaagatccaggcttggtaccgctgctggagggctcacaaagaatacctggctatactcaaagcggtcaagattatccaaggctgcttctacacaaaactggagagaactcgcttccttaatgttagagcctctgcaatcattatccagcgcaagtggcgcgcaatactgcccgctaagatcgctcacgaacactttcttatgatcaaacgacaccgcgctgcctgcttgattcaggcccactataggggatacaaggggagacaagtctttctgcgacagaagtcggccgctcttattatccagaaatacatccgggctagagaagccggaaagcatgagagaattaaatacatcgaattcaaaaaaagcaccgtcatcctacaggccctggtcaggggttggctggtacggaagaggtttttagagcagcgggcaaaaattcgcttgctgcactttaccgcagcggcatactaccatttaaacgctgtgcgcattcagcgcgcatataagctgtaccttgcggtgaaaaacgctaacaaacaggttaacagcgtaatctgcatacagcgatggtttagggctaggttgcaggagaagaggttcatccagaagtatcacagcataaagaaaattgaacacgagggacaggaatgcctttcccaaaggaaccgcgctgcgagcgtcatccagaaagcagtcagacactttctgctgcggaagaagcaagaaaaatttacttctgggattataaagatccaggccctttggagagggtactcctggcggaaaaagaatgattgcacaaagataaaagcaatccgcctgtctctacaggtagtcaacagggagattcgcgaagagaataaactctacaagcgaacagctcttgctctccattacctgctgacctataaacatttgtccgctatcctcgaggctctgaagcatctggaagtggtcacacgacttagccctctgtgttgcgagaacatggcgcaatcaggggctatcagtaagatcttcgtcttaatccggagttgcaataggtctatcccgtgcatggaagtcattaggtacgcagtgcaagttctgctgaatgtaagcaaatacgagaaaacaaccagtgcggtctatgatgtggagaattgcattgatattctgttggagcttttacaaatttacagagaaaaacccggaaataaagtagcggacaagggaggcagcatcttcacaaaaacgtgctgcctgctggcaattctgctcaagaccaccaacagggctagtgacgtgagatcaaggagtaaagtggtggatagaatctactctctgtacaagctgacggcccacaagcataagatgaacacagagcggatcttatacaagcaaaaaaaaaactcaagtatttctataccttttatcccagagacaccggtgcggacgcgcatcgttagccggctgaaaccggactgggtgcttcgcagagacaatatggaagagataaccaaccccttacaagccatccaaatggtcatggacactctgggtatcccctactag

SEQ ID NO: 214934 - DNA, 10434 bp, synthetic construct
  misc_feature 1..10434: note = Description of Artificial Sequence: Synthetic coding sequence
  source 1..10434: mol_type = other DNA
atggcaaatagaagggtggggaggggttgttgggaggtttctcccactgagaggcgacccccagccggtttgaggggcccagctgccgaggaggaagcaagctcccccccagtgttgtctctgtcacatttttgccgcagcccattcctgtgcttcggagacgtgctgctcggggcatcccggacactgagcctggcactggataatcccaacgaagaggtggcagaagtgaaaatcagccattttcccgctgccgaccttgggttcagtgtcagtcagagatgcttcgtgcttcagccgaaggaaaaaattgtcattagtgtgaattggaccccccttaaggaaggacgcgtgagagagataatgacattcctcgttaatgatgtcctgaaacaccaggctattctgctggggaacgctgaggagcagaagaaaaaaaagagatccctctgggacaccatcaaaaagaagaagattagtgcatcgacctcccacaatagacgcgtgagtaacatccaaaatgttaataagaccttttccgtgagccagaaggtagatagagtaaggtccccgctgcaggcttgtgagaacctggcaatgaatgaaggcggtccacccaccgaaaacaactccctcatcctcgaagagaataagataccaatttcaccaatcagtcctgctttcaatgagtgtcatggcgctacatgcctgccattgtcagtgcggaggtcgactacctactcatctctccatgcatcagagaatcgtgagttactgaacgtgcattctgctaacgtttcaaaggtgtcatttaacgagaaagcagttacggagacatcatttaactctgtgaatgtaaacggacagcgaggtgaaaattcaaagctcagcttgacacccaactgcagttctactctgaacattactcaatctcagatccactttctttccccagacagcttcgtgaacaacagtcatggtgctaataacgaactcgagcttgtgacatgtttatctagcgatatgttcatgaaagataactcccagcctgtgcacctcgagagtactatcgctcatgagatttaccagaagatactctcaccagactcattcattaaagataactacggtcttaaccaggatttggaatccgagtctgtgaaccccatcctcagcccaaatcagtttctgaaggacaacatggcctatatgtgcactagccaacagacatgtaaagtgccacttagtaatgagaattcgcaggtgcctcaaagtccggaggactggagaaaatcagaagtctctccccgaatccctgaatgtcagggtagcaagtcacctaaagccatcttcgaggagctggtggagatgaagagtaattactattccttcatcaagcagaataatccgaagttcagtgctgtgcaggatatttccagtcatagtcacaataagcagccaaagcgacgccctatcttgtccgcgaccgtgactaagcgcaaggctacttgcacaagagagaatcagaccgagatcaataagcctaaggccaagcgctgcctgaattcagctgtaggagagcacgagaaggtgataaataaccaaaaagagaaagaagacttccactcctatctgccaataattgacccaatcctgtcaaaatcaaaatcatacaagaacgaggtcacacctagtagtactaccgcgtcagtggctaggaaaagaaaaagtgatggcagcatggaggacgccaacgtgcgcgtggctatcacagagcatactgaagtgagagagatcaagcggatccacttttctccttcggagccgaagacctcagcggtaaagaagaccaaaaatgtgaccacacctatctctaaaagaataagcaatagggagaagttgaacttgaaaaaaaagaccgatttgtccattttccgtacacctatctcaaaaactaacaagcgaaccaagccgattatcgccgtggctcagtccagtctcacgtttataaagcctctcaagactgatatacctcggcacccaatgcccttcgccgctaagaacatgttttatgatgagagatggaaggagaaacaagagcaggggtttacttggtggctgaattttatattgactcccgacgacttcacggtgaagaccaacatttcggaagtgaatgccgcaaccctgctcttaggtattgagaaccaacacaagattagcgtacctcgagcacctaccaaggaggagatgagcctgcgtgcctataccgctcgatgccggctgaacagactgcggagggccgcttgtcgtctctttactagcgaaaaaatggtgaaggcaatcaaaaaactcgaaatcgagattgaagcgcgtcggctcatcgtgcggaaggataggcatctctggaaagatgtgggagagcgacagaaggtgttgaattggctgctctcctacaaccccctctggctcaggattggccttgaaactacttacggggaattgatcagcctggaggacaacagcgacgtaaccgggttggcgatgtttatcctgaataggttgctctggaacccggatattgcggcagagtaccgtcaccccacagttcctcacctgtaccgagacgggcacgaagaagctctcagtaagttcactctaaaaaaattgctgctgctggtgtgctttcttgattacgcaaaaatctctcggctgatcgatcatgacccatgcctcttctgcaaggacgctgaatttaaagcctcgaaggaaatccttctggcttttagtagagacttcctttctggcgagggcgatctctcccgccatttaggtctactgggactgcctgtgaaccacgtgcagactccatttgatgagttcgacttcgccgtaacaaacttggctgtggacctccagtgcggcgtgcggctggttcgcaccatggaacttctcacccagaactgggacctgagtaaaaagctgagaattccagcaattagcagactccaaaaaatgcataatgtggatattgttctgcaagtcctgaaaagccgaggaatagaactgagtgacgaacatggcaatacgatcctgagtaaggatattgttgaccgccaccgggaaaagactcttcgcctcctgtggaaaatagcattcgccttccaggtggacatcagtttaaacttggaccagctgaaggaagagatcgcgtttctgaaacacacaaagtccattaaaaaaaccatctctctgctctcatgtcattccgacgatctgataaacaaaaagaagggcaaaagggattccggctcattcgagcagtatagtgagaatataaaactccttatggattgggtgaatgccgtgtgtgccttctacaacaagaaggtcgaaaacttcactgtctcattttcagacggacgagtcttgtgctacctcatccatcattatcacccatgctatgtgcctttcgacgcaatttgccagcgaaccacccagactgtggagtgtacacaaactgggagtgtggtgctcaatagctcgagtgaaagtgacgactcatccctggacatgagcctcaaagcattcgaccacgaaaatacgtctgagctctacaaggaactgcttgagaatgaaaagaagaattttcacctggtccgctcggccgtaagagatttgggagggataccagcaatgattaatcatagcgatatgtcaaacacaattcctgacgagaaggtggtgattacctatctgagttttctctgcgccagattgctcgacttgcggaaggaaatccgagcggcaagactgatccaaactacatggcgcaagtacaagctcaagaccgacctaaagaggcaccaggagcgggaaaaggccgcacggataatacaactagctgtgattaatttcctagccaagcaaagacttaggaagcgggttaatgcagctctcgtcattcagaagtactggagacgggttctggctcagcgcaagttgctgatgcttaaaaaagagaagctcgagaaggtgcagaataaggcagcctcgctcatacagggctactggagacgttacagcacccgacagcgctttctgaagctcaaatactacagcataatcttacagagccggataagaatgataattgctgtgacgtcctataagagatacctgtgggctaccgtgacaatccagcgccactggcgggcttatttgcgcagaaaacaggaccaacagcggtatgaaatgctgaagagctccactctgattatccagtccatgttcagaaaatggaagcagagaaaaatgcaaagccaggtgaaagcgacagttattctgcagcgggctttccgggagtggcatctgagaaagcaagccaaggaagaaaactcagccatcatcatccaatcatggtatcgaatgcacaaggagctcagaaagtatatctacattcgtagctgtgtcgtgatcattcaaaaaagattcagatgttttcaggcccaaaagttgtataaaagaagaaaggagtcgatacttaccatccagaagtattacaaggcatacctgaaaggcaaaattgagaggactaactacctgcaaaagcgcgctgctgctatacaacttcaggcagcctttcgcaggctgaaggcacacaacctttgtagacagatcagggcggcttgcgtaatccaaagctactggagaatgaggcaggatcgcgtgaggtttctgaacttaaagaagacaataataaagttccaagcacatgtgcggaaacatcagcagaggcaaaagtataagaaaatgaagaaggcagctgtgatcatccagacccacttcagggcttacattttcgctatgaaggttttggctagttatcagaaaactcgtagtgccgttatcgtgctgcagtctgcgtacaggggaatgcaggctagaaagatgtacattcacatcctcacctcggtgatcaagattcagagctattatcgcgcttacgtgtccaaaaaggaattccttagcctgaaaaacgcaactatcaagttacaatctacggtcaagatgaaacagacacgaaaacagtacttgcatctgcgtgcagcggcactcttcattcagcaatgttacagaagcaaaaagattgccgcacagaagcgtgaagagtacatgcagatgcgagaatcctgcatcaaactccaggcattcgtgagggggtacctggtgcggaagcaaatgagactgcagagaaaggcagtgatatctctccagtcatattttaggatgaggaaagctcgacaatactatttgaaaatgtataaggcaatcatcgtgattcagaattactaccacgcttacaaagctcaggtgaaccagcgcaaaaacttcctgcaggttaaaaaggcagctacctgccttcaggccgcataccgcggttacaaggtccgccagctgattaaacagcagtcaattgctgctttaaagatccagtccgcattccgaggctacaataaacgagtaaagtaccagagcgtattacagtccatcattaaaattcagcgctggtaccgtgcttataaaaccttgcatgacacaaggacacatttcctgaaaaccaaagctgccgttatatcactacagagcgcttatagaggttggaaggtaaggaagcagattcggagggaacaccaagctgcccttaaaatccagtcagcttttcgaatggcaaaagctcagaagcagtttcgcctcttcaagacagctgctctggtaattcagcagaacttccgcgcttggactgcaggcagaaagcaatgcatggaatacattgagctgcgccacgctgtgctagtgctacagtctatgtggaagggcaagacactcaggcggcagctgcagaggcagcataagtgtgctataattatccagtcctactaccgcatgcatgtacagcagaagaagtggaaaattatgaaaaaggctgccctccttatccagaagtattacagggcctatagtatcggacgggaacaaaaccacctgtacttgaaaactaaggcagcggtggtcactctgcagtcggcttacagaggcatgaaggtccgaaaaagaatcaaggactgcaacaaggcagcagtgacgatccaatcaaaatatagagcctacaagacaaaaaagaaatatgccacgtatcgggcatcggccattataattcagagatggtatcggggaatcaaaatcacaaaccaccagcacaaagagtatcttaaccttaagaagacggctattaagatccagtccgtataccgtggtatacgggtacgtaggcatattcagcacatgcatcgggctgcgacatttatcaaggcaatgttcaagatgcaccagagtagaattagctatcacaccatgagaaaagctgcaattgtgatacaggttaggtgccgagcatattatcagggtaagatgcagcgggaaaaatacctgaccatcctgaaagctgttaaagtattacaggctagcttccggggagttcgggttaggcggaccttgcggaaaatgcagaccgcagccaccttgatacaaagtaattatcggaggtaccgccaacagacctattttaacaaactgaagaaaataacaaagactgtgcaacagaggtactgggccatgaaggagaggaacatccagttccagcggtacaacaaactaaggcactctgttatatacatccaggcaatcttccgagggaaaaaggccaggcgacatttaaagatgatgcatatcgctgccactctaatccagagacgcttcaggacgctgatgatgaggcgccgttttttgtcactcaaaaaaaccgccatcctgattcagcggaagtatcgggctcacctgtgtaccaaacaccaccttcagtttctccaggtccagaatgcagtgatcaaaattcagtcctcctataggcggtggatgatccgcaagcgaatgcgagagatgcaccgggcagctacgttcatacagtcaactttccggatgcatcggttgcatatgaggtatcaggctttaaagcaagcaagcgtagtgattcaacagcagtaccaagccaacagagccgcaaagctccagaggcagcattacctgagacagaggcattcggcagttattctccaagccgctttccggggaatgaagacgagacgtcatctcaaaagcatgcattcatccgctactctaatccagtctcggttccgctccctattggtgaggcgtcgctttattagcctcaaaaaggccaccatcttcgtgcagagaaaataccgggcaacaatctgcgctaaacataagctatatcaatttttacatctgcgtaaggccgcaatcactatacagtctagctaccgaaggttgatggtgaagaagaagctgcaggagatgcagcgggctgctgtgctcattcaggctacgtttcgaatgtaccgcacctacatcacatttcagacatggaagcacgccagcatccttattcagcagcattataggacttacagggccgctaagctccaaagggagaattacattaggcagtggcacagcgccgttgtgatccaggccgcatacaaaggaatgaaagcccgacagctgttgagggaaaagcataaagcatccatcgtgatccagagtacctaccgcatgtaccgccaatattgtttttaccagaagctccagtgggccactaaaatcatccaggaaaaatatagagctaataagaagaagcagaaggtatttcagcataatgaactcaagaaggaaacttgtgtgcaggctgggttccaagacatgaacatcaagaagcaaatccaagagcagcaccaagccgcaatcatcattcagaagcactgcaaagctttcaaaatccgcaagcactacctccatttgcgagccaccgtggtctctattcagagacgataccggaaactcacggcagttcggacccaggcagtcatatgcatccaatcttattataggggattcaaggtccgaaaggatattcaaaacatgcatagagccgctaccttaatccagtctttctaccggatgcatagggcgaaagtggactatgagactaagaagactgcaatagtcgttatccagaattactatcgtctatacgtgcgcgtgaaaaccgagaggaaaaactttcttgccgtgcaaaagagtgtgaggactattcaagcggctttccgtggcatgaaggtacggcagaaacttaaaaatgtttctgaggaaaagatggccgctattgttaatcaatccgccctctgttgctaccgcagcaagacacagtacgaagccgtacagtccgagggagtcatgatccaggaatggtacaaagctagcggactggcttgtagtcaagaggctgagtaccatagtcagagccgcgcagcagtaaccattcaaaaagctttctgccggatggtcaccaggaagttggagacacagaagtgcgcagctctgcggatccagttttttctccagatggcagtatatagacgaagattcgtccaacaaaaacgagccgcaatcactctccagcattactttcgtacttggcagacccgtaagcaatttttgctgtatcggaaggcggctgtggtcctgcaaaaccactatcgggcattcctttcggccaagcaccagcggcaagtgtacctacagatacggtcctctgttataattatccaagcacgttccaaagggttcattcagaaaaggaagttccaggaaataaaaaatagcacaattaaaatacaggctatgtggcgaaggtatagagctaagaaatacttgtgtaaggtcaaggccgcatgtaagatccaggcttggtacagatgctggcgagcgcacaaggagtacctggcaatccttaaggcagtgaaaattatccaaggctgcttttacactaaactggagcggacccgattcctcaacgtccgggcttctgcaataattattcagcgcaaatggagggcgatcctgcccgctaaaattgcgcacgaacatttccttatgatcaagcgccaccgcgctgcgtgtcttattcaagctcactatcgcggatataagggccgacaggtattcttgcggcagaagtcagccgctctgattatacagaagtacatccgggcaagggaagcgggaaagcatgagcgcataaaatatattgagtttaagaagtctaccgtaattctccaggctctggtacggggttggctcgtcaggaagcgcttcctcgagcaacgcgctaagatacggctgctgcacttcacagctgcagcttactaccatctcaatgcggttcgcattcaaagagcctataaattatacttagccgtcaaaaatgccaataagcaggtgaattcggtgatttgcattcagcggtggtttcgggcacgcctgcaggaaaaacgctttatccagaagtaccatagcattaagaagatcgagcatgaggggcaggaatgtttgagccagaggaacagggcagccagtgtgatacaaaaagcagtgcgccactttctgcttaggaagaaacaggagaagttcacctcaggaatcatcaagatccaggcgctctggcggggatattcatggaggaagaaaaatgattgtaccaaaattaaagccattcggctgagcttgcaggtggtgaatagagagatccgcgaggaaaataagttgtataaaagaaccgcactcgccctccattaccttctgacatacaaacacctgagtgcgattctcgaggccctgaaacacctggaggtggtcacccgactcagccccttgtgctgcgagaacatggcacagagtggtgcaatatctaaaatattcgttctgattcggtcttgcaataggagcatcccttgcatggaggttattagatatgccgtccaggtcctcctgaacgtctccaagtatgaaaagacaacatctgccgtctatgacgtggagaactgcattgacatccttctcgagctgctacaaatttaccgggaaaaaccgggaaataaggtggcagataaagggggatctatatttaccaagacgtgctgcctcctagctattttactgaagaccaccaatagagcttccgatgtgaggtccaggagcaaggtggtggaccggatctatagcctgtacaagctgacagcgcacaagcacaaaatgaatacagaaaggatcctctacaaacagaagaaaaattcctccatctctatacccttcattccagagacaccggtgaggacacgaattgtgagcaggcttaagcctgactgggtattgcggcgtgataatatggaagaaataacgaacccacttcaggccattcagatggtgatggatacgcttgggatcccgtactac

SEQ ID NO: 214935 - DNA, 1686 bp, synthetic construct
  misc_feature 1..1686: note = Description of Artificial Sequence: Synthetic coding sequence
  source 1..1686: mol_type = other DNA
atgtgtgggatttgggcccttttcggaagcgacgactgtttgtcggtacagtgcctttcggccatgaaaatcgcccacagaggcccagatgccttccggttcgagaatgtgaatggatacaccaattgttgtttcggtttccaccgactggctgttgtggatccattgtttggaatgcagccaatccgcgtgaagaagtacccttacctctggctgtgttataacggcgaaatttataatcataagaaaatgcagcaacacttcgaatttgagtatcagacaaaagttgacggtgaaattattcttcatctttatgacaaggggggaattgaacagaccatttgcatgttagacggagtgtttgcgttcgtgctgttagacactgccaataagaaagtgtttctgggcagggacacctacggggtgaggcctctatttaaggctatgacagaagatgggttcttagccgtctgttctgaagccaagggtctggtaaccctgaagcacagcgcaacaccttttctgaaggtcgagccctttctaccaggccattacgaagtgttggacctaaagccgaatggaaaggtcgccagcgtcgagatggtgaaatatcaccattgtcgcgacgtgccacttcatgccctctacgacaatgtggaaaaactgttccccggatttgagattgaaaccgttaagaataatctgcggatactgtttaataatgcggtcaaaaagaggctaatgacagatcggagaattgggtgcctgctgtcagggggattggactccagcctcgtggccgcaactctcctaaagcagctgaaagaggcccaggtccagtacccactacagactttcgccatcgggatggaggatagtcctgatttattagcagcccgtaaagtcgccgaccatattggatcagagcattacgaggtactctttaactcggaggaagggattcaggctttggatgaggtgatttttagccttgaaacctacgacataaccacagttcgcgcttcagtcggaatgtacctcatttcgaagtacatccgcaagaatactgactccgtggtgattttcagtggtgaaggctccgacgagctcacccagggatacatttactttcataaggcgccttcccctgagaaagccgaggaagagtcggaacggctcttgcgcgagctttacctgtttgacgtgctgagagccgaccggactaccgccgctcatgggttggagctgagagtgccttttctcgaccatcgcttcagctcatactacttgtctctgccacctgaaatgcgtatccccaaaaatggcatcgaaaagcatctgctcagagagactttcgaggacagcaatctcatccccaaggaaatactatggaggccaaaagaggcttttagcgatgggattacaagcgtgaaaaatagctggttcaaaatcctgcaggaatatgtggagcatcaagttgacgacgccatgatggccaacgcagcgcagaaatttccgttcaacacccccaagaccaaggaaggttactactacaggcaagtttttgaacgccattaccctggcagggcagactggctttctcactactggatgcctaagtggatcaacgcgaccgacccctccgccagaaccctaacacattacaagtccgcagtgaaggcttag

SEQ ID NO: 214936 - DNA, 1686 bp, synthetic construct
  misc_feature 1..1686: note = Description of Artificial Sequence: Synthetic coding sequence
  source 1..1686: mol_type = other DNA
atgtgcggaatctgggccctgttcgggtctgacgattgtctgtcagtacagtgcttatccgctatgaagatcgcgcatcgcggtcctgacgcctttcgttttgagaatgtcaacggttacacaaactgttgcttcggatttcatcggctggctgttgttgacccattgttcggaatgcagcctattcgggtaaagaaatacccctacctatggctgtgctacaacggtgagatttacaatcataagaagatgcagcaacacttcgagttcgagtaccagaccaaagtggacggggaaattatccttcacctgtacgataagggtggtattgaacagaccatctgcatgctggacggtgtcttcgccttcgtgttattagataccgcgaacaaaaaagtgttcctaggcagggacacatatggagtgcgccctctttttaaagccatgaccgaagatggatttctggccgtgtgtagtgaagccaaaggcttagtcactctgaagcacagcgcgaccccattcctcaaagtcgagccgtttctgcccggacactatgaggtgctggatcttaaacccaatgggaaagtcgcttcggtggaaatggtgaaataccaccattgtagagatgttcctcttcatgccctttatgataatgtagaaaagctgttcccgggttttgaaatcgagaccgtgaagaacaatctacggatcttgttcaataacgccgtcaaaaaaaggcttatgaccgaccgacggatagggtgtctcctgagcggcggtctggatagctccctggttgccgctaccttactcaagcaattgaaagaggctcaagtgcagtaccccctgcagacgtttgccatcggcatggaagattcccccgatttgctggcagcacggaaggttgctgatcacatcggttcagagcactatgaagtgctgtttaattctgaggaaggcatccaggctctcgatgaggtgattttcagcctggagacctacgatatcacaaccgttcgggcttctgtcgggatgtatctgatttctaagtatattcgcaaaaacacggactctgttgtgatcttctcaggagagggctccgacgaactgacacagggatacatctactttcacaaggccccttctcccgaaaaggcagaggaggaatcagagcgtctgctgcgagaattgtatctgtttgacgttctacgagctgacagaactacggcggctcacgggctcgagttgagggtgcctttcctcgaccatcgcttttcatcctactatctgagcctgccccctgaaatgcggatccctaaaaacgggattgaaaaacacctgctgagagagactttcgaggacagtaatctgatccctaaagagattctgtggcggcctaaagaggcgttcagcgatggcatcacgtcagtgaagaactcttggttcaaaatcctccaagagtacgtggagcaccaggtggacgatgcaatgatggcaaacgcagcccagaagttcccttttaacactccaaaaaccaaggagggctattattatcggcaagtttttgagcggcactatccaggcagagccgattggctgagccactattggatgccgaagtggatcaacgccacagatccgtctgccagaacactgactcattacaaaagcgcagtgaaggcttag

SEQ ID NO: 214937 - DNA, 1686 bp, synthetic construct
  misc_feature 1..1686: note = Description of Artificial Sequence: Synthetic coding sequence
  source 1..1686: mol_type = other DNA
atgtgcggtatttgggcgctttttggatcagatgattgtttgtcagtgcaatgcctgagcgccatgaaaatcgcccatagaggaccggacgccttcaggtttgaaaatgtgaacggctatactaattgttgttttggttttcaccggctggccgtggtcgaccctctgttcggtatgcagccaattagagttaagaagtacccctatctgtggctctgctacaatggcgagatatataaccacaagaaaatgcagcagcacttcgagtttgagtatcagactaaggttgacggggagattatactgcatctttacgacaaaggcggtatagaacaaacaatttgcatgctggatggcgtattcgccttcgttctgctcgacactgctaacaagaaagtgtttcttggtcgagatacttacggagtcaggcctctgtttaaggccatgaccgaggatggcttcctggccgtctgttctgaagctaaaggccttgtgacattgaagcattcagccaccccttttctgaaagtggagccgttcctacccggacattacgaagtcttagatcttaagcccaatggcaaagttgcctcagtggagatggtaaagtaccatcattgtcgcgacgtgcctctgcatgccctgtacgacaatgtcgagaaactgttccctggcttcgaaattgagaccgttaagaacaacctccggatcctctttaacaacgctgttaagaagcgactgatgaccgatcggcgtatcgggtgcctactaagtggcggacttgacagcagcctggtggcggctactctactgaaacagctgaaggaagctcaggtgcagtaccctctgcagactttcgctatcgggatggaagattccccagacttattagctgcacggaaggtggcggatcacattggatctgagcactatgaagttttattcaatagtgaggagggcattcaggccctcgacgaggtaatattttcactggaaacttatgatattactacggtcagggcttccgttggcatgtacctgatttccaagtacatcagaaagaatacagactcggtggttatttttagtggtgaaggtagtgatgagctgacccagggctatatctactttcacaaggcgccaagcccggagaaagctgaagaggaatccgagaggcttctaagagagctttacttgttcgacgtgctgcgcgcagatcggacaactgccgctcatgggctcgaactgagagtacccttccttgaccaccggttttcttcttactacttgtctctccctcccgagatgcgtatacctaaaaacggcatcgagaagcacctattgcgcgaaacttttgaggacagcaacctaatacccaaagagatcttgtggaggccaaaggaagcattttctgacggcataacatccgtgaagaactcttggttcaaaatactacaggaatacgtagaacatcaggtggacgacgccatgatggcaaacgccgcacaaaaatttcccttcaacactcccaaaacaaaggagggctattactacagacaggtgttcgagcggcactacccaggcagggccgattggctgtctcattactggatgccgaagtggattaatgccaccgaccctagcgctagaaccctcacacactacaaaagcgcggtaaaggcctag

SEQ ID NO: 214938 - DNA, 87 bp, synthetic construct
  misc_feature 1..87: note = Description of Artificial Sequence: Synthetic coding sequence
  source 1..87: mol_type = other DNA
atgtgtggaatttgggctcttttcggtagcgatgattgtctgtccgtgcaatgcctttccgccatgaaaattgcacacagggggtag

SEQ ID NO: 214939 - DNA, 489 bp, synthetic construct
  misc_feature 1..489: note = Description of Artificial Sequence: Synthetic coding sequence
  source 1..489: mol_type = other DNA
atgtgtggcatctgggcactgttcgggagtgatgactgccttagtgtgcagtgcttgtctgccatgaaaattgcccaccggggtccagacgcattccggttcgagaatgtcaacgggtacacgaattgttgcttcgggttccacaggcttgctgtggttgatccactgtttgggatgcagccgatcagggtgaaaaagtatccctatctgtggctgtgctacaatggggaaatatacaatcataagaaaatgcagcagcatttcgaatttgaatatcaaacgaaggtggacggagagatcattctccatttgtacgataagggcggaattgagcagaccatctgcatgctggacggggtgttcgcctttgtcctgctcgataccgcaaataagaaggtattcctgggacgggatacatatggcgtgagacccctatttaaggcaatgaccgaggacggtttcctggctgtatgctcagaagccaaatag

SEQ ID NO: 214940 - DNA, 648 bp, synthetic construct
  misc_feature 1..648: note = Description of Artificial Sequence: Synthetic coding sequence
  source 1..648: mol_type = other DNA
atgtgtgggatctgggcactgttcggtagcgatgattgtctgtccgtgcagtgcctgtccgcaatgaaaatcgcccacagaggcccagacgctttccggttcgagaatgtgaatggctacaccaactgctgttttgggttccaccgactggccgtggtggaccctctgttcggaatgcagccaatacgggtcaaaaagtacccctatctgtggctgtgttacaacggtgagatctacaaccacaagaaaatgcaacaacatttcgagtttgagtaccagaccaaagtggacggtgagatcatcttgcacctatatgacaagggcggaattgaacaaacaatttgtatgctggacggcgtttttgcgttcgttctattggacacggctaataagaaggtgtttctgggacgtgacacgtatggtgtccgtccactattcaaggcaatgacagaggacggtttcctggccgtgtgctccgaggctaaaggtctggttaccctgaagcactcagcaacacctttccttaaagtggaaccgttccttccaggacactacgaggtgctggacttgaagccaaacggtaaggtggcgagcgtggagatggtcaaatatcaccactgccgcgacgtgccactccacgctctgtag

SEQ ID NO: 214941 - DNA, 360 bp, synthetic construct
  misc_feature 1..360: note = Description of Artificial Sequence: Synthetic coding sequence
  source 1..360: mol_type = other DNA
atgtgcggaatatgggccctgttcggtagtgatgactgtttatcggtccaatgcctttcagctatgaagatcgcccatcggggtcctgacgccttccggttcgagaacgttaatgggtatacaaactgctgcttcgggttccaccgtctcgccgtagtcgacccgctcttcggaatgcagccgatccgagtgaaaaaatacccgtacctgtggttatgttacaatggagaaatttataaccacaagaaaatgcagcaacatttcgagttcgaataccaaaccaaagtggatggagaaatcatacttcacctctacgataaagggggaattgagcagactatctgtatgctggacggctag

SEQ ID NO: 214942 - DNA, 102 bp, synthetic construct
  misc_feature 1..102: note = Description of Artificial Sequence: Synthetic coding sequence
  source 1..102: mol_type = other DNA
atgtgtggaatatgggccttgttcggttcagatgattgcctcagcgttcagtgtctgtccgctatgaagatcgctcatcggggaccagacgcattccgctag

SEQ ID NO: 214943 - DNA, 192 bp, synthetic construct
  misc_feature 1..192: note = Description of Artificial Sequence: Synthetic coding sequence
  source 1..192: mol_type = other DNA
atgaagattgctcacagaggcccagatgcattccgattcgaaaacgtgaacggctatacgaattgctgttttgggtttcataggctggcagtcgtcgaccccctatttggtatgcagcctattcgggtgaaaaagtacccatacctctggctttgctacaacggggagatctataaccacaagaaagtctag

SEQ ID NO: 214944 - DNA, 1437 bp, synthetic construct
  misc_feature 1..1437: note = Description of Artificial Sequence: Synthetic coding sequence
  source 1..1437: mol_type = other DNA
atgcagcagcatttcgagttcgagtaccaaacaaaagtggatggcgaaatcattctgcacctgtacgacaaaggcggaatcgagcagaccatttgcatgttggatggggtttttgcattcgtgctcttggacacagccaacaaaaaggtttttcttgggcgtgatacatacggggtaagaccgctgtttaaggcgatgacggaggatggtttcctcgcagtgtgctccgaagccaaaggactggttaccctcaagcattcggctacaccatttctgaaggttgagccttttctgccaggccattatgaagtccttgatctgaagcccaatggcaaagtggcgtccgtggagatggttaaataccaccactgtcgggatgtcccacttcacgccttatacgacaacgttgaaaagctcttcccagggtttgagatcgagaccgtcaagaacaatctgcgcatcctgtttaacaacgctgtgaagaaacggttgatgacagatagaagaatcggttgccttctgagcggaggcctcgattcttctctggtcgcagctacactgttaaaacagctcaaggaggctcaggtgcagtatcccttacaaacctttgccattggcatggaagatagtcccgacttgctcgccgcacgtaaggtggccgaccacatcggcagtgaacactatgaagttctgttcaattctgaggaagggattcaggccctcgacgaggttatattctcactggagacgtacgatatcaccaccgtgcgcgctagcgttggcatgtatctgatcagcaaatacatcagaaagaatacagacagcgttgtgattttttccggggagggaagcgacgagctgacgcaggggtacatctactttcacaaagccccttcaccagaaaaggccgaggaggaatcggaacggctcctccgcgaactgtacctgttcgatgtcctgcgagcagatcggaccaccgctgcccatgggctggagttgcgcgtcccctttctagatcacagattctccagctattacctgtcgctgccacctgagatgaggatccctaagaatgggatcgagaaacacctgttaagggagactttcgaggattcaaatctgatcccaaaagagattctatggaggcctaaagaagctttcagtgacggcattacaagtgtaaagaattcctggttcaagatcctgcaggaatacgtggagcaccaagttgacgatgccatgatggcgaatgccgcacagaagttccccttcaacacccccaaaacgaaagagggttattattatagacaggtgttcgagaggcattacccaggacgtgctgactggctctctcactattggatgccaaagtggatcaacgctacggatccctctgctcgaaccctaacgcattataagagtgcagtcaaagcatag

SEQ ID NO: 214945 - DNA, 1623 bp, synthetic construct
  misc_feature 1..1623: note = Description of Artificial Sequence: Synthetic coding sequence
  source 1..1623: mol_type = other DNA
atgaagatcgcccatagaggcccagatgcttttcgctttgagaacgtgaacggctataccaactgttgcttcgggtttcacaggctggctgtggttgatccgctgttcggcatgcaacccattagggtgaaaaagtatccatatctgtggctgtgctataacggcgagatttataaccacaaaaagatgcagcagcatttcgaatttgaataccagacaaaggtcgatggagaaattatcctgcacctgtacgataagggtggaattgaacagaccatctgtatgctggacggggtgtttgccttcgtgctcctggacaccgctaataagaaagtctttctaggacgggacacatacggggttcggccattattcaaggctatgacagaagacggctttttggcggtgtgctccgaggctaaaggtctcgtgacccttaagcatagtgccaccccttttctgaaagttgagccttttctgcctggccattacgaggtgctcgacctgaagcccaacggaaaagtggcctctgtcgaaatggtgaaataccaccactgccgggatgtgccattgcacgctctgtatgacaatgttgaaaagcttttccctgggttcgagatcgagacagtgaagaataatctgagaattctgtttaacaatgctgtgaagaagaggttgatgacagaccggcgaatcgggtgtttgttatctggaggactggattcaagcctggtcgccgctaccttgttaaaacagctgaaggaggcccaagtacagtacccactgcagacgtttgccattgggatggaggactctcctgacttactcgctgcaaggaaagtagctgaccatatcggttccgaacactacgaagtgctcttcaacagtgaggagggaatccaggccctggacgaggtcattttcagcttggagacttatgacatcaccaccgtccgtgcgagtgtgggcatgtacctaatcagcaaatacatcaggaagaacacagactccgtcgtgatttttagcggcgagggttccgatgaattgactcaaggttacatttatttccataaggctccatcaccggaaaaggccgaggaagaatctgaacgcctactgagagagctgtacctgtttgatgtgctgagggctgacagaaccactgctgcccacggtctcgagttgcgcgttccattcctggatcatcggttcagtagttattacctgagcctgcctcctgagatgcgcatccctaaaaatggaattgaaaaacacctgttgagggagaccttcgaggatagtaacctgattcccaaggagatcttgtggaggccgaaggaggcctttagcgatggaatcacatcggttaagaattcctggtttaagattctgcaagagtatgtcgaacaccaggtagatgacgccatgatggccaacgccgctcagaagtttccctttaacacacccaagacaaaggagggctactactaccgccaggtattcgagagacattaccccggacgggcagattggctctctcactactggatgcccaagtggataaatgcaactgacccaagcgcccgaactcttacacactacaaatctgccgtgaaagcatag

SEQ ID NO: 214946 - DNA, 1437 bp, synthetic construct
  misc_feature 1..1437: note = Description of Artificial Sequence: Synthetic coding sequence
  source 1..1437: mol_type = other DNA
atgcagcagcattttgaattcgagtatcagacgaaggtcgacggagagatcatcctgcatctttatgacaagggagggatcgagcagacaatctgcatgctggatggggtctttgcctttgtgctgctggacactgctaataaaaaggtctttctggggagggatacgtacggagtacgaccactgtttaaagcaatgacagaggatggctttctcgccgtctgtagtgaggccaaagggctggtcacgctgaaacacagcgccacgccatttctaaaggtagagccctttctgcctggacactatgaggtcctcgacttaaagcccaatggaaaagtggcttcggtggagatggtcaaatatcatcattgccgcgacgtgcccctgcacgccctttatgacaatgttgaaaaactgttccccggtttcgaaatcgagacagtaaagaacaatctgagaattttatttaacaatgctgtgaagaagaggttgatgactgataggagaatcggctgcttgctgtccggaggcttggattcatctttagtagcagccactttattgaaacagctaaaagaggcccaggttcaataccctctccagaccttcgcgattggaatggaggactcccctgacctgctcgccgctcgcaaggtcgccgaccatattggaagcgaacattacgaggttttgttcaatagtgaagagggcattcaggcccttgatgaagtaatcttttctctggaaacatatgacatcaccacagtccgggcatcagtcggaatgtacctgattagtaagtacatccgcaaaaataccgatagtgtagtcatattttcgggcgaaggcagtgacgaattaacccaggggtatatttacttccataaggcgccaagccccgagaaggcagaagaggagtctgaaagattactacgggaactgtacctcttcgacgtactgcgcgctgaccgcactactgcagcccatggattggaactcagagttcctttcctggaccatcgcttctcgtcttactatctaagtctgcctcctgagatgaggattcccaagaatggaatcgagaagcacctcttaagggagaccttcgaagattccaatctcattccgaaagagattctttggagaccaaaagaagctttctcggatggtatcacgagtgtgaagaactcatggttcaagatccttcaggagtatgtggaacaccaggtcgacgacgccatgatggcaaatgcagcccagaagtttccatttaacactcccaagactaaggaggggtactactatcgccaagtgttcgaacggcattaccccggacgggctgattggttaagccactactggatgcccaaatggattaatgctacagaccccagcgccagaactctgactcattataaatcggctgtgaaagcgtag

SEQ ID NO: 214947 - DNA, 1395 bp, synthetic construct
  misc_feature 1..1395: note = Description of Artificial Sequence: Synthetic coding sequence
  source 1..1395: mol_type = other DNA
atggctgccagctgtctagtgcttctagctctgtgcctgctgttgcccttgctgctactcggaggatggaaaagatggaggaggggcagagccgctcgacatgtcgtagcggtagtgcttggggatgtcggacggagtcccaggatgcagtatcatgccctgagtctcgcgatgcacggcttttcggttaccctcctgggcttttgtaacagcaagccccatgatgaactcttacagaataatcgaatccagatcgtgggactaaccgaactgcagagcctagctgtggggcctcgcgtcttccagtacggcgtcaaggttgtgttacaggcaatgtacctcctgtggaaacttatgtggcgagagccgggagcctatatattcctgcagaatcctccaggacttccctcaatcgcagtttgctggttcgtcgggtgtctctgtggaagcaaacttgttattgactggcataattacggctattccatcatggggctggttcacggcccaaaccacccccttgtgctgctggccaaatggtatgagaagttctttgggcgtctctcacatcttaatctatgcgttactaacgccatgcgcgaagatctagcggacaactggcatatccgtgctgtaacagtgtatgacaagcctgcatcgttcttcaaggagacacccttagatctgcaacaccgcctttttatgaagctggggtccatgcattccccgtttcgagcaaggtctgagcccgaggacccggttacagaaagaagtgcatttacggaacgagacgcgggtagtgggctcgtcaccaggctacgggagaggcccgctctgctggtgtcctccaccagctggaccgaagacgaagacttttctattctgctggcagccctagaaaaatttgaacagctgacccttgacgggcacaacttgccctccctcgtttgtgttatcaccggcaaaggccctcttagagaatactattcccgactgatccaccagaagcacttccaacacatccaggtgtgtactccttggctggaggcagaagactatccgctgttgttaggctccgcggatttgggggtctgcctgcacactagttccagtggcctcgacctgcctatgaaggtggtggacatgttcggttgttgcctaccagtctgtgcagtaaacttcaagtgccttcacgagttagtgaagcacgaagagaatggcctggtcttcgaggacagcgaggaacttgcagcacagttgcagatgctgttctccaactttcctgatccagcgggaaagctgaaccagtttagaaaaaatctgagggaatcccaacagctcaggtgggacgagtcttgggtgcagacagtcctgccacttgtaatggacacttag

SEQ ID NO: 214948 - DNA, 1062 bp, synthetic construct
  misc_feature 1..1062: note = Description of Artificial Sequence: Synthetic coding sequence
  source 1..1062: mol_type = other DNA
atgtacctactgtggaaactaatgtggcgcgaacctggcgcatatatatttcttcaaaatcctcctggtctgccctcaatagcagtttgctggttcgtggggtgcctatgcggttccaagctggtgatagattggcataactatggatactctattatgggcctggtgcacgggcctaaccatccgctggtactgcttgctaaatggtacgagaaattctttggcagactttcccatttgaatctatgcgtaacaaatgcgatgagagaagatttagctgataattggcacatccgcgctgtgaccgtttacgacaagcccgcttccttctttaaagagaccccactggatctgcagcatagactcttcatgaagctgggtagtatgcactctcctttccgggctcgctctgagccagaagatcctgttaccgaaaggagcgcatttactgagcgtgacgccggatccggactggtgacccgcttgcgcgagcgcccagctctgctcgtctcttctacatcttggacagaagacgaggacttcagtattctgcttgctgccctggagaaattcgagcagttaaccttagacggtcacaatctacctagcttagtctgtgttattactgggaagggcccactacgcgaatattactctagactgatccaccagaagcatttccaacatatccaggtgtgtaccccttggttagaggctgaagattatcccctgttgctcgggagcgccgacctgggggtgtgcctgcacacatccagttcgggacttgacctacccatgaaggtcgttgacatgtttggatgttgcctgcctgtttgtgccgtcaattttaaatgtcttcacgagcttgtcaagcatgaggagaacggcttggttttcgaagatagtgaagaactcgctgcccagcttcagatgctattcagtaattttccggatcctgctggcaaactcaaccagtttagaaagaatttgagagagagtcagcaactccgatgggacgagagctgggtgcagactgtgcttcccttggtgatggatacttag

SEQ ID NO: 214949 - DNA, 1422 bp, synthetic construct
  misc_feature 1..1422: note = Description of Artificial Sequence: Synthetic coding sequence
  source 1..1422: mol_type = other DNA
atggctcagctcgaaggttattattttagtgcggctttatcttgcacattcctggtgtcgtgtctgttattttccgcctttagtcgtgcgttgcgcgagccatacatggacgagatctttcacctgccccaagctcagaggtactgtgaggggcactttagcctctctcaatgggaccctatgatcactaccttacccggtctctatttggtaagcatcggtgtaattaagcctgccatctggattttcggatggagtgaacacgtggtctgtagcattggcatgctacgctttgtgaacctccttttttccgtaggcaatttctatctgctctatctacttttctgcaaggtgcagccacggaacaaagctgctagctccatccagagagtgctgtccaccctgacactcgcagtcttccccactttgtatttttttaactttctgtactacaccgaggcgggttccatgttcttcacgttatttgcttatctcatgtgcctctatggcaaccataaaacctcagcgttcttgggtttctgcggctttatgttccgacagactaatattatctgggctgtcttttgtgcgggaaatgtgatcgcccagaagctgaccgaggcctggaaaacagaactacaaaaaaaggaggacagactaccccctatcaagggtccatttgccgaattccgcaaaattctgcagttcctcctcgcctatagtatgagctttaagaacctgtctatgcttctgctgttgacttggccgtacatccttctcggattccttttctgtgcctttgtggtcgtgaacggcggaatcgtcatcggcgatagatcttcacacgaggcgtgcctgcactttccacagcttttttattttttctcattcactctattcttcagcttcccacacttgttgtcacctagcaagattaagacttttctctctcttgtatggaagagacgcatcctgttcttcgttgtcaccctggtgagcgtatttctggtgtggaagttcacatacgctcacaaatacctgctcgcagacaatcgtcattacaccttttatgtgtggaagagggtgttccagaggtatgagaccgtgaagtacctgctggtgcctgcctatatttttgcgggatggagtatcgctgactcgctgaagagtaaatcgatcttttggaatttgatgttcttcatctgtctgttcaccgtgatcgtaccccagaaattgctagagttccggtatttcatactcccatacgtgatatatcggctgaatattcccttgcctcctacctcgagactaatatgcgaactgtcatgttacgctgtagtgaatttcatcactttttttatttttctgaacaagacatttcagtggcccaattctcaggacattcaaagatttatgtggtag

SEQ ID NO: 214950 - DNA, 1479 bp, synthetic construct
  misc_feature 1..1479: note = Description of Artificial Sequence: Synthetic coding sequence
  source 1..1479: mol_type = other DNA
atggccgctggtgagaggtcatggtgcctgtgtaaactgctccgctttttctactcgctcttttttcctgggctgatcgtgtgcggcacattatgcgtttgtcttgtaattgtactgtgggggatccgcttactgctccagcgcaaaaaaaagttggtgtcaacttctaagaatggtaagaatcaaatggtgatcgctttcttccacccctactgcaacgccggtggtggaggcgagcgcgttctgtggtgtgccctgcgcgctttgcagaaaaagtaccctgaagctgtttacgttgtgtacaccggtgacgttaatgtgaatggccagcagattctggagggtgccttccgcaggtttaatattagactgatccatcctgtgcagtttgtattcctgagaaaacggtacctcgtcgaggactcactgtaccctcatttcactttgctcgggcagtctctgggttccatctttctcgggtgggaagccctgatgcaatgcgttcctgatgtatacatcgatagtatgggttatgccttcactctgcctctgtttaaatatattggaggctgtcaagtggggagttatgtccactatccgaccatatctacggatatgctgtccgtcgtgaagaaccagaacattggattcaacaacgccgcattcataacccggaacccattcctttccaaagtgaagcttatttattactacctgtttgcatttatatatggactcgtgggctcttgtagtgacgtcgtaatggtaaattcctcttggacacttaatcacatcttatccctatggaaggtcggaaattgtactaacatagtctatcctccctgtgatgtgcaaaccttcctggacatcccactgcatgaaaaaaaaatgacaccaggccaccttctagtatcggtaggccagttcagacccgaaaagaatcatcctcttcagattagggcgttcgccaagttgctgaacaagaagatggtggagagtcccccttccctgaagctcgttcttatcggagggtgccggaacaaagatgacgagctaagggttaatcaactgcggagactttctgaagatctgggggttcaagagtatgttgagttcaaaattaacatccctttcgacgagttgaagaattacctatcagaagccaccattgggttgcacacaatgtggaacgaacactttggtataggcgtggttgaatgcatggccgcagggacaatcatcctagctcataacagcggaggccctaaactcgatatcgtagttccccacgagggggatatcacgggcttcttggccgagagcgaggaggactatgctgagaccatcgcacacattctctccatgagcgcagaaaagcggctgcagattcgaaaaagcgcgagggccagcgtgtctaggttcagcgatcaggagtttgaggttacatttctgagttcggtggaaaagctgttcaagtag

SEQ ID NO: 214951 - DNA, 111 bp, synthetic construct
  misc_feature 1..111: note = Description of Artificial Sequence: Synthetic coding sequence
  source 1..111: mol_type = other DNA
atggctgctggagaaaggtcttggtgtctatgcaaattactgcgcagctgcggagtttatgggagctggcacaattacccttgtactcagttcggaggccctaaagcttag

SEQ ID NO: 214952 - DNA, 1467 bp, synthetic construct
  misc_feature 1..1467: note = Description of Artificial Sequence: Synthetic coding sequence
  source 1..1467: mol_type = other DNA
atggccggtaagggcagcagcggaaggcggccactcttgctgggccttttggtcgctgtcgcaaccgtgcacttagttatctgtccgtacactaaggtggaagaatcctttaacctccaggctacgcacgaccttttgtaccattggcaggaccttgagcagtatgaccatctggagtttcctggcgtcgtacccaggacattcctggggccagtggtgattgcagtgttctcaagtcccgcagtctacgtgctgagcctcctcgagatgagcaaattttatagtcaactaattgttcgaggagtgctgggacttggcgtcatctttggcctgtggaccctgcagaaggaggtgcgcagacatttcggcgcaatggtcgctaccatgttctgctgggtgacggcaatgcaattccacctgatgttttactgcaccaggacgctgcctaacgtgcttgcgctgccggtggtcctcttagccctggccgcttggctgaggcatgagtgggcaaggttcatctggctgtcggcgtttgctataatcgtgtttcgtgtggaactatgtttgttccttggtcttctcttattgcttgcattagggaatcggaaagtcagtgtggttagagctttacggcacgccgtgcccgcaggtatcctgtgtctagggctcactgtcgctgtggattcgtacttttggcggcaactgacatggcctgaaggcaaagttctatggtataatactgtgcttaacaaatcttctaattgggggacaagtcctttgctctggtacttctatagcgcgctgcccagagggctgggatgctccctcttatttatacctcttggcctggttgaccgacggacacacgctcctacggtgctcgccctgggcttcatggccttgtatagtctgttacctcataaagagttgcgcttcattatttatgcgtttcccatgttgaatattacagctgcaagagggtgctcatatctgctgaataactataagaagtcctggctctacaaggccggatctttgctcgtgatcggacatcttgtggtgaatgccgcatacagtgctactgctctctacgtatcccattttaactaccccggtggtgtagcgatgcagaggctccaccagctcgttccgcctcagaccgatgtcctcctgcatatagacgttgccgctgcacagactggagtctctcgatttctccaagttaactccgcctggaggtacgacaaaagagaggatgtgcagccagggacagggatgctcgcctacacacacatcctgatggaggctgctcccggactcctggcgctgtaccgcgacacccaccgggtgctcgcttcagtcgtcggcactaccggggtgagcctaaacttgactcagctccccccattcaatgtgcatttgcagactaagcttgtgctgctggagcgcctgccccgtccttcctag

SEQ ID NO: 214953 - DNA, 987 bp, synthetic construct
  misc_feature 1..987: note = Description of Artificial Sequence: Synthetic coding sequence
  source 1..987: mol_type = other DNA
atgccgcctacacagccacgcccttgcatgtgcccgataagtactacgcaggtggcctcccaatgcaggggctgcacgtcttggtgcccacccaggcagacctctttctgtaccctgacatggcagccccctcgccaggtatgtctgggctttagcaagagtacagcaccagggggaaccactagagggcgaatgtgctctaggggccaggcttgttggcatacccatacgagctcctggagacgcccatgggccccaggtcccctgcagggacacacgccaggcccaggacagagacgaggggaccaccggtgtgaatcagaacccgaccccacagccccactacagaggcctcccgctgataaagctggagcttctggagaagccccacccgctgtgctgagaggcactcggcaaccctctgctgccactggactccccggtgccgtaattacaacaagcttttggcataattcctcaacaatcatgacaatccagcgatcaaaatcaaaagactgggcccctgcctcagaccgtcaccagactcgctctagggcttcctctacagcttcagccggagcactgagtactaaggaacgtggagcacaggtgctgctggctcccagggaaccactccccagggtgatggtggcgagctcaggtctacctgccggagattgccggcctgatcaggtgccgtttatgactaatcaggagcaaagggcacacccgggtacgtgtctgccagggggacacgtctgcccagcacacccaggtggcgctgtgttctggcagcaccccactctggctgctagggggcctctgggggcaccaaagactgcgcctcctctgagaggagaccatggcggtccaggcaggactcctcccccttggtgtcatcactgtaacttctgcattcataggcacccaatctctattacagacaagatccttggcgacaaacacatccagaagggaatgcgctag

SEQ ID NO: 214954 - DNA, 2865 bp, synthetic construct
  misc_feature 1..2865: note = Description of Artificial Sequence: Synthetic coding sequence
  source 1..2865: mol_type = other DNA
atgaacaatcaccagttagagctggccaaacagctgcacaaagaggggcatcttttttactgcacctgtagagtgctgacatgccccggacaggctaagagcatcgctagtgccccagggaaatgtcaggactctgccgctcttacctctacggctttctcaggcctggacttcggcctgctatccggatacctgcataagcaagctctggtcacagctacgcacccaacatgtaccctcctttttcctagttgtcatgcttttttccccctgcccctgacacctacactgtataagatgcacaaaggttggaaaaactactgcagccaaaaatccctgaatgaagccagcatggatgagtacctgggaagtcttggtctttttcgtaagctgactgctaaagacgcctcttgtctctttcgtgctatttcagagcagttgttttgctctcaggttcaccatctggagatccggaaggcgtgtgtgtcttatatgcgcgaaaaccagcagaccttcgaatcttacgtggaggggagcttcgaaaaatacctggaaagacttggagacccaaaggaatccgcagggcagctggaaattagggctttgtcactgatttataatcgggatttcatcctgtatcggttccccggaaaaccccctacttacgttaccgataacggatacgaagataagattcttttgtgctacagtagctcaggccactacgacagcgtgtactccaaacaattccagagctccgccgctgtttgccaagcggtattatacgagatcctttacaaagatgtcttcgtggtggatgaggaagaactcaagacagccatcaagttattcagaagcggctctaaaaagaataggaacaacgcagtaactgggtccgaagacgcgcacacggactacaaaagcagcaaccaaaaccgcatggaggagtggggggcttgctataacgccgaaaacattcctgaagggtacaacaaaggaacggaagaaaccaagtcacctgagaatccaagcaagatgccgtttccatacaaggtactgaaagccctggacccagagatctaccgcaacgtggaattcgatgtgtggctggattcaagaaaagaactgcagaaaagtgactacatggagtacgcaggacggcaatactacctcggtgacaaatgtcaggtctgcctggagagtgagggacgctactacaacgcacacatccaggaagtgggaaacgaaaacaacagcgtaactgtatttatcgaggaactcgccgagaagcatgtagtgccgcttgcgaacctgaaacccgtgactcaggtcatgagtgtgcccgcatggaatgcaatgccgtccagaaagggcagaggctatcagaaaatgccagggggatacgtccccgagattgtgatcagcgaaatggatatcaagcaacagaagaagatgttcaaaaaaattcggggaaaggaggtgtatatgactatggcatacggaaaaggggatcccctgcttccacccaggctccagcattcaatgcattacggacatgatccccctatgcactacagccagacagcaggaaacgtcatgagcaatgaacattttcacccacagcacccaagccccagacagggacgtgggtatggcatgccacggaattcctctcgcttcatcaatcgccacaacatgccagggccaaaagtggatttttaccctggcccaggaaagagatgttgtcagtcgtatgataacttttcttatcggtctcgttctttccgccgatcacatcgccaaatgtcgtgtgtcaacaaagaaagtcagtacggctttacgccagggaacgggcagatgcctcggggtctcgaagagacaatcaccttttacgaggttgaggagggggatgagacagcttaccccacacttccaaatcatggtggtccgtcaaccatggtacctgccacttccggctattgtgtcgggagacgagggcatagcagtggcaagcagacgctcaatctggaggaagggaacgggcagtctgaaaatggccgatatcacgaagagtatctgtatcgggcagaacccgactatgagacttcaggagtgtacagcactacagcaagtaccgccaacctgagccttcaggacagaaaatcctgcagcatgagtccgcaggacactgtcacaagctacaattatccgcagaagatgatggggaatattgctgccgtcgctgcgtcctgtgccaataacgtccccgcaccagtactctctaatggcgctgcagctaaccaggctatatctaccacctctgtgtcatcccagaatgctatccagcctttgttcgtgtccccaccgacccatggaagacccgatacaaaggttcttcaatattatttcaatctcgggctccagtgctattaccacagttactggcactcaatggtgtatgtgccacagatgcagcagcagctccacgtggagaattacccagtctataccgagccacccctggtagatcaaaccgtgcctcagtgttacagtgaggttcggcgtgaggatggaatccaagcagaagcctccgccaacgacacattcccaaatgctgactcaagcagcgtaccccatggcgctgtgtactatcccgtgatgagcgacccctacggccagccccctcttcctggcttcgacagctgcctccctgtcgtgccagactactcctgcgtccctccatggcaccccgttggcacagcatacggcggttcaagccagatccacggcgcaataaatccgggacccattggatgtatcgcaccatcccccccagcatcacactatgtgccccagggcatgtag

SEQ ID NO: 214955 - DNA, 498 bp, synthetic construct
  misc_feature 1..498: note = Description of Artificial Sequence: Synthetic coding sequence
  source 1..498: mol_type = other DNA
atgaaatgtgttttcgtgaccgttgggaccacctccttcgacgatttgattgcttgcgtgtctgctcccgactcccttcagaagatagagtcgttaggctacaacaggctcatactccaaatcggtcggggaactgtggtccccgagcccttttctacggagagcttcacacttgatgtgtacaggtacaaggattccctgaaagaggacatccagaaggccgaccttgtcatttcccatgcaggggcaggtagttgcctggaaaccctggaaaaaggaaagccccttgtagttgtgatcaacgaaaaactgatgaataaccatcagctggagctggccaaacagctccataaagaggggcatcttttctactgcacatgttctaccctgcccggactgcttcaatccatggacttgtctacactgaagtgctacccgccaggccagcctgagaagttcagtgccttcctggataaggtcgttggcctgcagaaatag

SEQ ID NO: 214956 - DNA, 3414 bp, synthetic construct
  misc_feature 1..3414: note = Description of Artificial Sequence: Synthetic coding sequence
  source 1..3414: mol_type = other DNA
atgaaatgcgtcttcgttacagtgggaactacctcgtttgacgatctcatagcttgtgtatcagccccagactctctgcagaagatcgagagcctggggtacaaccgtttgattctgcaaattggcagaggcactgtggtccccgaacccttttccactgagtcctttaccttggatgtttacaggtataaggacagtttaaaagaagacattcagaaagccgacttagtgatcagtcatgctggcgcaggatcgtgtctcgagacgttggagaagggaaaaccactggtcgtggtcatcaacgagaaacttatgaacaatcatcagttggagctcgccaagcagctgcacaaggaaggccacctcttctattgtacttgtcgtgtgttaacttgccctggccaggccaaaagtatcgccagcgctccgggtaagtgccaggactctgccgcattgacctccacagctttcagtggcttggatttcggactcttaagcggatatctacacaagcaggccttagtcacggccactcatccaacctgcacactgttgtttcctagctgccatgccttctttcccttgcctttgactcccactctgtacaaaatgcacaagggctggaaaaactactgttctcagaagagtctgaatgaggcaagcatggatgaatatctcgggtccctgggattattccgtaaactgacggccaaagatgcctcgtgtctgtttagagcgatttctgagcagctgttttgctctcaggtacatcatttggagatcaggaaggcatgtgtttcctacatgcgcgaaaaccagcagacattcgaaagctatgttgaaggctctttcgaaaagtacctggaacggctaggcgatcctaaagagtccgccggtcagctagaaatccgcgctctcagtttaatttataatagggatttcatcttatatcgattcccaggcaagcccccaacttatgtcaccgacaacggatacgaggacaagatactactgtgctacagttcctctggccactatgactcagtatatagcaagcagttccagagcagtgcagctgtgtgccaagccgtgctctacgagattctatacaaagatgtattcgtcgtagatgaagaggaacttaaaaccgcaatcaagttgttcagaagcggcagtaagaaaaatcggaacaacgctgtcacaggtagcgaggacgcgcacaccgattataaaagctctaaccaaaatagaatggaagagtggggagcctgctataatgctgaaaatattcctgagggttataataagggcacagaggagacaaagtcccctgagaaccctagcaagatgccatttccgtacaaggtgttaaaggcactcgatccagagatctatcggaatgtggagttcgatgtatggctcgacagtcgtaaagagctccagaagtcagattacatggagtatgccggaaggcagtattaccttggcgataaatgccaggtgtgcctggagtccgaaggccgttattacaacgcccacattcaggaggtgggaaatgaaaataattcagtgaccgttttcatcgaggaactggccgagaagcatgtagtgcccttagccaatctaaagccggtcacccaggtgatgagtgtgcctgcctggaacgctatgcctagtcgcaagggtcggggttaccagaagatgcctggcggatacgtgcctgagatcgtcatcagcgaaatggatataaaacagcagaagaaaatgtttaagaagattagaggcaaagaggtttatatgaccatggcatacggaaaaggtgatcctctgctaccacccaggttgcaacacagtatgcactatggccatgacccacctatgcactacagccagacagccggaaacgtcatgtcgaacgaacatttccaccctcagcatccctctcctaggcaaggcagaggctatggcatgcctcgcaattcaagcagattcatcaatagacacaatatgccgggacctaaggtcgatttttatccaggtcccggaaagaggtgctgccaatcctacgacaacttcagttacaggagccgcagcttcagaaggtctcacagacagatgtcttgtgttaacaaagagtcacagtatggcttcacccctggcaatggccagatgcctagaggtctggaggaaactatcactttctatgaagtggaagaaggtgatgagactgcctacccaactctaccaaatcacggaggaccatccacaatggttccagccacatcaggctattgcgttggaagaagaggccatagttccggcaagcagacattaaacctggaggagggcaacgggcaatccgagaacggtcggtaccatgaggagtatctctaccgcgcagaacctgactacgagacctccggcgtttatagtaccacagccagcacagccaacctaagtcttcaggatcggaaatcctgctctatgtcaccgcaagacacagtaacgagttacaactatccccagaagatgatgggcaacatcgcagccgtggctgcttcttgtgccaacaacgttcccgcaccagtactgtcaaatggcgcagcagccaaccaggcgataagtaccactagcgtaagcagtcaaaatgcgatacaaccactgtttgtgagtcccccaactcacggcagacctgttatagctagcccttcctacccttgtcactccgcaataccgcatgctggcgcttcactgccacctccacccccaccaccccctcccccaccaccccctcccccaccaccacctccgccacccccacctccccctcccccagcactcgacgtgggggagactagcaacttacaacctcccccaccactgccaccacctccctactcctgtgacccctcaggatccgacctgcctcaagacacaaaggtccttcagtattactttaatctcggactgcagtgctactatcattcctactggcactccatggtatacgttccccagatgcagcagcaacttcatgtcgaaaactacccagtatatactgagccaccattagtcgaccaaactgtgccccagtgttattccgaggtgcgaagagaggatgggatacaggcagaggcaagcgccaacgacacatttcccaatgcggattcctcttccgtgccacatggcgctgtatactacccggtgatgtccgacccctacggacagcctcccctgcctggcttcgactcatgcctgcctgtcgttccagactattcatgtgtcccaccgtggcaccccgttggcactgcctacggcggatcctcgcagattcatggggctatcaacccgggacccattggctgcatcgccccatctccacctgcctctcattacgtcccacaaggaatgtag

SEQ ID NO: 214957 - DNA, 651 bp, synthetic construct
  misc_feature 1..651: note = Description of Artificial Sequence: Synthetic coding sequence
  source 1..651: mol_type = other DNA
atggtgtgtgtactagtcctcgctgccgctgccggagctgtcgcagtgtttctgatcctgaggatttgggtagtgttgaggtcaatggacgtaactccaagggagtctctgtccatcctggtcgtcgctggaagcggcggacacactactgagatcctccgtcttcttgggtcgctatccaacgcttacagccccaggcactatgtgattgctgatactgatgagatgagtgcaaacaaaatcaactcattcgaactagaccgcgcagaccgcgatccgagcaacatgtacacaaagtattatattcataggattcccagatcacgtgaagttcaacagtcatggccttcaaccgtctttactactctgcacagcatgtggctgtcattccccctgattcaccgggtgaagcctgatctggtgctctgcaatggaccgggaacttgcgtcccaatctgcgtgtccgccctgcttcttgggatcttaggaatcaagaaggtcataattgtgtacgtagagagtatttgcagagtagagactttgagtatgagcgggaagattctgtttcacctcagcgactattttatcgtccagtggcccgctctgaaggaaaagtacccaaagtcagtctacctgggcagaattgtctag

SEQ ID NO: 214958 - DNA, 972 bp, synthetic construct
  misc_feature 1..972: note = Description of Artificial Sequence: Synthetic coding sequence
  source 1..972: mol_type = other DNA
atgccgctcttaaagcttgtgcatggctcccctcttgttttcggggagaaatttaagcttttcacattggtgtctgcctgtatccctgtgttcaggctggcacgccgacggaaaaaaattctcttctactgccactttcctgacctgttgctgaccaagagagattctttccttaaaagactgtacagagcacccattgattggattgaggagtacacaacggggatggctgactgcatcctggtcaactctcagtttacagccgcagtcttcaaagagacctttaaaagcctgagccatatcgatcctgacgtactctacccttctctcaacgtgacctcattcgatagcgtggttcccgaaaaattggacgatcttgtacccaagggaaagaaattcctactgctcagcattaacaggtacgagaggaagaagaacctgaccctggccctggaagctctcgttcaactgcggggacgccttacctcgcaggactgggaacgggtacaccttatagtggctgggggatatgatgaaagagtgctggaaaatgtggagcactatcaggaattgaaaaagatggtgcagcaaagcgacctcggtcagtatgtcacgttcctgagaagttttagcgacaaacagaagatcagtctcttgcactcctgcacatgtgtcctgtacaccccctctaatgaacactttggaattgtgcccctcgaggcaatgtacatgcagtgcccagtgatcgcagtgaattcgggtggcccattggagtcaatcgaccactccgtaaccggtttcctgtgcgagcctgacccggtgcatttttccgaagccatagagaagttcatcagagagcccagcttaaaagcaacgatgggcttggccggtagggctagagtaaaggaaaagtttagtcccgaggccttcacagagcagctgtacagatatgtcacaaagctgttggtgtag

SEQ ID NO: 214959 - DNA, 1251 bp, synthetic construct
  misc_feature 1..1251: note = Description of Artificial Sequence: Synthetic coding sequence
  source 1..1251: mol_type = other DNA
atggctgaggagcaaggtcgggaacgagatagtgtgcctaagccaagtgttcttttcctccacccagatctgggagtcggtggcgcagaacgactggttttagacgctgccttggccctgcaggccagaggctgctcggtcaagatatggacagcccactacgaccctggacactgcttcgcagagtctagagagctgccagttcgttgcgccggagattggctgcccagaggcttggggtggggcggtaggggcgctgccgtgtgtgcctatgtgcggatggtttttctggccctgtacgtgctttttttggccgatgaagagtttgacgtggtggtgtgtgaccaggtcagtgcctgcatccccgtgtttagactggccaggagacgcaagaagatcctgttttattgtcactttcccgatctcttgctgacaaagagggatagcttcctgaaacggctctatcgagccccaattgattggatcgaggagtatactactggcatggcagattgtatactggtgaattctcagttcactgcagcagtgttcaaggagacattcaaatccctgagccatatcgatccagatgttctttacccatctttgaacgtcactagctttgactctgtggtgcctgagaaattagacgacctcgtgcccaaaggcaaaaaattcctacttctcagtatcaacaggtacgagcgaaaaaaaaacctcactctcgccctggaagccctggtgcagttgcgtggcaggctcaccagccaggattgggaaagggtgcacctgatagttgccggtggttacgatgagcgcgtcctcgagaacgtggagcattaccaggagctgaaaaaaatggttcagcaaagtgatctgggccagtatgtgacattcctcaggtctttttccgataaacagaaaattagcctgcttcactcctgtacttgcgttttatacaccccttccaacgaacatttcggcattgtgcccctggaggccatgtacatgcagtgtccagtcatcgcagtgaattcggggggacctttagagtctatagatcatagcgtcaccggtttcctgtgcgaaccggatcctgtgcacttcagtgaggccatcgagaaattcatcagagaaccatccttgaaagccaccatgggccttgcaggtcgtgccagagtcaaagagaagttctctccagaggcttttaccgagcaactgtatcggtatgtgaccaaactcctggtgtag

SEQ ID NO: 214960 - DNA, 1317 bp, synthetic construct
  misc_feature 1..1317: note = Description of Artificial Sequence: Synthetic coding sequence
  source 1..1317: mol_type = other DNA
atggcagctggactgcgcaagcgcggtcgatccgggtccgcagctcaggccgaaggactgtgtaagcagtggctacagagagcgtggcaggaacgacgccttctgcttcgggaaccgcgatatacactcctcgttgccgcttgcctgtgtttagccgaggtgggcattaccttttgggttatacatcgagtggcttacaccgaaatcgattggaaagcttatatggctgaggtggagggcgtcattaacggaacatacgattacactcaattacagggagacaccggacccctggtttatccagctggcttcgtctacatcttcatgggcttgtactatgccacttctcggggaaccgatattagaatggctcagaatattttcgcagtcctgtatctcgctactctcttattggtatttctgatctaccatcagacctgtaaagtcccaccctttgttttcttcttcatgtgctgcgcctcataccgggttcacagcatctttgtgctaagactgtttaacgaccccgttgcgatggtgctgctgttcctctctataaatctgctcctggcgcagcgatgggggtgggggtgttgcttcttcagtttggctgtatcagtgaagatgaacgtactcctcttcgcgccaggccttctcttcttgctgcttacacagtttgggttcaggggagctttgccaaagctgggtatctgcgctgggttacaggtggttctggggctccctttcctgttagaaaatccgtctggatacctgagcagatcttttgacctgggtcgtcagttcctctttcattggacagtaaactggcgttttctgcccgaagcactctttctgcatcgagcttttcacctcgcccttctgactgcacacctgaccctgttgttactgttcgcactgtgccggtggcaccggaccggcgaatccatactgtctctcctcagggaccctagcaagagaaaggtaccaccacagcctcttacccctaaccaaatcgtctccaccctgtttacttctaattttatcggaatatgttttagtcgtagccttcattatcagttctatgtgtggtatttccataccctcccatacctcctctgggccatgccagccagatggcttacacatcttctgcgcttactggtgctggggctgattgagctctcatggaatacatacccctccacctcatgttcttcagctgccctccacatttgtcatgcggttatactgctccagttatggcttggaccacagccgttccccaagagcactcagcattccaagaaagcccactag

SEQ ID NO: 214961 - DNA, 1149 bp, synthetic construct
  misc_feature 1..1149: note = Description of Artificial Sequence: Synthetic coding sequence
  source 1..1149: mol_type = other DNA
atggcggctgctcggctggcccgagcagctcccgctgcagccggagccgcactccacgctgctggaggccgtctgccactaccagggggaggcggacaccacttgttgggccactcacagggaggtatgtaccccgctggcttcgtctacattttcatggggctctactatgctacgagccggggtaccgacatcagaatggctcagaatattttcgcggtgttatatcttgcaactctgctgcttgtcttcctgatctatcatcagacatgcaaggtgccaccatttgtgttttttttcatgtgttgcgcatcatatcgcgttcattccatttttgtgctccgcttatttaacgatcccgttgccatggttcttctcttcctttctatcaatctgctcctggcgcagaggtggggctgggggtgttgctttttttcactagccgtatctgttaagatgaacgttctgctctttgcacccggtttattatttttactgctgacccagtttggctttcgcggagcgcttcccaagctgggcatatgtgctggcctgcaagtagtcctgggtcttcctttcctcctggagaacccctctgggtatctgtcccggtctttcgatttaggaaggcagttcttgtttcactggacagtaaactggaggttcctgcctgaggctctctttctgcaccgcgcttttcacttagctctcctcacggcccacctgactctacttctgctcttcgccctctgcagatggcataggacaggcgaaagcatcctctctctattaagagacccgtccaagcgtaaggtgcctccacaaccattgaccccaaatcagatcgtctcaacactgttcacgtcgaactttatcgggatctgtttctctagatctctgcactaccagttctacgtatggtatttccacaccctcccctatcttctctgggcaatgcccgctcgctggttgacccacctacttcggctgttggtgctcggcctgatagagctgagttggaacacttatccttctactagttgctcctccgctgccttgcatatttgccacgctgtgattttgctgcagctgtggttgggtcctcagccttttcccaaaagtactcaacattcaaaaaaggctcattag

SEQ ID NO: 214962 - DNA, 1530 bp, synthetic construct
  misc_feature 1..1530: note = Description of Artificial Sequence: Synthetic coding sequence
  source 1..1530: mol_type = other DNA
atggagaagtggtatctaatgaccgtcgtcgtgctgattggactgactgtgaggtggacggtaagccttaatagctacagcggcgcagggaagccccctatgttcggggattatgaggcgcagcgacattggcaggagattacctttaacctccccgttaagcagtggtatttcaattcctcggacaataatctgcaatattggggcctcgattatccccctcttactgcgtaccatagcctgctttgcgcttatgtggccaaattcatcaaccccgactggatcgccctgcacaccagccggggttatgaatctcaggcccataaactcttcatgcggaccaccgtcctgatcgcagatctgctgatctacattcccgcagtggttctgtattgctgttgtctgaaagagatttccactaagaagaagatcgcgaacgcactttgcatactcctctatcctggattgattctgattgattacgggcactttcaaaacatatataattctgtgtcgctgggcttcgctttatggggtgtcctggggatctcatgcgactgcgatcttctgggttcattggccttctgcctggcaattaactataaacaaatggaactctaccacgcactcccttttttttgctttcttctggggaagtgtttcaagaaaggacttaaaggcaaaggtttcgtgctgctggtgaaattggcttgcattgtcgtcgcgtctttcgtcttatgttggctgcctttcttcacagagcgtgagcagacactgcaggtattgaggcgattgttcccggtcgatagaggcctgttcgaagataaggtggcgaacatctggtgcagctttaatgttttcctgaagataaaggacatcctgcccagacatatacagttgataatgagcttttgcagtacctttctaagtctcctgccagcgtgcattaagttgattctgcagccctcttccaagggctttaagtttactctcgtatcctgcgctctatctttttttctgttcagctttcaggtccatgaaaaatctatcctgcttgtctctttgcctgtctgcctggtgctgtctgagattccattcatgtctacatggttcctgctcgtctccaccttctcaatgctgccactgctcttgaaggacgaactcctcatgccttctgtggtcactactatggcctttttcatcgcatgcgtaacctcgttcagcattttcgaaaagacgagtgaggaagaactccagttgaaaagcttctccatttctgtaaggaaatatctgccctgcttcacatttctctcccggatcatccagtatctattcttgatctcagttattactatggtcctgcttacactgatgactgtaaccctcgacccgcctcaaaaactgcccgacctcttttcggtgctggtttgtttcgtttcatgcctcaattttctgttctttctggtctatttcaacattatcatcatgtgggacagtaagagtggcagaaaccagaagaagatttcttag

SEQ ID NO: 214963 - DNA, 1524 bp, synthetic construct
  misc_feature 1..1524: note = Description of Artificial Sequence: Synthetic coding sequence
  source 1..1524: mol_type = other DNA
atggagaaatggtacctgatgactgtcgtcgtgctcatcggtttgaccgtcaggtggaccgtctctttgaacagctacagtggagctggcaagccacctatgttcggcgactacgaagcccaacgtcattggcaagagataacctttaacctaccggtcaaacagtggtattttaacagttcagataacaatttacagtattggggcctcgactatccccctctcaccgcctaccactctctgctctgcgcctacgtggccaagtttataaaccccgattggattgctctacacacaagcagaggctatgaatctcaggcacataagctgttcatgcgaacaacagtgctgatagcggatctcctgatctacatccctgctgtcgtcctctactgctgttgccttaaggaaatcagcacaaagaagaaaatcgctaacgcactctgcatcctgctataccctggccttatactaatagactatgggcattttcaatataattctgtgtccctgggctttgctttgtggggcgtgttggggatctcctgcgactgtgacctgttggggagtcttgcgttctgcctggccattaactataagcagatggaattgtaccacgcccttccctttttttgttttttactgggtaagtgttttaaaaagggcctgaaaggtaagggatttgtcctgctggtcaaacttgcttgtattgtcgtggcctccttcgtactttgttggctcccatttttcacggaacgggagcagacactacaggtcctgagacgactgttcccggtggaccgcggattatttgaagacaaggttgccaacatatggtgctcatttaacgtctttttgaagatcaaggatatcctgcccagacatatacagctcataatgtctttttgctccactttcttaagcctactccctgcttgcattaaacttatattgcagccgtcatctaagggtttcaaattcactctcgtttcctgcgccttgagcttcttcctgtttagtttccaggtgcacgagaagtcgattcttctcgtctcgttgcctgtatgtcttgttctgtccgagatccccttcatgtctacctggtttctgctcgtttccacatttagtatgcttcccctgctgttgaaggacgaactgctcatgccttctgtggttacaaccatggccttctttatagcttgcgtgacaagcttctctattttcgaaaagaccagcgaagaagagcttcaactcaagtcattctctatctcagtgcgaaaatatctgccgtgtttcacttttctctctcgtatcatccaatacctattcctgatatctgtcattactatggtgttattgaccctcatgacagttacactggacccacctcagaaactccccgacttgttttctgtgctcgtgtgttttgttagctgcctcaactttctgtttttcctggtctatttcaacataatcatcatgtgggattctaaatctggcaggaaccagaagaaaatctcttag

SEQ ID NO: 214964 - DNA, 765 bp, synthetic construct
  misc_feature 1..765: note = Description of Artificial Sequence: Synthetic coding sequence
  source 1..765: mol_type = other DNA
atggaactttatcatgccctacccttcttttgctttctccttggaaaatgtttcaaaaaagggctgaaaggcaaaggcttcgtgctcctggtcaagctggcttgcatcgtagtcgcgtccttcgtgctgtgttggcttccattcttcaccgagagagagcagaccctgcaggtccttagaaggctcttcccagttgaccgtggtctgtttgaggataaagtcgctaatatatggtgttcttttaacgtctttctcaaaataaaagacatacttccaaggcacatccagctcatcatgcgacccgtgtgccttgttctctccgagatccccttcatgagcacctggttcctcttggtgagtactttctccatgctgccactcctgcttaaggacgagctgctgatgccgtctgtggttactactatggctttttttatcgcttgcgttacctccttttctatcttcgagaaaacttctgaggaagagttgcagttgaagtcattctctatatccgttagaaagtatttgccgtgtttcaccttcttatcccggatcatccaatatctgtttctgatcagcgtcatcacaatggtgttgctgacactcatgaccgtcacgctggatccaccacagaagctgccagacctgtttagcgtgttggtctgcttcgtgtcctgccttaattttttgtttttcttggtatacttcaatattataatcatgtgggactctaaatccgggcgaaatcaaaagaaaatcagttag

SEQ ID NO: 214965 - DNA, 1581 bp, synthetic construct
  misc_feature 1..1581: note = Description of Artificial Sequence: Synthetic coding sequence
  source 1..1581: mol_type = other DNA
atggccgctctcacgatcgccaccggtacaggtaactggttctccgcgctcgccctaggtgtcacactgctgaagtgccttctgatccctacctatcacagtaccgacttcgaggtacaccgaaactggctggccatcacacactcattacccataagccaatggtattatgaagcaacatctgaatggaccctggattatcctccctttttcgcctggtttgaatatattttatcccacgtagctaagtatttcgatcaggagatgcttaacgtacacaatctgaattactcgagttccaggacgcttctctttcagcggttctctgtgatctttatggacgtgttgtttgtttacgctgtaagggagtgttgcaagtgcattgatggcaagaaggtggggaaggaacttactgaaaaaccaaagttcatcttaagtgtgctgcttttgtggaatttcggccttctgattgtggatcatatccacttccagtataatggctttctcttcggcttgatgttgctctctatcgcacggctgtttcagaagagacatatggagggggcttttctgtttgctgtcctactgcatttcaagcacatttatctgtacgttgctcctgcgtatggtgtttatctgcttcgcagctactgtttcactgccaacaagccggacggttccattaggtggaaaagctttagttttgtccgagtaataagcctcgggttggtcgtgttcttagtctccgcccttagtctcggcccattcctcgcactcaatcagctccctcaggtattctctcggctctttccttttaaaagaggtctgtgtcatgcttactgggcccctaatttttgggctctctataatgcactggataaggtcctgagtgtcattgggcttaaattgaagtttttagaccctaataacattccgaaggcgagtatgacttccgggctcgtgcagcagttccagcacaccgtgttaccatcggtaacgccgcttgccactttgatttgtacacttatcgcaatacttccgtccatcttctgcctctggttcaaaccccagggaccaagggggttcctgcggtgtctaacactctgcgcactttcatccttcatgttcgggtggcacgttcacgaaaaagccattctgctggccattttacctatgtctttgttgagcgttgggaaggccggagacgcatcgatttttctcattctgaccacaacagggcactactctctctttcctcttctatttaccgcacccgagctccctatcaagattctcctcatgttactgttcacgatctattccatttcctccttgaagacgctgtttagaaaggaaaaaccactttttaattggatggaaaccttctacctgctgggcctcgggccactcgaggtctgctgcgagttcgtctttcctttcacctcctggaaagtgaaataccccttcataccattgctgttaactagcgtctattgtgccgtgggcatcacatatgcatggttcaagctgtatgttagcgtcctaattgatagtgccattggcaagaccaagaaacagtag

SEQ ID NO: 214966 - DNA, 1404 bp, synthetic construct
  misc_feature 1..1404: note = Description of Artificial Sequence: Synthetic coding sequence
  source 1..1404: mol_type = other DNA
atggcagccctcacaatagcgaccgggaccgggaactggttcagtgccctggcactgggtgtgacgttacttaagtgcctgctcatccctacataccatagtacagactttgaggtgcatcgaaactggcttgctataacacactcgctccccatttcccagtggtattatgaggctactagcgaatggacgctggattaccccccattcttcgcgtggttcgagtatatcctgtcccatgtggctaagtacttcgatcaggagatgcttaatgttcataatctgaactactcatcttccaggaccctgctcttccaaaggttttccgtgatttttatggacgtgctttttgtttacgcagtgcgtgaatgctgtaaatgcatagatggtaaaaaagtgggcaaggaactgactgagaagcctaagtttatactctcagtgctccttctttggaactttggtctgctcattgttgatcacatccatttccagtacaatggatttttgtttgggctgatgttactgagcattgctcgtctgtttcagaaaaggcatatggaaggcgcttttctcttcgccgtgctcttgcacttcaagcacatctatctgtatgtggcgccagcctatggggtgtatttgcttaggagctactgctttaccgctaacaaacccgacgggagtatccgctggaaaagtttttctttcgtcagagtgatctccctgggactcgttgtgtttctcgtctcagccctcagtttggggcctttcctagctctgaatcagctgcctcaggtcttttcgcggcttttcccgtttaaacgcggattgtgccacgcttactgggcaccaaatttctgggctctgtacaacgcactggacaaggtgctgagtgttatagggctaaagttaaaatttctagacccgaataatatcccaaaggcctctatgacaagcggcctcgtccagcagttccaacacactgtgttgccgagcgtgacacccctggcaactttgatctgtaccctgatcgccatactccccagcattttctgcctgtggttcaagccacaaggccctcggggatttctcaggtgcttgacactctgtgccctctccagcttcatgttcggctggcatgtgcacgagaaggcaatcctgctcgccatactgccgatgagtctgctgagtgtcggcaaggccggagacgcctccatattcctgattttgactacgactggccattactcattgttccctttactcttcaccgcgccagaattaccgattaaaattctgctaatgttgctgtttactatctactccatctcttctctcaaaacactgttccggaggagctttacactggtggctcaggcaggcgttcagtggcatgacctgtcctag

SEQ ID NO: 214967 - DNA, 1323 bp, synthetic construct
  misc_feature 1..1323: note = Description of Artificial Sequence: Synthetic coding sequence
  source 1..1323: mol_type = other DNA
atgatgttagcctttcttgtgctctctaccggcatgttttgctcttcttctgctttccttcccagcagtttctgcatgtatacaacccttatcgctatgaccggctggtatatggacaaaacgtctatagccgtgctcggcgttgctgcgggagccattctgggctggccattctccgctgccctcggacttcccatcgcttttgatctcctagtgatgaagcaccgatggaagtccttttttcactggtctcttatggccttaatattgtttctggtgcccgtggttgttattgacagttattactacggcaagctggtaatcgcacccctgaacattgtgctatataacgtgttcaccccccacggccctgacctgtacgggacagaaccatggtatttctacctcatcaacgggtttctgaatttcaatgtagcttttgctctggcactgctggtgttacctcttaccagtctcatggagtatctcttgcagcgattccatgtgcaaaatcttggccacccctactggttgaccctggccccaatgtacatttggttcattatcttctttattcagccccataaggaggaacgattcctgtttcccgtgtatccgctgatatgtctttgcggagccgtcgctctcagcgcactgcagaagtgctaccatttcgtcttccagagatatcgcctcgaacattatacggtgacatcgaattggctggcactgggcaccgttttcctgtttgggcttctgtccttttccagaagtgttgcgcttttcaggggctatcatggccctctggatctgtatccggagttttaccgcatcgccactgatcccaccatccacactgtgcctgaggggcgtcccgtcaacgtgtgcgtggggaaggagtggtacagatttccttcatcttttctgcttcccgacaactggcagcttcaatttattccctccgagttccgtggacagctcccaaagccctttgcagagggtcctttagctactagaatcgtgccaacagatatgaacgatcagaatctggaggagccatcacgctatatagacatcagcaaatgtcactacctagtggatcttgatactatgagggagacaccacgggagccaaagtactcctccaacaaggaggagtggatctccctcgcatataggccctttcttgatgcgtcccggtctagcaagctgttgcgggcattctatgtgccctttctgtctgatcaatacaccgtgtacgtaaattacaccatccttaaacctagaaaggccaagcagatcagaaaaaagtcaggcggatag

SEQ ID NO: 214968 - DNA, 2535 bp, synthetic construct
  misc_feature 1..2535: note = Description of Artificial Sequence: Synthetic coding sequence
  source 1..2535: mol_type = other DNA
atggcaccaagacgcctcttactggtcggtgaggggaacttttcctttgcagccgctctctccgagaccttagatcaaagtactcagttgaccgccacatgcctgcagcgcccagcagagctggccagggatcccctggcgtgggaaaatcttcaatgcctgcgtgagaggggcatcgatgtgaggttcggggtagactgcactcagctcgctgacgtgtttgagctgcatgaacgggaatttgaccaaatctatttcatattcccccactgcggaagaaaagcaggagtggccaagaacagagaactcctggccaagttctttcagagctgtgccgatgttttagccgaagaaggcgaggtgcacgtcgcattgtgccgcggacagggcggaacacccgcagacaaaccacagagagagtggcacaactcttggcaagtcgtcgcaatggctgcactgggaggactgatactgagtgacgtataccctttctcatgtaaagctgtagcaggctataaatgcactgggtatcggtcgcaagacaagagcttccatgttgagggcgctctgaaccatatttttactcggtcactgccatttgaggggtctcagccgcgtatttttcggatcaagctcgggaaccaatggttttccttccccgagccggaggcattagtgggcaagctcaaccgattagcgatggcttcccgcggagccagacagcgccttaagggctccggtgctagctccggtgacaccgctcccgcagcagataaattgagagagctcctgggcagccgcgaagctggaggcgctgaacatcgaacagagctgagtggtaataaagcgggacaagtttgggcacccgagggaagcactgccttcaaatgcctccttagcgccaggctgtgtgcagcgctgttgtctaacatctccgactgcgacgaaacatttaactattgggagccaacgcactatctcatctatggagaggggtttcagacctgggaatactcacccgcatatgctatcagaagctacgcctaccttctgttacacgcctggccagcagcgtttcatgcgagaattttgcagacaaacaagattttggtgttctactttctgagatgtcttctggccttcgttagctgtatctgcgagctttatttctacaaggccgtttgtaagaaatttgggctgcacgtctcccgcatgatgctcgcctttttggttctttcgactgggatgttttgtagttcatctgcattcctcccaagcagcttttgtatgtataccacccttattgccatgactggctggtatatggataagactagcattgccgtcctgggtgtggcagccggagctatcctggggtggcccttctctgcagcattaggcctgccaatcgcatttgatctcctggtgatgaagcataggtggaagtcatttttccactggtcgctgatggcactcatactgtttctcgtgcctgtggtcgtaatagatagctattattatggcaagctcgtcatagcccctttgaacattgttctctacaatgtctttaccccacacggacctgatctgtacggaacggagccgtggtacttctacttgataaacggctttctgaacttcaacgtggcttttgcattagcactcctggtgctccctctaacttctctcatggagtacctgctgcagcgattccacgtgcaaaatctgggccacccatattggctcactcttgctcccatgtacatttggttcataattttttttatccagccccataaggaagagagattcctcttccccgtgtacccgctgatctgcctatgtggagccgtggccctgtcggccttgcagaaatgctaccactttgtttttcagcgataccggctagaacactatacggtcaccagcaattggctcgctcttggaacggtgttcttgttcggcctgctgtctttcagccgcagcgtcgccctttttcggggataccacggtcccctcgacctctatccagaattttaccgaattgccaccgaccctaccatccacacagtgccggaaggaagaccagtcaatgtctgtgtgggcaaggagtggtaccggttcccctcaagctttctgcttcctgacaactggcagctgcaatttattccttctgagttccgaggtcagcttcctaaaccgttcgcagaaggtcccctcgctacaagaattgtgccgaccgacatgaatgaccagaacctggaggaaccctcacgatacattgatatttccaagtgccactatctcgttgacctggatacaatgcgggaaacccctcgggagccgaagtactcttccaataaggaggagtggatttcattggcgtatagaccctttctcgacgccagcaggagcagtaagctgctgcgcgcattctacgtccctttcctgtctgaccagtatactgtgtacgtgaattacactattctcaaacctcgaaaggccaagcaaatacgtaaaaagagcggtggctag

SEQ ID NO: 214969 - DNA, 1344 bp, synthetic construct
  misc_feature 1..1344: note = Description of Artificial Sequence: Synthetic coding sequence
  source 1..1344: mol_type = other DNA
atgatgctggccttcctggtcctgtccacggggatgttctgctcatccagtgcttttctgccttcatctttctgcatgtatactaccctgattgctatgaccgggtggtacatggacaagacaagtattgctgttttgggcgtagcagctggcgctatcctggggtggccattctccgccgctttgggtctgcctattgcgtttgatctcctggtcatgaagcaccgctggaagtcattttttcactggagcttaatggccctgatcctgttcttagtgccggttgtcgtgatcgattcttactattacggcaagctcgtgattgctcctctgaatatcgtgttgtacaacgtgttcacaccccacggacccgacctgtacggaactgagccttggtatttttacctgattaacggttttcttaacttcaacgtggcatttgctctggctttattggtgctgcccctgacatccctgatggagtatctgcttcagagattccacgtacagaatctgggccatccctactggctcacgcttgcccctatgtacatttggtttattatctttttcatccagccacacaaggaggagcgattcctgttccccgtgtatccattgatctgtctgtgcggcgctgtagccctgtccgcattgcaacactcctttctttacttccagaagtgctatcacttcgtgttccagcgctacaggcttgagcactataccgtgacctctaattggttggcactgggtaccgtgttcttgttcgggctgctgtcattcagcaggtctgttgcactgtttcgagggtatcacgggcctctggacctctatcccgaattctatcgcattgccactgaccctactatacatacagtcccggagggacgcccagtgaacgtttgtgtgggtaaggagtggtaccgctttccgtcatcttttcttctgccagataattggcagctccagtttattccaagcgaattccggggtcagctgcctaaaccattcgctgaggggcctctggccactagaattgttcccaccgacatgaacgaccagaacctggaggaaccttcccgttatatagatattagcaaatgtcattaccttgttgaccttgatactatgagggagacgcctcgggaacctaaatatagtagtaacaaggaggagtggatttcactggcataccggccatttctcgatgcatccagaagctctaagttgctgcgggctttttatgtcccttttttaagcgaccagtatacggtgtacgttaactatacaatcctgaaacctcgaaaggctaagcaaatacgtaaaaagagcggcggatag

SEQ ID NO: 214970 - DNA, 1647 bp, synthetic construct
  misc_feature 1..1647: note = Description of Artificial Sequence: Synthetic coding sequence
  source 1..1647: mol_type = other DNA
atggttctcgcagagttatatgtatctgaccgagagggatctgacgccactggcgatggcaccaaagaaaaacccttcaagacgggcctgaaggctctcatgaccgtcggcaaggaacccttccccaccatatacgtcgactctcagaaggagaacgagcgatggaatgtcattagtaaatcccaattgaagaatattaagaaaatgtggcaccgggagcagatgaaatcagaatctcgggaaaagaaagaagccgaggattccctcaggcgggagaaaaatctggaggaggcaaaaaaaatcaccatcaaaaatgatccttccctacctgaaccaaagtgcgtgaaaattggggctcttgaagggtacagaggacagcgagtcaaagtgtttggttgggtgcatcggctgcggaggcagggcaagaacttgatgttcctcgttttgagagatggtaccggatacctgcagtgtgtattagcagacgagctgtgccagtgttataatggggtgctgcttagcacagagtcgtctgtcgcagtatatgggatgctcaatcttactccgaagggaaaacaagctccagggggacacgagctcagttgcgacttttgggaactgatcggactggccccagccggaggggctgataaccttatcaacgaagagtctgatgtggatgtgcagctgaacaaccggcacatgatgatcaggggagagaatatgtcaaaaatcctgaaggcaagatctatggtgacaagatgttttcgggatcacttctttgacagaggctattacgaggtaacccctcctaccctggtgcaaacacaagtcgaaggtggtgcaaccctatttaagttagactactttggagaggaagctttcctgacgcagtcttctcagctgtatctggagacatgtctgcccgctctcggcgacgtgttttgtattgcgcagtcatatcgcgcagagcagagcagaaccagaagacatttggccgagtatacccacgtggaggcagaatgcccatttcttacattcgatgacctgttgaataggctggaagaccttgtgtgcgatgtggtagaccgcattctcaagagcccagcaggctccatcgtgcatgaactcaatcccaacttccagccccctaagcggccttttaagagaatgaactattcagacgctattgtgtggctgaaggaacacgacgtcaagaaggaggacggtacattttacgagttcggagaggacattcccgaagccccagagaggttaatgaccgatactataaatgagccgatcttgctgtgtcgctttccggtagaaattaagtctttctatatgcagcggtgcccagaggattctcgcttgacagagagcgtggacgtgctaatgcccaatgtgggcgaaattgtcgggggaagcatgcggatcttcgattctgaggaaatcctcgccggttataagagggagggaatcgacccaactccctactattggtacacagaccaacgcaagtatgggacttgtcctcatggcggatacggactgggcttggaacgctttttgacatggatcctcaacagatatcacatcagagacgtgtgtctttatccccgattcgtgcaaagatgcacgccatag

SEQ ID NO: 214971 - DNA, 765 bp, synthetic construct
  misc_feature 1..765: note = Description of Artificial Sequence: Synthetic coding sequence
  source 1..765: mol_type = other DNA
atgacggtgggcaaagaaccgttccccacaatatacgtggacagtcaaaaggaaaatgaacgttggaatgtgatcagtaagtctcaacttaaaaacatcaagaagatgtggcatcgcgagcagatgaaaagcgagagcagagaaaagaaggaggcagaggactccctccggagggaaaagaatttagaggaggcaaaaaagatcacaatcaagaacgatccaagcctccccgagcccaagtgtgttaagattggagctttggaggggtacagaggccaaagagtcaaggtattcggctgggtccaccggctcaggcgacagggcaaaaatctgatgtttctggttctgcgcgatggaactggatacctgcagtgtgtgttggccgacgagctctgccaatgctataacggtgtgttattgtccacagaatcaagtgtcgcggtctacgggatgctgaatctgacacctaaagggaagcaggctcccggtggacacgaactttcatgcgatttttgggaattgatcggtctggctcccgctggaggggctgacaacttgatcaacgaggaatcagacgtcgacgtgcagctgaacaataggcatatgatgattcgaggcgagaacatgagcaagattcttaaggctcggagcatggtgactcgctgttttcgcgatcacttttttgatcggggatactatgaggtgtcaatgcacagttctgcattcgcaaagaacatgttcttcgctgtgctgaagctggaatag

SEQ ID NO: 214972 - DNA, 900 bp, synthetic construct
  misc_feature 1..900: note = Description of Artificial Sequence: Synthetic coding sequence
  source 1..900: mol_type = other DNA
atgtgtgaagattggtgttttcgagatcacttctttgaccggggatattatgaggtcaccccacccaccctcgtccagacccaggtcgagggtggcgcaaccttatttaagcttgattactttggagaagaggctttcctgacccagagctcgcaactgtacctggagacttgcctgcctgccctcggtgatgtgttctgtattgctcagagttaccgggctgagcagtctagaactaggcgccatttagctgaatatactcatgtcgaagccgagtgtccgtttctgaccttcgatgacctactaaaccggttagaggacctggtttgtgatgtcgtcgaccggatcttgaaatcccctgccggttctattgtgcacgagctgaatcctaattttcagccacctaaacggccattcaaaagaatgaattactcggatgccatcgtgtggctcaaggaacatgacgtcaagaaggaggacgggactttctatgagttcggcgaggatataccagaagccccagagagactgatgacagataccatcaacgagcccatcttactatgtcgcttccccgtggaaatcaaaagcttctatatgcagcgttgcccagaagatagcaggctcactgaatctgttgacgtgctcatgcctaatgtcggtgagattgttggcggatctatgcgcatctttgacagcgaagagatactggccggatacaaaagggaggggattgatccaactccctattactggtacactgatcaacggaaatatggaacttgtcctcacggcggatatgggctgggtctagaacggttcctgacctggattctcaacaggtaccacattagagacgtgtgtttgtaccctcggtttgttcaacgctgcactccctag

SEQ ID NO: 214973 - DNA, 525 bp, synthetic construct
  misc_feature 1..525: note = Description of Artificial Sequence: Synthetic coding sequence
  source 1..525: mol_type = other DNA
atggtgttggccgaactgtatgtgtcggacagggaaggctctgacgccaccggcgacggcacgaaggagaagccatttaaaaccggcctcaaggcccttatgaccgtgggcaaagagccgttccccacaatctatgtggatagtcagaaggaaaacgaaagatggaatgtgatctccaaatcacaattaaagaacataaagaaaatgtggcacagagagcaaatgaagagtgagtccagagagaagaaggaggctgaggattcactgaggcgtgagaaaaatctggaggaggcaaagaaaatcaccataaagaacgatccgtctctaccagaacccaagtgcgtgaaaattggcgctctggaaggttatcgtgggcagagggtaaaagtcttcggttgggtacatagactcagacggcaagtaagtgtgctgcagtggagctcgctagtgcatggcgagcagtgctgctcggtctggaatgccaagtcctatcccaagggccaagccggaagccgatggccttag

SEQ ID NO: 214974 - DNA, 1434 bp, synthetic construct
  misc_feature 1..1434: note = Description of Artificial Sequence: Synthetic coding sequence
  source 1..1434: mol_type = other DNA
atgctgggtgtgaggtgtctcttgaggagcgttagattctgctcttctgcccctttcccaaagcataaacctagcgcaaaactgtccgttagagacgccctgggggctcagaatgcatcgggagagcgaataaagattcagggatggattcgatcagtccgtagtcagaaagaggtcctatttctgcacgtgaacgacgggtcttctctggaaagcctacaggtggtggccgactctggactggactcccgcgagctgaacttcgggagctcagtggaagtgcaagggcagctgataaaatctccgagcaagcgccaaaacgtcgagttgaaagccgagaagatcaaggttattggaaattgcgatgcaaaagactttcctattaagtataaggagaggcaccccctggaatacctgaggcagtatccacacttcaggtgtcgcactaatgtgctggggagcatcctgcgcatccgatccgaggccactgcagcgattcatagcttcttcaaggactcaggattcgtgcacatacatacgcctattattacttcaaacgatagcgaaggggctggcgagctcttccagttagagccctcagggaagctcaaggtgcctgaagaaaactttttcaatgtgccagcttttttgactgtcagcggccaactccatctggaagttatgtctggcgcatttactcaagttttcactttcgggcctactttccgtgcagaaaacagccagagcaggagacatctggctgagttctacatgatcgaggctgagatcagctttgtagatagtctgcaggacctgatgcaggttattgaggaactcttcaaagctactacaatgatggtgctgagtaagtgtccggaggacgtcgagctgtgccataagttcatcgcaccgggtcagaaagatcgcctggaacatatgctcaaaaacaatttcttgataatctcgtacacagaagccgtggagatcctgaagcaggcctcccagaacttcacctttacacctgagtggggagctgatctgcggacggagcatgagaagtacctcgtaaagcattgcgggaacatcccggtgttcgtcatcaactatcctttgactcttaagccgttctacatgcgcgacaacgaggatggcccacaacataccgtggccgctgtggacctcctcgttcctggggtgggggagttgtttggaggcggattgcgagaggagagataccacttcctggaagagaggctcgcacggtctggactaactgaagtgtatcagtggtatctcgacctcagacgctttggctcggtcccacacggtgggttcggaatggggttcgagcggtacctccagtgcatactcggagtcgataatataaaagatgtgatccccttcccacgttttcctcactcttgcctgctctag

SEQ ID NO: 214975 - DNA, 942 bp, synthetic construct
  misc_feature 1..942: note = Description of Artificial Sequence: Synthetic coding sequence
  source 1..942: mol_type = other DNA
atggcccagagaaaaaatgccaagtcctctggtaattcatcttctagcggctccggatcggggtcaacttctgctggctccagcagtcctggagctcgccgagagaccaagcacggcggacataaaaatggccgaaaaggtggcttatcgggcacaagcttcttcacgtggttcatggtcatcgcactactgggcgtttggacctctgtggctgtcgtgtggttcgaccttgtggattatgaagaggtgttggggaaactgggcatctacgacgcagatggagacggcgatttcgatgtggatgatgcaaaagtcttgctggggttgaaggagcggtcaacctcggaaccggcagtcccacctgaggaggctgagcctcacaccgagccagaggaacaggtgcctgtcgaggctgagccacagaacatagaggacgaagctaaagagcagatccaaagtcttctacatgagatggtgcatgctgagcatgtggaaggagaggatctccagcaggaagacgggccaacaggcgaaccccaacaggaagatgatgaattcctcatggctactgacgttgatgatagattcgaaacacttgaacctgaagttagccatgaggagaccgagcacagctatcatgttgaggagaccgtatcacaggactgcaatcaggacatggaagagatgatgtccgaacaggagaatcccgatagttcggaacccgtcgtcgaagatgagcgactgcaccatgacactgacgacgttacatatcaggtatatgaggaacaggctgtgtatgaacccctggaaaacgaaggaatcgaaataacggaggtaactgcccctcccgaagacaaccctgtcgaggactctcaggtgatcgtggaagaagtctctattttcccggtcgaggagcagcaggaggtgccacctgacacgtag

SEQ ID NO: 214976 - DNA, 612 bp, synthetic construct
  misc_feature 1..612: note = Description of Artificial Sequence: Synthetic coding sequence
  source 1..612: mol_type = other DNA
atggcccagcgaaagaacgcgaagagttctgggaacagttcctcttccgggagcggttcagggtcaactagcgcaggaagttctagcccgggagcgaggcgggaaaccaaacacggcggacacaagaatggccgaaaaggaggactcagcgggactagcttcttcacatggtttatggtgatcgctctattaggcgtctggacttcagttgcagtggtctggttcgacttggtggactatgaagaggtcctggcaaaggccaaagactttcgatataatctgtctgaagtgctgcagggcaagctggggatctacgacgccgacggcgacggtgattttgacgtggatgacgctaaggtcttactgggtctgaccaaggatggatccaacgagaacatcgattctctggaggaagttttgaacattttagctgaggagagtagtgattggttttatggctttttatccttcttgtacgacataatgacccctttcgaaatgttggaggaggaagaggaagagagcgagacagccgacggcgtggatgggacgagtcagaacgaaggagtgcaggggaagacatgcgtgattctggacctccacaatcagtag

SEQ ID NO: 214977 - DNA, 2277 bp, synthetic construct
  misc_feature 1..2277: note = Description of Artificial Sequence: Synthetic coding sequence
  source 1..2277: mol_type = other DNA
atggcgcagcggaagaatgctaaatcttcagggaatagttcaagctctgggtccggcagtgggagtacatccgccggaagctcgtccccgggtgcccgtagggaaaccaaacacggagggcataaaaatgggagaaagggaggcctcagcgggacttcattctttacatggtttatggtaatagcgttgctgggtgtctggacatccgtcgccgtagtgtggtttgatctagtggattatgaggaggtgctggggaaattggggatctatgatgccgacggagatggtgactttgatgtcgacgacgccaaagttctgctaggtctgaaggaacggtccacgagtgagcccgcagtgccccctgaggaggccgaacctcacaccgagcccgaggagcaagtacctgtggaagcggaaccacagaatatcgaggacgaagccaaagagcaaatccaaagcctgctgcacgagatggtgcatgcagagcacgtcgagggtgaggacctgcagcaggaagacgggcctacaggcgaacctcagcaagaggacgatgagtttctgatggctacagatgtggatgaccgattcgaaacgctcgagcctgaagtgtcccacgaagagacggaacattcgtatcatgtcgaagagacggtctcacaagattgtaatcaggatatggaggagatgatgagtgagcaagagaatcctgactcctcggaacctgtcgtggaggatgagaggctacatcatgacacagatgacgtgacataccaggtgtacgaggaacaggcagtgtatgagcccttggaaaacgagggcattgagatcacggaggttactgcccctccagaggacaatcctgttgaggacagccaggtaatcgtggaggaagtgtctatttttcctgtcgaggagcagcaggaggtcccacccgaaacaaatcgcaagacagacgaccccgagcagaaggctaaggtcaagaagaagaagccaaagctcctcaacaaattcgataagacaataaaagccgagctggacgccgctgagaaacttcgaaagcggggtaaaatagaggaagccgtgaatgcgtttaaggagttggtcagaaaatacccacagtctcccagggctcgatatggtaaagcccagtgtgaggacgatctggcagagaaacggcgaagcaatgaggtgctacgcggagcaatagagacataccaagaggtcgccagcctgccggacgtccccgctgacctgttgaagctttccttaaaacgtcggtccgatcgccaacagttcctagggcatatgcgcggttctctcctgacattgcagagattagtacaactgtttccgaatgacacgagtctgaagaatgatttgggcgtgggttatctacttataggagataatgataacgctaagaaagtttatgaagaagtcttgtccgtcacacctaacgacggtttcgccaaggtgcactatggctttattctgaaggctcagaacaagattgccgagtccattccttacctaaaggagggcattgagagcggggaccccggtacagatgatggcagattttacttccaccttggcgacgcaatgcagagggttggcaacaaagaagcctataaatggtacgagcttggccacaaacgcggtcacttcgctagcgtgtggcagcgcagcctgtacaacgtgaacgggctcaaggcccaaccatggtggacccctaaagaaaccggatacacagaacttgtcaagtctctggagcggaactggaaactcattagagacgaaggtctggccgtgatggacaaggctaaaggtttgtttctacccgaagacgaaaacctgagagagaaaggggactggagccaatttaccctctggcaacagggtagaagaaatgagaatgcttgcaaaggggctcctaagacctgcacgctgttagagaagtttcccgagacgacagggtgtagaaggggtcaaattaagtactccatcatgcaccccggtacacatgtgtggccacacaccggacctactaattgtcggttgaggatgcacttaggccttgtgattcctaaggagggttgcaagattcgttgcgccaacgaaactaaaacctgggaagaaggaaaggttctgattttcgacgatagctttgaacatgaggtctggcaggatgcatctagtttcaggttgatttttatcgtcgacgtctggcatcctgagctaacaccgcagcagcggcgttccctccctgcgatctag

SEQ ID NO: 214978 - DNA, 678 bp, synthetic construct
  misc_feature 1..678: note = Description of Artificial Sequence: Synthetic coding sequence
  source 1..678: mol_type = other DNA
atggctgaagacaaggagactaaacatggcggtcataagaatgggaggaaagggggtttatctggaacctccttctttacatggttcatggtcatcgccctcttgggagtatggacttcagtggctgtggtgtggtttgacctcgtggattacgaagaagtactagcgaaggccaaagattttcgctataatttgagtgaggtcctccaggggaaactcggtatctatgacgccgacggagatggtgactttgatgtggatgacgctaaagtcctgttggagggaccaagtggagtcgcaaaaaggaagacgaaggccaaagttaaagaactgactaaagaagagctgaagaaagagaaggaaaagcccgagtcccgaaaagaaagcaagaatgaggagcgtaagaaggggaagaaggaggatgtgcgcaaggacaaaaaaattgcagatgctgaccttagcagaaaggagtcccccaaaggaaagaaggaccgtgagaaagagaaagtggaccttgagaaaagtgccaaaacaaaagagaatcggaagaagtctacaaatatgaaagacgtgtccagtaagatggcctctagagacaaagatgataggaaagaaagcagaagcagtacgagatacgcacatctcacaaagggaaacacccagaaaaggaacggttag

SEQ ID NO: 214979 - DNA, 1290 bp, synthetic construct
  misc_feature 1..1290: note = Description of Artificial Sequence: Synthetic coding sequence
  source 1..1290: mol_type = other DNA
atggctcagagaaagaatgcaaaaagctcaggaaacagttccagctccggttctgggagtggttcgacctctgctggttcatcttcccctggcgctaggcgagagaccaaacacggcggacacaagaatggcaggaaaggcggattgagtgggactagcttctttacctggttcatggtgattgccctccttggagtgtggacatcagtcgcagtggtgtggtttgacctcgttgactacgaagaggtgctaggaaagctgggcatctatgacgccgatggggacggagacttcgacgtagacgacgccaaggtgctgctggggcttaaagagcgcagtacaagcgagccagccgtgccgcctgaggaggccgagccacacaccgaaccagaagagcaggtcccagtggaggctgagcctcagaacattgaagacgaggccaaagagcaaatacagagtctcctccacgaaatggtccacgccgaacacgtggagggcgaggacttacagcaggaggatggtcccacaggggaaccccagcaggaagacgatgaatttctgatggccacagacgtggacgatcgatttgagaccctggaacccgaggtatctcatgaggagacagagcattcctaccacgttgaagagacggatagcagcgagccggtagtcgaagacgaacgcctccatcatgataccgacgatgtcacttaccaagtatacgaagagcaggcagtatatgaacccctggagaatgagggcattgagattaccgaggtgactgccccacccgaagataaccccgtcgaggatagtcaggtcatcgtcgaagaagttagcatttttcctgtcgaggagcaacaggaggtccctcccgaaacaaatcgcaagacagacgaccctgagcagaaggcaaaagtaaaaaaaaagaaaccaaagctgttgaataagttcgataaaaccattaaggcagagctcgacgctgctgaaaaactgcgaaagcggggtaaaattgaggaggcagtgaatgcatttaaagagctggtgaggaagtatccacagtctcctcgagccaggtatggaaaagcccagtgcgaagacgacctcgcggagaaacgcagatcgaatgaggtcctgcgcggagcgattgaaacataccaagaggtggcctcactcccagatgtccccgctgacttgctcaagctgtcgctgaagcgcagaagcgataggcaacagtttctgggacacatgagggggagcctgctgactctgcagagactagtgcagtag

SEQ ID NO: 214980 - DNA, 900 bp, synthetic construct
  misc_feature 1..900: note = Description of Artificial Sequence: Synthetic coding sequence
  source 1..900: mol_type = other DNA
atggcagaggataaggaaacaaaacacggaggtcacaagaacggccgaaagggaggactgagtggcacctctttctttacttggttcatggtaatagcactccttggtgtttggacatctgtcgctgtggtctggttcgacctggtggactacgaagaggtactggccaaagccaaggatttcaggtacaacctgtccgaagttctgcagggcaagcttggaatttacgatgccgacggagatggagacttcgatgtcgatgatgccaaagttcttctgggtctgaaagagcgatcaacatctgagccagcggtgcccccagaagaggccgaaccccatacggagcccgaggagcaggtcccagtggaggccgaaccgcaaaacatagaagatgaggccaaagaacagattcagtccttgctccacgagatggtgcatgccgaacacgtagagggggaagacctacagcaggaagacgggccaactggggagccgcaacaggaagacgacgaatttctgatggctaccgacgttgacgaccggttcgagaccttagaacccgaggtgtcacatgaggaaaccgaacactcatatcacgttgaggaaactgtttcacaggactgtaatcaagacatggaagagatgatgtctgaacaggagaatccggacagcagcgaacccgtagtagaggacgaacgcctgcaccacgacacagatgacgtgacctaccaggtctacgaagagcaggccgtgtatgaacccttagagaatgaagggatagagataaccgaggtgacagccccacccgaggataatcccgtcgaggatagtcaggtcattgttgaagaggtgtccatctttcccgtagaggagcaacaggaagtgccccctgatacttag

SEQ ID NO: 214981 - DNA, 900 bp, synthetic construct
  misc_feature 1..900: note = Description of Artificial Sequence: Synthetic coding sequence
  source 1..900: mol_type = other DNA
atggctgaggacaaggagactaaacatgggggtcataagaacggcagaaagggagggttgtcagggactagcttctttacctggttcatggtcatcgcgcttctgggggtgtggacatcagtggccgttgtgtggtttgacctggtcgattacgaggaggtgttagccaaggccaaggattttcgatacaacttatcagaggtgctgcagggaaagctggggatctacgacgccgatggagacggagattttgacgtggatgacgctaaagttcttctcggattgaaggagcgaagtaccagtgagcccgcagtcccccctgaagaagctgagccacacaccgagcccgaagagcaggtgccagtagaggctgagccccagaacattgaagatgaagccaaggaacagatccagagtctgctccatgagatggtgcatgccgaacacgtggagggcgaggatcttcagcaggaggacgggcctacaggcgagccacagcaggaggatgatgagttcctgatggcaaccgacgtggacgacagattcgagaccctggagcccgaagtgtcacatgaggagacagaacattcttatcatgtggaggagactgttagccaagattgcaatcaggacatggaagaaatgatgtctgaacaagagaacccagatagcagtgagccagtggttgaggatgaaagacttcaccatgacaccgacgacgttacctaccaggtgtacgaagaacaggctgtatacgagcccttggaaaatgaggggatcgaaatcactgaggtgacagcccctccagaagacaatcctgtcgaggactcacaggtgatcgtcgaagaggtgtcgatcttccctgtggaggagcagcaggaggttcctcctgatacttag

SEQ ID NO: 214982 - DNA, 897 bp, synthetic construct
  misc_feature 1..897: note = Description of Artificial Sequence: Synthetic coding sequence
  source 1..897: mol_type = other DNA
atggcagaggataaggagaccaagcacggcggtcacaagaacggccgaaagggcggactgtctggcacttccttctttacttggttcatggtgatcgctctgcttggagtgtggactagtgtcgccgtagtctggttcgacctggtggactatgaagaggtgctcgctaaagcgaaggattttaggtacaatctgtcagaagttttacaggggaaactaggaatttacgacgccgacggagatggcgactttgacgttgatgatgctaaagtgcttctggggctgaaggaaagatccacctctgagcctgcggtgccgccagaagaggccgaaccacatacggaacctgaggagcaagtcccagtcgaggctgaacctcaaaatattgaggatgaagccaaggagcaaatccagagcctgcttcacgaaatggtccatgcagagcacgtggaaggggaagatctgcagcaagaagacggcccaacgggtgagccccagcaggaggacgacgagttcctgatggctactgacgtggacgaccgcttcgagacactggagccagaggtgtcccatgaagagacagagcacagctatcacgtagaagagaccgtgagccaggattgcaatcaagacatggaagaaatgatgagcgaacaagaaaacccagacagctccgaaccagttgtggaggacgaacggctgcaccacgatacggatgacgttacttaccaggtttacgaagagcaggtctacgagcctttagagaacgagggcattgaaatcaccgaggtgaccgcgccacccgaggataatcctgtggaggactcgcaggtgatagtagaggaagtatcaatttttccagtagaagaacaacaagaggtgccacccgatacatag

SEQ ID NO: 214983 - DNA, 813 bp, synthetic construct
  misc_feature 1..813: note = Description of Artificial Sequence: Synthetic coding sequence
  source 1..813: mol_type = other DNA
atggcgcagcgcaaaaatgcaaaaagctccggaaactcctcctcctcgggaagtgggtctggcagcacgtccgcaggcagctcatcacccggagccaggcgtgaaacaaagcatggcggacataagaacggtcgcaaggggggactgtccggcacctcattctttacttggttcatggtgattgccttgctcggtgtgtggactagtgtggcagttgtatggttcgatcttgtggactacgaggaagtgctgggcaagctggggatctacgatgcagacggcgacggagattttgatgttgatgatgcaaaggtcctcttaggtcttaaggagcgatcaacatcagaacctgccgtgcctccagaggaggctgaaccacataccgaaccagaagagcaggttccggtggaagcagaaccccagaacattgaggacgaggcaaaggagcagatacaatcactgcttcatgagatggtgcatgccgagcatgaaacggaacattcataccacgtggaggagacagtatcccaggattgcaaccaggacatggaggaaatgatgtcggaacaggagaatccggatagctccgagccagtcgtggaagatgaacggctccaccacgataccgatgacgtgacctaccaggtgtatgaggaacaggctgtttacgagccattggaaaacgaaggaatcgagatcaccgaggtaactgctccgccagaggacaaccctgtcgaggattctcaggtcattgtggaagaagtgtcaatattcccagtggaggagcagcaagaagtacccccagatacttag

SEQ ID NO: 214984 - DNA, 633 bp, synthetic construct
  misc_feature 1..633: note = Description of Artificial Sequence: Synthetic coding sequence
  source 1..633: mol_type = other DNA
atggccgaggacaaggagacaaaacacggcggacacaaaaacggacggaaggggggactatccggaaccagtttcttcacctggtttatggttattgcactgttgggcgtctggacctctgtggctgtggtctggtttgacctcgtagattatgaggaggtgctgggcaaactaggtatctacgacgccgacggggatggcgacttcgatgtcgatgatgctaaggtcttactggaggggcctagtggggtcgctaagcgaaaaacaaaggcaaaggtcaaggagctgaccaaggaggaactgaaaaaggaaaaagaaaaacctgaatctcgtaaagaaagcaagaatgaagaaaggaaaaaaggaaaaaaagaggacgtgagaaaagataagaagattgctgacgccgatctgtccagaaaggaaagccctaagggaaagaaggacagagaaaaggagaaagtcgacctcgagaaatccgctaaaactaaagagaatcgtaagaagtcaaccaacatgaaagacgtgagctccaagatggcctctcgtgataaggacgaccgcaaagaaagccgaagttccacccgatatgcccatctgacgaagggaaacacgcagaagcggaacggatag

SEQ ID NO: 214985 - DNA, 771 bp, synthetic construct
  misc_feature 1..771: note = Description of Artificial Sequence: Synthetic coding sequence
  source 1..771: mol_type = other DNA
atggccgaagataaggagaccaagcatggaggacacaagaacgggagaaaggggggtctgtccggcactagcttttttacctggtttatggtgattgcgctgctgggtgtctggacctcagtggctgtggtgtggtttgatctggtggattacgaagaagtcctcgccaaggcaaaggactttaggtacaatttgtccgaggtgctccagggaaagctgggcatctacgacgctgacggcgacggagacttcgacgttgacgacgccaaagttttgctcggcctcaaagaacgatctacctcagaacctgccgtgccaccagaggaagccgaacctcataccgagcccgaggagcaagtacccgtagaggcagagccccagaatatagaagatgaagccaaagaacagattcagtccctcctgcatgagatggttcacgccgagcacgaaaccgagcacagctatcacgtggaggagacagtcagccaggactgtaaccaggacatggaggaaatgatgagcgagcaagaaaacccagacagttctgaaccagttgttgaagacgagagattgcatcatgacactgacgatgtgacgtaccaggtatacgaagaacaggctgtttatgaaccacttgaaaacgaggggattgagattactgaggtaacagcccctcctgaggataaccccgtggaagattcccaagtcattgtagaggaggtgtctatattccctgtcgaggaacaacaggaggtgccccctgacacttag

SEQ ID NO: 214986 - DNA, 2190 bp, synthetic construct
  misc_feature 1..2190: note = Description of Artificial Sequence: Synthetic coding sequence
  source 1..2190: mol_type = other DNA
atggcagaagacaaagagacaaagcacggtggccataaaaatggcaggaagggcggactgtcaggtacctcattctttacttggtttatggtgatagccctgctaggcgtgtggaccagtgtagcagtagtgtggttcgatttggtagactacgaagaggttctgggtaaactggggatttacgatgcagatggagatggcgatttcgacgtggacgacgctaaagtcttactgggcctaaaagaacggagcactagtgaacctgccgtcccaccagaagaggccgagccccatacagagccagaggaacaggtgccagttgaggcagaacctcagaacatcgaagatgaggccaaagaacagattcagagcctcttacatgagatggtgcatgcagagcatgtggagggagaagatcttcagcaggaggacggcccaaccggggagccccagcaagaggatgacgagtttttgatggcgaccgacgtggacgaccgtttcgagacactggaacctgaggtgagtcacgaggagactgaacacagttaccacgtggaggagacagtgtcccaggactgcaatcaagacatggaggaaatgatgagcgaacaggagaaccccgacagctctgagcctgtggtggaggatgagaggctacatcacgacaccgacgatgtcacctaccaagtgtatgaggagcaggccgtgtatgaacccctggagaatgaaggaattgagattactgaagttacggcgcctcctgaagataacccggttgaagattcacaagttatcgtagaggaagtgtccatctttcccgtggaggagcagcaggaagtgcctcccgaaaccaatagaaagacggacgaccctgagcagaaagccaaagtgaagaaaaagaaaccaaagctgctcaacaagtttgataagacaattaaggcggagctggatgctgccgaaaagctacgaaagcgaggtaaaattgaggaggctgtgaacgccttcaaggaactcgtgcgcaaatacccccagtccccgagggcacgctatggcaaagcccagtgtgaggatgatctggccgagaagagaagatcaaatgaagtccttcggggagctattgaaacataccaggaggtggcttctctgccagatgtaccagctgatttgctgaaactgtccctgaagcgtcgttcggacagacagcagtttttgggacacatgaggggaagcctgcttacactgcagagattagtgcagctgttccccaatgacaccagccttaagaatgatctcggggttggctacctgctgataggagataatgacaacgccaaaaaggtttacgaagaggtcctttcggtgaccccgaacgatggttttgccaaagtgcactacggcttcatactcaaagcccagaataagatcgccgaaagcattccctatcttaaggagggcattgaaagcggggacccagggaccgacgatggcaggttttattttcacctgggcgacgcgatgcagcgggtcgggaacaaggaggcgtataagtggtacgagctgggccataagcgtggacactttgcttcagtctggcaacggtctctgtacaatgtgaacgggctgaaagctcagccctggtggacacctaaagagaccgggtacaccgaattggtgaagagcctggaaagaaactggaagctcatcagagacgagggcctggcagttatggataaagccaaggggcttttcctgcccgaggatgaaaacctaagagagaagggagattggagccagttcacactgtggcaacagggtcgaagaaatgaaaacgcttgtaagggtgccccaaagacatgcactttgcttgagaagtttcccgagactacaggatgccgacgtgggcagatcaaatatagcatcatgcatccagggactcacgtctggccccataccggtcctaccaattgccggcttcggatgcacctgggcctcgtcattcccaaagaggggtgcaaaataagatgcgctaatgaaaccaagacgtgggaggagggaaaagtgctgatattcgacgatagctttgaacacgaggtttggcaggatgcttcgagttttagactgatttttatagtcgacgtgtggcatccggaactgacaccccagcagcggagatcgctgcccgcaatctag

SEQ ID NO: 214987 - DNA, 1032 bp, synthetic construct
  misc_feature 1..1032: note = Description of Artificial Sequence: Synthetic coding sequence
  source 1..1032: mol_type = other DNA
atgggctcccctggtgcttcccttggtattaagaaggcactacagagtgagcaggcgaccgcactgccagcgtctgcccctgctgtcagccagcctacagctcctgctccatcctgcctacccaaagctggccaagtgatcccaaccctattgcgtgaggccccattctcctctgttatagctccaacgctcctttgtgggtttctcttcctggcgtgggtagctgctgaagtgcctgaggagagctcgcgcatggctggctcaggcgctcgatctgaagaaggcaggcgacagcacgctttcgtcccagagcctttcgacggagcaaatgttgtacccaacctgtggttacattcctttgaagtgatcaacgaccttaaccattgggaccacatcacgaaattacggtttcttaaagagtcactcagaggtgaggccctcggcgtttataatcggctttcaccacaggaccagggcgattacgggacagtgaaggaggcattgctcaaggcttttggcgttcctggcgctgcgccatcgcacctgccgaaggagatcgtctttgctaactcaatgggtaagggctactacctgaagggaaagatcggcaaagtaccggtgaggttcctggtcgatagtggcgctcaagtatccgtggtgcaccctaatttatgggaggaagtcactgacggagatcttgacacactgcagcccttcgagaatgttgtgaaagttgcaaacggggctgagatgaagatattaggcgtgtgggacacggctgttagcctgggtaagttgaagcttaaggcccagtttctggtcgccaacgctagtgctgaggaagctattattggcacagatgtgctccaggaccacaacgcaattctggactttgaacataggacctgcaccctgaaagggaagaaattccgcctactccccgtgggcggttcactggaggacgaattcgacctagaattaattgaggaggatcctagcagtgaagaaggtagacaagagttaagccactag

SEQ ID NO: 214988 - DNA, 960 bp, synthetic construct
  misc_feature 1..960: note = Description of Artificial Sequence: Synthetic coding sequence
  source 1..960: mol_type = other DNA
atgtgcagcttgcctgtgcccagagaaccactccggagagtggctgtgactgggggaactcatggcaatgagatgagtggggtctacctggcacgccattggcttcacgcccctgccgagttacaaagagcttctttctcggccgtacctgtgcttgccaatcccgctgctaccagtggctgtcgaaggtacgtcgatcatgatctcaatcgtacgttcacgagcagttttttgaatagccggcctactcccgacgacccctacgaagtgacaagagccagggagttaaaccaactgcttggccctaaggcctctggtcaggcttttgactttgttctggatcttcataacacgacggcgaatatgggcacgtgcctcatagctaagtcctcccatgaggttttcgccatgcatctgtgtagacaccttcagttgcagtacccagagctcagttgccaggtcttcctgtaccaaagaagtggtgaagaaagttacaatctcgacagcgttgcgaaaaacggcctaggactggaactaggaccccagccccagggcgttctccgcgcagatattttttcacgtatgcgcacacttgtcgcaacggtactggacttcatcgagctcttcaaccagggcaccgccttccctgcttttgagatggaggcatataggcctgtcggcgtggttgatttccctagaacagaagcgggacacctggcaggtaccgtccacccccagctgcaggatcgagacttccagcctctgcagcccggtgctccaatttttcagatgttctccggcgaggacttgttgtacgagggagagtcaacagtgtaccctgtcttcatcaatgaagccgcatattacgaaaagggggttgcctttgttcaaactgagaagtttacatttaccgtgcctgcgatgcccgcactcacgccagccccaagcccagcctcatag

SEQ ID NO: 214989 - DNA, 1041 bp, synthetic construct
  misc_feature 1..1041: note = Description of Artificial Sequence: Synthetic coding sequence
  source 1..1041: mol_type = other DNA
atggcaaggaaatccaacctgcctgtactgctggtcccatttttgctgtgccaagctcttgtcagatgcagctcaccactgccacttgtcgttaacacctggcctttcaaaaatgcaactgaggccgcatggcgtgcgctcgctagcggcggttcagcattggacgcagtggaaagtggctgcgccatgtgcgaacgggaacagtgcgatggcagtgtgggatttggtggttccccagatgagctgggcgagacaaccctggatgctatgataatggacggcactactatggatgtgggggcagtcggagatttacggcgaataaaaaatgcaatcggggtagcaagaaaggttcttgagcacaccacacatacactcctggtgggcgagagcgccactacatttgcccaaagtatggggtttatcaacgaagatttatcaactacggcttcccaggctctgcactccgattggttggccaggaactgccagcctaactactggaggaatgtcattcccgacccttcaaagtattgcgggccatataaacctccaggcatcctcaaacaggacatcccgattcacaaggagaccgaggacgatcggggacatgatacaattggaatggtagttatccacaagaccgggcacatcgccgctggcacatccactaacggtataaaattcaagatacatggacgggtgggcgatagccccatcccaggagctggtgcatacgccgacgataccgcaggcgcagccgctgccaccggaaatggggacattttgatgagattcctgccctcctatcaggcggtggaatatatgaggcgcggagaagacccaacaatagcctgccagaaggttatcagtagaatacagaaacatttcccagagttctttggtgctgtcatctgtgcaaatgtgacgggtagctatggagccgcttgcaataagcttagcacttttacccagttctcattcatggtgtataacagcgagaagaatcagccgacagaggagaaagtagattgtatctag

SEQ ID NO: 214990 - DNA, 573 bp, synthetic construct
  misc_feature 1..573: note = Description of Artificial Sequence: Synthetic coding sequence
  source 1..573: mol_type = other DNA
atggagtcgcagcggttagagttaattcgactgatggagacgcaggaagaagacgtggttctcttaactgcaggagaacacaataaagcttgctcactgctggggaaacttcggttggaatgcgcagacttactcgaaacacgcggagtggtgctcagagaccctactctgttctctttcctgtgggtggtggattttcctctctttctgcccaaagaggagaacccccgtgagttggagtcagcccaccatccatttactgctccccacccaagcgatattcacttgctgtatactgagcccaaaaaggaagatgtcaaaatgctgtcacatctcctacaggcgctggactatggtgcaccgccacacggcggaattgctctcggacttgaccgactgatctgccttgttaccgggagcccaagcatccgagatgtgattgctttcccaaaatctttccgaggacacgatctgatgagcaatacccccgatagtgttcctccggaggagctgaagccataccacatacgggtatccaaacctacagactccaaggcagaaagggctcattag

SEQ ID NO: 214991 - DNA, 1938 bp, synthetic construct
  misc_feature 1..1938: note = Description of Artificial Sequence: Synthetic coding sequence
  source 1..1938: mol_type = other DNA
atgtactttccgagttggctgagtcagctctaccggggactctctcgtcctatacgtaggacaactcaaccaatttgggggagtctgtacagaagtctcctgcagtcttcgcagagacggatccctgagttttctagctttgtggttcggaccaacacatgtggggagctgagaagctcccatttaggccaagaagtgaccttatgcggctggattcagtaccggagacaaaatacttttcttgttctgagggactttgatggactagtccaagttattatcccccaggacgaaagtgcagccagcgtgaaaaagatattatgtgaagcccctgttgaaagcgtcgttcaggtcagcgggaccgtgattagtaggcctgccggacaggagaaccctaagatgcctacgggtgaaatcgaaatcaaggtgaaaaccgcagagctacttaatgcttgtaagaagctgccatttgaaatcaaaaacttcgtaaaaaagacagaggccctgcgacttcagtaccggtacctggacctcagaagtttccagatgcagtacaatctgcggcttaggtcacagatggttatgaaaatgagagagtatttatgtaatctgcatggattcgtggacatcgaaacacctacattattcaaaaggaccccgggaggagcaaaagagttccttgtgccctccagggagcctgggaaattttactctttgccgcaatcaccccagcagttcaaacagctcctcatggtggggggactggacaggtactttcaggtggcgaggtgttaccgcgacgaaggttcacgacccgaccgtcagccagagtttacgcaaatagatatcgagatgagttttgttgaccagactggtatccagagcttgatcgagggattattgcagtactcatggcctaatgacaaagaccccgtggtcgtgccttttcccaccatgacatttgcagaagtgctggccacgtatggcaccgacaagcctgatacgcggttcggcatgaagatcatagacattagcgatgtcttcagaaatacagagatcggattcctccaggacgccctgagcaagccccatgggacagtgaaggccatctgcattccggagggtgctaaatacctcaagcgcaaagatattgagtcaatccggaacttcgcggcagatcatttcaatcaggaaattctgccggtattcctgaacgccaaccgcaattggaattccccagttgcaaattttataatggaatcacagaggctcgaattaatccgtctgatggaaacacaagaggaagacgtcgtccttttgacggcaggagaacataacaaagcctgttccctgctcggtaaactgcgcctcgaatgtgcggatttgctggaaacacgaggcgtcgttctccgtgaccctaccctgtttagctttttgtgggttgtggacttcccgctgttcctcccaaaagaggaaaatcccagggagttggagtcagcccatcacccgttcacggccccacatccgagcgatatccatcttctgtatacagagcccaaaaaggccagatcccaacactatgatctggtgctgaacggcaatgagattgggggtggcagtatcagaatacataacgccgagctgcagcgttacatcctggccacattgcttaaggaggatgtaaagatgctgagccacttgctccaagctctcgactatggtgccccaccccacgggggtattgccttggggcttgaccgcctgatttgtctcgtcactgggagcccctccattagagacgtgatcgcattccctaaatcttttcgtgggcacgacctgatgagcaatacacctgactccgtgccgccagaggagctcaaaccatatcatattcgcgtgagcaaaccaaccgacagcaaggccgaaagggcccattag

SEQ ID NO: 214992 - DNA, 1143 bp, synthetic construct
  misc_feature 1..1143: note = Description of Artificial Sequence: Synthetic coding sequence
  source 1..1143: mol_type = other DNA
atgaaggagtacgttctgttgctgtttctcgcactgtgcagcgccaagccgttcttcagtccctctcacatcgcccttaaaaacatgatgctgaaggatatggaagatacagatgatgatgacgatgacgatgacgatgacgacgatgacgacgaagacaattctttgtttccaacgcgagagccaagatcgcactttttccccttcgatctgttccctatgtgtccgtttggatgccaatgttatagcagggtggttcattgttccgatttaggattgacttctgtacctacgaatattccatttgacactcgaatgctggacctgcagaacaataaaatcaaggaaatcaaggagaacgacttcaaagggctaacttcactgtacggcttgatcctaaataacaataagttgactaaaatacaccctaaagctttcctcaccacaaagaagcttcgcagactttacctgtctcacaaccagctgagcgagatcccactgaacctgcccaagagtttggccgaacttcgcatccacgagaataaggtgaaaaaaatacagaaagataccttcaaaggaatgaacgccctccatgtgctggagatgtccgcgaatcccctagacaacaatggtattgaaccaggggcatttgagggggtgacggtttttcacattcgcatagctgaagccaagcttacttctgtccccaaaggcctgcccccaacccttctggagctccacctcgattataataaaatttccacagttgaactcgaggattttaaaaggtacaaagaactgcagcgcctggggctgggtaataacaaaattactgatatagaaaacggatcgctggccaacattcccagggtgcgagaaatccatttggaaaataacaagctgaaaaaaattccctctgggctacccgaactgaaatacctgcaaattatctttctccactccaactctattgcccgagtaggcgttaacgacttttgccccaccgtgcctaagatgaagaaaagcttatactcagccatcagtcttttcaataaccccgtgaagtactgggagatgcagcctgccaccttccgctgtgtcctaagccgaatgtccgtccagcttggcaactttggcatgtag

SEQ ID NO: 214993 - DNA, 732 bp, synthetic construct
  misc_feature 1..732: note = Description of Artificial Sequence: Synthetic coding sequence
  source 1..732: mol_type = other DNA
atgaaggaatatgtgctcctgctgttcctggcgctgtgctctgccaaacctttctttagcccaagccacatcgctctaaaaaacatgatgctgaaggatatggaagacaccgacgatgatgacgacgatgacgacgatgatgatgacgatgacgaggacaactctctgttcccaacacgggagccacgtagtcatttttttccatttgatctgtttcctatgtgtccttttggttgtcagtgttatagtcgtgtggtccactgctcagacctaggacttacatcggtgcccacaaatatcccgttcgatacccgtatgctcgatctgcagaataataaaattaaggagattaaggaaaacgatttcaagggcctgactagcttgtacggactcattctgaataataataaactgacaaagatacatccgaaagccttcctgaccacaaagaagctacgtcggttgtacctgagccacaaccagctgagcgagatacctctgaaccttcccaagtccttagccgaactcaggatccacgagaacaaagtgaaaaagatccagaaagacactttcaaaggcatgaacgcgctccatgtgcttgagatgagtgccaaccctctggataataacgggattgagcctggggcatttgagggtgtgacggtgttccacataagaatcgccgaggcaaaactgaccagcgtcccaaaagttaacctccctcagttctag

SEQ ID NO: 214994 - DNA, 243 bp, synthetic construct
  misc_feature 1..243: note = Description of Artificial Sequence: Synthetic coding sequence
  source 1..243: mol_type = other DNA
atgatgctgaaggatatggaagacaccgatgatgacgacgacgatgatgatgatgacgacgacgacgacgaagataactcgctgtttcctacacgcgagccgaggtcacacttctttccttttgacctgttcccaatgtgtccatttggatgtcagtgttatagccgcgttgtgcattgctccgatctcggcctaacttcagtccctacaaatatcccattaatcctggagtgcttgatctag

SEQ ID NO: 214995 - DNA, 732 bp, synthetic construct
  misc_feature 1..732: note = Description of Artificial Sequence: Synthetic coding sequence
  source 1..732: mol_type = other DNA
atgaaagaatacgtgttgctgcttttcttagctttgtgttctgccaagcctttcttctcgccctcccatatcgcactgaagaatatgatgttaaaggacatggaagacacagacgacgacgacgacgatgatgacgatgacgatgacgatgatgaagataattcattgttccccactagggaaccaaggtcacacttcttcccttttgacttgttccccatgtgtccgtttggatgtcagtgctactcacgcgtggtgcattgttctgacctggggttgacatctgtgccaaccaatattccttttgatactcggatgcttgatctgcagaataataaaataaaggagattaaagagaatgactttaagggcctgacttccttgtatgggctgattcttaataataataagctcacgaagattcaccctaaggctttccttacgaccaaaaagctcagaagattgtacctgtcccataaccagctctccgagatcccactaaaccttcccaagagtctggccgagctgcgcatacatgagaacaaagtaaagaaaatccagaaagacacattcaaaggcatgaacgcgctgcacgttcttgagatgtccgccaatcctctggataacaacggaattgagccaggcgcttttgaaggtgtcacggtcttccacatacgcatcgcagaagccaagcttacatccgtgcccaaggacaatctgcctagcttttag

SEQ ID NO: 214996 - DNA, 3885 bp, synthetic construct
  misc_feature 1..3885: note = Description of Artificial Sequence: Synthetic coding sequence
  source 1..3885: mol_type = other DNA
atggcgcttgccggactgtgtgccttactcgcatgttgttggggcccagccgctgtgctagcaacagcagccggagacgtggatccaagcaaggaacttgagtgcaaattaaaatctatcactgtgtctgctctgccctttctgcgcgaaaatgatctctctatcatgcatagcccaagcgcttccgaaccaaaactgctgtttagtgtgagaaatgatttccctggtgagatggtggtggtagacgaccttgaaaacaccgagcttccttactttgttctcgagatttcaggaaatactgaggacatccctcttgtgaggtggagacaacagtggctggaaaacggcaccctgctgttccatatccaccatcaagatggagctccatccttgcctggccaagaccctacagaagagcctcaacatgagagcgctgaggaggagttgcgtattctccacattagcgtgatgggcggaatgatcgccctgctgctaagtatcctgtgccttgtgatgatcctctacacgcgacgacggtggtgtaagcgacgaagagtcccccaaccacagaaatcagccagtgcagaagccgctaacgagattcattacatcccttccgtgctaatcggcggtcacggcagggagtccctgcgcaatgccagggtgcagggtcacaattcctcgggaaccttatctattcgcgaaacgcccatcctggacggatacgagtacgatatcactgatttacggcatcatctgcagagggaatgcatgaacggcggagaggatttcgcttctcaagtgactagaactctggactcactacaaggctgcaacgagaagtccggcatggatttaacaccgggtagcgacaatgctaaactttccctcatgaacaagtataaggataatatcattgccacatcacctgttgattctaatcaccagcaggccacattgttatcacatacttcctcctcacagcggaaacgcattaacaacaaggctcgagcaggaagcgccttcttaaatcccgagggggactcgggcaccgaggcagagaacgatcctcagctcacattttataccgatcctagcaggtcacggagaaggtctagggtgggatcacctaggtctcccgtgaacaaaaccacactgacgctcatctccattacatcttgtgtgattggtctggtctgcagttcccacgtgaactgcccactcgttgtgaaaataacgctacacgtgcccgagcaccttatcgccgacggatctcggttcatcctactcgaaggcagccagctagacgcctctgactggttgaaccctgcacaggtggtgctgttctcccaacagaacagcagcggaccatgggcgatggacctgtgcgctcgccgtctgctggacccctgcgagcatcagtgcgaccctgagacgggcgaatgtctctgttatgagggatacatgaaagacccagtccacaagcacctctgtattcggaatgagtggggaacaaatcaaggcccttggccttacactatctttcagagagggttcgatcttgtattgggcgaacagccctctgacaagatctttcgattcacatacacactgggcgagggcatgtggctgcctctgtctaagtcctttgtaatccccccagctgagctggcgataaacccttccgctaaatgcaaaacggatatgactgtaatggaagacgcagttgaagtgcgagaggagctcatgacctcctcctccttcgattcgctcgaggttttactcgatagcttcggtcctgttcgagactgttcaaaggacaacgggggatgctctaaaaacttccgttgcatcagcgaccgcaagctggattcaactggctgcgtgtgtccgtccggcctgagccctatgaaggattcctccggctgctatgacagacatatcggggtggattgctctgacggctttaatggtggatgtgagcagctgtgcttgcagcagatggccccattcccggacgatcctacattatacaacatcctcatgttctgtggctgcatcgaagactacaaactgggcgtagacggtaggtcatgtcagctgataacagaaacatgccctgaggggtctgattgtggggagagtcgcgaactgcccatgaatcaaacactgttcggggagatgttctttggatacaacaaccacagtaaagaggtcgcagcaggtcaggtgctgaagggaaccttccggcagaataattttgctcgcggactggaccaacagctgcccgacggacttgttgtggccaccgtgccgctggaaaatcagtgtctcgaggagatttcggagcctacaccagatcctgatttcctgacgggcatggttaacttcagcgaggtgagcggctaccccgtcttacagcactggaaggtgcgatccgtcatgtaccatattaagctgaatcaggttgcgatcagccaagccttgagcaatgcccttcactctctcgatggtgctacttcccgggcagattttgtagcgcttctggatcagttcggcaaccattacatccaggaagcgatctacgggttcgaggaatcgtgctccatttggtatccaaataagcaggtgcaacgcagactgtggctggaatatgaggatatttctaaaggaaactctccaagcgatgagagcgaagagagagagagagatcccaaagttttgacattccctgaatacatcacgtctctctccgattccggcacgaagcacatggccgcaggcgtgagaatggaatgtcactctaagggtagatgtccgtcatcttgcccactgtgtcacgtcacctcctcacccgacactccagctgaaccagttctgctcgaggtgacaaaggcagctcctatttacgagttggtcaccaacaaccagacccagagactgctccaggaggccaccatgagtagcttgtggtgctccggaactggggatgttatcgaagattggtgtagatgcgatagtacagctttcggagctgatggcctgccaacctgtgctcctcttccgcaacccgtgctccgcctctcgaccgtccacgagccctcatccacacttgtagtgctggaatgggagcattcggagccaccaatcggagtccaaattgtagattacctcctgagacaggagaaggtcactgacaggatggaccacagcaaagtggagaccgagacagtgctctcatttgtcgacgatatcatttccggcgctaagtccccctgtgctatgccctctcaggtgccggataagcagttgactactatctctctgattatcaggtgccttgaacctgatactatatacatgttcactctctggggcgtcgacaatacaggtcgacggagtaggccatcagacgtaatcgtcaaaactccgtgccctgtcgtggacgacgttaaagctcaggagattgcagacaaaatatataatttgttcaatgggtatacgagcggcaaagagcaacagacggcatacaatacactgttggacctgggtagccctacattacacagagtcctgtaccactacaatcagcattacgagtcgttcggcgagtttacctggcgatgtgaggacgaacttggccctaggaaggccggtctcatcctgagccaactaggagacttgtcatcctggtgcaacgggcttctgcaggaaccaaaaatttcgctgcgcaggtctagtctgaaatacctcggctgtcggtactcagagatcaaaccctacgggctcgattgggccgaactgtctagagacctaagaaaaacttgcgaggagcagactctctcaatcccctataatgattacggggattccaaggagatatag

SEQ ID NO: 214997 - DNA, 3909 bp, synthetic construct
  misc_feature 1..3909: note = Description of Artificial Sequence: Synthetic coding sequence
  source 1..3909: mol_type = other DNA
atggcgttggctggcctatgcgctctcctggcttgctgttggggccctgctgcggtcctggcaacggctgccggagatgttgatccatctaaggagctagagtgtaaacttaagtctattaccgtatccgccttgccatttctacgtgaaaacgatttatctataatgcacagccctagcgcatctgagccaaaactcctatttagcgtgcggaacgattttcccggtgagatggttgtcgtggacgacctggagaataccgagctgccttacttcgtccttgagatctccggtaatactgaggacatccccctcgtgaggtggagacagcagtggctggagaatgggaccttgctgtttcatattcaccatcaagacggcgctccctcacttcccggacaggatcctactgaagagcctcagcacgagtccgcggaagaagaactgcgcattctgcacatctctgtgatggggggaatgatcgcactgttgttgagcatcctgtgcttggtcatgatcttgtacactaggcgacgatggtgtaagcgcagacgcgtcccacagccccaaaaaagcgcaagtgcagaagccgctaacgaaatccattacattccttccgtgcttataggcggacatggaagggagtccctcaggaacgccagggttcagggccataattctagcggaactctcagtataagggagactccaatcctcgacggctacgaatatgatattactgacctgcgccaccaccttcagagggagtgcatgaacggaggcgaggatttcgcgtctcaggtaacccgcacactggacagtctgcaggggtgcaacgagaaatctgggatggatctgacgcctgggtccgacaacgctaagctgtccctaatgaataagtataaggacaatattatcgctacatcccccgtcgactctaatcatcagcaggctacacttttatctcacacgtcatcaagccagaggaaaagaatcaacaacaaggcacgggctggaagcgctttcctgaaccctgagggagactccggtaccgaggccgagaacgatcctcaactcactttttataccgatccttcccgctcccggcgacgatcacgggtcggctcaccaaggtcacccgtgaataagactacccttaccttgatctccataacctcatgtgtgatcggtctagtgtgcagctcccacgtaaactgcccattggtggttaagataacactgcatgtgcccgagcatttaattgctgatggcagccgattcatcttactagagggcagtcagctggatgcgtctgactggcttaaccctgcccaggtggtgctcttttctcagcagaactcttccggcccttgggcgatggacctctgcgctaggaggttgttagatccctgcgaacaccagtgcgacccagaaaccgggaggcgcgagcatcgagcggcaggcgagtgtctatgctacgaagggtacatgaaggatcccgtgcacaagcacctctgcattagaaacgagtggggtactaaccaagggccttggccctacaccattttccaacgcggatttgatctggttctgggagaacagcccagtgataagatctttcggttcacatataccctaggagaaggcatgtggctgccactgagcaagagctttgttatcccaccagctgaactggccatcaacccctcagccaagtgcaagacagatatgaccgtgatggaagacgctgttgaagtgcgcgaggagctcatgactagcagctcgttcgactcccttgaggtactcctggattcttttggcccagtacgggactgtagcaaagacaacggagggtgcagcaaaaacttccggtgcattagcgatagaaaactcgatagtacaggctgtgtctgcccaagtggcctttctccgatgaaggactcctcaggatgctatgaccgccatataggcgtggactgttcggacggcttcaacggaggctgcgagcagctgtgcctgcagcagatggcaccgtttcccgacgacccaaccctgtacaacattctgatgttttgcggatgtattgaagattacaaacttggggtcgacgggaggagttgccagctaattacggagacttgcccagaggggagcgattgtggagagagccgcgaactccctatgaatcagacgttattcggcgagatgttcttcggttataacaaccactccaaggaggtggcagctggtcaggtgctcaaaggcactttccgtcagaacaactttgcacggggtctggaccagcagctgccggatggactcgtagtcgctaccgttccattggagaatcagtgtttagaggagatttccgagccaacaccggaccccgacttcttgactggcatggtgaatttttctgaggttagtggttaccccgtcctgcagcactggaaagttcgcagcgtgatgtaccatattaagctgaaccaggtggcaatttctcaggcactgtcaaatgccctgcactcattggatggagctacatcaagagccgactttgttgccctcctcgaccagttcggcaaccattatatacaggaagccatatacggttttgaggagtcttgtagcatatggtaccctaataaacaggtgcagcggagattgtggctcgaatacgaggatatatcgaagggcaactctccctctgacgagagcgaggaacgtgagagagacccaaaggtgctgaccttcccagaatacatcacttccctatctgatagcggcacaaagcacatggccgcaggcgtacgaatggaatgccactccaagggtcgttgtcccagcagctgtcctttgtgccatgtgacatcttcaccagacaccccagccgaaccagtgctcctggaagtgacaaaggctgctcctatttacgagttagtgacaaacaaccagacacagagactgttgcaagaggccaccatgagctcactctggtgtagcggtacaggcgacgtaattgaggactggtgtcgctgtgatagtactgcctttggggctgacggccttcctacttgcgctccgctgccacagcctgtgctgagattgtccactgtacatgagccatcctcaacgctggttgtgctggaatgggaacattctgaacctccgatcggggttcagatcgtcgactacctacttaggcaggagaaagtcaccgaccgaatggatcatagcaaagttgagaccgagaccgtcctctcctttgtggatgatattatctccggggctaagtctccttgcgcaatgcctagccaggttccggataagcaattgactactatttcgttgattattcgctgcctggagcctgacacgatatatatgttcacgctgtggggcgtcgacaatacaggtcgcaggtcacgtccctccgatgttatcgttaagaccccctgtcccgtcgttgacgacgtcaaagcccaggagattgcagataagatctacaacctgttcaatggatatacttccggaaaggaacaacagacagcttataacacgctgctggatttgggcagtccaacactgcaccgcgtgctgtatcattacaatcagcattacgagtctttcggcgagttcacatggaggtgtgaggatgagttgggaccccgaaaagcaggactgatcctcagtcagcttggggacctctcaagctggtgcaatggactgctccaggaacccaagatcagcctgcgcaggtcctcattgaaatacctcggatgtcgctatagcgaaatcaagccttacgggctcgactgggcagagctaagtcgcgacctgcgcaagacttgcgaggaacaaacactctcaataccctataatgactacggagacagcaaagaaatttag

SEQ ID NO: 214998 - DNA, 3651 bp, synthetic construct
  misc_feature 1..3651: note = Description of Artificial Sequence: Synthetic coding sequence
  source 1..3651: mol_type = other DNA
atggcactcgccggattatgcgctctactagcctgttgctggggtcccgctgctgttcttgctacagccgcaggtgacgtggatcccagcaaggaactggagtgcaagctgaagtccatcacggtcagtgccctcccattcctgagggaaaatgacctctccatcatgcatagcccatcggcctctgagccaaagttactgttttctgtgaggaatgattttcccggtgagatggtcgtggttgatgacctcgaaaataccgagctgccctatttcgtgctcgaaatatctggtaatacagaggacatcccactggttcgatggcgacagcagtggcttgaaaacggaacgctgctctttcacatccatcaccaggacggcgctccgagcctgcctggccaggatcccaccgaagagccccagcacgagtcagcggaggaggaactgcgaatcctgcatatctccgtaatgggcggaatgatcgcactgctgctgtctatactgtgcctggtgatgattctctatacaaggagaaggtggtgcaagcgcagacgggtcccccagccacaaaagagtgcctctgccgaagctgcgaatgaaatacactacatccctagcgtccttatcggaggccacggacgggaatctctgaggaatgcgagagtgcaggggcataactcttccggcactctgtccatccgcgagacaccgatcctggatgggtacgagtacgacatcactgacttgaggcatcatctgcagcgggagtgtatgaacgggggtgaggactttgcatctcaagtgacgcgtaccctcgatagtctgcagggatgtaatgagaaaagtgggatggacctgacaccagggtctgacaacgcaaagctctctctgatgaacaagtacaaagacaacatcatagcgacatcaccggtagattccaaccaccagcaggccacattgttgtcccatacctccagctcacagcggaagaggatcaataataaggcccgagccggttccgcttttctaaaccctgaaggagattccgggaccgaagccgaaaatgatccccaactgacattttacaccgacccatctcgatctcgcagacgatcccgcgttggctccccacgcagcccagtcaacaaaacaaccctgactctgatctcaattacatcatgcgtcataggtcttgtgtgcagttctcatgtgaattgcccgcttgtcgtgaagataacactgcatgtccctgaacacctcattgcagacggaagtaggtttatcctcctcgagggttcccagctagacgcctcagactggctaaacccggcacaggttgttctgttctctcaacaaaatagcagtgggccatgggccatggatctttgtgccaggagattgctggacccttgcgagcatcagtgcgacccagaaaccggggaatgcctgtgttacgagggctacatgaaggacccggtccacaagcatctgtgcatacggaacgagtgggggacaaatcagggaccatggccttacacaattttccagaggggattcgatcttgtgttgggcgagcagcccagcgacaagatttttaggtttacatacactctcggagaggggatgtggttgccattatctaagagctttgtgatacctccggctgagctggccattaacccttccgccaagtgtaaaacggacatgacagtgatggaggatgccgtcgaggtgagagaggaactgatgacatcttcaagctttgacagtctggaggtgctgctggactcctttggcccagtacgcgattgttccaaagacaacggcggttgcagtaagaatttccggtgtatttccgatcgcaagctggattccacgggttgtgtatgtccctctggcctgtctcccatgaaagactcgagtgggtgctatgaccgtcacatcggagtggactgttcggatggctttaatgggggttgtgaacagctgtgcctgcaacagatggcccctttcccagacgaccccactttatataatatactgatgttctgtggatgtatcgaggattataagctcggggtcgacgggcgttcatgtcagttaattacagagacctgcccagagggctcagactgcggagagtccagggaattgcccatgaaccagacgttgtttggcgagatgttcttcggttacaacaaccatagcaaagaagtggccgctggtcaggttctgaaggggactttcaggcagaacaactttgccagagggctggatcagcagctccctgacggcctagtagttgctactgtcccccttgaaaaccaatgcttggaagagatcagtgaacccaccccagaccccgactttctcactgggatggtcaactttagcgaggtgtccggctatcctgtgctgcaacattggaaggtgcgtagcgtgatgtaccacattaaattaaatcaagtggcaatttctcaagccctcagtaacgctctgcacagcttggatggcgcaacttctcgggctgacttcgtggctctgctggatcagtttggcaatcactacatccaggaagccatctacggctttgaagaatcatgcagcatttggtatcccaacaagcaggttcagaggcgtctgtggcttgagtacgaggacatttcaaaaggaaacagtccaagtgacgagtctgaggaacgtgagcgcgaccccaaagtgctcacatttcccgagtacatcacctctctgtcggactctggcaccaagcatatggcagccggagtgcgtatggagtgccacagcaaaggccgatgtccttccagctgtcccctctgccacgtgacgagtagccctgacacacccgcagagccagtcctgctggaggtgacaaaggcagccccaatatacgagctggtcacaaataaccaaactcaacggttactccaagaggccacgatgtcatcattgtggtgctctgggactggcgatgtgattgaggattggtgtcgctgcgattccaccgcattcggagcagacgggctgcccacttgtgcaccactgcctcagccggttctcaggttatccaccgtccacgagccctcctccactttagttgttcttgagtgggaacactcagagccacccatcggggtccaaatcgtggattacctgctgcggcaagaaaaggtgacagaccgcatggatcattctaaagtggagacagagacagtcctcagctttgttgacgacatcatcagtggtgccaagagtccgtgcgccatgccaagccaggtgccagataagcaattgacaaccatctctttgattattagatgtctagaacctgatacaatctacatgtttacactatggggtgtagataacactggacgtaggtccagaccttccgacgtgatcgtgaaaacgccttgccccgtcgtggacgatgtcaaggcccaagagattgctgataagatttataatctcttcaacggctacacttccggaaaggaacagcaaacagcttataacaccctgctcgatcttgggagtcccacgctacatagggtgctttatcactataatcagcactatgaaagttttggggaatttacctggcggtgtgaggacgagctggggcctagatag

SEQ ID NO: 214999 - DNA, 3657 bp, synthetic construct
  misc_feature 1..3657: note = Description of Artificial Sequence: Synthetic coding sequence
  source 1..3657: mol_type = other DNA
atggccctggccggactctgcgccctgctagcgtgttgttggggcccagctgccgtgttggccaccgccgctggagacgtcgaccccagtaaggaactggaatgcaagctgaagtctatcaccgtcagcgctcttccattcctcagagagaatgatctgagcatcatgcacagcccttctgcctcggagcctaaactactgtttagtgtgcgcaacgattttcctggcgagatggttgtggtcgatgaccttgagaacacggaactgccttatttcgtgctggaaatcagtgggaatactgaagatattcccttggtcagatggcgccagcagtggctggagaatggtactctgttgttccatattcatcaccaggatggcgctccatccttgccaggtcaggaccccaccgaagagccgcagcacgagtctgcagaagaggagctgcggatcttgcatatctccgtgatggggggaatgattgccctcctgctgagcatcttgtgccttgtgatgattctgtacacgagacggagatggtgtaagcggagacgggtccctcagccccagaagtccgcatcggctgaagcggctaatgaaatccactacattccgagcgtgctgattgggggtcacggcagggaatccttgcggaatgctagggtgcagggtcataactctagcgggactttgagcattcgtgaaactcctatcctcgacggatatgaatatgacatcaccgatttgcggcaccatttgcagcgagaatgcatgaatgggggagaagacttcgcaagccaggtcacaaggacgctggattctctgcaaggctgcaatgagaagtccggtatggacctgaccccaggcagcgacaatgctaaactgtccctgatgaacaagtataaggataatatcattgccacctccccggtggattccaatcatcagcaggcgactctgctgagccatacatcttcctcacagagaaagcggatcaacaacaaagctcgcgctggtagcgccttccttaacccagaaggagactcaggcacagaagccgaaaacgatcctcagctgacattctacactgatccttcacgctctcggagaaggagcagagtggggtcacctcggagtcccgtcaacaagacaacgctgactctcatatctatcacttcctgtgtgatcggcctggtctgcagttctcatgtcaattgtccactcgtggtgaagattaccttacatgttccagagcacctcatagctgatgggtcccgatttatcttactggaaggtagccaacttgacgcctcagactggctcaaccctgcccaagtggtgttgtttagccagcagaatagttcaggcccatgggcgatggacttgtgtgcgagacgattgcttgacccttgcgaacatcagtgcgatcctgagaccggagaatgtctgtgctacgaaggctatatgaaagaccctgttcacaagcatctctgcattcgcaacgagtggggaaccaatcagggaccctggccttacaccatttttcaaagagggtttgatctggttctgggagagcagccatccgataaaatattcaggtttacttatacccttggcgaagggatgtggttacccctgtccaaaagcttcgttatacccccagccgaactagctataaacccatccgccaagtgtaagacagatatgaccgtgatggaagacgcggtcgaagtgagggaggaactgatgacctcatcttcattcgactccttggaagtgctgttggactccttcggccctgtgcgcgactgctcaaaagataatggcggatgctccaagaattttcgttgcatcagcgatcgcaagcttgattctactggctgtgtctgtccttccggtctctcacccatgaaagattcatccggctgttatgaccgccacatcggggtggactgttcagacgggttcaatggtggctgcgaacagctgtgcctccagcagatggcccctttccccgacgaccctaccctatataatatactcatgttctgcgggtgcatcgaggattacaagttgggggtcgatgggagaagctgccagctcatcaccgagacatgtcccgagggcagtgattgcggggagtcccgagagctgcccatgaaccagacactgtttggcgaaatgttttttgggtataataatcatagcaaagaagtggccgctgggcaggtgctgaaaggtaccttcagacagaataatttcgcaaggggattagatcagcagctgccagatgggcttgtggtcgccaccgtgcctttagagaatcagtgtctggaggaaatctccgaacctactccagacccagacttcttgactggaatggtgaatttctcagaggtgtccggctaccccgtcctccaacactggaaagtgaggtccgtgatgtaccatatcaaactgaatcaggtggccatttctcaggcactgtccaatgcattgcattccctcgatggagctacctcccgggcagattttgtggccctcctggaccaatttggaaatcactatatacaggaagctatttacggatttgaagaaagctgtagcatctggtaccccaataagcaggttcagcggcgattgtggctcgagtatgaggatattagtaagggcaacagtcccagcgacgaaagcgaggaaagagaacgcgacccaaaagtactcacctttcccgaatacatcacttctctgagtgactccgggaccaagcatatggcagcgggagtgcgtatggaatgtcatagtaagggacgttgcccctcctcctgccccctgtgccatgtcacatcctcgccggacacaccggcagagcccgtgctgctggaggtgactaaagccgctccaatatacgaactggtcacaaataaccagactcagaggctcttacaggaagccactatgtcgagcctatggtgctctggaaccggtgatgttatagaagattggtgtaggtgcgatagtactgcttttggagcggacggcctccctacgtgcgccccactgccccagcccgtccttcgtctgtctactgtccacgaaccttcttctacacttgtggtactggagtgggaacattcagaaccgcctatcggcgtccaaattgttgactacctactgcgacaagagaaagtgaccgaccgtatggaccattccaaggtcgaaacagagaccgtcctaagctttgtggatgacatcataagcggggctaaaagtccatgcgccatgccaagccaggtaccagacaagcagctgaccactatttcactcattatcaggtgcctcgagccagacaccatttacatgttcacactttggggagtggataacaccgggaggagatctcgaccaagtgacgttatcgttaaaaccccttgccccgtggtggacgacgtgaaggcccaggagattgctgacaaaatttataatctcttcaacggctatacctccggaaaagagcaacagacagcatataatacccttctggacttaggatcaccaactctgcacagagtgttatatcattataatcagcactatgagtccttcggagaatttacttggaggtgtgaggatgagctgggacctagaaatcagtag

SEQ ID NO: 215000 - DNA, 1323 bp, synthetic construct
  misc_feature 1..1323: note = Description of Artificial Sequence: Synthetic coding sequence
  source 1..1323: mol_type = other DNA
atgaataccctgctctgtaagggtatgttctgtctcctcagttgggaggcggactctcgcggaaggctcggcgagtataccctccaaccacttagtttgcagactgaggaaaccactgagctcgggagcaagaaagagctgaaatctatgccatttatcacctatctgtccgggctcctgacagctcagatgctcagtgacgaccaactcatctccggagtcgaaatcagatgcgaggagaaggggaggtgtccctctacctgccacctgtgtcggagaccagggaaggagcaactttccccgactccagttctgttggagatcaacagagttgtgcctctgtacactctaatacaggataatgggaccaaggaagccttcaagtcggctcttatgagtagttactggtgtagtgggaaaggagatgttattgatgattggtgtcggtgtgatctaagcgcctttgacgccaacggtctccccaactgttcccccttactgcagcccgtcttgcgtctgagccccaccgtggagccgtcttctaccgtcgtatcactggagtgggtggatgtgcagcctgcgattggaacaaaggtcagtgattacatcctgcagcacaagaaggtagacgaatataccgacactgacctgtatacaggggagtttctgagtttcgcagacgatctactgagcggtctggggaccagctgtgtcgccgctggtaggtcacatggcgaggtgccagaagtttccatctattcagtgattttcaaatgtcttgaacctgacggcctctataagttcactttgtacgcagtggacacacgcggtcgtcacagcgagcttagcacggtgacactgcgaaccgcctgtcccttagtggacgataacaaggccgaggaaattgcggacaaaatctacaatctatataacggttatacttccgggaaggaacagcagatggcctacaatacgctgatggaagtgtccgcttctatgctgtttcgagtacagcatcattacaattcacactacgagaagtttggagacttcgtttggcggtctgaggatgaactgggccctcggaaggcccatctgatcctgagacgcctggaaagggtctcctcccattgcagttctctgttgaggtcggcctacatccaatctcgtgtagagacagtgccctatctgttctgtagatcggaggaggtcaggcccgcaggtatggtctggtattcgatcctcaaggacactaaaatcacttgtgaagaaaaaatggtgagtatggcacgcaatacctacggagaatccaaggggagatag

SEQ ID NO: 215001 - DNA, 4020 bp, synthetic construct
  misc_feature 1..4020: note = Description of Artificial Sequence: Synthetic coding sequence
  source 1..4020: mol_type = other DNA
atggcagcggctggggcacgcctgagccctggcccaggtagcggtctgcgaggacgtcctagactgtgcttccaccctggacccccacctctgctacccctcctgctgctgttcctgttgttactgccacccccacctctgctggctggcgcaacagcagcagcatcaagagagccagacagtccttgtcggctgaagacggtgaccgtgagcactcttcccgcactcagggagagtgatatcggttggtccggagcacgggctggcgctggcgctggcacgggagctggagcagctgccgcagctgcgagtccagggtctcctggaagcgccggtacagcagcggaatcccggctactcctctttgtgcggaacgagctgccgggaaggattgctgttcaggatgacctggacaataccgaacttcctttctttactttggagatgtcggggacggcggcagatataagcctggtgcactggagacagcagtggctagaaaatgggactctgtactttcacgttagcatgtcaagcagtgggcagctggcacaggcaaccgcccctactcttcaggaaccctcagaaatcgtcgaggagcagatgcacattctgcacatctcagttatgggcggtttgatagcactattactgttactgctggtgtttactgtggccttatacgctcaacgcaggtggcagaaaagacggagaatcccccaaaagtctgcttccacggaggccacccacgagatacattatataccttccgtgctcttgggacctcaggcgagggaatctttcaggagcagccgtctgcaaacccacaacagtgtcattggtgtgcctatccgggagactccaattctggacgattacgactgtgaggaagatgaggaaccacctagaagagcaaatcatgtgagtagggaggacgagtttgggagccaggtcacgcacacactcgacagcctaggccaccctggcgaggaaaaggtggatttcgaaaagaaggcagcggctgaagcaacccaggagaccgtggagagcctgatgcagaagttcaaagaatccttcagagcaaacacccccatcgagattggccaattgcagcccccacttcggagtacctctgctggaaaaagaaagagaaggtcaaagtccaggggtggcataagctttgggagggcgaagggcacatctggaagtgaggctgatgacgaaacacagctcacattctatactgagcaataccgatcccggaggagaagtaagggactgctgaagtcccccgtgaacaagacagctctgactctcattgccgtttccagttgtatcctggccatggtttgtgggagtcaaatgtcctgtccacttactgttaaggtgactctgcacgtgccagagcacttcattgcagacgggtcctcatttgttgtgtcagaggggagttacttagacatttccgattggcttaaccccgcaaaattgtctttatattatcagatcaatgctacatccccctgggtccgcgatttgtgtggccagcggactaccgatgcctgtgaacagctgtgcgaccctgagaccggcgagtgttcttgccacgaaggttacgcccctgaccccgtgcataggcatctatgcgtacgaagcgattggggacagagcgaaggaccctggccctatacgaccttggagagaggatacgatctagtgaccggtgaacaggcgccagagaaaattctgagatccacattctctctgggtcagggactgtggttgccagtctctaagtctttcgtagtacccccagtggaacttagtatcaaccctctcgctagctgcaaaacagatgtcctggtgactgaggaccccgctgatgtgagagaagaagcaatgctgtcaacctacttcgagacgatcaatgatttactcagttcattcggtcccgtgagagactgcagcagaaacaatggtgggtgcaccaggaattttaagtgcgtgtctgaccgccaggttgactcttccgggtgcgtgtgtcccgaggagctcaagccaatgaaggacggttctggatgttatgatcatagcaaaggaatcgactgttctgatggcttcaatggcggatgcgaacaactctgtttgcaacagacactacccctcccgtatgatgctacatcctctactattttcatgttctgcgggtgtgtcgaggagtacaaactggcacccgatggaaagtcttgtttaatgctaagcgatgtttgcgagggacctaagtgcttgaaacctgacagcaaattcaatgacacactttttggggaaatgcttcacggatacaataaccggacacagcatgtgaatcaaggccaagtgtttcaaatgacctttagggagaataacttcattaaagacttccctcagctcgcagatggactcctggtcattcctttacccgtggaagagcagtgtagaggagtgcttagtgaaccactcccggatctccagctcctgaccggtgacattcggtacgacgaagctatggggtatcccatggtgcagcaatggagggtgcgctccaacctttacagagtcaagttgtccacaattacactcgccgctgggtttactaatgtgttgaagatcctcactaaggagtctagccgcgaggagctgttgagttttattcagcactacggctcgcactacattgccgaggctttgtacggctctgaactgacctgtatcatccacttcccatctaagaaagtccagcagcaactatggctgcaataccaaaaagaaactactgagttaggctctaagaaagagctgaaaagcatgccctttatcacatacctgtctggactcctgactgctcagatgctgtccgatgaccagttgatttctggcgtcgaaataagatgtgaggagaagggtaggtgcccatctacctgtcacctctgtcgacggccaggcaaggagcagcttagtcccaccccggtacttctcgagattaatcgggtggttccactgtatactctgattcaggacaacggcaccaaggaggctttcaagtccgctttgatgtcttcctactggtgttctgggaaaggcgacgttattgatgattggtgccgatgtgatttgagcgccttcgatgctaatggtctgcctaactgttctcctctcctacaaccggtgctacggctttctccaacagttgaaccatcaagtacagttgtcagtcttgagtgggtggatgtgcagcctgccatcggtacaaaggtctctgattatatccttcagcacaagaaagttgatgagtataccgatactgacctttatactggcgaatttctgagcttcgctgacgatctgctgtcaggactggggacatcttgcgtggcagccggtaggtcgcatggagaggtgcctgaagtgtcaatatactccgtcatatttaagtgccttgaaccggacggcttgtacaaattcacactttacgcagtggatacccgtggtcgccactcagaactcagcactgtgactctgcgcactgcatgtcccctggtggacgacaataaagctgaggaaatcgcagataagatttacaacctgtataatggatatacctcagggaaggagcagcaaatggcctataacactcttatggaggtcagcgctagcatgctattcagagtgcagcaccactacaacagtcactacgagaagttcggcgatttcgtgtggcgctctgaggatgagctggggcctcgcaaggcccacctcattcttaggcgtctcgagagggtgagttcacattgctcttccttactgagaagcgcctatatacagtcaagagtggaaaccgtaccctacctcttttgcagaagtgaggaagtgcgccctgcaggaatggtgtggtatagtatcctgaaggatacaaaaatcacctgcgaagagaagatggtgtccatggccaggaacacgtacggggaaagtaagggccgttag

SEQ ID NO: 215002 - DNA, 1188 bp, synthetic construct
  misc_feature 1..1188: note = Description of Artificial Sequence: Synthetic coding sequence
  source 1..1188: mol_type = other DNA
atgcccttcattacctatctgtcaggactgctgacagcacagatgctctccgatgaccagctgattagcggtgtcgaaatcaggtgcgaagaaaaaggtcggtgcccatctacttgccacctgtgtcggagacctggcaaggaacagctttccccgactccggtgctgctcgaaattaaccgcgttgtccccctctacaccctcattcaagataatggtacaaaagaggcgttcaaatccgccctgatgtctagctactggtgcagtgggaaaggagacgtcattgacgactggtgcaggtgtgatctctctgctttcgatgcgaacgggttacccaattgctcacccctgctgcagcccgtcttacggctatcaccgacagtggaaccttcaagtaccgtggtgagcctggaatgggtagacgttcagccggcaattggaactaaagttagtgattacattctacaacacaaaaaagtggatgaatacacagacacagacctgtacacaggtgagtttctgtcttttgctgatgatcttttgagcggattggggacttcgtgtgtcgcagctggcaggtctcatggcgaggtgccagaggtgtctatctatagtgtgatctttaaatgcctcgagcctgacgggttatataaattcacactgtacgcagtggacacaagaggacggcactccgagttgtccacagtgactctcagaaccgcttgccctttggtggatgacaacaaggcagaagaaatcgcagacaagatttataacctgtataacggatatacttcaggcaaggaacagcagatggcatataatacgctgatggaagtctctgccagcatgctgttccgggtgcagcatcactacaattctcactatgagaaattcggagacttcgtctggcggtcagaagacgaactgggcccacggaaggctcatctgatcttgcgtcggcttgaacgggtatcctctcactgcagcagcctattacgcagcgcttatattcagtctcgcgtggagactgttccctatctgttctgccggtcagaggaagtgaggcccgctgggatggtgtggtacagcatcctgaaggacacaaaaattacttgcgaggagaaaatggtgagtatggctaggaacacctattacctgaccttgtctaaggtgagtcctttttag

SEQ ID NO: 215003 - DNA, 585 bp, synthetic construct
  misc_feature 1..585: note = Description of Artificial Sequence: Synthetic coding sequence
  source 1..585: mol_type = other DNA
atgccattcatcacttacctatcgggcctcctcaccgcccagatgctctctgacgaccagttaatctccggcgttgagattaggtgtgaagaaaaagggagatgcccaagtacatgccacttatgtcgccgacccggtaaggagcaactctctccaaccccagtgctactagagattaaccgggttgtgcccttgtatacactcattcaggataacggcacaaaggaggcgttcaagtcagctcttatgtccagctattggtgctcagggaaaggggatgtaattgatgattggtgtaggtgtgacttaagcgcctttgacgccaatgggctgccgaactgcagcccacttttacagccagtgctccgactcagccccactgtcgagccttcctccacagttgtgagtctagagtgggtggacgtgcagcccgcaatcggcacaaaggtttcagattacatccttcaacacaagaaagtggacgagtacaccgacacggacttgtacacagtgtactgctggatcaccttcatcgacctccgaatcctgaatcaaccgtgtattccaggaatgaaacccacctag

SEQ ID NO: 215004 - DNA, 3867 bp, synthetic construct
  misc_feature 1..3867: note = Description of Artificial Sequence: Synthetic coding sequence
  source 1..3867: mol_type = other DNA
atggctgccgctggagcacggctgtcccccggaccgggttcgggattgagaggcaggcctaggctctgttttcatccaggtcctccgcctctactccctctacttttgttattcctactattgctcccacccccacctctgcttgccggagcgaccgcagccgcttccagggaaccagactcaccctgcaggttgaaaaccgtcacggtgtccaccctgcctgctttaagggaatccgatataggctggtcaggggcacgagctggggctggggctgggacaggcgcaggggctgccgctgctgccgcatcacctgggagccctggttcagccggtaccgctgcggaaagccggctgctactgtttgtgcggaatgagctaccaggacgaattgctgttcaggacgacttagataacacggagctgccatttttcacactggagatgagcggcacagcagccgacatctccctcgttcattggcgacagcagtggcttgagaacggtaccctctatttccacgtgtcaatgtcttcgtcaggtcaactagcgcaagctactgcccctacattacaggagccctcagagatagtcgaagagcagatgcacatactccatatcagcgtcatgggcggactcattgcactgttgcttctgctgttggttttcacggtcgccctgtacgcgcagagacgctggcaaaaaagacggcgaattccacagaagtctgccagtacagaggccacccatgagatccactacatccccagcgtattgctggggcctcaggccagggagagtttccgatcatctaggctgcagactcacaacagcgtgattggggttccaattcgagagacgccaatcttagatgattatgattgtgaggaggacgaagaacctcctagacgtgcaaatcacgtgtcgcgggaagacgaatttgggtcccaggtcactcacaccctcgacagcttgggacaccccggagaggagaaggtagattttgagaagaaaggcggaatttcatttggccgtgctaaaggtacatcgggaagcgaggctgacgacgagacccagctgaccttttacacagaacaatatagaagccgccgacgctccaaaggcctgttaaaatctccagtcaataagaccgctcttaccctgatcgctgtatcgtcctgcatccttgcaatggtatgcggctcacaaatgagttgtcccctgactgtgaaggtgactctccacgttcctgaacactttatcgccgatggctcctccttcgtcgtaagcgagggctcatatctggacatatcagattggttgaacccagccaagctgagcttgtactaccaaataaacgccacctccccctgggtgagagatttgtgcgggcagaggacaacagacgcctgcgagcagctctgcgaccctgaaacgggagaatgctcttgtcacgaaggatatgcacctgaccccgtgcaccggcacctgtgtgtgcgttctgactggggccagtccgagggtccctggccatatacaaccctggagcgtggatacgaccttgtgaccggagaacaagctccagagaaaatcctgcgcagcacgttctccctgggacaagggctgtggttgccggtatccaaaagttttgtggtaccacctgttgaactatcgataaatccactggcatcttgcaaaacggatgtgttagtgactgaagatcctgccgatgtaagagaggaagcaatgctaagtacctactttgaaacaataaatgacttattgtctagctttggaccagtccgagattgtagccggaataatgggggttgtactcggaacttcaagtgtgtttctgaccgccaagtagactcaagcggttgcgtctgccccgaggaattgaaacccatgaaggacgggtccggctgttatgatcattccaaagggattgattgctccgatggtttcaatgggggatgcgagcagctgtgtttgcagcagacactgccgcttccatacgacgctacttcatcgactattttcatgttctgtgggtgtgtggaggagtataagttggcccctgacgggaagagctgcctaatgctgagcgatgtgtgcgaagggcctaaatgcctaaaacccgacagtaagttcaacgataccctgttcggcgaaatgctccacggctataacaaccggacccaacatgtcaaccagggccaggtgtttcagatgacatttagagagaataactttattaaggacttccctcaactagctgatgggctgctcgtgattcccctccctgtggaagagcagtgtagaggcgtgttgtccgagccgctacctgacctccagctgttgactggggacatccgttacgatgaagcaatggggtatccaatggtgcagcaatggcgtgtgcgttccaatttataccgggtaaagctgagtaccattaccttggccgctgggttcaccaacgtcctgaaaatcctgacgaaagagtcaagtagagaggagctattatcatttatacaacattatggctctcactacattgccgaggctctttacggctctgaacttacctgtattattcactttccttcaaagaaggtccaacaacaactgtggctccaataccagaaggaaaccacagaattgggcagtaagaaagaattaaaatcaatgccttttataacctacctctctggactcctcactgctcaaatgctctctgacgaccagctgatcagcggcgtggagattcgctgtgaagaaaaagggagatgcccctcaacctgccacctctgtcgcagaccgggtaaagagcagctttcccccactcccgtcctcttggagatcaatcgcgtagtgccactttataccctcatccaagataacggaacaaaggaggccttcaaatccgccctcatgtcttcatattggtgctctgggaaaggtgacgtcatcgatgattggtgcaggtgcgacctctctgcgtttgatgccaacggtctgccaaactgcagtccacttttgcaaccagtgctgcgcctgtccccaactgtcgagccaagcagcaccgtggtgtcccttgaatgggttgacgtgcaacccgcaatcggtaccaaggtgtctgattatattctacagcataagaaggtcgatgagtacactgacacagacctctacaccggagagttcctttctttcgcagatgaccttctcagtggactaggcaccagttgcgtggccgctggaagaagtcacggggaagtccccgaggtctctatctattccgtgattttcaaatgcttagagccggacggcctgtataaatttactctgtatgccgtggataccagaggtcgccacagcgagctaagcactgtaacactgaggaccgcctgtccactcgtggacgacaacaaggccgaagagattgcagacaaaatttataatctctacaatggctataccagtggcaaggaacagcagatggcctataatacactcatggaagtctctgcgtccatgctcttcagagtccagcaccattataattctcattacgaaaaatttggagattttgtgtggaggtctgaggacgaactgggtccacgaaaggcacacttaatcctcagacgcctcgaaagagtctcatcccactgctcttccctcctcagatcagcttacatacagtctcgggtggaaacagttccatacctcttttgccggagcgaagaggttaggccagccggaatggtctggtactccattctgaaggacactaaaatcacatgtgaagaaaaaatggttagtatggcaagaaatacatatggtgagtcaaagggacggtag

SEQ ID NO: 215005 - DNA, 1188 bp, synthetic construct
  misc_feature 1..1188: note = Description of Artificial Sequence: Synthetic coding sequence
  source 1..1188: mol_type = other DNA
atgcccttcatcacctacctctccggtctcttaacggcacagatgctttccgacgatcagctcattagcggtgttgagattaggtgcgaagaaaagggccgatgtccctccacctgccacctctgtagaagacccggaaaggagcagttatcccctacacctgtcctcctggagataaaccgggtagtgcccttgtacacactaattcaagataatggcaccaaggaggctttcaaatctgcccttatgtccagttattggtgcagtggcaaaggggacgtcatcgatgactggtgccgttgtgatctttccgctttcgacgcgaatggcctgccaaattgttcccctctgctccagcccgtcttgaggttgtccccaacagtagagcccagtagcaccgtcgtgtccctggaatgggtcgacgtgcaaccagcgatcggcaccaaggtgtccgattatatcctgcagcacaagaaagtcgatgaatataccgacacggatctctacactggggaatttctcagctttgcggacgacctcttgagcggcctgggcacatcttgcgtcgctgcagggagatcgcacggcgaggtgcccgaggtctcaatctattcagtgatcttcaaatgtttagagccggatggattgtacaagttcactctgtatgctgtcgataccagaggccgtcacagcgaacttagtaccgtcacactcagaaccgcttgtccactggtagatgataataaggcagaggagattgcggacaaaatctacaacttgtacaatgggtacacatccggtaaggaacaacagatggcttataataccctgatggaagtgtcggcctcaatgttgttccgtgtgcagcaccactataattcccattacgagaagtttggagactttgtgtggagatccgaggatgagctgggacctcgcaaagcacacctcatcttacgcaggctggagcgcgtgtctagccattgttcttccttgctgaggagcgcctacattcaatcacgagtggagactgtcccctacctattttgccgatcggaggaggtgaggcctgcaggcatggtgtggtattcgattttaaaagataccaagattacctgcgaggagaaaatggtatctatggcccgaaacacctactatcttacactgtccaaggtcagccccttctag

SEQ ID NO: 215006 - DNA, 4008 bp, synthetic construct
  misc_feature 1..4008: note = Description of Artificial Sequence: Synthetic coding sequence
  source 1..4008: mol_type = other DNA
atggccgcagccggtgccagactgtcaccaggaccaggatctggtttacgaggaaggcctcgcctctgtttccaccccggacccccaccgctactgcctcttttgctactcttcctgcttcttttaccccctcctcccttgctggccggtgccactgcagctgcctcacgtgagccagacagcccctgccggctgaagactgtgaccgtgagcaccctccctgcattacgtgaaagtgacattggctggtccggcgctcgggctggtgccggagctgggacaggggcaggagcagcagcagcagctgcttctcccggatcacctggcagcgccggaacagcggctgagtcccgcctgctgctgttcgttcgtaacgagctgcctggcagaattgcagtccaggatgaccttgataatacagagctccccttttttacacttgagatgagtggcacggccgcagatattagtctcgtgcattggcgacaacagtggctggagaacggcaccctgtacttccacgttagtatgtcgtccagtgggcaacttgcccaggccactgcgccaaccctccaggaaccaagcgagatcgttgaggagcagatgcatattctgcacatctctgtcatgggaggtttgattgcattgctgctcctcctgcttgtgtttaccgtcgccctgtatgcccagcgacggtggcagaaaaggcggagaatcccccagaaaagtgcatccactgaagcgacccacgaaatacactacatccccagcgttttgttgggaccccaagcaagagaaagttttaggtcgagcaggctacagacccacaatagtgtgatcggagtgcccattagggaaactcctattctcgatgattacgactgcgaggaagacgaggagccgccacgcagagccaaccacgtgtctcgggaagatgagttcgggagccaagtgacccacaccttggattcactgggacaccctggcgaagaaaaagtcgatttcgaaaaaaaggcagcagctgaagcaacacaagagacggtggaatctctgatgcaaaagttcaaggaatcattccgggctaatacaccaatcgagattggacagctccagccgcctcttaggagcacatctgctgggaaacggaagcgccgtagtaaaagtcgcggtgggatctcattcgggagagctaaagggacctccgggtctgaggctgacgacgaaacccaactcacgttttacacagaacaataccgttccagaagaaggtccaagggactgctcaagagccccgtaaataagactgctctcacacttattgctgtaagctcttgtatcttggctatggtgtgtggcagccaaatgtcatgccccctgaccgtcaaagtcactctgcatgtccctgagcacttcatcgccgatggaagcagctttgtcgtgtcggagggaagctatctggatatcagtgactggctcaatccggcaaagttatcactctactatcagataaacgccacgagcccttgggtccgcgatctgtgtggtcagcgaaccactgacgcttgtgaacagctttgcgacccagagacaggtgagtgcagctgtcacgaaggttatgcacctgacccagtccatcgccatctctgcgtgcggtccgactgggggcagagcgaaggtccatggccatataccaccctcgagaggggttacgatttggtgacaggtgagcaagcccctgagaagatcctgtcattaggccagggcctctggttgcctgtgtcaaagagcttcgttgtgccccctgtagagctgtctatcaaccctttagcatcatgtaagactgacgtcctggtaactgaagacccagccgatgttagggaagaggcgatgttgtccacttatttcgagaccatcaatgacctcctctcaagctttggacccgtgcgcgactgcagtcgaaacaacgggggatgcactcgaaacttcaagtgcgtttccgatagacaagtggatagctcgggctgtgtatgcccagaggagctcaagcccatgaaagacgggtctggctgctatgaccattctaaagggatagactgcagtgatgggtttaacggaggctgtgagcaactgtgcctccagcagactctccctctgccctatgatgcaacgagtagcacaattttcatgttttgcggctgcgtggaagagtacaaactagctcctgatggaaaatcctgtctgatgctgagtgatgtctgcgagggacccaagtgcctgaagccagacagtaaatttaatgacacgcttttcggcgaaatgctccacggctataataatcgtactcagcacgtcaatcagggccaagtgttccagatgacctttcgggaaaacaacttcatcaaggactttcctcaacttgcggatggtctgctggtcattcccctaccggtagaagagcagtgtcgtggtgtactgagtgagccccttcccgacttacaactattaactggcgacatccgttatgatgaagcaatgggttatccaatggttcagcaatggagggtcagatctaatctatatagggtgaaattgagcaccatcactctggctgctggcttcacaaatgtcctgaagatcttgacaaaggagtctagccgtgaagaattgttgtcttttattcaacactatggaagccactatatcgcagaagccctctatgggtctgaactcacttgcattatccacttccccagtaaaaaagtgcagcagcagctatggctccagtaccagaaggaaaccactgagctggggagcaagaaagagttaaagtcaatgccttttatcacatacttaagcggtctgctcacggctcagatgctttccgatgaccaactgatctcaggagtggaaatcagatgtgaggagaaaggaagatgtcccagcacgtgccatctgtgtagacgacccggtaaggaacaactttcccctacccctgtcctactggaaatcaaccgcgtggtacccctctacacacttatccaagataatggaacaaaggaggctttcaaatctgctctaatgtcctcctattggtgtagcggcaaaggagatgttattgatgattggtgccgatgcgacctgagtgcattcgacgctaacggcctacccaattgtagtccgctcctacagcctgttttgcgtctcagccctacggtagaaccgtcttcaactgtcgtttccttggagtgggtggacgtccagccggctattggcaccaaagtgtcagattatattctgcagcacaaaaaggttgatgaatacactgacaccgacctgtacactggcgaatttctgtcattcgctgacgatctgctgtccggccttggtactagttgcgtggctgccggaaggtcacatggtgaggtccccgaggtcagcatttactctgtgatttttaaatgcctggagcccgacggcctctataagttcactctgtacgccgtcgatacccgaggacggcactccgaactgtctaccgtaacactgcgcaccgcctgtccccttgtggatgacaataaggccgaggaaatagccgacaagatctacaacttgtacaatgggtatacatcagggaaagagcagcaaatggcatataatacgctgatggaggttagtgcctccatgctgttcagggtgcagcaccattacaactctcattatgaaaaatttggcgattttgtgtggaggtccgaggacgagcttggccctaggaaagctcatctcatccttcgaaggttggagcgggtttcctcccattgttcgtcactgttgcgcagcgcctatatccagtcccgggtcgaaacagttccctatcttttttgccgcagtgaggaggtgagacccgctgggatggtttggtactccatcctgaaagacacaaaaatcacatgtgaggagaagatggtgagtatggctcggaacacctacggcgaatctaagggtaggtag

SEQ ID NO: 215007 - DNA, 297 bp, synthetic construct
  misc_feature 1..297: note = Description of Artificial Sequence: Synthetic coding sequence
  source 1..297: mol_type = other DNA
tagatggcatacaatacgctcatggaggtgagtgcatccatgctcttcagagtccagcatcattataattctcactatgaaaagttcggagatttcgtgtggcgcagcgaagatgagcttggaccttcacttctagaaagctttatgtcactccaggatatcaatttgctagaacggagacctggtagaccccagaggcccggaaacccattatcaaacgtttcctggcgtatctcggagattgctccgacttcacacaccgacatgtctgcagggataaaggagactgcaagctag

SEQ ID NO: 215008 - DNA, 6827 bp, synthetic construct
  misc_feature 1..6827: note = Description of Artificial Sequence: Synthetic coding sequence
  source 1..6827: mol_type = other DNA
atggccgcagagagaaggtgtggatccatgagggacctgcgtgcccaggtgacgtctggactactacccttccctgaggtgaccctacaggccctgggagaagacgagatcactctcgagtccgtgttgagggggaaattcgcagctggaaaaaatggcctagcatgcctcgcctgcggccctcaactcgaggtggttaactccattacaggggagcgcctgtctgcctatcggttttcaggcgtgaatgaacagccccctgtcgtgctggctgtgaaggagtttagttggcaaaagcggaccggactgctcatcggtttggaggagactgaagggtcagttctttgtctgtatgacctcggcatctccaaggtcgtaaaggccgtcgttctcccgggacgcgttacagctatcgaacctatcatcaatcatggcggagcctcagcaagtacacagcacctgcacccctctctgaggtggctctttggcgtggccgcagtggtgacagacgtgggccaaatcctccttgtggacctgtgtctggacgacctgtcgtgcaaccagaacgaggtcgaggcaagcgatctggaagtgttaaccggaatcccggcagaggtgccacacatccgggagagtgtaatgagacagggacgccacttatgcttccagctcgtgtcccctactggcaccgccgtgagcacactgtcatacatctcgcggaccaaccagcttgccgtaggcttctcagatggctatctagccctgtggaatatgaagtctatgaagcgagagtactacattcagctggagtctggtcaggttcctgtatacgctgtgaccttccaagaacctgagaacgacccacgcaactgctgctacttatgggcagtccagtccacgcaagatagtgaaggagacgtcctgtccctgcatttactgcagcttgccttcggaaacagaaagtgtctagcctccggccagattttatatgagggcctcgagtactgtgaagagcggtacacgttggatctgaccggcggaatgttccccctaagaggacagaccagcaacaccaaactcttgggctgtcagagcatcgagaaattcagaagccacggggaccgtgaggaaggagtaaatgaggctcttagtcctgacacatctgtgtccgtgttcacttggcaggtgaatatctatgggcagggtaagcccagcgtgtatctgggtttgttcgacatcaatagatggtaccacgcgcagatgcccgacagcctgagatcaggcgagtatctgcacaattgcagttattttgctctatggagtctggagtcggtagtctccagaacttctcctcacggtatactggatatacttgttcacgaacggtcactcaacaggggcgtaccaccatcctatcccccacccgagcagttctttaaccctagcacatataactttgacgcaacttgcctgcttaactctggggtggttcacctgacatgcactggtttccagaaagagaccctgactttccttaaaaagagcggccctagcttgaacgagctcatccctgacggttataacaggtgcctggtcgctgggctactatctccacgttttgtggacgtccagccctcaagtctgtcacaagaggagcagctcgaggccattctgagtgcagccattcagaccagctcgctgggcctgttgacagggtatattcgcagatggataactgaagagcagcctaatagcgccacgaaccttagatttgtgctggagtggacctggaacaaagtcgtgctgaccaaagaggagttcgaccggctctgtgtccccctctttgacggctcgtgccacttcatggatccacagaccatacaatctatccagcagtgttacctgttgctcagcaatctgaacatagtgctctcttgttttgcgtcggaagcgagggaaattacagagcgaggcctgatcgacctcagcaacaaatttgtggtcagccacttaatctgtcagtatgcacaggtggtgttgtggttctcacactctggcctccttcctgaaggtattgacgatagcgtgcagttgtctagactttgctataattatcctgttattcagaactactatacttcgagaaggcagaaattcgaacgtttatctcggggaaagtggaatccagactgtcttatgatcgacggcctggtgagccagctaggcgaacgcatcgagaaactgtggaagagggacgaaggcggaacgggtaagtatccacccgcatcgctacatgccgtactggacatgtacctgctggacggtgttaccgaggccgctaaacactccatcacaatatatttactgttagacataatgtatagctttcccaataaaaccgatacccctatcgaaagtttccccaccgtattcgcaatcagctggggacaggtgaagcttatacaggggttctggttgatagaccataatgactatgagtcgggactcgatcttttgttccatccagccactgctaaacccctcagctggcagcactctaagatcatacaagctttcatgagtcagggcgagcatcgccaggccctgaggtatatacagaccatgaaaccaacggtgagctcaggaaacgatgttattttgcacttgacagtcctgcttttcaaccgctgtatggtggaagcttggaacttcttaaggcagcactgtaatcgcttgaacatcgaggagctgctgaagcacatgtatgaagtgtgtcaagagatgggcctgatggaggatttgcttaagttgcccttcaccgatactgagcaggagtgcctggtcaaatttttgcagtccagcgccagtgtgcaaaatcacgagttccttctggtgcaccatctgcagagggccaattacgtccccgcacttaagctcaaccagacactcaaaatcaatgttatgaatgaccgagaccccaggctgagagaaaggtctttagcacggaattccatcctggaccagtacgggaaaatcctccccagagtgcatcggaagttggccatcgaaagagctaaaccctaccatctctccacctcttccgtgttcagacttgtctccaggcctaagcccctctccgctgtgcccaaacaagtggtaacagggaccgtcctgacccgcagtgtgtttatcaacaatgttctgagcaagattggagaagtatgggccagcaaggagcctattaactcaactacgcctttcaactccagcaaaatcgaggaacctagccccatagtatatagcctgcccgcaccagaactgcctgaagctttttttggcacaccgatttcaaaagcatctcaaaaaatcagcaggctgctggacctggttgtgcagcctgtgccgagacccagccagtgctctgagttcattcagcagtcctccatgaaatcccccctctatttggtgtcccgaagcttgccctcttctagtcaactgaagggatctccgcaggcaatcagccgtgccagtgagctccacttgctggaaacccctctagtggtgaagaaggcgaagtcactcgctatgagtgttacgacaagtgggttctcggaattcactccacaatcgatactgcgctcaactctgagatctacacccttggccagcccatccccgagtccagggaggtctccacagaggctaaaggagacaagaatcagctttgttgaagaagatgtgcatcctaagtggatcccaggggctgccgatgatagcaaactggaagtcttcactactcccaaaaaatgtgcagtgcctgtcgagacggaatggttgaagagtaaagatcgcacaactagcttcttcctgaatagcccagagaaagaacatcaggaaatggacgagggtagccaaagcctggagaagttagatgtgtctaaaggaaattcctccgtttccattactagcgatgaaaccacactggagtaccaggatgccccatctccagaagatcttgaagagaccgtgttcacagcctcaaagcccaagagctcttccacagctttgaccacgaatgtcaccgaacagaccgagaaagatggtgataaggacgtgtttgcttcagaagtcacgccttccgatctccagaaacagatggggaatctggaggatgccgagaccaaggatctgctggtggccgctgaggcgttcagtgagctcaaccacctgtcacccgtgcaaggaacagaggctagtctgtgcgcaccatccgtgtatgaggggaagatctttacccagaaaagtaaggtcccggtgttggatgaaggactcacgagtgtggaaacctatactccagcaattcgcgcaaacgacaataagtccatggcagacgtactcggcgatggcggtaatagcagtcttaccatttcggagggcccaatagttagcgagaggcgactgaatcaagaagtggcattgaacctaaaagaagaccatgaggtggaggttggcgttcttaaggagtcagtcgatctgcctgaggaaaaactgcccatttccgacagtccacccgacactcaagaaatccacgtgatcgaacaggagaaacttgaagcccaggactcaggtgaagaggccaggaacctctcttttaatgagttgtacccttctgggactcttaagctgcagtacaattttgacacaatcgaccagcagttctgtgacctcgccgataataaggatactgctgagtgcgacatcgcagaggtggatggggaactgtttgtggcgcagtctaatttcactctcattcttgagggggaggagggagaagtggagcccggtgactttgcctctagtgacgtgctcccgaaagccgcaaatacagcaacagaggaaaagttagtgtgcagtggagagaacgacaaccatggacagattgctaatctgcccagtgctgtcacatctgaccagaaaagccaaaaggtcgacacccttccatatgtcccagaacctattaaggtggctatcgcagaaaacctgctggatgttattaaagatacgagatccaaagagatcaccagcgacaccatggagcagagcattcatgagactatacctctcgtgtctcaaaatatcatgtgtcccaccaaactggttaagagtgctttcaagacagcccaagaaacttccaccatgaccatgaacgtctcacaggtggatgatgtggtatctagtaagaccaggacccgtggccagcggattcagaacgtaaacgtcaaatctgcgcagcaagaagccagcgccgatgtggctacacccaaaatgcctggacagagcgtgagaaaaaaaacaagaaaggccaaagagatcagtgaggcaagcgagaacatttactcggacgttcggggactgtctcagaatcagcagattccccaaaactctgtgaccccaaggcgaggcaggcgtaaaaaggaggtaaaccaggatatactcgaaaacacgtctagtgtggaacaagagctacagatcacaaccggtagggaatcaaagagacttaagtcatcccagctcctggagcctgctgtggaagagacaaccaaaaaagaggttaaagtaagtagcgtcactaaacggacccctcgcagaattaagagaagcgttgaaaaccaggaaagcgtggagatcattaatgacctgaaagtgtccactgtgacatctccgtcaagaatgatcagaaagcttaggtcaactaacctcgatgctagcgaaaacactgggaataagcaagacgataaaagcagtgacaagcaactccggattaaacacgttcgaagagtgaggggccgagaggtctcaccatctgacgtgcgggaggattctaatctcgaatcatcacagcttacagtccaagcggagttcgacatgagtgcgatcccacgaaagcgcggtcgccctaggaaaatcaatccctccgaggacgtgggatcaaaggccgtcaaagaggaacgcagcccaaagaaaaaggaagccccttcaatccggagacggtctacgcgcaacactcccgctaaatctgagaatgtcgatgtgggcaagcccgcacttggtaagagcatcctcgtgcccaatgaggagctgtccatggtaatgagtagcaaaaagaaactcacaaagaaaactgaaagtcagtcccagaagcggagcctgcatagtgtcagcgaggagcggactgacgaaatgacgcacaaagagactaacgagcaggaagaaagactgctagctaccgcctcattcactaaatcatccagatcaagcaggacccggagctctaaagcaatcctcctgccggatctgtccgagcctaacaatgaacctctgttctcccccgcatctgaggtgccacggaaggcaaaagctaaaaaaatcgaagttccagctcagctcaaggaactagtttctgacctgagttcacagtttgtgatcagtcccccagcgctccggtctaggcagaaaaatacctccaacaagaacaagctggaggacgagctgaaggacgacgcacaatcagttgagacactgggcaagccaaaggctaagcggataaggacctccaaaaccaagcaggcctctaagaatacagaaaaagagagcgcttggtctccaccccctatcgagatcagattgatttccccactggcttctcctgcagatggggtaaagtctaagcccagaaagactactgaggtgacgggtacggggctggggcgtaataggaagaagctttcctcttaccctaagcagattctgaggaggaagatgctgta

SEQ ID NO: 215009 - DNA, 6905 bp, synthetic construct
  misc_feature 1..6905: note = Description of Artificial Sequence: Synthetic coding sequence
  source 1..6905: mol_type = other DNA
atggatagcttggcaggtttaagtccgcgtgaagccgcaggcgtactgagcctgtcgtgcgttggagtttgtagcacttgcgcatgggcctggccacacggttctatgcgagatctgcgggctcaagtcactagcggcttgctgccttttccggaggtcactcttcaggccttgggcgaggacgagattacactggagagcgtcctgcgtggcaaattcgctgccggaaagaatggattggcctgcctggcatgcggaccacagctcgaggtcgtgaatagcatcactggcgagagattgagtgcctaccgattttccggggttaacgaacagcctcccgtcgtactggccgttaaggagttttcatggcagaaaaggactgggctcctgatcggtctggaggagacggaggggtccgtgttgtgcttatacgaccttgggatttccaaagtcgtgaaggcggttgtgctgccgggacgcgtcaccgcgattgagcccataattaatcacggcggtgcctcggcctcgacgcagcatctacacccatccctgagatggctgtttggggtggctgctgtagtgactgacgtggggcaaatcctgctggtggacctctgtctggacgatctgtcctgtaatcagaacgaggttgaagcttctgatctggaggtgttgaccggtattcctgcagaagttcctcatattcgggagagcgtgatgaggcagggtcggcatctgtgttttcagctggtaagtcccaccggtactgctgtcagtacgctatcctatatctccaggacaaatcagctggccgtggggttcagcgatggttaccttgccttgtggaatatgaagagtatgaagagggagtactacatccagttagagtcaggacaagtacctgtgtacgcagtcacctttcaggagccggaaaatgatccccgaaactgctgctacctctgggctgtccagtctacccaggactccgaaggggatgttctcagtcttcacctcctccagctggcattcggtaatcgcaaatgcctggcatcgggacagatattgtacgaaggactcgagtattgtgaagagcggtacacactggacttaacaggaggtatgtttccgctgcgcggtcagactagcaacacgaaacttttgggctgccagtctatcgagaaatttagatctcatggagacagggaggagggcgtcaatgaagcgctttctcccgatactagcgtgagtgtgtttacctggcaagtgaacatttacggacagggtaaaccatctgtctatttggggttattcgacatcaaccggtggtaccatgctcagatgcctgattccctgcggtcaggcgagtacctacacaattgttcttatttcgccctgtggtcacttgagtcagttgtgagcaggacgtctccccacggtatcctcgacatcctggtgcatgagaggagtctcaatcgtggcgtaccgcctagttatcccccacctgaacagtttttcaatccatccacctacaatttcgatgccacatgtctgctgaatagcggagtggttcaccttacatgcactgggtttcagaaggaaacactgacgtttttaaagaagagtggcccttccttgaacgagcttattcccgacgggtacaaccggtgcctcgtggcaggtctcctgtccccccgattcgttgacgtgcagccaagtagcctgtcacaggaggagcagttagaggctatactgtccgccgcaattcagacatcaagtctcggcttactgactgggtatattcggagatggattacagaggagcaaccaaacagcgcgaccaatctgagattcgtcctggaatggacttggaataaggttgtgttgacgaaggaggagtttgatagactgtgcgtccctctgttcgatgggtcatgtcattttatggatccacagaccattcaatcaatccagcagtgctatctgttgctctcgaatttgaatatagtgctgtcttgtttcgcctccgaagcacgggagattacagagcgcggactgatcgacttatctaacaagtttgtagtctcccatctcatctgccagtacgctcaggtggttctgtggtttagccactcgggcctgctacctgaaggtatcgatgattctgtgcagctctcgcgtctctgctacaactacccggtgatccagaattattacactagccgtagacagaagttcgaacgactctctcgcggaaaatggaatccggactgcttgatgatcgatgggttagttagccaacttggagagcgtattgagaaattatggaagcgcgatgaaggcggtacggggaaatacccacctgcgtcactgcacgctgtcctggatatgtacctgctcgatggagttactgaagctgccaaacactcaataaccatttacctgttgcttgatatcatgtatagctttcctaacaaaacagacacacccatagagtctttcccaacagtgtttgcaatctcatgggggcaggtgaaactgattcaggggttctggctcatagaccacaacgactacgaaagcggcttggacctcctctttcatcctgccactgctaagcccctctcttggcagcatagcaaaatcatccaagccttcatgtcgcagggagagcatcggcaggcacttaggtacatccagacaatgaaacccacagtgtcaagtggcaatgacgtgatcttacacctgacggtgctgctgtttaatcggtgcatggtggaggcatggaattttttgcgtcaacattgcaacaggctcaacattgaggagctccttaagcatatgtatgaagtgtgccaggaaatgggcctgatggaggatctcctcaaactgccctttacagacacagagcaggagtgcctggttaagtttctgcaatccagcgcctcggtacaaaatcacgaatttctgctggtgcaccatcttcagcgagcaaattatgttcctgcgctaaagctcaatcagaccttaaaaattaatgttatgaacgatagagatcccaggttacgcgagcgaagcttagcacggaactccatcttggatcagtacggcaagattctcccccgagtccaccggaaactcgccatcgaacgagcaaagccctaccatttgtccaccagcagtgtgttcaggttagtatctaggccgaagccccttagtgccgttccgaaacaggtagtgacaggtacggtgctgaccagatccgtgttcattaacaacgtcctgagtaagatcggggaggtgtgggcatctaaggagccaatcaatagcaccactcccttcaattcttctaagatcgaagagccttcaccaattgtgtattctcttccagctcctgagctgccggaagcattcttcggaacgccaataagtaaggcatcacagaagatcagcagactcctagacctcgttgtgcagccagtccccaggccatcccagtgttccgagttcatccagcagtcttctatgaaatctccactgtatctggtctcacgaagcctgcccagcagctctcaacttaaagggtccccccaggccatttcccgggcttccgagctgcacctgttggagacaccgttggtcgtgaagaaggccaagagcctggcaatgagcgtaacaacctcagggttcagcgagtttactccccaatctatactgcggagcacgctaagaagcactcctctcgctagcccctccccaagtcctggcagatcgccgcagagattaaaagaaacgcgaatctcttttgtagaggaagacgtgcaccctaaatggataccgggtgccgctgatgattccaagctggaggttttcacgacacctaaaaaatgcgcagtgcccgttgagaccgagtggctgaagtcaaaggaccgcacaacctcttttttcctgaatagcccagaaaaagaacatcaggaaatggatgaagggtctcagagcctggagaagttagacgtatcgaagggtaactcgagcgtgtctatcacctccgacgaaaccacactggagtaccaggacgccccatcacctgaagacttagaggaaactgttttcaccgcaagcaagcccaaatcttcatccacagctctgacaaccaacgtgaccgaacagacagagaaagacggagataaggacgtttttgcttcggaggtgacaccgagtgatctgcagaaacaaatgggtaacctggaggatgcggagactaaggatcttcttgtagcagcggaggctttctccgaattaaatcacctaagccctgtgcaggggactgaagcatctctgtgcgcaccatcagtgtacgaggggaagatcttcactcagaaaagcaaagtgccggtgctagatgagggtctgactagtgtagagacatatacgcccgctatccgggctaacgataataaatccatggcggacgtactgggggatgggggaaacagcagcctgaccatttcagaagggccaatagtttccgaacgtagacttaaccaggaagtggctctcaatctgaaagaagatcatgaggtggaagtaggcgttctgaaagaatctgtcgacctgcctgaagaaaaactgcccatttctgacagcccacccgacacacaggagatccacgtgattgagcaagagaagctggaggctcaggattctggagaggaggcccgtaatctgtccttcaatgagctgtacccatccgggacactaaagctacagtacaactttgacacgattgaccagcaattctgcgacctggccgataataaagataccgctgaatgcgatatcgccgaggtcgacggggaacttttcgtggcccagtcaaactttacactcatacttgagggcgaggagggcgaggtggaacccggagatttcgcctcatcggacgtcttgcctaaggcggctaataccgcgaccgaggaaaaactcgtgtgtagcggtgagaatgacaaccacggccagattgcaaatctgccttctgcggtaacttcggatcagaaatcacagaaggtcgacaccctcccctatgtgccagaacccattaaggtggctattgcggaaaatctgcttgatgtgatcaaagacacaagatctaaagaaattacctcagataccatggagcagagcattcacgaaaccatcccactcgtatctcaaaatattatgtgccccacgaagctggtgaaatctgcctttaagaccgctcaagagacatccaccatgactatgaacgtgtctcaagtggacgatgtcgtgtccagcaagactagaacccggggacagcgcatccagaatgtgaacgtgaaatcagcacaacaggaagcctctgccgacgtagccacccccaagatgcccggacagtcagtgcgcaaaaaaacacggaaggctaaagaaatatccgaggctagtgagaatatttacagtgacgttaggggcctctcacagaaccagcagatcccgcaaaacagtgtgaccccaaggaggggcaggcgaaagaaggaggtgaatcaggacattctggagaatactagctcggtcgagcaggaattacaaattacaacaggcagggagagtaaacggttaaaaagctcccagctgctggaaccggctgttgaggaaactaccaaaaaagaggtgaaggtgagttcagtcacgaagcgtactccaaggcggatcaaaaggtctgtggagaaccaggaatctgtggagatcattaacgacctgaaagtctctacagtgaccagccccagccgcatgatccggaaactccgctcaaccaatttagacgcatccgagaataccggtaataaacaggatgacaaatcttccgacaagcagctacgcatcaagcacgtccgtcgagtcagaggcagggaagtgagcccatctgatgttagagaggactctaatctagagtcaagtcagcttactgtgcaggcagaattcgatatgtcagcaatccctcgcaaaaggggcagaccacgtaagatcaacccctccgaagacgttggtagcaaggccgtaaaagaggaacggtccccgaagaagaaggaagccccaagcattaggcgacggtctactcgcaacaccccggctaaatcggagaatgtcgacgtgggaaaacccgctctcgggaaatccatactagttcccaatgaagaactgagtatggttatgtctagtaaaaagaagctgaccaagaaaactgagtcacaaagtcagaaaaggtccctgcacagtgtgtcagaggaaagaactgatgagatgacccacaaggaaacaaacgagcaagaagagaggctgctcgccactgcctcttttacaaaatcttcaagatcttcccgtactcggtcttccaaggcaatcttacttcccgatttgagtgagccaaacaacgagcctctgttctcccccgcttccgaagttccccgaaaggccaaagcgaaaaaaattgaggtccctgcccagctgaaggagctggtgtctgatctcagctctcagtttgtaatctctccaccggctttgcgatcaaggcagaagaacacctccaataaaaacaagctggaagatgaactgaaagatgatgcgcagagcgtcgaaacgctgggaaagcccaaagcaaaacgcatcaggacttcaaagacaaaacaggctagcaagaacacagaaaaagaaagtgcgtggagccctcctccaatagagataagactaatctcaccactcgcctcccccgctgatggtgtgaagtctaaaccaaggaaaaccaccgaagtgaccgggaccggactagggaggaacagaaaaaaactttcaagctaccctaagcagatccttcgcagaaagatgctcta

SEQ ID NO: 215010 - DNA, 6800 bp, synthetic construct
  misc_feature 1..6800: note = Description of Artificial Sequence: Synthetic coding sequence
  source 1..6800: mol_type = other DNA
atgagggacctgagggctcaagtaacctcaggcttgctgccatttcccgaagttacacttcaagctttaggggaggatgagattaccctggaatccgtgctaaggggaaagttcgctgcagggaagaacggactggcctgcctcgcatgcggccctcaactagaggttgtgaactccatcactggtgaaaggctgagtgcctacaggttttccggagtgaacgagcagccaccggtcgttcttgctgttaaggagttttcatggcagaaacggacaggtctgctgattggcctggaagagactgagggctccgtgctgtgtctttacgaccttgggattagcaaagtggttaaagccgtggtactgccagggcgtgtgaccgccattgagcctattattaatcacggcggagcatctgcgtccacccaacacttgcatccttcactgagatggctgttcggtgttgccgcagtggtcacggacgttggccagatcttactggtggacttgtgcttagatgaccttagctgtaatcaaaatgaagttgaggctagcgacctcgaagtcctcaccggcatccccgctgaagtacctcatattcgagagagcgtaatgagacaggggcgacatctctgcttccagcttgtgtcacctacgggcaccgcggtttctactctctcctacatctcaaggacgaaccaattagccgtgggctttagcgacggatatctcgctctgtggaacatgaaatcaatgaaaagagaatattacattcagctggagagcggccaggtacctgtatacgccgtgacgtttcaggagcccgagaacgatccacgcaactgttgttatctatgggccgttcagagcacccaggacagcgaaggcgatgtgctgtctttgcacctgcttcagcttgctttcggcaaccgtaagtgcctcgcctctggccagatcctgtatgaaggcctcgaatactgtgaggaacggtatactttggatttgactggcggaatgttcccactccggggacagacttccaacaccaaacttctgggctgccagtccatcgagaaattcaggtcccatggagatagagaggaaggagtgaacgaagcattgtcccccgacacaagcgtgtcggtattcacttggcaggtgaacatctatgggcagggaaaacctagcgtttacctgggtctcttcgatatcaacaggtggtatcatgcccagatgcctgacagtttgcggtcaggagagtacctccacaattgctcctactttgcgctctggtccctcgaaagcgtcgtatcacggaccagcccccatggaatattagatatactcgtccatgaacgctcattgaatcgaggggtaccccctagttaccccccacccgagcaattcttcaatccatctacatataattttgacgctacctgtttgttgaattctggggtagtgcatctgacatgcaccggatttcagaaggagactttaacttttttgaaaaagtcaggaccttcgctcaacgagctcatccccgatggttacaacagatgcttagtggccggtttgctgagccctcgatttgtcgacgtacagccaagctcccttagtcaggaagagcagctggaagctattctcagcgctgctatccagacaagcagcctcggacttttaacgggctacatcaggagatggattaccgaggagcagcctaactcagctacaaacctaaggtttgttctggagtggacttggaacaaggtggttcttaccaaggaagaattcgataggctctgtgtcccgctctttgatggatcttgtcacttcatggaccctcagactatccagtcgatccaacagtgttatctattactgtccaatttaaacatagtattgagttgttttgccagcgaagctcgcgagatcaccgagcgcggactcatcgatctttctaataaattcgtggtgagtcatctgatttgtcagtacgcccaagtcgtgctatggttctctcactccggcttgctgccagaaggcatcgatgactctgtgcaactgtcaaggctctgctacaattaccccgtgattcagaattactatacatctagacgacagaagttcgagagattgtctcggggtaaatggaatccagattgcctcatgatcgacggactggtcagtcagcttggggagcgaattgagaaactctggaagagggatgaggggggaacaggcaaatacccacctgcttccttgcacgctgtactggatatgtacctgctggacggcgttacagaagccgcaaaacactctattaccatttatctcttactcgacatcatgtacagtttcccaaataagaccgatacgcccatcgaatcttttcctactgtatttgccatctcctgggggcaggtaaagctcatccagggattctggttaatcgaccacaacgattacgaaagtggcctcgatctcctcttccaccctgctaccgccaaacccctatcctggcaacattcaaagatcatccaggcatttatgagccagggcgagcaccgccaggcactgcgctacatccagacgatgaagcctaccgttagttcaggaaatgacgtcatcctgcatctcaccgtactgctctttaatagatgcatggttgaggcgtggaactttttgagacagcactgcaatagactgaacatcgaggagctgcttaagcacatgtatgaggtgtgtcaagagatgggtctgatggaggacctgctcaagctccccttcactgatacggagcaggagtgtctcgttaagtttctgcagtctagcgcctctgtgcaaaatcatgaattcttacttgttcaccacctgcaacgcgctaactacgtgcctgctttaaagctgaaccagactttgaagataaatgtgatgaacgaccgggaccccaggttacgagagcgcagcctcgcacgtaactctatcttagatcagtacggtaaaatcctgcctagggtgcacaggaaactggccatcgagcgtgctaaaccttaccacctctctacctcttccgtgttccggctcgtgagccgccctaagcccctttctgctgtgccaaaacaggtggtcacggggactgtcttgacccggtcagtctttatcaacaatgtcttatccaagataggagaagtctgggcttccaaggagcccattaattccaccaccccttttaacagctccaagattgaagagccatccccaattgtgtactccctgccagctcctgagcttccagaggccttctttggaacccctataagcaaagccagccagaagattagcagattacttgacctggtggtacaacctgtcccaagaccttcccagtgctctgaatttatccagcagtcgagcatgaaaagccctctgtacctcgtgagccggagcttaccttcatcctcccagctcaaaggctcccctcaggctatcagcagggccagcgagctgcatctcctggagacccccctggtcgtgaaaaaagcaaaatcactcgccatgagtgtaacaacttctggctttagcgagtttacaccccagtctatcctgaggtctacactgcgaagcacccccctggcttctcctagccctagcccaggaagatccccccagcggctgaaagagactcgaatttccttcgtggaggaagacgttcatccaaagtggattccaggcgcagctgacgattcgaaactggaggtgttcactaccccaaaaaaatgcgccgtccccgtcgagacagagtggctgaagagcaaagatcgcacgacttcatttttcctaaacagcccggaaaaggaacaccaggagatggacgaggggtcgcagtctttagagaagcttgacgtgagcaagggcaatagctcggtcagtattacgtctgatgagaccactctggagtatcaggacgcaccttcaccggaggatctggaggaaaccgtattcactgctagtaaaccgaagtcttcatccacagcacttactacaaacgttaccgagcagaccgagaaagatggggataaggacgtgttcgcctccgaggttactccctccgacctgcaaaagcaaatggggaacctagaagacgctgagactaaggatctgttagtagcagcagaggctttttccgagctgaatcatttgtcaccagtccaagggactgaggcatccctatgtgcaccttccgtttatgaaggaaagatcttcactcaaaaatcaaaggttcctgtactcgatgaaggactaacaagcgtcgaaacctatacgcctgctattcgtgccaatgataacaaatccatggccgacgtcttgggcgacggtgggaatagtagtttaaccattagtgagggtcctattgtttccgaacgaagactgaaccaggaagtagcactcaatcttaaggaggatcatgaggtcgaagtgggggtgctgaaagaatccgtggacctgcctgaggagaagctcccaatctccgatagtccacccgatacccaggagatacatgtcattgagcaggaaaaactggaggctcaggattctggggaagaggcgaggaatctctcctttaacgagctgtacccctcgggtacactcaaattacagtacaacttcgacacaattgatcaacaattctgcgacctggccgacaataaagacactgccgagtgtgatatcgctgaagtggacggagaactgtttgtggcccaatctaactttaccctgatcctggagggcgaagagggagaggttgagccgggagatttcgcttcctctgacgtgctgccgaaagccgcaaatacggccacagaggagaagttggtgtgcagcggcgagaacgataatcacgggcaaattgcgaatctccccagcgcagtgacgtccgaccaaaagtcacagaaggttgataccttgccatacgttcctgagcccatcaaagtagccatcgctgaaaacctcctggatgtgattaaagatactagatcaaaggaaattacaagcgatacaatggagcagtcgatccacgagacgatccccctggtctcgcagaacatcatgtgtccgaccaaacttgtaaaaagcgcttttaaaaccgcccaagagacatctacaatgacgatgaatgttagccaggttgacgatgtggtgagctcgaagacacggaccaggggacagagaatccagaacgtgaacgtcaagagcgctcagcaggaagccagtgccgatgtggctaccccgaaaatgccagggcagagcgtgcgaaagaagacacgcaaagcgaaggaaatctcggaagcgagcgagaacatatatagcgacgtgcgcggtctgtcccagaatcaacagataccgcagaactctgtcacgcctagaagaggcaggaggaagaaggaggtgaatcaggatatattggaaaacacgagttcggtcgagcaggagctgcagatcacgacaggacgcgagtccaaacggctcaagagttcacagttgctggaacccgctgtggaggagaccaccaaaaaagaagttaaagtgagttccgtgacgaaaagaactcccagaaggatcaaacgtagcgttgaaaatcaggaaagcgtagagataatcaacgatctgaaggtgtctaccgtgacatcaccatcacgaatgattagaaaactacgcagtaccaatctggacgcgtccgagaacactgggaataagcaggacgataagtcctcggataaacagcttaggatcaagcacgtaaggcgggtgaggggacgcgaagtgagtccctctgatgtcagggaggatagcaacctagagagtagccagctgactgtccaggccgagtttgacatgtctgctataccacggaagagagggcgacctaggaaaattaatccttcagaggacgtggggtcaaaagcggtcaaggaggaacgatcaccaaagaagaaggaggcgccatcaattcgcagacgtagcacgcgcaatacacccgctaaatccgaaaatgtcgatgtgggaaagcctgcccttggaaagtctatcctggtacccaatgaagagctgagcatggtgatgagtagcaagaagaaattgacgaaaaaaaccgaatcgcagtctcagaaaagaagtctgcattcagtgagtgaggaacggactgatgaaatgacccacaaggagacaaacgaacaggaggagcgattgctggccacagcctcatttaccaagagttcgcggtcctcacgcacacgctccagtaaggctattctcctgcccgatttgagtgaaccaaataacgagcctttgttcagccctgcctcagaggtccccaggaaagcaaaggccaagaaaattgaagtgcctgcccagctgaaggagcttgtcagcgacctgagtagccaattcgtgatctcaccacccgcacttaggtcgcggcagaagaacacttccaataaaaataagctggaggacgagctcaaggatgacgctcagtccgtggaaacgctcggaaagccaaaggctaagcggatccgaacctccaagactaaacaagcttcaaagaatactgagaaggaaagcgcctggtccccgcctcccatcgagatcaggctgatttcgccccttgcatcacccgctgatggagtgaagtccaagcctcgcaagaccaccgaagtaaccgggactggactgggacgcaaccggaaaaagttgtcaagctatccaaagcaaatactaagaagaaagatgctgta

SEQ ID NO: 215011 - DNA, 3567 bp, synthetic construct
  misc_feature 1..3567: note = Description of Artificial Sequence: Synthetic coding sequence
  source 1..3567: mol_type = other DNA
atgaaagcagccgatgaaccagcgtacctgaccgtgggcactgatgttagcgctaaataccgtggggcattttgcgaggctaaaattaagacagttaagagattagtgaaagtgaaggtactcctgaaacaggacaataccacccagctggtccaagatgatcaggtgaagggtccgttgagagtgggggctattgtggaaacgcgtacctcagatggaagtttccaggaggcaattattagtaagttgaccgatgcttcctggtacacagtcgtctttgatgatggtgacgagcgtacgctgcgccgtacctcgctctgccttaaaggtgaaaggcattttgcggaaagtgaaactcttgaccagctccctctaaccaatcctgagcatttcgggacgccagtgatcgctaagaaaacgaatcgaggtcggcgatcttcattgcctgtcacagaggacgaaaaggaggaggaaagtagcgaggaagaggacgaggacaaacgacggctaaacgacgaactgcttggcaaggtggtgagcgtggtgagcgcaacggagaggaccgagtggtatccagcgctggtaatctctccgtcctgtaatgatgatattaccgtgaaaaaggatcagtgtctcgttagatcgtttattgactccaaattttactcaatcgctagaaaggacattaaggaggttgacatcttgaatctgccagagtccgagctgagcacaaagcccggactccagaaggcctcgattttcctgaaaactagggttgtgccggacaattggaagatggatatctctgagatactggagtcttcatccagtgacgacgaggacgggcctgcagaagagaacgatgaggagaaggaaaaagaagctaagaagactgaggaggaagtgccagaggaggaactcgatccggaggaaagggataattttctgcagcagttatacaagtttatggaggacaggggcactccaatcaataaaccgcctgtactggggtacaaagatttgaacctgttcaagctctttagactcgtttaccaccaaggtgggtgcgacaatatcgacagcggcgctgtatggaaacaaatctacatggatcttggaattcccattctgaacagcgcggcatcgtacaacgtgaagaccgcatataggaagtacctctacggctttgaagagtactgccgttccgcaaacatccagttccgtacagttcatcaccacgagcccaaagtgaaagaggagaagaaagaccttgaggagtccatggaggaagctctcaaactcgaccaggagatgcccttgactgaagtcaagagcgagccagaggagaatatcgactcgaactctgagtcggagcgtgaagaaatcgagctgaagtcccccagggggcgtagacgaatcgccagagatgtgaactctattaagaaagagattgaggaagaaaagactgaggataagttaaaggataatgatacagagaacaaggatgtagatgatgactatgagacagccgagaagaaggagaatgagctgctcctgggacgaaagaacacccctaaacagaaggagaagaagataaagaagcaagaggacagcgataaggacagtgacgaggaggaggagaaatctcaggaacgagaagagaccgagtcaaagtgcgattccgagggggaggaggatgaagaggatatggaaccttgcttaacgggtacgaaggtgaaggtgaaatacggtaggggaaagactcaaaagatttatgaggcttcaattaaatccactgagatcgacgatggagaggtattgtatttagtgcactattacggttggaacgtgaggtatgatgaatgggtcaaagctgaccggattatctggcccctggataaaggcggacccaagaagaagcaaaagaagaaagccaagaacaaggaggattccgagaaggacgagaagcgggacgaggagcgtcagaaaagcaagcgtggtcggcctcctcttaagagtactctgtccagcaacatgccctatggtttgtcaaagacagcaaatagtgagggaaaatcagactcatgctcaagtgatagcgagactgaggacgcgttggaaaagaacctcattaacgaggaactctccctgaaagacgaattagaaaagaatgagaaccttaatgacgataagctcgacgaggaaaaccccaaaattagtgcccacattttaaaagaaaatgacaggacccagatgcagcctttggaaactttgaaactggaagttggtgagaatgaacagatcgtgcagattttcggtaataagatggagaaaacggaggaagtgaaaaaggaagcagagaaatcccccaaaggcaaaggcagaagaagcaaaaccaaagacctctcccttgaaataattaaaatcagttccttcggccagaatgaggccggttctgagcctcatatcgaggcgcactccctcgagctaagtagtctggacaacaagaactttagtagcgcaacagaagatgagatagaccaatgcgtaaaggagaagaagctcaagcggaagatccttgggcagtcatctcccgagaagaagatccggatcgagaacggtatggaaatgacaaacacagtgagtcaggagcgaacctctgattgcatcggctcagagggaatgaagaatctgaatttcgagcagcacttcgaacgtgaaaacgagggcatgcctagtctcatcgcagagtccaaccagtgtatacagcaattaacatccgaaagattcgattcaccggcagaagagaccgtgaacatacccctcaaggaagacgaagacgctatgcccctaatcggaccggagaccttggtgtgccatgaggtggacctggacgatttggatgagaaggataagacttctattgaagacgttgcagtggagtcatccgagtccaactcactcgtttccatcccacctgccctccccccagttgtccaacacaacttctctgtggcttcacctctcacactgtcccaagacgagagccggagcgtgaagagtgaaagtgacattacaatcgaagtcgattctattgccgaggagagccaggagggcttgtgtgagcgggagtccgctaatggttttgagaccaacgtcgcctcaggaacgtgtagcatcattgttcaggagagggagtcccgcgaaaagggacagaaacgtcctagtgacggcaattccggccttatggctaaaaagcaaaagaggactccaaaacgtacatctgccgctgccaaaaacgaaaagaatgggactgacgaattggataacatgaatagcacggagcggatttcatttctgcaagaaaagctgcaggagatcaggaaatattacatgtccctcaagagtgaagtggcgactatcgatcggcgtagaaaacgactgaagaagaaagaccgggaagtgtcccacgcaggagcttctatgagtagcgcttccagcgatacggggatgtctccaagtagctcaagtccacctcagaatgtactggccgtcgaatgtcggtag

SEQ ID NO: 215012 - DNA, 3774 bp, synthetic construct
  misc_feature 1..3774: note = Description of Artificial Sequence: Synthetic coding sequence
  source 1..3774: mol_type = other DNA
atgaaagccgctgacgagccagcatacctgaccgtgggcaccgatgtttccgctaagtaccggggagccttctgtgaagcaaagattaaaaccgtgaaacgcttagttaaagtgaaagtgctactcaaacaagacaatacgactcagttggttcaggatgatcaggtgaagggaccattgagggttggggcaatcgtggaaacaagaacctcggatggatccttccaggaagctattatcagcaagctgaccgatgcatcctggtacactgtagtgttcgacgacggggatgagaggaccttacgcaggaccagtctttgcctgaagggggaacgacatttcgccgaatccgagaccctggaccagcttccacttactaacccggagcactttggcacccctgtgatcgcaaagaaaaccaacaggggacggaggagctcactcccggttaccgaagatgaaaaggaagaagagagcagtgaggaggaggacgaggacaaaaggagattgaatgacgagcttctcggaaaggtggtcagcgtcgtaagtgccaccgagcgcaccgagtggtaccctgctctagtgatttcccctagctgcaacgacgatataaccgtaaaaaaagaccagtgtttggttaggtcctttatagactctaagttttactcaatcgcccgtaaggacatcaaggaggttgatatcctgaaccttcccgagtccgaattgtcaaccaaacctggcctacagaaggcctccatattcctaaagactagggtggtccctgataactggaaaatggacatttccgaaatcctagaatcctcaagctcagacgatgaggatggcccagctgaagagaatgacgaagagaaggaaaaggaagccaagaaaacagaggaagaggttcccgaagaggaactggacccggaagagcgggacaattttctgcagcaactgtacaagtttatggaggacagaggaacacctatcaacaaaccacctgtgctgggctacaaagacctgaacctgttcaaacttttcaggttagtctaccaccagggaggctgcgacaacattgacagcggtgctgtgtggaaacagatttacatggaccttgggattcctatcctaaactcagccgcttcttacaatgtcaagactgcgtaccgaaagtatctgtatggcttcgaagaatactgcagatccgcaaatatccaatttagaactgtccatcatcacgaacctaaagtcaaagaggaaaaaaaggaccttgaggaatcaatggaggaggccttaaaacttgatcaggaaatgccactgacagaagtgaagtcagaaccagaggaaaacatcgatagcaatagcgagagcgaacgcgaggaaatcgagctcaagtcccctcgaggccgtcgccgtattgccagagacgtgaactcaattaaaaaagagatagaagaggagaagaccgaagacaagctgaaagataatgacacagagaataaggatgtcgatgacgattatgaaactgccgagaagaaggaaaatgaactgcttctggggagaaaaaatactccaaaacagaaggagaagaagataaagaagcaggaggatagcgacaaagacagcgacgaggaggaagaaaaaagccaggagcgggaagaaaccgaatcaaaatgtgactcagagggggaagaggacgaggaggacatggaaccatgcctaactggcaccaaagtaaaggtgaagtacgggagaggtaaaacccagaaaatctatgaggcttctatcaaatcaacagagatcgacgatggagaggtgctatatctggtgcactactacggctggaacgtgagatacgatgagtgggtaaaggccgatcggataatttggcctcttgataaaggcggacctaagaagaagcagaagaaaaaggcaaaaaacaaagaagactccgagaaggacgaaaagcgcgacgaagagcgccagaaaagtaaaaggggtagacctccacttaagagcacactgtccagtaatatgccttacggattgtccaagacagccaattctgagggcaaatctgattcctgctctagcgattcagagaccgaggatgctttggaaaagaatttaattaatgaggaattgagcctgaaagacgaactcgagaaaaatgagaatctgaacgacgacaaactggatgaggagaatcccaaaatctcagctcacatcctgaaggaaaacgatagaactcagatgcaacccctcgagacactcaaactggaggtgggcgagaacgaacagatcgtgcagattttcggcaataagatggagaaaaccgaggaggtgaaaaaggaggccgaaaaaagcccgaaggggaaggggcgtaggtccaagactaaagaccttagcctcgaaatcatcaaaatcagcagtttcggccagaacgaagccggatcagagcctcatattgaagctcactcactagagctgagtagcctcgataataagaatttttcttccgcaacggaggatgaaatcgaccagtgtgtgaaggagaagaagctcaagaggaaaattctgggtcagagttctccagaaaaaaagattaggattgagaatggcatggagatgaccaatacagtatcccaggagcggacatctgattgtatcgggtcggaaggcatgaagaacctcaactttgagcagcactttgaaagagagaatgagggaatgcccagtctgatcgccgagtctaaccagtgtattcaacagctcacatctgagcggtttgatagcccagcagaggagaccgtcaatattccactgaaagaagacgaggacgcgatgcctctgattggccctgagacgctcgtttgccatgaggtagacctcgacgacctagacgagaaagataagacatccattgaggatgttgccgttgagtctagcgaatctaactctctcgtctcaatacccccagctctgccgccagtggtacagcacaatttttctgtggcgagccctcttactctgagtcaggacgagtccaggtctgtaaagagtgagagcgatatcactattgaggttgactccattgccgaagaaagccaggagggcctttgcgaacgcgaatccgcgaacggattcgaaacgaacgtcgcatcagggacttgttctatcatcgtgcaggagcgtgaatcgcgcgagaagggtcagaagagaccatccgatggcaattcaggcctgatggctaagaaacagaagcgaaccccgaagaggacgagcgctgcagccaaaaacgagaaaaacgggaccggtcaatcatcagacagcgaggaccttccagtgctggataattcttctaaatgcacacctgtcaaacatctcaatgtgagcaagccgcagaaactcgctcgctcacccgcaaggatatcgccacacatcaaagatggagaaaaagacaaacacagagagaaacaccccaactcctcacctagaacttataagtggtcttttcagctgaacgagcttgacaatatgaacagcacggaacgtatcagctttctgcaggagaaactgcaggagatacgaaaatattatatgtccctgaagtcggaagtggctaccattgacagaaggcggaagaggttgaagaagaaggatagagaggtgagccacgcaggggcaagcatgtcatcagcttcatcggataccggaatgagtccctccagttcctctccccctcagaacgtcctggcagttgagtgtcgatag

SEQ ID NO: 215013 - DNA, 3612 bp, synthetic construct
  misc_feature 1..3612: note = Description of Artificial Sequence: Synthetic coding sequence
  source 1..3612: mol_type = other DNA
atgaaggccgctgatgaacctgcttacctaactgtcggcacagatgtgtccgctaaatacagaggcgcattctgtgaagccaagatcaaaaccgtgaaaaggctggtgaaagtgaaagtcctgctgaaacaggataatacaacgcagctggtgcaagacgaccaggtgaagggccctctccgagtgggcgctatcgttgaaacccgcacatctgatggctcctttcaggaggctatcattagtaagctgacagacgcatcctggtacactgtggttttcgatgatggggatgaacggacattgcggcgtacatccctgtgcctaaagggcgaacggcacttcgccgagtcggagaccctggatcagcttcctctgaccaaccccgagcacttcggaacccccgtgatcgctaagaagactaatcgcggacggagaagctcgctccccgttaccgaagacgagaaagaggaagagagcagcgaagaagaagatgaggacaagcgtagactcaatgacgaattactcggcaaggtggtctccgtggtgagcgctactgagcggaccgagtggtaccccgcactcgtgatatctccctcctgtaacgacgatataactgtcaaaaaagatcaatgcctggtccggtcctttatcgatagcaagttctatagtatagccaggaaggatatcaaagaagtagatattttaaacctgccagagtcggagttatccaccaagcccggactacagaaagcatcgatttttcttaaaacccgtgtagttccagacaactggaagatggacatttctgaaatactggagagtagctccagcgacgacgaggacggacccgctgaggagaacgatgaagagaaggaaaaagaggctaaaaagaccgaagaggaggtgccggaggaggagttggacccagaggagagggacaatttcctgcaacaactctataaattcatggaggaccgtggcacaccaattaacaagccgccagtgctcggctataaggacctcaacctcttcaaactattccgcctggtttatcaccagggaggctgcgataatatcgatagtggagctgtctggaagcagatttacatggatttgggcatccctattctcaattcggccgcatcatacaacgtgaagaccgcgtaccggaaatacctgtacggttttgaagagtactgcagaagcgccaatatccagtttaggactgttcaccaccacgagccaaaggtcaaggaggaaaaaaaagaccttgaagaatcaatggaagaagcactcaaattagaccaggagatgccattaaccgaggtgaagtctgagcctgaagagaatattgactcaaactccgaaagcgagcgggaggagattgagttgaagtcaccaaggggaaggagacggatcgcaagggacgtgaatagcattaagaaagagattgaggaagagaagacagaagataaactgaaggataacgataccgagaataaagacgtggatgacgattatgagaccgcagagaaaaaggagaatgaactgctgttagggagaaaaaatacacctaaacagaaggagaagaaaattaaaaagcaggaggacagcgacaaagattccgatgaggaggaagaaaagtctcaggagcgggaggaaaccgagagcaagtgtgatagtgaaggggaggaagatgaagaggacatggagccttgcctgacaggcacgaaggtcaaagtgaagtacggaagagggaagactcagaagatttacgaagcctccatcaaatccaccgaaatcgatgatggggaggtgctttacttggtgcactattacggatggaatgtacgttacgatgaatgggtaaaagcagatcgcatcatctggcctctggataaggggggtcctaagaagaagcaaaagaagaaagcaaaaaataaagaagattctgagaaggatgaaaagagagacgaggaacgccaaaagagtaaaagaggtcgccctcctctcaagtccacgttatcttcgaacatgccgtatggcctcagtaagaccgcaaactctgagggtaagagcgattcatgtagttccgattccgaaacggaggacgccctggagaagaaccttataaatgaggagctctccctcaaagatgaattggagaaaaacgagaacctcaacgacgacaaactcgacgaggaaaaccccaaaatctccgcccatattcttaaggaaaatgaccgcacccagatgcagccccttgagaccctgaaattagaagtgggcgagaatgaacagatcgtgcaaatcttcgggaataagatggaaaagactgaggaagtcaaaaaggaggcagaaaaatctccgaagggcaagggaagacggagcaagactaaggatctgtccctcgaaattatcaaaatttcatcttttgggcaaaacgaggcgggatccgagccccatatcgaggcacattctctggaattgagcagtctcgacaacaaaaatttcagcagtgcgactgaggacgagattgaccagtgtgttaaggaaaaaaaactcaagcgaaaaatcttgggacaatcctcccccgagaaaaaaatccgcatcgagaatgggatggagatgacaaacacggtgtcacaggagagaacaagcgactgcatcggtagtgagggcatgaaaaatctgaatttcgagcagcacttcgagagagaaaatgaaggaatgccctcattgattgccgaatcgaaccagtgcattcagcagctgacctccgaacgttttgacagccccgcagaggagacagtcaatatcccgctaaaggaagatgaggacgcaatgccattaattggccctgagactctcgtgtgccacgaggtggacctcgatgacctggatgaaaaagataagacatccattgaggatgtggccgtggagagttctgaatccaactccctcgtgagcattcctcccgctttgcccccagttgttcagcacaatttttccgtagcctcaccattgacactttcacaggatgaatctcgctccgtcaagtcggaatcagatattacaattgaggtggatagtattgccgaggaaagccaggaaggcctctgtgagagggaaagtgccaatggctttgagacgaacgtggcctctggcacttgttccattattgttcaggagcgagagtcaagggagaagggccagaaacgcccatctgacggaaactctggactgatggccaagaaacaaaagaggacccccaaacgcacctcagccgctgcgaaaaacgaaaaaaatggcaccggccagagttcagactcagaggacctgccagtgttggacaattctaacgaacttgataatatgaattccaccgagcgcatttccttcctacaggaaaaactccaggagattcgcaaatactatatgagtctgaaaagtgaggtcgcaacaattgaccgccgtcggaagcgcttaaaaaaaaaagatcgcgaagtgtcccatgcgggagcgagtatgagctcagctagctccgatactggaatgtccccctctagttctagccccccacagaacgtgctcgccgtggagtgtcggtag

SEQ ID NO: 215014 - DNA, 165 bp, synthetic construct
  misc_feature 1..165: note = Description of Artificial Sequence: Synthetic coding sequence
  source 1..165: mol_type = other DNA
atgaaagctgcagacgagcccgcataccttacggtggggacagacgtctccgctaagtacaggggtgctttttgcgaggccaaaattaaaaccgtgaagcgactggtaaaagtgaaggttctcctgaagcaagataacaccacccagttggtgcaggatgattag

SEQ ID NO: 215015 - DNA, 3567 bp, synthetic construct
  misc_feature 1..3567: note = Description of Artificial Sequence: Synthetic coding sequence
  source 1..3567: mol_type = other DNA
atgaaagccgcagacgagccggcttatctaactgtcggaactgatgtgtcggccaagtacaggggtgccttttgcgaggccaaaatcaagactgtcaaaagacttgtcaaggtcaaggtcttgctgaaacaggataacactacacagcttgtgcaggatgaccaggtgaagggccctctccgcgtcggggctatcgttgagaccagaacatcagacggcagttttcaggaagcaattatctccaagcttaccgatgctagctggtatacagtcgtgttcgatgatggcgacgagcgtacactgcggcgtaccagcctgtgcctcaaaggcgagaggcacttcgctgagagcgagacccttgatcagcttcccctgaccaaccccgagcatttcggtacccctgtgattgctaaaaaaactaacaggggacgccgaagcagtctgccagtgaccgaggatgaaaaggaggaagaaagctccgaggaagaggatgaagacaaaagaagacttaacgacgaactgctggggaaggtggttagcgtcgtttcagctaccgaacggacagaatggtaccctgctctggtgatttctccgtcttgcaacgacgatataacggtgaagaaggatcagtgccttgtgcgttctttcatcgattccaagttttactcaattgctcgcaaggatatcaaagaggtggacattctcaacctccccgagtctgaactgtcaaccaagcctggacttcagaaagccagcatcttcctgaaaacgcgggtggtgcctgataactggaaaatggacatttccgagatcttggagtcctcatcctcagatgatgaagacggcccagcagaagaaaacgacgaagaaaaggaaaaagaagcgaagaaaaccgaggaagaggtgccggaggaggagctcgatcccgaggaaagggataactttctgcagcagctgtacaaatttatggaagatagaggaactccgatcaataaacccccagttttaggatataaggatcttaatctgttcaaattatttaggttggtgtatcaccaggggggatgtgacaacattgattccggggcagtgtggaagcagatttatatggatctcggtattcccattttgaatagcgcggcaagctacaacgttaagaccgcctaccgaaaatacctgtacggcttcgaggagtactgccggagtgcaaatatccagttcaggacggttcatcaccacgaacccaaagtcaaggaggaaaaaaaggacctggaagagtctatggaagaagctctgaaattagaccaggagatgccccttaccgaggtaaagagcgagccagaggagaatattgacagtaactccgaaagcgaacgcgaggaaattgaacttaagtccccccgaggtcggcgtcgcatcgccagagacgtcaacagtatcaaaaaagagatcgaagaggagaagaccgaagataagcttaaggataacgacactgaaaataaggatgtggacgacgattacgaaactgccgaaaaaaaggaaaatgaactgctcctgggtagaaaaaatacgcctaagcaaaaggaaaaaaagattaagaagcaggaggattctgataaggacagtgatgaggaagaggagaaatcccaggaacgcgaagagaccgaaagtaagtgtgactccgaaggagaggaagatgaagaagacatggaaccatgcttaactgggactaaggtaaaggttaagtatggacggggaaaaactcagaagatttacgaagcaagcataaaaagtacagaaatcgacgatggggaggtcctgtacctcgtccactattatgggtggaacgtgaggtacgatgagtgggtgaaggcggatagaattatttggccattggacaaagggggaccgaaaaagaagcagaaaaagaaggctaagaataaggaggattcggagaaggacgagaaaagggacgaagaacggcagaaatctaagcgcggtaggccaccactaaaatccaccttgtcttcgaatatgccatatggcctgtcaaaaaccgccaacagcgaggggaaatccgattcctgttctagcgacagtgaaactgaggacgccctggaaaagaatctgattaacgaggaactgtccctcaaggacgaactggaaaagaacgagaacctgaacgacgataagctagacgaggagaatccgaaaatctctgctcacattctgaaagagaacgatcggacacagatgcagccacttgagaccctgaagttggaggtgggtgagaatgagcaaattgttcaaatcttcggtaacaagatggagaaaaccgaggaggtgaagaaagaggccgagaaaagccctaagggcaagggaaggagatcaaagacaaaggatttgagtctcgaaatcattaagatatcctcatttgggcagaacgaagcgggaagtgagccccacatcgaggcccattccctggagctcagttcgctcgacaataagaactttagcagtgcaactgaggacgaaattgaccagtgtgtgaaggagaagaaacttaaacgaaaaatcctggggcaaagttcccccgaaaagaaaatccgcattgagaacggtatggaaatgaccaatacagtgtcacaagagaggacatccgattgtattggtagcgaaggtatgaaaaatcttaattttgagcaacattttgagagggaaaatgagggaatgccctcccttatcgccgagtcaaaccagtgtattcagcagttgacatccgaacggttcgacagtcctgcggaggagaccgtgaatatacccctgaaagaggacgaagatgccatgcccttgattggacccgagactctcgtgtgtcacgaggttgatctcgatgacttagatgagaaggacaaaacgtctattgaggacgttgccgtggaatcctcagaaagtaattcactggtctccatccctcccgctctgcctcccgttgtgcagcacaacttcagcgtggcctcccctctcaccctgagtcaagatgagtctaggagtgttaagagcgaatccgacatcactatcgaagtagattctatagccgaggagtcacaagaaggcctgtgcgagagagagtctgcaaacggctttgaaaccaatgtagcgagtggcacatgcagcataattgtccaggagcgagagtctcgcgagaagggccaaaagcggccaagcgatggcaacagcggcctaatggccaagaaacaaaagcgcacccctaaaaggacttcagcagcagctaaaaacgaaaaaaatggaaccgatgagctggataatatgaactccaccgaaagaatctcctttcttcaggagaagcttcaagaaattcgaaagtattacatgtctctgaaatctgaagtcgccactatcgacaggagaagaaagagactcaaaaagaaagacagggaggtgtctcacgccggagcttcaatgagttcggcgagctctgacacaggaatgtccccatcatcaagctcgccccctcagaacgtcctagccgtggagtgcagatag

SEQ ID NO: 215016 - DNA, 3939 bp, synthetic construct
  misc_feature 1..3939: note = Description of Artificial Sequence: Synthetic coding sequence
  source 1..3939: mol_type = other DNA
atgaaagccctggatgagcccccttacctcactgtaggcacagacgtgagtgccaaataccgcggtgccttctgcgaggcgaagattaagaccgccaagcgtttggtgaaggtgaaggtgacctttagacacgacagttcgactgtggaggttcaagatgatcacattaagggtccgctgaaggtcggagctatcgtggaggttaaaaacctcgacggcgcataccaagaagctgtgattaataagcttactgatgccagttggtatacagtagtgttcgatgatggagacgaaaagactttgaggagaagctccctgtgcctcaaaggagaaagacatttcgccgaatctgaaaccctggaccaactgcctctgactaacccagaacacttcggtacaccagtcatcggtaagaagacgaataggggtcgtcgttccaaccacatcccggaagaagagtcatctagctcttccagcgacgaggacgaagacgatagaaagcagatcgatgagttactgggcaaggttgtctgcgttgactatatttctctagacaagaagaaggcgttatggttccctgctctcgtcgtgtgtccggactgttccgacgagatcgccgttaagaaagacaacatccttgtaagatcttttaaggacggcaagttcacctctgtgccacgcaaggatgtacatgagatcacaagcgacactgctccgaagccggacgctgtgctcaagcaggccttcgaacaggcactggaatttcacaagtcaaggacaatccccgctaactggaagacggagctgaaggaagactcctcctcgagcgaggccgaagaggaagaagaagaagaagacgatgaaaaagaaaaagaagataacagcagcgaagaggaggaagagatcgaaccgttccccgaggagcgggagaattttctacagcagttatacaagtttatggaggatagaggaactccaattaacaagaggccggtcttaggctatcgcaacctcaacctgtttaaattgttccggctcgtgcataagctcggcggtttcgacaacattgagtccggtgctgtgtggaagcaagtctatcaagatttaggtattccagtgctgaattctgcagccggatacaatgtgaaatgcgcctataaaaagtatctatacggttttgaagaatactgcagaagcgcaaacattgaatttcagatggctctgcccgaaaaagtggttaataagcagtgcaaagagtgtgagaatgtcaaggagatcaaggtcaaagaagagaatgagaccgaaatcaaagagattaaaatggaggaggagcgcaacataattcctcgagaggagaagcccattgaagatgaaattgagaggaaggaaaatattaagccaagcctgggttcaaaaaaaaacctgctggaaagcatccctacgcactccgatcaggaaaaggaagtgaacattaaaaaaccagaggacaacgagaacttggatgacaaggatgacgatactacccgagtggacgagtctctaaacatcaaagtggaggctgaagaagagaaagcaaagagcggagatgagacgaataaggaagaagacgaggatgatgaagaagccgaagaagaggaggaggaggaagaggaggaggaggatgaggatgacgatgataacaacgaggaggaggagtttgaatgctatcctcctggaatgaaagtccaagtgcgctatggtcgagggaaaaaccaaaaaatgtacgaagcctctatcaaagatagcgacgtagagggcggtgaagtcctctacctggtgcattactgcggatggaatgtccggtacgacgagtggataaaggccgataagattgtgagaccagcagataagaatgtaccaaagatcaagcacaggaaaaaaataaagaacaaactggataaggaaaaagacaaagacgagaagtactcccctaagaattgtaagttacgacggttgtcaaagcctccatttcaaacgaatccatccccagaaatggtaagcaaattggatctgacagatgccaagaatagtgacacagcgcatatcaagagcatagaaataacttccatcctgaacggcttgcaggcgtccgagtcaagtgcggaagattcggagcaggaggatgagcggggagctcaagacatggataataacggaaaagaggagtctaaaattgaccacctcaccaacaacaggaacgatctgatctctaaggaggaacaaaattctagttccctcctcgaggaaaacaaagtgcacgcagatcttgtgatttctaaacctgtgagcaagtctcccgaacgcttgcgcaaggacatcgaagtcctgtcagaggatacagattacgaagaggacgaggtgactaagaagaggaaggatgtcaaaaaagatacaacggataagtcctcaaagccacagataaaacggggaaaacgccgatattgcaacacagaagagtgtctcaagacaggatcaccagggaagaaagaagaaaaggcaaagaataaagagtccctgtgtatggaaaattcttcaaatagctcatctgatgaagacgaggaagagactaaagccaagatgaccccaacaaaaaagtataacggccttgaagagaagcgcaaaagccttagaacaacgggtttttatagcggattcagtgaggtggccgaaaaaagaattaagttactgaacaactctgatgagcggctgcagaacagccgagccaaagaccgaaaagatgtgtggagctccattcaaggacaatggccaaaaaagactctgaaagaattattctctgactctgataccgaagctgctgccagtccaccccatcccgctcccgaagaaggtgttgccgaagaatccctgcagaccgttgccgaggaggaatcttgcagcccaagcgttgaactggaaaaacccccacctgtcaacgtagatagtaagcctattgaagagaaaacagtggaagtgaacgaccggaaagccgagtttccttcgtctggttctaattccgtgctaaatactcccccaactacgcccgaaagtccatcctctgtgaccgtcactgaggggtcccgacagcagagtagtgtgaccgtctctgaaccactcgctcccaaccaggaggaggtgagatctatcaagagtgaaactgactctacgatcgaggtcgactcggtggccggtgagctgcaggacctgcagtctgaggggaatagctcaccagcaggcttcgacgcgtctgtgtccagcagtagttccaaccagccagaacctgaacatccagaaaaggcatgtactggccagaagcgcgtgaaggatgcccagggtggaggctcgagtagcaaaaagcaaaaacggagccataaggctacagtggttaacaataagaagaagggtaaaggtactaattcttccgattccgaggaactgagcgccggagagtctatcacgaaatcccagcctgtcaaatccgtgtctaccgggatgaagtcccattctacaaagagcccagcacgcactcagagtcccggaaagtgcggaaaaaacggggacaaagatcccgatctgaaggaaccaagcaacaggctgcccaaggtgtataagtggtcctttcagatgtctgaccttgagaacatgacatccgcagaaagaatcacaattctgcaggaaaaattacaggagattcggaagcactatctgtcactgaaatccgaggtcgccagcatcgaccgcagacggaagaggcttaagaaaaaagaacgtgagagcgccgctactagctcctcatcaagcagtccctcttcatcttccataacggctgccgtcatgcttacattggcagagccgtccatgagtagtgcctcacagaacgggatgagtgtggagtgtcgctag

SEQ ID NO: 215017 - DNA, 3681 bp, synthetic construct
  misc_feature 1..3681: note = Description of Artificial Sequence: Synthetic coding sequence
  source 1..3681: mol_type = other DNA
atgaaggccctagatgaacccccatatctcacagtggggactgatgtgtccgccaagtacagaggggcattttgtgaggctaagattaaaacggctaaaagactcgtaaaggtaaaggtcacttttagacacgatagttctaccgtggaagtacaggacgaccacattaaggggccattgaaagtgggcgcaatcgtggaagtcaaaaatctggatggggcttaccaggaagccgtgatcaataagctgactgacgcctcatggtacacagtagtatttgacgatggcgatgaaaaaaccctgagacggtcctcactgtgcctgaagggagagagacactttgctgagtctgagacgctcgatcaacttccattaactaatccagagcattttggtacccctgtcattggcaaaaagacaaatcgcggacggagatccaatcacatacccgaggaggaatcctccagtagctcgagcgacgaagacgaggacgatagaaaacagattgatgagctgctggggaaagtggtgtgtgtggattatatctcactggacaaaaaaaaggccctgtggtttcctgcgctcgtcgtgtgtcccgattgcagcgatgaaattgccgttaagaaagacaacatcttggtgcgctccttcaaagacggcaagtttacatccgttcctcgaaaggacgtgcatgaaatcaccagcgacaccgctccgaagccggacgccgtcttaaaacaagccttcgaacaggcattggaatttcataaatcccgcaccatccctgccaattggaagactgaactaaaggaggatagcagtagctctgaagcagaggaggaagaggaggaggaggacgatgaaaaggagaaagaagacaattcctctgaagaggaggaggagattgagccatttccggaagaacgcgagaactttttacagcagctatataagtttatggaagatagagggaccccaattaataaaagaccagttctcggataccgcaacctgaacctgttcaagcttttccgcctggtccataagcttgggggtttcgacaatatcgaatccggggctgtctggaagcaggtctaccaggacctggggattcctgtgctgaacagtgcagctggatacaacgtaaagtgcgcgtataagaaatacctctatggctttgaggaatattgcagaagcgctaatatagaatttcagatggcccttccagagaaggtcgttaacaaacagtgcaaggaatgtgagaatgtgaaggaaatcaaggtgaaggaggaaaacgagaccgagataaaggagataaagatggaagaggaaagaaatattataccaagagaagagaagccaattgaagatgaaatcgagcggaaagagaatatcaagcctagtcttggctcaaaaaagaacttattggagagtatcccaacgcattctgaccaggagaaggaggtcaacataaagaaacctgaggacaatgagaatctcgatgacaaggatgacgacacgacacgcgtcgacgaaagtctgaacataaaagtggaggctgaggaggaaaaggccaaatcgggatacgatgagtggatcaaagcggataagattgtacggccagccgataagaacgtacctaaaatcaaacaccggaagaaaattaaaaacaagctggacaaagaaaaagataaagacgagaagtactccccaaagaattgcaagctccgcaggctatctaagccaccatttcagaccaacccatctccagagatggtgagcaagctggacttgacagatgcgaagaactccgatactgcgcacatcaaaagtatcgaaataacgagtatcctcaacggtcttcaggctagtgagtcaagcgccgaagacagcgagcaggaagacgagaggggtgcccaagacatggacaacaacggcaaggaggagtcaaagatcgaccaccttacaaataaccgcaatgatctgataagtaaagaagaacagaactccagcagcctgcttgaggaaaacaaagtgcatgccgatctggtgattagcaaaccagtgagcaagtcccctgagaggctccggaaagatattgaagtgctctcagaagacaccgactacgaagaggatgaggtcaccaagaagagaaaggacgttaaaaaagatactaccgacaagagttccaaaccccagataaagcgtggtaaacgtcgctactgtaatacggaggagtgtcttaaaacaggtagcccaggcaagaaagaagaaaaagctaagaataaagagtctctgtgtatggagaactccagtaacagttctagtgacgaagatgaggaggagaccaaggcaaaaatgacacccaccaaaaaatacaacggactagaggaaaagaggaagtctttaagaaccactggtttttatagcggtttttcggaagttgctgaaaaacgtattaaacttctgaacaattccgacgaacgcctgcaaaattctagagccaaggaccggaaggatgtctggtcatccatacagggccaatggccgaagaaaacgctcaaagaattgttctctgatagcgatactgaggccgctgcttcacctccccaccccgcacccgaggagggagtagctgaggagagtttgcagacagtcgccgaggaagaatcttgtagtccgtcggtggagcttgaaaagcccccacctgtgaacgtcgactctaagccgatagaagagaagaccgtcgaagtcaacgacaggaaagccgagtttccctcatcaggttcgaatagcgtcctgaacactcctccgactacacctgagagcccctcgtctgtgactgttactgaaggatcacgacagcagtcgagcgtcactgtatcagaacctctggcccctaaccaagaggaggtgagatcgattaaaagtgaaacagattcaaccatcgaggtcgatagcgtcgccggagagctgcaggacctacagagcgaaggaaacagtagccccgcaggtttcgacgccagcgttagctcttcaagcagtaaccagcctgagcccgagcaccccgaaaaggcctgcactggccaaaagcgcgttaaagatgcccaggggggaggaagtagtagtaaaaagcagaaaaggagccacaaggcgaccgtggtaaataataagaagaaggggaaaggcaccaatagctccgacagcgaggagctgtctgctggagagagtataaccaaatctcagccagtgaagtctgtgtcaaccggcatgaagtctcatagcaccaagagtcccgctcgtactcaatccccaggaaagtgtggcaagaatggggacaaagatcccgatctgaaggagccgtctaatcgcctacccaaggtgtataaatggtcttttcagatgtcagatctggagaacatgacctcagccgaaaggataaccatcctgcaagagaaattacaggagattcgcaagcactacttgtcactgaagtcagaagttgcatccattgatcgtagacgcaagcggctgaagaaaaaggaaagagagtccgcagctacctcctcatcatcttcctctccttcaagttctagcatcacagccgcagtgatgctgaccttggctgagccttctatgtcttccgcaagccagaacggcatgtctgtcgaatgccgttag

SEQ ID NO: 215018 - DNA, 3939 bp, synthetic construct
  misc_feature 1..3939: note = Description of Artificial Sequence: Synthetic coding sequence
  source 1..3939: mol_type = other DNA
atgaaggcactggatgagccgccatacctgactgtgggtaccgacgtgagcgctaagtaccggggagctttctgcgaggcaaaaatcaaaactgctaagcggctcgttaaggtgaaggtgactttccgccatgattccagcaccgtcgaggtgcaggacgatcatattaaaggcccactgaaggtgggtgcaattgtcgaggtaaagaacctcgatggcgcatatcaggaagccgttattaataagctgaccgatgcctcctggtacacggtggtgttcgatgacggcgatgagaaaacgctcaggaggtccagcctgtgtctaaaaggagagaggcattttgcagagagtgagacgctggatcagctgccactgacaaaccccgagcattttggcacaccggtaattgggaagaagacaaaccgcggtaggagatctaatcacatccctgaagaagagtcatcatcctcctctagtgatgaagacgaagatgaccggaagcagatcgatgagctgctgggtaaggtggtttgcgtcgattacatttctcttgacaaaaaaaaagcactgtggttccccgctcttgtggtttgccctgattgcagtgatgagatcgcagtgaagaaagacaacattctggtgcgcagttttaaggacggtaagtttacctccgtgcccagaaaggatgtccatgagatcaccagtgacactgcgcctaagcccgacgcagttctgaaacaggctttcgagcaagctctggagttccataagtctaggaccatccctgctaactggaagaccgaactgaaagaagacagtagttcctctgaggccgaagaggaggaggaggaagaggatgacgaaaaggagaaagaagacaacagctcagaggaggaggaagaaatagaacccttccctgaggaacgggaaaatttcttgcagcagctatataagttcatggaggaccggggaactccaatcaataagagacccgtccttgggtatagaaatctgaatctgtttaaactgttcagactcgtccataaactcggaggctttgataacattgaatcgggcgctgtttggaaacaggtctatcaggacctcgggatccctgtcctgaattccgccgctggctacaacgtcaaatgtgcatacaagaagtacctctacggttttgaggagtattgtcgctccgcaaatattgaatttcagatggctctccctgagaaagtcgttaataagcagtgcaaagagtgcgagaacgttaaggaaattaaggtcaaggaggagaacgagacggagataaaggaaattaagatggaggaggagaggaatattattcccagggaggagaagccaattgaagatgaaattgaacggaaagaaaacatcaaaccaagcctcgggtccaagaaaaacttgctcgagagcatcccaacccactccgaccaggaaaaagaagtgaatatcaaaaaaccggaggacaacgaaaacctagatgataaggatgacgatacaacacgcgtggacgaatccctaaatatcaaagttgaggcagaagaagaaaaagctaaatctggagacgaaacaaataaggaggaagacgaagatgacgaggaagccgaggaagaggaagaggaggaagaagaagaagaggacgaggacgacgatgacaacaacgaggaggaagaatttgagtgctacccccctggcatgaaagtccaggtccgctatggacgcggaaaaaatcagaaaatgtatgaggccagcattaaggattcagacgtggaagggggagaagtcctgtacctggtgcattactgtggctggaatgtgcgctatgacgagtggattaaagccgataaaatcgtgcggccagctgataaaaacgtgcccaaaataaagcaccgcaagaagattaagaacaaattagataaggaaaaagacaaagacgagaaatactcacctaagaactgcaagcttaggagactgtccaagccaccatttcagacaaacccatccccagaaatggtcagcaaactggacctgactgacgccaaaaatagcgataccgctcacatcaaaagcatcgagatcacatccattcttaatggactgcaggcttccgaaagctccgcagaagatagcgagcaagaagacgaacggggagctcaagatatggataataacggaaaagaagagtctaagatcgaccacctcaccaacaataggaacgacctgatttctaaggaagaacagaatagttccagtctgctcgaggagaacaaagtgcacgctgatctggtcatttcaaagcctgtgtctaaaagccccgaaagactgcggaaggacattgaggtcctatccgaagacaccgactacgaagaggatgaagtcacaaagaagagaaaggacgtgaaaaaagacaccactgacaaatcaagcaagccacagataaaacgcggaaagagaaggtattgcaacaccgaagagtgcctaaaaaccggatcgcctggaaaaaaggaggagaaagccaaaaacaaagagtccctatgtatggagaatagtagtaattcaagcagtgatgaggatgaagaggaaaccaaggctaaaatgactccaactaagaagtacaatggattggaggaaaaacggaaaagtctacggacgactgggttctactcagggttctcggaggtggccgaaaaaagaattaagctcctgaacaattctgacgagcggctccaaaattcccgagccaaagacagaaaggatgtttggtcgtcaatccagggacagtggcctaaaaaaactctgaaagagctgttctcagatagcgatacagaagccgctgcatcccctccccatccagccccagaggaaggtgtggcagaggagagcctacaaaccgtcgcagaggaagagagctgtagtcccagtgtcgagctagaaaaaccacctccagtgaacgtggactcaaagcccatcgaagagaagaccgtggaagtcaacgaccgcaaggccgaattcccctcttctggctccaacagcgtccttaacacacctccaaccactccagaatccccttccagcgtaactgtcaccgagggctcacgccagcagtcaagcgtgacagtgtctgaaccgcttgcgccaaatcaagaggaggtgcggtcgattaagtccgaaaccgacagcacaattgaagtcgacagtgtggcaggggagctccaggatttgcagagtgagggcaactcttcccccgcaggcttcgatgcctcagtgtcatcttcttcatcgaaccagccggagccggaacatcctgaaaaagcatgtaccggccaaaagcgcgtgaaagatgctcagggcggtggatcaagttcgaagaaacagaaacgctcccacaaggccacagtggttaacaataaaaagaagggaaagggcaccaattcttctgattctgaagaactatctgcgggagagagcattactaagagccagccggtcaagtccgtctctacaggcatgaagtctcattctactaagagtcccgctcgtactcaaagccctggcaagtgtgggaagaatggtgataaggaccctgacctcaaggagcctagtaatcgcttaccaaaggtgtacaagtggtcgttccagatgtctgatctggagaatatgacatctgctgaaaggattaccatcctgcaggaaaagctgcaggagatccgcaagcactacctatctctgaagagtgaggtggcctctatcgaccgacgtcgaaaacgtctgaaaaagaaggaacgggagagcgctgccacttcatcgtcaagctcatctccttcaagctcaagcattactgctgccgtgatgttgacattggccgagcctagcatgtccagtgccagtcagaacggcatgtctgtggaatgtcgctag

SEQ ID NO: 215019 - DNA, 3462 bp, synthetic construct
  misc_feature 1..3462: note = Description of Artificial Sequence: Synthetic coding sequence
  source 1..3462: mol_type = other DNA
atgaaggccctggacgaacctccttaccttactgttggcactgatgtctcagccaaataccggggtgcattttgcgaggctaagattaaaactgccaaacgactcgtgaaggtgaaagtgacctttcggcacgattctagtaccgttgaagtacaggatgaccacattaagggtcccctcaaagtgggtgccattgtggaagttaaaaatctggacggcgcttaccaggaggctgtcataaataagctaacagacgcgagctggtataccgtggtgttcgatgacggagacgagaagactttgaggcgctcttccctgtgtcttaagggcgagcggcactttgccgaatccgaaaccctggaccagttgcccctgacaaatcccgagcacttcggaacacctgtgatcggtaaaaagactaatagagggaggcggtccaatcatatccctgaggaggaatcaagctcttcaagttccgacgaggacgaggacgataggaagcagatcgacgagctactgggaaaagtggtgtgcgtagattatatatctcttgataaaaagaaagctctttggtttccagcgctcgtcgtgtgtcctgactgcagtgatgaaatcgcagtgaaaaaggacaatatcctggtgaggagcttcaaggacggcaagtttacatccgtgccgcgaaaggatgtacatgaaattaccagcgacacagcacctaagccagacgcagtcttgaagcaggcttttgagcaggctttagaattccataagtcacgtacaattccagccaattggaaaaccgagttaaaggaagattccagctcaagtgaggcggaagaggaggaggaggaggaagacgacgagaaggagaaggaagacaacagtagcgaagaggaggaggagatcgaacctttcccagaggagagggagaacttcctgcagcagctgtacaaatttatggaggacaggggcacacccatcaataaacgccctgtgctaggatacaggaatctaaacttgttcaagctttttaggcttgtgcataagctcggcggattcgataatatcgagtctggcgctgtctggaaacaggtgtaccaagacttgggaatccctgtcctgaattcggccgctgggtacaacgtgaagtgtgcttacaaaaagtatctgtatggttttgaggaatactgtcgctctgcaaacattgagttccagatggcacttcccgagaaggtcgttaataagcagtgcaaggaatgtgagaatgttaaggagatcaaggttaaagaggagaacgaaactgagattaaggagatcaagatggaagaagaaagaaacatcatccctcgggaggagaagcctatagaagacgagattgagagaaaggagaacatcaagccctctctgggctctaaaaagaacctgctggaaagtattcccacacattccgaccaagagaaagaggtgaacattaaaaagcccgaggacaacgaaaatctggacgacaaggatgatgacactacacgggtcgacgagtctttgaatattaaagtcgaggcggaggaggaaaaggcaaagtccggggacgagacgaacaaagaagaggatgaagatgatgaggaagccgaagaggaagaagaggaagaggaggaagaagaggatgaggacgacgacgataacaacgaagaggaagagttcgaatgttacccaccgggaatgaaggtgcaggtgagatatggcagaggtaaaaatcagaagatgtatgaggccagtataaaagacagcgacgttgagggcggagaagtactttatctcgttcattactgtgggtggaacgtgcggtatgatgagtggatcaaggcagataagattgttagaccagcggacaaaaacgtgcccaaaatcaagcaccgtaagaagatcaaaaataaactcgataaggaaaaagacaaggatgagaaatattctccaaaaaactgcaaactgcggaggctcagtaagccccctttccagaccaatccttcgcctgaaatggtctcaaagctagatctcactgatgcaaagaactcggacactgctcacattaagtccatcgagatcacaagcattctaaacggactgcaagccagcgagagttccgcagaagactccgaacaggaggatgagaggggggctcaggacatggacaacaatggcaaggaggagtccaagattgatcatttgacaaataataggaacgacctcatctcaaaggaagagcagaatagtagttctttactcgaggaaaataaagttcacgctgatctggtgatatctaaacctgtgtctaaaagccccgaacgtctgcggaaggatatcgaagtactcagcgaagacacggactatgaggaggacgaggtgaccaaaaagcgtaaagatgtcaagaaagacacgaccgacaaaagctctaagccccaaataaagcgcggaaaacgacgctattgcaacaccgaggaatgtttgaagactggcagtccgggaaagaaggaagagaaggccaagaataaagagtctctttgtatggaaaactcatccaattccagctctgacgaggacgaagaagaaactaaggccaagatgacccccacgaagaagtacaatggactggaagagaagaggaaatccctgaggaccaccggcttctatagcgggttcagcgaggtggccgaaaagagaatcaagctgttgaataatagtgatgaacgcctgcagaatagccgcgcaaaggacagaaaggacgtctggtcatcgattcagggtcagtggccaaaaaaaacccttaaggagctgttctccgactccgatacagaagccgcagccagtcccccacatcctgccccagaagagggcgtcgctgaggaatcgcttcaaactgtcgctgaagaggagtcctgttccccctctgttgagcttgagaagccgcctcccgtcaacgtagactccaaaccgattgaagagaaaactgtggaggtaaatgaccgcaaagcggagtttccctcatccgggagcaatagcgtgcttaatacaccacctacaactcccgagagcccttcctctgtgacggtgactgaaggttctagacagcaaagttcagttactgtgtcagagcctctagcccctaaccaggaagaggtccgtagcattaagtccgagactgacagcaccattgaggtggatagtgtcgctggtgaactgcaagacctgcagagcgaaggtaatagcagtccggcaggattcgatgcgtctgtctcctcctctagcagcaaccagcccgagccagaacacccggagaaggcttgtaccggccagaagagggtgaaggacgcccaggggggaggctcctcgagtaagaaacagaagaggagtcataaagcgaccgtcgtcaataacaagaagaagggaaaggggattttaccacattag

SEQ ID NO: 215020 - DNA, 1452 bp, synthetic construct
  misc_feature 1..1452: note = Description of Artificial Sequence: Synthetic coding sequence
  source 1..1452: mol_type = other DNA
atgaaggccctggatgagcccccatatctaacggtgggcacagatgtgtctgcaaaatataggggggcattttgtgaggctaaaatcaagactgcaaagagactcgtcaaggtaaaagtcacgttccgccatgattcctcaaccgtagaggtgcaggacgatcacatcaagggtcctttaaaggttggggctatcgtggaggtgaaaaatctggacggcgcttatcaggaggccgtgatcaacaagttaactgacgcatcatggtatacagtcgtgttcgatgacggagatgagaaaaccctgaggcggagtagcctttgcctgaagggtgaacggcacttcgcagagagcgagaccctggaccaactgccccttactaaccccgagcatttcggcaccccagtaattgggaagaagaccaacaggggccgaagatctaatcatattccagaggaagagagctcttccagcagttctgacgaagacgaagatgataggaaacagattgacgagctcctcggaaaggtcgtgtgtgtggactatatttccctggataagaaaaaggcgctttggtttcccgctctggtcgtgtgccccgactgttccgatgaaatcgctgttaagaaggacaacatcctcgtccggagtttcaaggacggcaaatttacttctgtgccacggaaagacgtacacgaaattaccagtgacactgctcccaagcctgacgccgtgctcaagcaagcctttgaacaggctctcgaatttcataaatctcgtactatcccagcaaactggaagaccgagctgaaagaagactcttcttcttccgaggcagaggaggaagaggaggaggaggacgacgagaaagagaaagaagacaactcttctgaagaggaagaggaaatcgaaccatttccggaggaacgggaaaactttttgcagcagctgtacaaatttatggaagacagaggaacacctatcaacaagaggcccgtgctgggctatcgtaacctcaacctgtttaagctgtttcggctggtacacaaattgggaggcttcgataatattgagtccggcgcagtctggaagcaggtgtatcaggatctgggaattcctgtgctgaattccgccgcaggttataacgtcaaatgcgcatacaaaaagtatctgtatggttttgaagagtattgtaggtctgccaatattgagttccagatggccttacctgaaaaggtggtaaacaaacagtgcaaggagtgtgagaatgtgaaggagatcaaggtgaaagaggagaatgagactgagattaaagagatcaagatggaagaggagagaaacataatccccagggaagaaaaacctattgaggatgagatcgagcgtaaggagaatatcaagcccagtctgggatccaagaaaaacctgctggaatctatcccaacccattcctag

SEQ ID NO: 215021 - DNA, 1968 bp, synthetic construct
  misc_feature 1..1968: note = Description of Artificial Sequence: Synthetic coding sequence
  source 1..1968: mol_type = other DNA
atgaaagcactggatgaaccaccttacttgacagtgggaactgacgtgtccgctaaatacagaggagctttctgcgaggctaagattaaaacagctaagcgcctggtcaaggtcaaggtgactttcaggcacgacagttctactgtggaagtgcaagatgaccacattaagggccctctcaaagtgggggcaattgtggaggttaaaaatttggacggggcttatcaggaagccgttatcaacaaattgaccgacgcttcctggtacaccgtggtgtttgatgacggcgacgagaagacgctgagacggtcttccctgtgtctgaagggggaaagacattttgcggaatccgaaacacttgatcagctgccattaacaaacccagagcattttggcaccccagtgattggtaagaagactaatcggggacgcaggtctaaccacatcccagaggaggaatcaagctccagctcatccgacgaagatgaagacgatagaaaacagattgacgagctgttaggaaaagtggtttgcgtggactacattagcctcgataagaagaaggcgctctggtttccggcattggttgtctgtcctgactgcagcgatgagatcgcggtaaaaaaggataatatactggtacgttcttttaaagatgggaaattcacttctgtgcctagaaaggacgtgcacgagataactagtgatactgccccaaaaccagatgcagtgctgaagcaggcctttgagcaggctctcgaattccataagtctcgtactatcccagctaactggaagaccgagttgaaagaagattctagtagctctgaggccgaggaggaggaagaagaagaggacgacgaaaaggagaaggaagacaacagcagcgaagaggaagaagagattgaaccatttcccgaggaaagagaaaactttctacaacagctgtataaatttatggaggatcgtggcaccccgatcaacaaacgccctgtcttgggataccggaacctgaacctatttaagctctttcgactagttcacaagctgggaggcttcgataacattgaatccggggctgtgtggaagcaggtctatcaggaccttggcatacccgtgcttaactctgccgcagggtacaacgtcaaatgcgcatataaaaaatacctatatggcttcgaggagtactgtcgatccgcaaatatagagttccagatggctctacctgagaaggtcgttaataaacagtgcaaggaatgcgagaatgtcaaagaaattaaggtcaaggaggagaacgaaacggaaattaaggagataaaaatggaagaggagcgtaacataatacccagagaggagaaaccgatcgaggacgagattgagcgcaaagaaaatatcaaaccatccctcggtagcaagaaaaaccttttagagtccatacccacccacagcgatcaagagaaagaagtgaatatcaagaaaccagaggataatgaaaatcttgacgataaggacgatgacacaactagggtcgacgaatccctcaacatcaaggtggaagcagaagaggaaaaggccaaatctggagatgaaactaataaggaagaggatgaggacgacgaagaagctgaggaggaagaggaggaggaagaagaggaggaggatgaggatgatgatgataataacgaggaagaagaattcgaatgttatcctccaggcatgaaggtccaggtccggtatggccgtggcaaaaaccaaaaaatgtacgaggcttcaattaaggactcagacgtcgagggaggagaagttctgtacctggtgcattactgtgggtggaacgtacgctacgatgagtggatcaaagcggataaaatcgtgcggccagcagataaaaatgttcctaaaatcaagcacaggaaaaaaattaagaattctgtctacaaaaagaaaaaaaagaaaaaaaataagtag

SEQ ID NO: 215022 - DNA, 1785 bp, synthetic construct
  misc_feature 1..1785: note = Description of Artificial Sequence: Synthetic coding sequence
  source 1..1785: mol_type = other DNA
atggccgctccagtcaaaggtaaccgcaagcagagtaccgaaggagatgctctcgacccacccgctagtcccaagcccgcaggcaagcagaacgggattcaaaaccctataagccttgaagacagcccggaggcaggaggcgagcgggaggaggagcaggaaagagaggaggagcaggcatttctggtgtctctgtataaatttatgaaggaaagacatacccccatagaacgagtgccacatctaggatttaaacaaatcaacttgtggaaaatatacaaagctgttgagaagttaggagcctacgagctggtgactggcagacgcctgtggaaaaacgtgtatgatgagcttggaggttcacccggaagcacctctgctgctacatgcacacgccgacattatgaacggctggtgttaccttatgtgaggcacctcaagggcgaggatgacaaacctctgccaaccagcaagcccagaaaacagtacaagatggccaaggaaaatagaggggatgatggagctactgagcggcctaaaaaagctaaggaagaaaggaggatggatcagatgatgcccggaaaaacaaaggccgacgctgctgacccggctcccttgccaagccaggaaccccctaggaactccactgagcaacagggtctggctagcgggtcatcagtgagtttcgtgggtgctagcgggtgtcccgaggcctataaaagactgctcagcagtttctattgtaaaggaacacacggtataatgtcacctttggccaagaagaagctactggctcaagtctcgaaagtggaggccctgcagtgtcaagaggaaggttgtagacacggcgcagagccccaggccagtcccgcagtacacctccctgagtccccgcagagcccaaagggattgaccgagaacagtcgccaccgcttgaccccgcaggagggacttcaagctcctggaggatctctgagagaggaagcgcaagcaggaccatgccctgcagccccaatctttaagggatgcttttacactcaccccaccgaggttttgaagcccgtctcacagcatcccagagactttttttcccgtctgaaggacggcgtcctactgggcccacctggtaaagaaggcttatcggtgaaggaaccccagcttgtatggggcggagatgccaatagaccgtcagcatttcacaaggggggatcaaggaaaggtatactctatcccaagcccaaggcatgctgggtgagtccaatggcgaaggtaccagctgagtcccctactctgccaccaactttcccaagcagccccggactcggatccaagcgcagcctggaagaggaaggtgccgctcattctgggaaacgactgagagcagtgtctccattcttgaaggaagcggatgccaaaaaatgtggcgctaaaccagccggtagcggcctggtgtcctgccttttgggccctgcattgggcccagtgccaccagaggcttaccgcggaaccatgctgcattgcccattgaatttcacgggcactcctggtcccctcaaggggcaggctgctcttcctttttcccctctagtcataccagccttccccgcacacttcctcgctaccgcgggaccatcacccatggccgctggcctgatgcattttccccctaccagtttcgactctgctctgaggcacaggctttgtccagcaagcagcgcttggcatgcccctccagttaccacctatgccgcaccgcacttttttcatctgaataccaagctgtag

SEQ ID NO: 215023 - DNA, 1917 bp, synthetic construct
  misc_feature 1..1917: note = Description of Artificial Sequence: Synthetic coding sequence
  source 1..1917: mol_type = other DNA
atggctgcccctgtgaaaggaaaccgcaaacaaagtaccgaaggtgacgcgctggacccgcctgcctctcccaaaccagctggtaagcagaacggaatacagaaccccatttctctggaggacagccccgaggccggaggggagagggaagaggaacaagagcgcgaagaggagcaagctttcctcgtgtctttgtataaattcatgaaagagcgccacacacccattgagcgtgtccctcacctgggtttcaagcagatcaacctttggaaaatttacaaggcagtagagaagcttggggcttacgagttagtaacgggccgacgtctgtggaagaacgtgtacgacgagttgggaggatcccctggctccacatcagccgcaacctgtacgagacggcactacgaacgcctggtcctaccctacgtccgtcacttaaagggcgaggatgataaaccgctcccaactagcaaaccaaggaaacaatacaaaatggccaaagagaatagaggcgacgatggagccacggaacggcctaaaaaggctaaggaagaacgtaggatggatcagatgatgcccggaaagaccaaggctgacgcagccgatccagctcctctgccgtcccaggaacccccaaggaattccacagagcagcagggcctggcttcagggtcaagcgtgtccttcgtgggagcatccggttgcccggaggcatacaagcgtttgctgtcctcgttttattgcaagggaacacatggcatcatgagtccgctggccaaaaagaagctgctagctcaagtttctaaggtggaggcactacagtgccaggaagagggctgcagacacggcgcagagcctcaggcctccccagccgtgcacctgcctgaaagccctcagagccccaaggggctgaccgagaacagccggcataggctaactccacaagaaggccttcaggctcctggcggatccctgagggaagaggcccaggctgggccttgtccggcagcaccaatcttcaagggctgtttctacacacatcccaccgaggtattgaagcctgtgagccagcacccgcgtgatttcttttctaggttaaaagacggcgtgctgctaggcccacccggaaaggagggcctcagtgtcaaggaaccgcagctcgtgtggggtggggacgccaaccgaccttcagcatttcacaaggggggatcgaggaagggcattctgtatccaaagcccaaagcctgctgggtgagcccaatggccaaagttcccgcagagtcacctactcttcctcctacatttcccagctcccccggtctcgggtccaaaagaagtcttgaagaggagggcgctgctcacagcggtaagcgcttacgcgctgtgagtccgttcctgaaggaggctgacgctaagaaatgtggagccaagccagcgggatccggactggtctcttgcctgctcgggcctgctctggggccagtgccccctgaagcgtataggggaacaatgttgcactgtcccctgaattttactggaactcaccaccagagccagcccatgcaacgccctacctcaagtaccagcactccaagctgtaggcccgcacacggggtcgtgtatacagttgagtctactggcgcatacaaccgccaagtgttactgcccggtggctcggaactggttccagcaacacaggacactcgcgctatgcctcttgctggtcagcctgggacttcagaagaagagggtagcggaaagactggcttcatctccagacagcagccggaacctagaagccggggaccttcttgttataaggctctgggcgaggacggccaacttccactgcctcagtcgggcgctagaagtacacaagttgcgcatgggaagtctaataagaaaacgcctgtctag

SEQ ID NO: 215024 - DNA, 1581 bp, synthetic construct
  misc_feature 1..1581: note = Description of Artificial Sequence: Synthetic coding sequence
  source 1..1581: mol_type = other DNA
atgaaggagaggcacacacctattgagcgtgtccctcatctgggattcaagcagataaatctgtggaagatctacaaggcagtcgagaaacttggcgcatatgagctggtcacagggcgaagactgtggaagaatgtgtacgatgaattagggggatcaccagggagcaccagcgccgcaacctgtactaggaggcattatgagcgcctggttctaccttatgtaagacacctgaagggggaagatgacaagcccctcccaaccagcaagcctcgtaaacagtataagatggcaaaagagaaccgcggtgatgatggagccaccgagcggccaaaaaaggcaaaggaagagcgacgcatggaccagatgatgcctgggaagaccaaagcggacgccgctgatccagcccctttgccctcccaggagccgccacggaattccactgagcagcaagggctggcaagcggctcctctgtaagttttgtgggggcatccggatgccccgaggcctacaaacggctgctctcctctttttattgtaaagggacacacggaatcatgagcccccttgcaaaaaagaagctgttggcacaggtatccaaggtggaagcactccagtgtcaggaagaagggtgcagacacggcgcagagccccaggcgtcccccgctgtgcatctgcctgagtcaccccagtcaccgaagggcttaactgaaaattctagacaccgcctgactccacaagaggggctgcaggcaccaggaggtagcctgcgggaggaagctcaagctggcccatgcccagctgcccctattttcaaagggtgcttctacacccaccccactgaggttttaaagccggtgtcccaacatccaagggacttcttctcacgcttgaaggacggcgtgttattaggaccgcctggcaaggagggcctcagcgtcaaggagccacagttggtgtggggtggggacgccaatcgcccttcagcctttcataaaggcggatctcggaaggggatcctgtaccccaagccaaaggcctgctgggtcagcccgatggctaaggtccccgcagaaagcccaacattgccaccaacatttcccagctcccccggactcggctccaaaagaagtctcgaggaagagggtgccgcacacagcgggaaacgcctgcgcgctgtcagcccattcctaaaggaagccgacgccaagaagtgtggcgcaaaaccagccggatctggcctggttagctgtttgctgggtcctgcgcttggccctgttcctcccgaagcctacagagggacgatgctccattgtcccctcaatttcactggtactccaggtcccctgaaaggacaggcggcactgcctttcagccctctggtcataccagccttcccagcccactttctagccactgcagggccatccccgatggcagccggactcatgcattttccccctacatctttcgatagtgctcttcggcatcggctgtgtcctgcttcgtctgcttggcatgccccaccagttactacttacgccgcaccacacttttttcatttgaatactaagctgtag

SEQ ID NO: 215025 - DNA, 3567 bp, synthetic construct
  misc_feature 1..3567: note = Description of Artificial Sequence: Synthetic coding sequence
  source 1..3567: mol_type = other DNA
atggaacctaactctctgcagtgggttggctccccatgcgggctgcacggcccatatatcttctataaggcatttcagttccacttggaaggtaaaccaaggattctgtccttaggtgacttcttctttgtccgctgtactcctaaggatccaatctgtattgctgaactccagctgctgtgggaagagcgcacatcacgacagctccttagttcaagtaaactctacttcctcccagaagacaccccacagggccgaaattcagaccacggagaggacgaagtgatcgctgttagtgaaaaggtcattgtgaaactcgaggatctggtgaagtgggtgcattcagacttcagcaagtggcggtgtggctttcacgccggaccagttaagaccgaggcattgggcaggaacggccaaaaggaggccttgctgaagtaccggcaaagcactctaaacagcggactgaatttcaaagatgtcctgaaggaaaaagcagatctgggagaagatgaagaagagaccaatgttattgtgctgtcttacccccaatactgtcgctatcgctctatgctcaagcgcattcaggacaagccaagttcaatcctgacggaccagtttgcgctcgccctgggaggcatcgctgtggtgtcgcgcaacccacaaatactctattgtagggatacattcgaccacccaaccctaatcgagaatgagagcatatgcgacgagttcgcccctaacctgaagggaagacccagaaaaaagaaaccctgcccccaaagacgggactctttttcaggcgttaaagattccaacaacaactccgacggaaaggctgtcgccaaggtgaagtgcgaagcccgaagcgcccttactaagcccaaaaacaatcataattgtaagaaggtgagtaacgaggagaaaccgaaggttgcgatcggcgaggaatgtagggctgacgagcaggctttcctggtggccctatacaaatacatgaaggaaaggaagacacccatcgaacgcataccctacctgggctttaaacaaatcaacctctggacaatgtttcaggcggctcagaagctcgggggatatgaaacaatcaccgcccgaaggcagtggaaacacatttacgacgagctgggcggaaaccctggatccacatccgctgctacttgcactcgaaggcattatgagaggcttattctgccctacgaaaggtttatcaaaggagaggaggataagcccctccctcccataaaaccacggaagcaggaaaacagcagtcaggagaatgagaataagaccaaagttagcggaaccaagaggattaagcatgaaattcccaagtctaagaaggagaaagagaatgcgccaaagccacaagacgccgcagaggtgagctctgagcaggagaaagaacaggagacccttatctcacagaagtcgattcccgagcccctgccagccgctgacatgaagaagaaaatcgagggctaccaagagttttcagccaaaccactggctagccgagtggaccctgaaaaagataatgagacggatcaaggttccaatagcgagaaggtggccgaggaagcgggtgaaaagggacctaccccgcctcttcccagcgctcccctcgcccctgagaaagacagtgccttggtgccaggtgcctccaagcagccccttacctccccatccgcactggtagacagcaagcaagaatccaagctttgttgcttcacagaaagtcctgagtccgagcctcaggaggcatccttcccaagctttcccaccacacaacccccactggcaaaccaaaacgagacggaggacgacaaactgccagctatggcggattacattgctaactgcactgtcaaggtcgaccaactgggatcagacgacatccacaacgcgttgaagcagacacctaaggtcctcgtggtgcagtccttcgatatgttcaaagacaaggatttgaccggaccgatgaatgagaaccatggcctgaattacactcctcttctgtattccaggggaaaccctggcattatgtcccccctggctaagaagaaattgctgtctcaggttagcggcgctagcctcagcagctcctacccttacggcagcccccctcccttgatttcaaaaaaaaagctgatcgcacgggatgatttatgctcatccctgtcccaaactcaccacggacaatcaacggatcatatggccgtttctcgcccttctgtgattcagcatgtgcagtctttccggtccaagccgagtgaggagagaaaaactatcaatgatatattcaagcatgaaaagctatcaagatcggatccccaccgctgctcatttagcaaacatcaccttaacccattggcagacagctacgtacttaaacaggaaatccaggaggggaaggacaaactgctggagaagcgggcactacctcacagtcatatgcccagcttcctggccgacttctacagtagtccgcatctacacagcctgtaccgtcacactgaacatcacctacacaatgaacagactagcaaatatccctctagggacatgtatcgggaatcagaaaactcctcttttccatcccatcggcatcaggagaagctacacgtcaactatctgacctccctacatctgcaggacaaaaagagtgccgcagccgaggccccaactgatgaccagcctacggatttgagcctccctaagaaccctcataagcctactggaaaagtcctgggactggcccacagcactaccgggccacaggagtctaaggggatttctcagttccaggtgttgggatcccagtccagggactgccatccgaaggcatgcagggtctccccgatgacgatgtctggccctaaaaaatacccagagagcctttctagaagtggcaagccccatcatgtccgattggagaattttcggaaaatggagggaatggtgcacccaattttacacagaaaaatgtctccccagaatatcggggctgcacgcccaattaagagatctctggaagacctggatcttgtgattgctggtaaaaaggcccgagccgtgagccccttagatcccagcaaggaagttagtggtaaggagaaagcaagcgagcaggagagcgaaggaagcaaggctgctcatgggggacacagtggcggaggatccgagggccataagctgccattgtcaagcccgatctttccaggtctgtactccggctccctgtgcaacagcggacttaatagccggctccccgctggttatagccactccctgcagtatctcaaaaaccagacggtactttccccactgatgcagcctttggcttttcactctttagtgatgcagagaggcatttttacgagccccacgaacagccagcaactgtataggcacctggccgctgccacgcccgtgggcagtagctatggggatctccttcataacagcatctaccctttggcggctatcaaccctcaagctgccttcccatcgtcccaactgtctagcgtgcatcctagcacgaagctgtag

SEQ ID NO: 215026 - DNA, 2838 bp, synthetic construct
  misc_feature 1..2838: note = Description of Artificial Sequence: Synthetic coding sequence
  source 1..2838: mol_type = other DNA
atggcccctaacctcaaaggccgtcctagaaaaaagaagccttgtccccagagacgggattctttctcgggggttaaggacagcaacaataactctgatggcaaggcggtggccaaggtcaagtgcgaggcacgttccgccctgacaaagccaaagaacaaccacaattgcaagaaggttagcaacgaagagaagcctaaagtagcgataggtgaggagtgcagggccgacgagcaggcgttcctggtcgccctgtataaatacatgaaggagagaaagacccccattgaacgcattccttacttaggcttcaagcagattaatctatggacaatgttccaggccgcacagaagctgggaggatatgagaccatcacagcacggagacaatggaaacatatctatgacgaactgggcggtaaccccggatctacatccgccgctacttgtactcggcgtcactacgagcggctgatcctgccatacgagagattcattaagggcgaggaagataagccgttgcctcccattaaaccaaggaagcaggaaaattcgagtcaggaaaatgaaaataagacaaaggtatccggaacaaagcgaataaagcatgagatccccaaatctaagaaggagaaggaaaatgcgccaaagccccaggatgctgccgaggtgtcgagcgagcaggagaaagagcaggaaacacttatttcccagaagtccatcccagaacctctgcccgcagctgacatgaagaaaaaaattgaaggctatcaggagttttcagccaagcccctggcgtctagagtggaccctgagaaagacaatgaaaccgatcaaggcagtaactctgagaaagtcgcagaagaggctggagaaaagggcccaaccccacccctaccgtctgctcccctggcccctgaaaaggactcagctctcgtgcctggagctagcaagcagccactgacctctccttctgcacttgtggacagcaagcaagaaagcaaattgtgttgcttcaccgaatcaccagagtcagagcctcaggaagcctcattcccttcttttccaacaactcagccccctctcgcaaaccagaacgagaccgaggacgacaagctcccggcaatggccgactacattgccaactgcacggtgaaggtggatcaactgggatcagacgacatccacaatgcacttaagcagactcccaaggtgcttgtggtgcaaagtttcgatatgtttaaggacaaggatctgaccggcccaatgaatgagaaccacggcctgaattacaccccactcttgtacagtcgtggaaacccaggcattatgagccctctcgcaaagaaaaagcttttgagccaggtgtccggagccagcctgtcaagcagttatccgtatggatccccccctccattgatttccaagaagaaattaattgcacgtgatgatctgtgctcaagcttgtcacagacacaccacggtcagagcaccgatcacatggccgtgtcccgcccttccgttatccaacatgtgcagtctttccggagcaaaccaagtgaggaacgcaaaactataaatgacatatttaagcatgagaaactgagccgcagtgacccacatagatgctccttctccaaacatcacttgaatcctcttgctgatagttacgtgctgaaacaagaaatccaggaggggaaggacaaactcctcgaaaaacgggcacttccacactcccacatgccaagctttctagcagatttctacagctcaccgcacctacacagtctatataggcacacagagcatcacctgcataatgagcaaacatctaaatatcctagtcgggatatgtacagggaatccgagaactcgtcctttcccagtcaccgccaccaagaaaagctgcatgtgaactaccttaccagcctgcacctgcaggacaaaaagagtgctgccgctgaggcaccaacagacgaccagccgacagatttgagcctgcctaaaaacccccataaaccaactggtaaagtgttggggctcgcacactctaccacgggaccacaggaatcaaagggtatttctcagttccaggttctgggaagtcagtctcgtgattgccacccaaaagcctgccgtgtgtcccccatgaccatgtcaggccctaaaaagtatcctgagagcctgtcgaggtcaggcaaacctcaccatgtgagattggagaacttccggaaaatggaggggatggtgcacccgatcttgcatcggaagatgtctcctcagaacattggggcagcccgtcccatcaaacggtctctggaagacctggacctggtaattgccggaaagaaagcaagggctgtgtcccccctggacccttctaaagaagtatctggaaaagagaaggcctcagaacaggaaagcgaaggctcgaaggccgctcacggcggacactcggggggaggaagtgagggccacaagttgcctctcagctcacctatttttcccggactttacagtggcagcctgtgtaactccggactgaatagccgactgcccgcagggtactcacacagcctgcagtatctaaagaaccagactgtgctctccccactaatgcaacctctcgctttccattccttggtcatgcaacgcggtatatttactagtccaacaaacagtcagcagctgtaccggcatcttgccgctgctactcctgtaggctcaagctatggcgatctcttgcacaactctatctatcccctggccgcaataaaccctcaggcagcatttccttcatcccagttgtcatctgtccacccaagcactaaactgtag

SEQ ID NO: 215027 - DNA, 1134 bp, synthetic construct
  misc_feature 1..1134: note = Description of Artificial Sequence: Synthetic coding sequence
  source 1..1134: mol_type = other DNA
atgggcaccactgaggcgacgttaagaatggaaaatgtggacgtcaaagaggagtggcaggatgaagacctccctagaccactcccggaagagaccggcgtcgagttgctcggctctcctgtggaagacacgtcgagcccccctaacacgctgaacttcaatggggctcatcgaaagaggaagactctcgtggcacctgaaatcaatatctcactcgatcagagcgagggcagcttgctgagtgacgactttcttgacacaccggatgacttggacataaatgtggacgacatcgagacacctgatgagactgactctctggaatttctcgggaacggcaatgagttagaatgggaggatgacacgcccgttgccaccgccaaaaacatgcccggagacagcgccgatctctttggcgacggcactaccgaggacgggtcagcggcaaatggcaggctttggcgaaccgtgatcataggcgagcaggaacatcgtattgatcttcacatgattcggccttacatgaaagtcgtgacacacggagggtactacggggagggcttaaacgcgattatagtatttgccgcttgtttcctgcctgattctagcctcccggactaccattacatcatggagaacctctttctctacgttatttctagtctggaactgctggtagctgaggactatatgattgtctatttgaacggcgcaaccccacgtcgacggatgcccggaataggatggcttaagaagtgctaccagatgatcgatcgcaggctaaggaaaaatctgaaatcgctcattatcgtacacccaagttggtttattcgcacggtgcttgctatatctagaccattcatttcggtcaaattcattaacaagatacagtacgtgcatagtctggaagatctggaacagctgatccccatggagcacgtccagattccagattgtgtgctccaatacgaagaagagaggctcaaagccagacgagaaagtgccaggccacagccagagttcgtgctgccacggagcgaagagaaacctgaagtggcgccagtcgaaaaccgcagcgccctcgtatctgaagatcaagaaacctctctgcagcccctgcacagaagcagctag

SEQ ID NO: 215028 - DNA, 1116 bp, synthetic construct
  misc_feature 1..1116: note = Description of Artificial Sequence: Synthetic coding sequence
  source 1..1116: mol_type = other DNA
atgggtaccactgaggcaacactccgaatggagaatgtggacgtcaaagaggagtggcaggatgaggacctacctagacccttaccagaagagacgggggtagagcttctgggtagccccgtagaagataccagctcccctcctaataccttaaatttcaacggggcacacaggaaacggaagactttagtagcccctgagattaatatcagcctggaccagtctgaaggcagtcttcttagcgatgactttctggacacacctgatgatctggacatcaacgtggacgacatagagactcctgatgaaaccgattcactggaattcttgggcaatggcaatgagctggagtgggaggacgatactccagtggcaacagccaaaaatatgccaggtgattccgccgatctctttggcgatggtacgaccgaggacgggagtgcggctaacggtcgactctggcggacagtaataattggagagcaggaacatcgaatcgatctacatatgatccgcccatacatgaaagttgtgacccacggagggtattatggggagggcctcaacgccatcatagtattcgccgcatgcttccttccggacagctccttgcccgactaccattacatcatggagaacttatttctgtacgtgataagctccctggagctgctggttgcagaggattacatgattgtgtatctcaacggtgcaacgcctagaagacggatgcccggaatagggtggctgaaaaaatgctatcaaatgatagatcggcgtttgcgtaagaacttaaagtccctcatcatcgtacacccctcctggttcattaggactgttcttgctattagcaggccgtttatatcggtgaaattcatcaataaaatccaatacgtccactctctggaggacctggaacagttgattcccatggaacacgttcaaattcccgactgcgtcctacaatacgaggaggagcggctcaaggcacggagagagtccgccagacctcagccagagttcgttctaccacgcagcgaggaaaagcccgaggttgctcctgtggaaaaccggtcggcacttgtcagcgaggatcaagagactcgcatgtcttag

SEQ ID NO: 215029 - DNA, 1134 bp, synthetic construct
  misc_feature 1..1134: note = Description of Artificial Sequence: Synthetic coding sequence
  source 1..1134: mol_type = other DNA
atggctgggcgacgctcaagtcaacccggaattgccctgcacaatccaggaaaccatcaggtgcaaaacccccaaggcagactcgaaactgtcagaccactccccgaggagacaggggtggaattactgggaagtccagtcgaggacactagctctcccccaaacactttgaacttcaatggtgcccatcggaagcggaaaacactagtggcccctgaaattaatatctcgctggatcaatcagaaggcagtctgttaagcgacgactttctggacacccctgatgacttagatatcaatgttgacgatatcgagactcctgatgagacagatagtttggagtttcttggtaacggcaatgaattagagtgggaggatgatacacccgtggccacggcgaaaaatatgcctggcgatagtgctgacttatttggtgatgggaccacggaagacggttctgcagcgaacggcaggctctggcggacggtcattatcggcgagcaggagcacagaatagacctgcacatgatcaggccctacatgaaagtggtgacgcacggaggctattatggggagggacttaacgccattatagtgtttgccgcttgcttccttccagactcctccctccccgattaccactacatcatggagaatctctttctctatgtgatctcttccctagaactcctcgtggctgaagactatatgattgtttatttgaacggggcaactcctagaagacgcatgccgggaattggatggctgaaaaagtgctatcagatgatagatcggaggctgcgaaagaatttgaaaagcctcatcattgtgcatccatcttggttcatccggacagtcctcgctatctcacgcccatttatttctgtaaagttcatcaacaagatacaatacgtccactcattagaagacttggagcaacttattcccatggaacacgtgcagatacccgactgtgtcctacagtatgaggaagaaaggctgaaagcaagacgggagagcgccagacctcagccagagtttgtgctaccgcgaagtgaagagaagcccgaagttgctcctgttgagaaccgtagtgctttggtttctgaagatcaagagacctctatgagctag

SEQ ID NO: 215030 - DNA, 1116 bp, synthetic construct
  misc_feature 1..1116: note = Description of Artificial Sequence: Synthetic coding sequence
  source 1..1116: mol_type = other DNA
atgggcacaacagaagccacactgcggatggagaatgttgatgtgaaggaggagtggcaagatgaggacttgccacgacccctgccagaagagaccggggtggagttgctcggcagtcctgtcgaggacactagcagtcccccaaacacattaaactttaacggagcgcatcgcaagaggaagaccctcgttgcccctgagataaatatcagcctggatcagagtgaaggcagcctactgtccgatgatttcctagatactcctgacgacctggatatcaacgtggatgacatcgagaccccggatgagacagactccctcgaattcctcggaaacggaaatgagcttgaatgggaggacgatacccccgtagcaacggcaaagaacatgccaggggactcagcggacttattcggcgatgggactaccgaggacggctccgcggctaacggtaggctgtggcggacggttatcatcggagagcaggagcacagaattgatctgcatatgatacgtccatacatgaaagtggtgacgcacggtggttactatggcgagggcctgaacgcaatcatagtctttgccgcatgttttctgcctgatagcagtctgccggactaccattacatcatggagaacctgtttctgtacgtcatctcatctcttgagctactggtggcagaagactatatgattgtgtacctgaatggcgctacacctcgccgaaggatgccgggaatcggctggttgaagaagtgttatcagatgatcgacagaaggctgcgcaaaaacctcaagtccttgatcatagtccacccatcatggttcattaggacagtgctcgcaatcagcaggcccttcatttccgtcaagttcatcaacaagatccaatatgtgcactcgctggaagacctcgagcagttaatccccatggaacatgtccaaattcccgactgtgtgctgcaatacgaagaggagcggctcaaggcccgtagggagtcagccaggccccagcccgagttcgttcttcccaggtctgaagagaagcctgaggttgcgccagtcgaaaacagatctgctctggtctctgaagatcaggaaacaagcatgtcctag

SEQ ID NO: 215031 - DNA, 1050 bp, synthetic construct
  misc_feature 1..1050: note = Description of Artificial Sequence: Synthetic coding sequence
  source 1..1050: mol_type = other DNA
atgggcactactgaggctaccctcagaatggaaaatgtggatgtgaaagaagaatggcaagatgaggatccgcctccaaataccctcaattttaatggagcccaccgcaaacgaaagaccttggttgctcccgagatcaatatctcgctggatcagtcagaaggctcattgctttcagatgactttttggacacacccgatgatctggatatcaatgttgacgatatcgaaacaccagacgagaccgatagtttggaattcctgggcaatggaaatgagcttgagtgggaggacgacacgcccgtggcaactgctaaaaatatgcctggagattctgcagacctgttcggggatggcaccacagaggacggctctgctgccaacggcaggctgtggagaacggtgataatcggtgagcaggaacataggatcgatttgcacatgataaggccttatatgaaggtggtcacacatgggggttattacggagaggggctgaacgccattattgtcttcgctgcatgttttcttcctgactcttccttgccagattatcactacatcatggagaatctgttcctatacgtgatctcttctctcgagctcctcgtcgctgaggattacatgattgtgtatcttaatggggctactccccgacggagaatgccaggtatcgggtggttaaagaaatgctaccagatgatcgacaggagactgcgtaaaaaccttaaaagcctgataatagtgcacccttcctggtttatacgcaccgtcctggcaatctctcggcctttcatctcagtcaaattcattaataagatacagtacgtgcactctctggaggatctcgagcaactgatcccgatggaacatgtgcaaatacccgattgcgtattacagtatgaagaggagcgtttgaaagctaggcgcgagagcgcacggccacaacccgagtttgtgctgccccgtagcgaagaaaaacctgaggtcgcaccggtcgaaaacagaagcgccctggtaagtgaggaccaggaaaccaggatgagctag

SEQ ID NO: 215032 - DNA, 2448 bp, synthetic construct
  misc_feature 1..2448: note = Description of Artificial Sequence: Synthetic coding sequence
  source 1..2448: mol_type = other DNA
atgaagtcgaaccaggagcgttctaacgagtgcctgcccccaaagaagcgcgaaatccctgccaccagccgttcatcagaagaaaaagccccaacgctgccaagcgataaccatcgcgtagaaggcactgcctggctaccgggaaatcctggcggtagggggcacggcggagggagacatggtcccgcagggacctccgtggagctgggactccagcagggcatagggttgcataaagccctctctacaggactggattattcgccacctagcgcgccacgtagtgtacccgtggccactaccctgcctgctgcatacgccaccccgcagcccggaacaccggtgagccctgtgcagtacgcacaccttccacacacctttcaatttattggctcatcgcaatattcgggaacttacgcctcattcatcccttcccagttgatacccccaaccgcgaatcctgtgactagcgcagtggctagtgcagccggagccacaactccctctcagagatctcagcttgaggcctactctaccctccttgccaacatgggatcgctgtcacagacccccggacataaagccgagcagcagcagcaacagcaacagcaacaacagcagcagcatcagcatcagcagcaacaacagcagcagcagcaacagcagcagcagcagcatctgtcccgggcaccgggactgattacgcccggaagccctcctcccgcacaacagaatcagtatgtgcacataagctctagccctcaaaacacaggcaggacagccagcccgccagctattccagtgcacctgcatccccaccaaacgatgattcctcatacactcacccttggtccccctagccaggtcgttatgcaatatgccgatagcggttctcactttgttccgagagaggcaaccaaaaaagctgagagttctagattgcagcaggcaattcaggctaaggaagttctcaatggggaaatggaaaaaagcaggcgatatggagccccttcgtcagccgacctcggactggggaaagctggcggtaaatccgtacctcatccatatgagtccagacacgtcgtggtccacccatcaccaagcgactacagcagtagagaccctagcggagtgagggctagtgtgatggtgctccccaattcgaacacccccgcagcggatcttgaggtacaacaggccacccacagagaagcaagcccctcgaccctgaatgacaaaagtggactccatctgggtaaacccggacatcgaagctacgccttgagccctcacactgtgatccagaccacccactccgcaagcgagcctctgccagttgggttgcccgctaccgctttctatgccggaacacagccaccagtgatcggctatctcagtggacagcagcaggccatcacctacgccggttctcttccgcaacacctcgtgattcctggaacccagcctctgctcatccctgttggaagcacagacatggaagcctctggagcagctccagcaatcgtcaccagttctccacagtttgctgcagtgccacacacctttgtcactactgccctgccaaaatccgagaacttcaacccagaggctttggttacgcaagccgcttatcctgctatggtccaggcgcagattcacctgcctgtcgttcagagtgtggcctctcccgcagcggctcctcctaccctgccaccctactttatgaagggatccattatccagctggccaatggagagctcaaaaaagttgaagacctgaagaccgaggattttatccagtctgcagagattagcaacgacctaaagattgattcgagcactgtcgagaggatcgaggattctcacagcccaggggtggcggtgatccaattcgccgtaggcgaacatcgggctcaggtcagcgtcgaagttctcgtggaatatccgttcttcgtattcggacaagggtggtccagttgctgccccgagcgaacttcccagctgtttgatctgccttgctccaaactgagcgtgggtgacgtgtgcattagtttaaccttaaaaaatttgaagaatggctctgtgaaaaagggtcagcccgtagacccagcttcagtcttgctgaagcactcaaaagctgacggcctggccggttcccgtcatcggtatgctgaacaggagaacgggatcaatcagggcagcgctcagatgctgtctgaaaatggggaacttaaatttcctgaaaagatgggactgcccgcagctcccttcctgacgaagatcgaaccaagcaagcccgctgcgacgcgcaaaagaagatggtcggccccagagtctcggaaattagagaagtctgaggatgaaccacctctcacactcccgaagccctcacttatccctcaggaggttaagatttgcattgaaggcagatccaatgtaggaaaatag

SEQ ID NO: 215033 - DNA, 2448 bp, synthetic construct
  misc_feature 1..2448: note = Description of Artificial Sequence: Synthetic coding sequence
  source 1..2448: mol_type = other DNA
atgaagtcaaatcaagagcgaagtaatgagtgcctgcctccaaaaaagcgagagatcccagccacctctcgaagttccgaggagaaggccccaacacttccatctgataaccatagggtggaaggcaccgcctggctcccgggaaaccctggtggacggggtcatggcggtggtcgccacggaccagccggaacgtccgtggagctggggctgcagcagggcattggcttgcacaaagcacttagtactggattggactattccccacccagcgctcccagaagcgtgccggttgccactacactgcctgctgcgtacgctacaccgcagcccggaacaccggtctcacccgtgcagtatgcgcatctcccccacacatttcagtttatcggaagcagccaatatagtggaacgtatgcttcattcattccatctcagctaatccccccaaccgccaaccccgttacatccgctgtggcgtccgctgcgggagccaccaccccatctcagcgcagccaactcgaggcctactccactctcttggctaacatgggaagcctgagtcagaccccgggtcacaaagcagagcagcagcagcagcagcagcagcagcaacaacagcagcaccagcatcaacagcaacaacagcaacagcagcagcagcagcagcagcaacacctctcccgtgccccaggtttaatcacacccggatccccccctcctgcgcagcagaaccagtacgtgcatatctccagttctccacagaacacaggaagaacagcatcaccacccgctattcctgtgcatctgcacccacaccaaaccatgattccacacacactcacactcggacccccatcacaggtcgtcatgcagtatgccgattcaggatcacacttcgtgcccagggaagcaactaaaaaagcagaatcttcccggctgcaacaagctatccaggcaaaagaggtgctgaacggagaaatggagaaatcccgcagatatggcgcacccagctctgcggacctgggcctgggcaaggcgggtggaaagagtgttccccacccttacgagagcaggcacgtggtcgtgcacccttctccgagtgattattctagcagagacccgagcggcgtcagagcgagcgtgatggtgctgcccaactcaaacacccccgctgccgatctggaagtacagcaagccacacacagagaagccagcccatccacacttaacgataaatccgggctgcacttaggaaagcctggccatagatcgtatgccctgagtcctcacactgtcattcagacaacgcattcagcctccgaaccgcttccagtgggattaccggcaaccgctttctatgcaggaactcagccccctgtgatcgggtatctgagtgggcagcaacaagcaattacctacgccggtagcctcccacagcatttagttatcccaggaactcagccactgctgattcccgtgggctccaccgacatggaggcctccggggctgctcccgctattgtgacatcaagtcctcagttcgccgcagtcccccacacttttgtcactactgctctgccaaaatcagagaactttaaccccgaggctcttgtgactcaggcggcttatccagctatggtgcaggctcagattcatcttcctgtggtgcagtctgtcgcttctccggctgcagccccaccaactctgcctccttattttatgaagggatccattatccaattagccaacggagaattaaaaaaagtcgaagacctgaagacagaggattttattcagtccgccgagatatcaaatgacctgaaaattgatagctcaacagtcgaacggattgaggattctcacagccccggtgtggcagtaattcaatttgctgtgggcgagcatcgggcacaggtcagcgtagaagtgttagttgagtatccattcttcgtattcggacaagggtggtcttcatgttgccccgagcggacgtctcagctattcgacttgccctgttccaagctcagtgtgggggacgtgtgcatttcacttacactaaaaaacctgaaaaacggctcagtcaagaagggccagcctgtggaccccgcttctgtattgctcaagcactcgaaggccgatggactcgccggaagtcgccacaggtacgcagaacaggaaaacggtataaatcaagggagcgctcagatgctgagcgagaacggagaattgaagtttccagaaaaaatgggcttacccgcagctccctttctgaccaagattgaacctagcaaacctgccgctactcgaaagcgccgatggtctgccccagaaagcagaaagctggagaaatcagaagatgagccccctctgactctgcccaaaccttctctaatacctcaggaagtgaagatatgtatcgagggacgcagcaacgtcggcaagtag

SEQ ID NO: 215034 - DNA, 2448 bp, synthetic construct
  misc_feature 1..2448: note = Description of Artificial Sequence: Synthetic coding sequence
  source 1..2448: mol_type = other DNA
atgaaatctaaccaggagagatctaatgagtgcttgcctcctaagaagcgagagatccctgccacttccaggtcaagtgaagaaaaggcccctacgctccctagtgacaaccatcgggtcgaaggcacagcttggttaccaggcaacccaggaggcaggggccatggcggaggacgacatggcccagccggtacctccgtcgaactgggtctccaacaaggcataggacttcacaaggccctgagcacagggcttgactattctcctccttcagcgcctcgcagcgtgcccgtagctactacactccccgcagcctatgccacacctcaacctggaacaccagtcagtcccgtgcagtacgcccacctgccccacacttttcagtttatcggctcttcgcaatacagcgggacatatgcctcttttataccctcacagctgatccctccaaccgccaacccagtaacatccgccgtggcctcagctgccggagcaactacaccaagccagaggagccagctggaagcatattccacccttctcgcaaacatgggttctctctcccagacccccggacataaagccgagcagcagcagcaacagcagcagcagcagcagcagcaacatcaacaccaacagcagcagcaacagcagcagcaacagcagcaacagcaacacctgagtagagctcctggattgatcacgcctgggagcccccctccggcacaacaaaatcaatacgttcatatctcatcttcacctcagaacacgggacgaacagctagtcccccagccatcccagtgcatctccacccgcaccaaacaatgattccacataccctgaccctgggcccaccgagccaggtggttatgcagtacgctgattcagggtcgcattttgtgcctcgggaggcgacaaagaaagccgaaagctctcggctgcagcaagcaattcaggcaaaagaggtattgaacggagagatggagaagtctagaagatatggggctcctagctctgctgacttagggctgggcaaagcaggaggaaagtccgtacctcatccctacgaaagtagacatgtcgtcgttcatccctccccatcggactattcatccagggacccctctggagtaagagcaagcgtcatggtattgcccaacagcaacacaccagccgctgacctggaggtgcagcaagctacacacagagaggcctctccatctacactcaacgataagtcgggtcttcatcttggcaagcccggacaccggagttatgccctgtcaccccatacggtaattcagacgacccattcagcgagtgagccactgcctgtcggcctcccggcaacagccttctatgctgggacccaacctccagtgatcggatacctgagcggtcaacagcaggcaattacttacgccggttccttgccacaacatcttgtgattcctggtactcagcctttgttgatcccggtcggcagtactgacatggaggcgagcggggctgctccggctattgtgacatcctcccctcagttcgccgctgtcccacatacattcgtgactactgccctccccaaaagcgaaaactttaaccccgaggccctggtcacccaagccgcataccctgctatggttcaagctcagatacatctaccggtagtccagtccgtggcttcccctgccgctgctccacctacattgccaccgtacttcatgaagggcagcatcatccaactggcgaatggcgagttgaaaaaggtggaggacctgaaaacggaggacttcatacaaagtgcagagatctcaaacgatcttaaaatcgattcgtcaacggtcgaacggattgaagactcacactctcctggagtggccgttatccagttcgccgttggcgaacacagagcgcaagtgtctgtggaggttctcgtggagtaccctttttttgtatttggccaggggtggagctcttgctgcccagagcgaacctctcagctctttgatcttccctgtagtaaattgagcgtaggtgacgtctgtatctccctgacactcaagaaccttaagaacgggagtgtcaagaagggacaacctgtggaccccgcttcagtgctcctcaagcactcgaaggccgatgggttggctgggagcaggcacagatacgcagagcaggaaaacgggatcaatcaaggctccgcacaaatgctgtctgaaaacggtgagttgaaattccctgagaaaatgggactgcccgcagccccatttctgacaaagatcgagcccagcaaaccagcagccactcgcaagcgacgctggtccgccccagaatcaaggaaactcgagaagagcgaagatgagcctcctttgactctgcccaaaccctcacttatcccacaggaggtgaaaatctgcattgagggcagaagcaacgtgggcaaatag

SEQ ID NO: 215035 - DNA, 1428 bp, synthetic construct
  misc_feature 1..1428: note = Description of Artificial Sequence: Synthetic coding sequence
  source 1..1428: mol_type = other DNA
atggccgcaccgagacctcctcctgctaggctctccggagttatggtgcctgcaccaattcaggacctcgaggccttacgtgcccttacagctttgtttaaagaacaaagaaatcgggagaccgcccctagaaccatctttcagcgagttctggacatcctgaaaaagtccagccacgccgtcgagctggcttgtcgcgatccgtcccaggtggaaaacttggcatctagtctccagctgataacagagtgcttccgatgcctgagaaacgcttgcattgaatgcagtgttaatcaaaactccattcgcaacttagacaccattggcgtggctgtggatctgatactcctatttcgggagcttagagtggaacaggagagtcttctgacagcctttagatgtgggctgcaattcctcggcaacatcgcatcgagaaatgaagacagccagtctatcgtgtgggtccacgcatttcccgaactgttcttatcctgcctgaaccacccagataaaaaaatcgttgcctatagctctatgattctgtttacaagcctcaaccatgaacgcatgaaagagctggaggaaaatctcaacattgcaatcgacgtaatcgacgcctaccaaaaacaccccgaatcagagtggccgtttctgatcatcactgatttatttctgaagtcacctgagctcgtgcaagctatgttccctaaactgaataatcaggagcgggttacactgttggacctaatgatcgccaagatcacctcagacgaacctcttactaaagatgacatcccggtattcctccgacatgcggaactcattgcgtcaacgttcgtggaccagtgtaagaccgtattgaaattggcatccgaagaacctcccgatgacgaggaggctctcgctacgatacggttgctagacgttctgtgtgaaatgacagtgaatactgagctgttgggctacctccaggtgttccctggcctcctggagcgcgtcattgacctccttcgcgtgatacacgtggccggtaaagaaacaacaaacattttttcaaactgtggctgcgtgcgtgccgagggggatatttctaacgtggctaacggcttcaagtcccacctcataaggctgataggcaatctgtgctacaaaaacaaagacaatcaggacaaggtgaatgaactggatgggattccattaatactggacaattgcaatataagcgactctaacccttttctcacccagtgggtgatctatgcaatccgaaacctcaccgaggacaattcgcaaaatcaagatcttattgccaaaatggaggagcagggcctagctgatgcctcgctgctaaaaaaggtcgggtttgaagtggaaaagaagggcgaaaagctgattctgaagtccacacgggacacaccaaaaccttag

SEQ ID NO: 215036 - DNA, 1236 bp, synthetic construct
  misc_feature 1..1236: note = Description of Artificial Sequence: Synthetic coding sequence
  source 1..1236: mol_type = other DNA
atggccgctccccgacctcccccagccaggctttctggggttatggtgcccgcacctatccaggatctggaggccctccgggcacttacagccctcttcaaggagcagcgcaacagaaatctggatacaatcggggtggcggtagacctcattctgctttttcgggagctgcgagtggagcaggagagccttttgaccgcattcaggtgtggcctgcaatttctcggaaacatcgcctctcgaaacgaagactcccagagtattgtttgggtgcacgcttttcccgagctcttcctgtcatgtttaaatcaccctgataaaaaaatagtggcctatagtagcatgatcctgtttacttctcttaaccatgagaggatgaaagagttggaggagaatttaaatattgccatcgacgtaatcgacgcataccagaaacatccagaaagtgagtggccgttccttattatcactgacctgttcctcaagtcacctgagctggtccaggccatgttccctaagcttaacaatcaagaaagagtgacattacttgatttaatgattgcaaagatcacatccgacgagccgctgaccaaggatgacataccggtgttcttgcgtcacgcagagctgattgcatcaacttttgtcgatcagtgtaaaacagttctgaagcttgcatctgaggaaccacccgacgacgaagaggccttggccaccatccgactcctagatgtgctgtgcgagatgacagtcaataccgaattattaggctatctacaggtatttcccggattgctggaaagggtgattgacttgttgagggtgattcacgtggcaggcaaagagaccacaaatatcttcagtaattgcggttgtgtgcgggctgagggcgatatttctaacgtcgccaacgggttcaagtcacatctgataaggttgataggcaacctgtgctacaaaaacaaagacaatcaagataaagtgaatgagcttgatgggatcccattaatcctggataattgcaacatatccgactctaatccctttcttacgcagtgggtaatttacgctatccgcaatttgactgaagataattcccagaaccaggatcttattgctaagatggaagaacagggcctcgccgacgcctctctactgaagaaagtgggtttcgaggtggagaagaagggggaaaaactgatcctgaagagtacacgggacactcccaagccatag

SEQ ID NO: 215037 - DNA, 1362 bp, synthetic construct
  misc_feature 1..1362: note = Description of Artificial Sequence: Synthetic coding sequence
  source 1..1362: mol_type = other DNA
atggcggctccgaggccccctcccgctcgtctgagtggggtgatggtgccagcaccaatccaagatttagaagccctacgggctctgaccgcactgtttaaggagcagcgcaatcgcgagacagcccctaggaccatcttccagcgggtattagacatccttaagaagagttcgcatgctgttgagcttgcctgtagagatccatcgcaggtggagaaccttgcgtcatcgctgcagctcatcactgagtgctttcgttgtttgagaaatgcttgcatcgagtgcagcgtaaatcaaaattctattagaaacctggacaccatcggggtggccgtggatctgatcctcctcttccgggagttgagagtagagcaggaaagtctgctcactgcttttagatgtggcttgcaatttctgggcaacattgcgagtaggaatgaggattcccaatcaatagtgtgggtgcatgcatttcccgagctgttcctaagttgccttaaccatcccgataagaagatcgtggcatacagctctatgatcctgttcacctcactgaatcacgaacgtatgaaagaactggaagaaaacctgaatatcgccattgacgtgattgacgcttaccagaaacatccagagagcgaatggccattccttattataacagacctcttccttaagtcaccagagttggttcaggcgatgtttccaaagttgaataatcaggagcgggtgaccctgttggacctcatgatcgccaagattacgtcagatgagcctttaacaaaggacgacataccagtcttcttgcggcacgcagaattaatcgcttccacgttcgtagatcaatgtaagactgtacttaagctcgcatccgaggagcctccggtgatgtatccctatatgcgaatcgtgggaaaattccgactgcttgatgtcctttgcgagatgaccgtgaacactgagctcttgggctatctacaggttttcccgggtctcctggagcgggtgatcgatctcttgagggtcatacatgtcgctggcaaggaaacgaccaatattttcagtaattgcggatgtgtgcgggctgaaggagatatttccaacgtggcaaatgggttcaagtcccacctgattagactcattgggaacttatgctacaagaataaggataatcaggacaaggttaacgagctcgatggaataccacttattctggataactgtaacattagtgattccaatccgtgtagcgatccagtgggcgatatctgtcaccctaaaccttatagacggcaacaaccaaaacctcggttcgactgtaaggatgggggaactggggcaggacgatgcattcccacctag

SEQ ID NO: 215038 - DNA, 2070 bp, synthetic construct
  misc_feature 1..2070: note = Description of Artificial Sequence: Synthetic coding sequence
  source 1..2070: mol_type = other DNA
atgaaaccggtacacgagcggagccaggaatgccttccgcctaagaagagggatttgcctgtaacctccgaggacatgggacgcacaactagctgtagcaccaaccatacaccgagctctgatgcgtctgagtggtctagaggggtggtggtcgcaggacaaagccaggctggagccagagttagtctcggaggagatggcgcagaagccataactggtctgaccgtcgaccagtatgggatgctatataaggtcgccgtacccccagcaacatttagtcctaccggcctgccatccgtggtaaatatgagcccccttccgccaacattcaatgtggcatcatcattgatccaacaccctggaatccactaccctcccttacactacgcccaactcccctcgaccagcttgcagttcataggctcgccctacagccttccctacgcagttcctccaaactttctgcccagccccctgctcagcccctccgccaatctggctacttctcacctgccccactttgtgccgtatgccagtctgttagcagaaggagccacaccacccccacaggcccctagtcccgctcactctttcaacaaagccccaagtgctaccagccctagtggacagctgccccaccatagcagtactcaacccctcgatctggctcccggtcgtatgcccatatactatcagatgtctcgactcccagccggatacacattgcacgagacaccccctgccggagccagtccggtgctgacaccacaggagtcccagtccgcgctggaggctgccgcagccaatgggggacagcggcctagggaacgcaatctggtgcggcgagagagcgaggctctcgattcacccaactccaagggagaggggcaggggctggtgcctgtggtcgagtgcgtggtggacggtcaactatttagtggaagccagacccccagggtggaggtggctgctcccgctcatcggggaacgccagacactgatctcgaggtccagagagttgtgggagccttagcatcacaagactaccgggtggtagcagcccagcggaaagaagagcctagcccccttaatctttctcatcatacacccgatcatcaaggcgagggacggggatctgcaagaaaccccgctgagctggcagaaaagtctcaggcccgaggattctaccctcagtcccatcaggaacccgtaaaacacagacccctgccaaaagccatggtagtggcgaacggtaacttagtgcccaccggtacagacagcgggctccttcctgtgggctccgaaatcttggtagcctcatcgttagatgtccaggcacgggcaacattcccagacaaggaaccgacacctccacccattactagttcacacctcccttctcacttcatgaagggcgcaattatccagctcgccacaggcgaactgaaacgagtagaagatctccagacccaggacttcgtgcgttccgctgaggtctcaggcggactcaagattgacagttccaccgtggtcgacattcaagagtcgcaatggcctggatttgtcatgctgcacttcgtggtaggggagcaacagagcaaagtctctattgaggtgccccctgagcacccgtttttcgtgtatggccagggttggagctcctgtagtcccggtcgcacaactcaactattcagcctcccctgccatagactccaggtcggcgacgtctgcatctcaatctccttgcagtccctgaactccaactctgttagtcaggcgtcttgcgcacctccaagccagctgggcccaccccgtgaacggccagagagaactgtcctgggatccagggaactatgcgactctgaaggcaaaagccaacccgcaggagaaggatcccgcgtcgtcgagccatcacagcccgagtccggtgctcaggcctgttggccagcccctagttttcagaggtactctatgcagggcgaggaggccagagccgctctgctgcggccatctttcatccctcaggaagtcaagctgtccattgaagggaggtctaacgccggtaagtag

SEQ ID NO: 215039 - DNA, 3942 bp, synthetic construct
  misc_feature 1..3942: note = Description of Artificial Sequence: Synthetic coding sequence
  source 1..3942: mol_type = other DNA
atgcggtcggccgctgccgcaccacggtcccctgcagttgccaccgaatcaagacgatttgccgcagcccgttggcccggatggcggagtctccaaagaccggctcgccgatctgggaggggagggggtggcgctgcccctggcccatacccctcagccgctcctccgcctcccggtccgggtcctcctccgtctcggcaatcgagtccaccctctgccagcgactgttttggctctaatggaaacggagggggtgccttcaggccaggaagtagaagactcctgggcctcggtggtccacctagaccattcgtggtactcttattaccactggctagcccaggcgcaccgcctgccgctcccacccgggcatctccgttgggtgcccgagcttctcctcccaggagcggggtgtccctcgcgcgtcccgctccaggctgcccacggcctgcctgcgaacctgtttatgggccactcaccatgagcctaaaaccacagcagcagcagcaacagcaacaacagcaacagcaacagcagcagcagcagcagcagcagcagcagcagcccccaccagctgccgcaaacgtacgcaaacccggaggctctggcctactggcttcccctgcagctgcaccttctccaagctcctcctctgttagctcatcgtccgcaaccgcaccttcctctgtggtagctgctacctccggcggaggtagaccgggacttggaagaggcagaaattctaacaaagggctacctcagagcaccatcagcttcgatggcatctacgctaatatgcgcatggtccatatcttaacctctgtggtgggaagtaaatgcgaggtccaggtgaaaaacggcggaatctacgaaggagtgttcaaaacttattctccaaagtgcgatctggtcttggacgctgcccatgaaaaatcaaccgagtcaagtagtggccctaaaagggaggaaataatggaatcaattctattcaaatgctccgacttcgtcgtggtccagtttaaggatatggattcttcttatgccaagagggatgcttttaccgactccgccatctcggctaaggttaacggtgaacataaggaaaaagacctggagccatgggacgcgggagagctcacagctaatgaagaacttgaggctctggagaacgacgtgtccaatggttgggatcccaacgacatgtttcgatacaacgaggagaactacggggttgtatcaacatatgacagtagcctttccagctacaccgtcccgttggaacgcgacaactcagaggagtttctcaagcgagaggctcgggctaatcagcttgcagaggaaatcgagagcagtgcgcagtacaaggccagagtggcattggagaacgatgacaggagcgaggaggagaaatatacagccgtccagagaaactcaagcgagcgggaaggtcatagcatcaacacaagagagaacaaatacatcccccctggacagcgcaacagggaagttataagttggggctccggaagacagaacagccctaggatgggccagcccggtagcggatctatgccatctcggtctacttctcacacctctgattttaaccccaattccggcagcgaccagcgagtcgtgaacggcggagtcccatggccgagcccttgcccatcccccagtagccggccaccttcaaggtaccagagtggtcccaatagtttgccgccacgcgctgccacccccacgaggccacctagcaggcccccaagccgtccaagcagacccccatctcatccgtctgcccatggaagccccgctccagtatcgaccatgccaaaaagaatgagcagcgaggggcctcccagaatgagtcccaaagcgcagagacaccctcggaaccatcgggtgtccgcagggagaggttcgatttcatcgggcctagagttcgtctctcacaaccctccaagcgaggcagccactccccctgtggctcgtacgtctccctccgggggaacctggtcatccgtggtttcgggggtgccgaggctgagcccgaagacccacagacccagaagcccgaggcaaaattccataggaaatacacctagcggacccgtgcttgctagcccccaggcaggcataatccctaccgaggccgtggccatgccaataccagctgcctctcccacccccgcaagcccagcctctaacagggcggttactccctccagtgaagccaaagatagtaggctacaggaccagcgacaaaacagtcctgccggaaataaagagaacatcaaacccaatgagaccagtccgtctttctcaaaggccgaaaacaaaggaatatcaccggttgtctccgaacacaggaaacagatcgacgaccttaaaaagttcaagaacgattttagattgcagccatccagcacctctgaaagcatggatcagctgctgaataaaaatcgtgaaggagaaaaaagccgggatcttataaaagataaaatagagcctagtgctaaggactccttcatagaaaactcttcttctaactgcacttcgggcagtagcaagcctaatagtccaagcatttccccatcgattctgagtaacactgagcacaagcgtggaccagaggtgacctctcaaggtgtccagacttcatcacccgcatgcaagcaagagaaagatgataaggaagagaagaaagacgctgcggaacaggtccgcaagagtaccctgaacccaaatgcgaaggagtttaaccctaggtctttctcccagcccaagccatccaccaccccaactagccccaggcctcaggctcaaccttcccccagcatggtcggccatcagcagcctacccctgtgtacacacagcctgtctgttttgctcctaatatgatgtaccctgtaccggtgagtcccggagtgcagcccctgtacccaattccgatgactccaatgcccgtgaaccaggctaagacatatcgcgcagtgcccaatatgccccagcagagacaggaccaacaccatcaatcggccatgatgcatcccgcaagcgccgctggaccccctattgcagcaacacccccagcatattctacacagtatgtggcctacagcccgcaacagttccctaatcaacccctcgttcaacacgtgccgcattatcaatcgcagcaccctcatgtttatagcccagttattcagggcaatgcacgcatgatggcaccaccaacacatgcccagccaggcttggttagcagcagcgcgacacagtatggcgctcatgaacagactcacgccatgtacgcatgtccaaagcttccctataacaaggagaccagcccttcattctacttcgcaatttctacaggcagcttggcccaacaatacgcccaccccaacgctacccttcatcctcacactccgcacccccagccgtctgcgaccccaacaggtcaacaacagtctcagcacggtggaagccatccagcgcctagtcctgtccaacaccatcagcatcaggccgctcaggctctccacctggcttccccccagcaacagtcagctatctaccacgcgggtctagccccaacgccacccagcatgactcctgcaagtaacacacaaagtccccagaactcatttcccgctgcgcaacaaacagtgtttactatccacccatctcacgtgcagcctgcctatacaaacccccctcacatggcgcatgtgccacaggcccacgtacagagcgggatggtgccttcacacccaacggcacacgctccaatgatgttgatgactacccagccacccggagggccacaagccgcactggctcagtccgcattgcagcccatccccgtgtctacgaccgcacattttccttacatgacgcacccctctgtccaagcacaccatcaacagcagctgtag

SEQ ID NO: 215040 - DNA, 2988 bp, synthetic construct
  misc_feature 1..2988: note = Description of Artificial Sequence: Synthetic coding sequence
  source 1..2988: mol_type = other DNA
atgcgcagcgccgcagccgctcccagatcccctgcagtcgcaacagagagtcggcgattcgcggctgcacgctggcccggatggagaagcttacagcgcccagcacgacggagcggcaggggcggtgggggtgctgcgccaggcccttatccctctgcagcgccacccccacctgggcctggaccccctccatctcggcagagcagccctccctcagcgagtgactgcttcggttccaatggcaacgggggtggcgcttttcgccctggcagcagaaggttgctgggcctgggtgggccaccaaggccattcgttgttctcctgttgccactggcttcccccggtgcaccgcctgccgctccaaccagagcctcccccctgggcgctcgagccagtccgcctcggtccggagtgagtctagctcggcctgcacctggttgtcctcgcccagcatgtgaaccggtctatggcccacttaccatgagccttaagcctcagcagcagcaacagcagcagcagcagcagcagcagcagcaacagcagcagcaacagcagcagcagcagccacctccagccgctgccaacgtgagaaagcctggtggatctggcctgctcgcaagccccgcagcagccccttccccctcaagctccagtgtgtcctctagcagcgcgactgccccttcgtcggtcgtcgccgctacgtctgggggaggacgcccaggtctgggacgtggaagaaatagcaacaaaggcctcccgcagagtacaatatccttcgatggcatttacgctaacatgcgaatggttcacattctcacctcagttgttggatccaagtgtgaggtgcaagtgaaaaatggtggcatctacgaaggagtgttcaaaacctactcgccaaagtgtgatttggttctggatgccgctcacgaaaaatctactgaaagctcctccggcccaaaacgggaggagataatggagtccattctgttcaagtgtagcgatttcgtcgtggtacagtttaaggacatggatagctcgtacgccaagagggatgccttcaccgattccgccattagcgcaaaagtgaatggcgaacataaggagaaggatcttgagccatgggatgcaggcgaactgactgccaatgaggagcttgaagcgcttgagaatgacgtgtctaacggttgggaccctaatgacatgtttcggtataacgaagagaattacggagtcgtgtcaacttacgacagctccttatcatcatacaccgtacctctcgagcgcgacaactcagaggaattcctgaagagagaagccagagctaatcagttggctgaagaaattgagagtagcgcccagtataaagccagagtggccctcgagaacgatgatcggtcagaggaagaaaagtacaccgcagtgcagcgaaattcaagcgagcgcgaggggcactcaatcaacacacgggagaataagtacattcctcctggtcagaggaaccgggaggtcatctcctgggggtccggtaggcagaacagtccaaggatgggacagcccggaagcgggagcatgccctcacggtctactagccatacctccgactttaatcccaatagtggaagtgatcagcgggttgtaaatggaggcgtaccttggccctcgccctgtccaagtcctagtagtaggcctccaagcagataccagtccggtcctaattccctgcctccacgcgctgccaccccaacccgaccccctagtaggcctccaagccgtccttctcgcccacctagtcacccttctgcccatggcagccctgcacctgtgagcactatgcctaagagaatgtccagcgaggggcctccacggatgagcccaaaagcccaaagacaccctcgcaaccatagagtgtccgcaggcagagggagcatttccagcggcttggaattcgtaagccacaacccaccctctgaggctgctacacctccggttgctcgcacatcccctagtggcggaacgtggagttccgtggtgagtggagtaccaaggctgtcccctaaaactcatcggcctagatcccctcgccagaacagtattggaaacacccccagtggccctgtgctagcctcaccccaggccggaatcattccaacagaggccgtggctatgcctatccctgccgcatcccctacgccagcaagccctgccagtaatcgcgctgtgacaccatccagcgaggccaaggattcgagactgcaggaccagcgccaaaattctcctgccggaaacaaggagaatattaagccaaatgagacctcccccagcttttcaaaggccgagaataagggtatttctcctgtggttagtgagcaccgaaaacaaatcgatgacctaaagaagtttaaaaacgatttccggctgcagccaagcagcaccagcgagagcatggatcagctactcaataaaaacagggaaggcgaaaagtcacgggatctgatcaaagacaagatcgaaccctcagcaaaggactcctttatagagaactccagctccaattgcacatccggatctagcaaaccgaattcccccagtataagccccagcatcctgtcgaatactgagcacaagcgtggcccagaggtaacgagccagggcgtgcagacgtcgagtccagcttgcaaacaagaaaaggacgataaagaggaaaaaaaagatgctgcagaacaggtaaggaagagtacattgaaccccaatgctaaggagttcaatccgcgatccttttctcagcccaagcctagtaccacacccacaagccctcgaccacaagctcagccttctccctcaatggtagggcatcagcagcctactcctgtttacacccagccggtgtgttttgcacctaacatgatgtacccagtgcctgtatccccgggagtgcagtatcagatctgtcctaactcaggtaagaccagcatcatcagagtgccttag

SEQ ID NO: 215041 - DNA, 3189 bp, synthetic construct
  misc_feature 1..3189: note = Description of Artificial Sequence: Synthetic coding sequence
  source 1..3189: mol_type = other DNA
atgctgaaaccccagcctctccagcagccaagtcaacctcagcaaccaccacccacacagcaggccgtggccaggcgaccacccggtggcacctcaccgccaaacggcggtctgccgggaccgctggccacatcggctgcgcctccagggcctcccgcagcagccagtccctgcttgggcccagtcgcggctgctggatccggattgcgaagaggggctgaaggcatcttggctccccaacctccccctcctcagcagcatcaggaaagacccggagccgctgctattggttccgcacggggtcagagcacaggcaaggggcctcctcagtcccccgtttttgagggtgtgtacaacaactctaggatgctccactttttaactgccgtggttggttctacatgtgacgttaaggtgaaaaacggaaccacttatgaagggatctttaagaccctgtcttccaaattcgaactggccgtggacgctgtccatcggaaggctagcgaaccagcaggcggaccccgaagggaggacattgtagacaccatggtgttcaagccgagcgatgtcatgctggtgcactttaggaatgtggatttcaattacgccactaaggacaagttcacagactccgcaattgcaatgaacagcaaagtaaatggagaacacaaggagaaggtgcttcaaaggtgggaaggtggcgactccaattcagatgactacgatctcgagagcgatatgtctaacggctgggatcccaacgagatgtttaaattcaatgaagagaactatggagtcaagactacatacgatagcagtcttagctcctataccgtgccgctcgaaaaagacaatagcgaggaattccggcagcgggaactgagagcagcacaacttgcaagggaaatcgagtcttctccgcaatacaggctccgcattgccatggagaacgatgatgggagaaccgaggaggaaaaacactcggctgttcagcggcaggggagcggcagagaaagccccagcctggcttccagagaaggcaaatatatccctctgccccagcgcgtgcgggaaggccctagagggggagtgaggtgtagttcttcccgaggcggaaggccgggactaagtagtcttcctcccagaggccctcaccacctggataatagttcccctggccctgggtccgaggccagaggaataaacggcggaccctcacgcatgtcacctaaagcacagaggcctctacggggtgctaagaccctctcctccccatcaaataggccttctggggagacctctgtgccacctccccctgctgtaggccgtatgtatccaccacgaagccccaaaagcgccgctcctgcccctatatcagcctcatgtccagaaccacccatcgggtccgcggtgcccacgagttcggcgtccattccagtgacgtcctccgtctctgatcccggtgtcgggagcatctcccctgcatctccgaagatctcattggcccctactgatgtaaaggagctgtcgacaaaagaacctggcagaacactagagccgcaagagttggccagaatagcaggcaaggtgccaggtctgcaaaacgaacagaagaggtttcagcttgaagagctcaggaagttcggagcccagtttaaactgcagccttcctctagccctgaaaatagcctggatcccttcccaccccgtatcctcaaagaagaaccaaagggtaaggaaaaggaagtcgacggtttgctgacaagcgagccaatggggtctcctgtgtccagtaagacggagtctgtgagcgataaagaggacaagccccctcttgcccctagcggaggcaccgagggtccagaacagccaccgcctccatgcccaagccagactggctctcctccagtgggactgattaagggcgaagataaggatgaaggacccgttgccgaacaagtgaaaaagtcaactctgaaccctaacgctaaagaattcaaccctaccaagcccctgctgagtgtgaacaagtcgacctccacgcccacctctcctggaccaagaacgcattccaccccttccattccagttttgacagctggtcaatcaggcttatattccccacagtacatcagctacattcctcagatccacatgggtcccgctgttcaggcgcctcagatgtacccctaccccgtgtcaaattctgtgcccggacagcagggaaaatatcggggagccaagggcagtctgccaccgcagagatctgatcagcaccaacctgccagcgccccaccgatgatgcaggccgcagccgctgcaggaccacctctcgtagctgccactccatactcctcctatattccttacaacccccagcagtttcccggacagcctgccatgatgcaacccatggcacactaccccagccagcctgtctttgctcctatgttacagtccaatcccagaatgctcacctccggaagccacccgcaggctatagttagctcgtctacaccacagtacccctctgccgagcaacctactccccaggccctttatgcaaccgtgcatcaaagctacccccaccatgctactcagttacatgcacaccaaccacagccagccactactccgaccggaagccagccgcagagtcaacatgccgcaccctcccctgttcagcaccaggccggacaggcaccccacctcggctccggccaaccccagcagaacttgtaccacccgggtgctctcaccggcaccccgccatccttaccccctggaccgagcgcacagtcaccacaaagctccttcccacagcccgctgctgtttacgcgattcatcatcagcagcttccacacggcttcactaacatggcccatgtgacgcaggctcatgtgcagaccggtataacagccgctccaccccctcaccccggagccccacaccccccacaggtgatgttgctgcatccaccccagtctcatggtgggccaccgcagggcgcagttccacaatcaggggttccggcactatcagcatccactccatccccatatccttatattgggcatcctcagggggagcagcctggccaggcacccggattccctggcggtgcagatgatagaattcctcctctacctcccccaggagagctcaaaatcgttctggcagctacctag

SEQ ID NO: 215042 - DNA, 3228 bp, synthetic construct
  misc_feature 1..3228: note = Description of Artificial Sequence: Synthetic coding sequence
  source 1..3228: mol_type = other DNA
atgctcaagccacagcccctccaacagcctagccagccgcagcaacctccccctacccaacaggccgtggcaaggcggcctcctggaggcactagtccacctaatggaggattgcccggaccactggctacctcagccgctcctcctgggcctcctgccgctgcatcgccctgcctcggaccagttgcagccgctgggagtggcctgcggaggggagccgaaggcattttagcccctcagcctccccctcctcaacagcatcaggagcgccctggcgctgcagcgattggtagcgccagaggtcagagcaccggcaagggcccaccacagagtcccgtgttcgagggtgtttacaacaattcacgcatgttacatttcctgacagccgtggtgggatcaacctgcgatgtgaaggtcaagaacggaacaacctacgagggcatcttcaagaccctctctagtaaatttgaattggccgtggatgcagtgcaccgtaaagccagcgaaccggcaggtggacctcggcgagaggatattgtggacactatggtgttcaagccctccgacgtaatgctagtgcattttaggaatgttgattttaactacgctaccaaggataagttcaccgactctgccatagctatgaatagtaaggttaatggcgagcacaaggaaaaagtccttcaacgctgggagggtggcgacagtaacagcgacgattacgatctggagtctgatatgagcaatggctgggacccgaacgagatgtttaagtttaacgaagaaaactacggtgtgaaaaccacctacgatagcagcctgtcgagctacacggtaccgctcgaaaaggacaattctgaggagttcagacagagagaactccgagcagcacagttggccagggagatcgaaagttccccacaataccgcctccgaattgctatggagaatgatgacggacggaccgaggaggagaagcactccgcagttcagcggcagggctcgggcagagaatccccctcactggcctcgagggaagggaagtatattccccttccccagagagtccgggaagggccacgtgggggagtccggtgctccagcagccgcggtgggaggcccggtctgtcttcgttacccccacgtggtcctcatcatctcgacaactccagcccaggacccggttccgaggctcgtggaatcaatggcggaccctcccgcatgagtcctaaggcacagaggccgcttagaggggctaagactctgtcaagcccatccaataggccttctggagagacctcggtgcctcctccgcctgctgtaggacgcatgtacccccctcgctcccctaagagcgccgctcctgccccaatttctgcaagctgcccggagcctccaatcggatccgctgtccccactagttctgcctccattccagttacgagcagcgtgtcggatccgggtgtaggatccatttcaccggcttcaccaaagatttctctcgcccctaccgacgtcaaagaactgtctaccaaggaaccaggacgaacgcttgaaccccaggagcttgcccgtattgcaggcaaggtgcctggtctgcagaatgagcagaaaagatttcaactggaggagctacgcaagttcggcgctcaatttaagcttcaaccatcttcaagtcccgagaacagtctcgaccccttccctccacggatattgaaggaggaaccaaagggtaaagaaaaggaagtggacggactgctgacctcagaaccaatgggctctccagtcagttcaaaaaccgagagcgtgagcgacaaggaagacaaaccaccactggcacctagcggaggcactgaggggccagaacagcctcctccaccgtgccccagtcagactggctccccaccggttgggctgattaagggggaggataaggatgagggccctgtagccgagcaggtcaaaaaatctactttgaatccaaacgcaaaagaattcaacccgaccaaacctctgctgagcgtgaataagtcaacatcaacccccacatcacccggtcctcgaacccacagcacaccgagcatcccagtgcttaccgcagggcagtccgggctctactctccacagtacatcagctacatcccacagattcacatgggccctgccgtgcaggctcctcagatgtatccttacccggtgtccaatagcgtccccggtcagcagggtaagtaccgtggcgctaaggggagcctcccaccacagcggagtgaccagcaccaacctgctagcgccccaccaatgatgcaggcagcggctgcagctggcccacctttggtggcagccaccccatactcgtcctacatcccatataacccccagcagttccccggacagcccgctatgatgcagcccatggcccactacccaagccaacccgtgttcgcccctatgttacaaagcaaccctcgcatgctgacctctggaagtcaccctcaggccatcgtgtcgagtagcaccccccagtaccccagcgccgagcaaccgacgccccaagctctgtatgcgacggtgcaccagagttatccacaccatgctactcagctgcatgctcaccagcctcagccggctacgactccaactggcagccagccccagtcccagcatgccgcacctagccctgtccagcaccaggcagggcaggcaccgcacctgggatcagggcaaccacaacaaaatctgtaccatcctggcgctcttactggcactccgccatccttgccgcctgggccttccgctcagtcacctcagagcagtttccctcagccagcagcagtttacgcaattcatcaccagcagttgccccacgggtttacaaatatggctcacgtcacccaggcccatgtccagaccgggattaccgcagccccaccgccacatccaggggcaccacacccgcctcaggtgatgctactccacccccctcagagccacggaggccctccccagggtgccgtgcctcaatctggagtgcctgcactgtctgcgtccacaccatccccatacccatatataggccatccgcagggtgaacagccaggtcaggcgccaggttttcccggaggcgctgacgatcgcatccgggagtttagccttgcagggggaatctggcacggtcgggcagagggattacaggttggccaggacgccagggtcctagggggtgaatag

SEQ ID NO: 215043 - DNA, 3135 bp, synthetic construct
  misc_feature 1..3135: note = Description of Artificial Sequence: Synthetic coding sequence
  source 1..3135: mol_type = other DNA
atgttgaaaccccagccgctgcagcagccatcccaaccgcagcagccccctcccacacagcaggcagttgctcgcaggcctcctggaggcacatccccgcctaacgggggtcttccagggcctctggctacatctgccgcacctcccggtccccctgctgcagcctcaccgtgtctgggcccagtggccgctgccggaagcgggttgcggcgtggtgcagagggcatcctggcaccccaacctcccccaccacaacagcatcaggaacggcctggggcagcagccataggatcggcgaggggccagagcaccggaaagggtccgcctcagtcgccggtcttcgaaggcgtgtacaataattcccgcatgttacactttctgacggcggtggtgggcagcacatgtgatgtgaaagttaagaatggcaccacttatgaaggaattttcaaaaccctgtctagcaagtttgaacttgcagttgacgctgtccatcggaaggcaagtgagcccgcaggcggtcccagaagagaggacattgtcgacactatggttttcaaacctagtgatgtgatgctcgtacactttcggaacgtcgacttcaactatgctactaaagataagttcacagatagcgcaattgccatgaattcgaaagttaatggagagcataaggagaaggtgcttcagcggtgggaaggcggtgactcgaactctgacgactacgatctggaatccgatatgagcaacggatgggaccccaatgagatgttcaaatttaacgaagagaactacggggtgaaaactacatacgatagtagtctgtcgagttacactgtgccactcgaaaaagataacagcgaagaatttcgtcagagggagttgcgggctgcccagctggcgcgagaaatcgaatccagccctcaatatcgactgcgcattgctatggagaatgacgacggacgtacggaagaggagaagcatagcgcagtacagcgccaggggagcggtcgcgaatccccttcgttggcttcaagggaggggaagtacatacccttgccccaacgcgtcagagaaggaccccgtgggggagtgaggtgtagtagctccagaggtggccgtccagggctctcttcactcccacctcgcggtcctcatcatctcgacaactcgtctcctggcccaggaagtgaagcacggggtatcaacggaggtccttcacgaatgtctcccaaagcccaaaggccactgcggggtgccaagacccttagcagtccgagcaatcggccaagtggtgaaaccagtgtgccgccacctccagccgtggggagaatgtacccacccagatccccaaaatcagccgcacccgcacccatatccgccagctgtcccgagccaccaatcgggagcgcggtgccgacttcaagcgcctcaattcctgtgaccagttcagtatctgacccaggcgtggggtccattagtcccgcttccccgaagatcagtctggccccaacagacgtgaaggagttaagcaccaaggaacctggaaggacgctcgagccacaggaactcgctaggatagcaggcaaggtgcccggacttcaaaatgaacagaagagatttcagctggaagaacttagaaaattcggtgctcaatttaaattgcaaccctcctcaagtccagaaaattcccttgatccatttcctccacgaattctgaaagaagagccaaaaggcaaggaaaaagaggtggatggcctccttacctctgagcctatgggcagtcccgtctctagcaaaacagaatctgtgagtgacaaggaagataagccgccattagctccgtctggagggaccgagggaccagagcagccacctcctccctgtcctagtcagacaggatctccacctgttggactaattaagggggaagacaaagacgaaggtcctgtggccgaacaggtcaagaagtccacacttaacccaaacgcaaaagaattcaacccaaccaaaccgttgctttcggtcaacaagtcaacctcaacaccaaccagccctggacctcgtacccactccactcccagcatcccagttctcacagccggtcaatctggcctatactcaccacaatacatcagctatatcccacagatccacatgggcccagcagtgcaggcccctcaaatgtacccgtacccagtctccaattccgtaccagggcagcagggcaaataccggggtgcaaagggaagcctgccgccacagcgatctgaccagcatcagcccgctagtgcccctccaatgatgcaggccgctgcagccgctggtcctcccctggtggccgctaccccatattccagctacattccctacaacccacagcaatttccaggccagccagctatgatgcagccaatggcccactaccccagtcagccagtgttcgcgcctatgctgcagtcaaaccccaggatgctcacatccggctcccacccccaggccattgtctcctcttcaacaccccaatacccgtctgcggagcagcccaccccccaggccctgtatgccaccgtacatcagtcttacccccatcatgctacacagctacatgcgcaccagccacagcccgctacaactcccaccggtagccaaccccagagtcagcatgccgcaccctcccctgtccagcaccaagccggacaagccccacatttgggaagcggccagccccaacagaatctttaccatcctggggctcttacgggtactcctccttcactcccaccagggccttctgcccagtcacctcaaagttccttcccgcaacccgctgctgtctacgccatccatcaccagcagcttccccacggtttcaccaacatggcccacgtgactcaggcccatgtccagacaggcatcactgccgcaccccctccacaccccggagcccctcatcctccacaagttatgttgctccaccccccacaaagccacggcggacctccccaaggagccgtgccacagtcaggcgtacccgctttgtcagcctcaactcctagtccatacccatacatcgggcaccctcaggtgcagagccatccttctcagcagctccctttccacccaccaggaaattag

SEQ ID NO: 215044 - DNA, 1203 bp, synthetic construct
  misc_feature 1..1203: note = Description of Artificial Sequence: Synthetic coding sequence
  source 1..1203: mol_type = other DNA
atgctgaaaccacaacctcttcagcagccatcccagccccagcaaccacctccaacacagcaggccgtggcaaggagaccacccggaggaactagccctccaaatgggggtctgcccggtcccctggccacgagcgcagccccacctggcccacccgctgcagcttctccatgcctcggccctgtggctgcagctggcagcggtctgcggaggggggcagagggcattctggcgcctcagcctcccccaccacagcagcatcaagagcggcctggggcagccgcaatcggttcagctagagggcaatcgactggcaagggtcccccacagagtcctgtctttgagggtgtttacaataattcccggatgctccacttcctcacagctgttgtgggtagcacatgcgacgttaaggtgaaaaatggtaccacctacgaagggatcttcaagaccctgagttccaaattcgaactggccgtggacgcagttcaccgtaaggcgtcggagcccgctggcggtcccaggcgtgaagacatcgtggacacaatggtatttaagccatccgacgtcatgttagtgcattttcgtaatgtagacttcaattatgccaccaaggataagtttactgattccgccattgccatgaactcaaaagtgaatggggaacacaaggagaaagtgttgcagcgttgggagggaggcgactctaattcagatgattatgatctggagtctgatatgtctaacggttgggatcctaatgagatgttcaagttcaatgaggaaaactacggagtcaaaactacatacgattcttcactgagtagttacacagttcctcttgaaaaggataactctgaggaattccgccaacgggagctacgcgcagcccagctcgcccgtgaaatcgagagctccccgcaataccggttgagaattgcaatggagaacgatgatggccgaaccgaggaggagaagcattcagccgtgcagagacaaggcagcggcagagagagtcccagtctggcctcgagagaaggcaaatacataccgctccccccacaccggggtcaggggcaggggccagcaggcgtggggggatcctgcagtgctccagcacggcctcatcctgtgctgccttctcatccactgatctacagtcctgcgggtgacggacggtctttcatattctactatctctag

SEQ ID NO: 215045 - DNA, 3135 bp, synthetic construct
  misc_feature 1..3135: note = Description of Artificial Sequence: Synthetic coding sequence
  source 1..3135: mol_type = other DNA
atgctcaagccacagccgttgcagcagccctcacagccacagcaaccaccgcctacccaacaggccgttgccagacgtcctcccggaggaacatcaccgcctaatggtgggttgccgggaccactagcgacttctgccgcaccgccaggaccccctgcggcagcctcgccttgtctagggccagttgcagccgctggctccggactgcggcgaggagctgagggcatcctggctccccagccgcctcctccacagcaacatcaggagaggccaggagcagcagcaatcggaagcgcgagggggcagtccaccggaaagggacccccacaatcccctgtgttcgaaggggtctacaataatagtagaatgctgcactttttgactgccgtcgtcggctcgacatgtgacgtaaaagtgaagaacggaacaacttatgagggaatcttcaagactctgagctctaagttcgaactggctgtcgacgctgttcaccgaaaggccagcgagcccgctggcggtcccagaagggaggatatcgtcgatacgatggtgttcaaacccagcgatgtgatgcttgtccattttcgaaatgtggacttcaactatgctaccaaggataagttcaccgacagcgctatagccatgaacagcaaggtgaacggggaacataaagagaaggttctccagcgctgggaaggtggtgatagtaactctgatgattatgacctggaatccgatatgtctaacggatgggatccaaatgaaatgtttaagtttaacgaggaaaactatggcgtgaagactacttacgactcctcacttagcagctatacggtgcccttggagaaagacaacagtgaggagttccgccagcgggaactgagggccgctcaattggctagagaaatcgagtcctccccacagtatcgactccgtattgccatggaaaatgacgacggcaggactgaggaggaaaagcacagcgccgtgcagcgccaagggagtggacgagaatcacctagtttggctagccgagaaggcaagtatatccctctgccccaaagggtcagggaaggtcccagaggtggggtaagatgtagtagctcacggggtggcaggccaggactgagtagtttgcctccacgtgggccacaccacctggacaacagcagccccggacccggaagcgaggcgagggggatcaacggagggccttccagaatgagcccgaaagcacagcgacctctgcgcggagctaagacactctctagcccatctaatcggccatctggagaaacttctgtgcctccccctccagcggtgggaagaatgtaccccccaagatctccaaagtccgccgcaccagcgcctatctccgccagttgccctgagcccccaatcggttcagcggtgccgacaagttctgcttctatccccgtgacatcctcggtgagcgaccccggtgtggggtcgattagccctgcaagcccgaaaatcagcctcgcccctactgacgttaaagaactgtcgacaaaagaaccgggtcggactcttgagcctcaggaattggcacgaatcgcaggtaaagtccctggtttgcagaacgagcagaagaggttccagctcgaggagctacggaaattcggcgctcagttcaaactgcagccttcctctagccccgagaactcacttgacccattccccccacgcatcctgaaggaggaacctaaagggaaggagaaggaagttgacggcctactcacctctgagcctatgggatctccagtctccagcaaaacagagtctgtctctgataaggaagataagcctccccttgccccatccggcggaaccgagggtcccgagcagcccccaccaccttgcccctctcagactggcagtccacctgtgggcctgattaagggtgaagataaagatgaaggaccagtggcagagcaggtcaagaagagcaccttgaatccgaatgctaaggaatttaatcctacaaagccactgctttccgtgaacaaatcaaccagtacgcccacttcgccagggcctagaacgcattccactccttccatccctgtgctgaccgctggtcagtcaggcctgtacagcccgcagtacatctcctatatcccccaaatccacatgggccctgctgtccaggcgcctcaaatgtatccctaccccgtgtcgaactccgttccaggacagcaaggcaaataccgcggtgccaagggatcgctgccaccacagcggtctgaccaacaccagccagcatccgcccctcccatgatgcaggccgctgcggctgccggtccaccactggtggcagccacaccatactcatcatatatcccctataatcctcagcaattccccggacagccagcaatgatgcaacccatggcccattacccctcacaacctgtgttcgcccctatgcttcagtccaatcccaggatgctcacttctgggagtcatcctcaagccattgtgagtagcagtaccccgcaatatccttcggcagagcaaccaactcctcaggcattgtacgctaccgtccaccagtcatacccccaccacgcaacacagctgcatgctcaccagccacagcccgcaacaacaccaaccggatcccagccccagagtcagcacgccgcaccgtctcccgtccagcaccaggccggacaggctccccacctgggctcaggacagccacagcagaatctctaccaccccggagcgctcactggaactccaccgtctctaccacctgggccatcagctcagtccccccagagcagtttcccccagccagcagccgtgtacgccatccatcatcaacaacttcctcacggttttaccaacatggcacacgtcacacaggcccatgttcagacagggattacggctgcgccaccccctcatcccggagcccctcacccacctcaggtgatgttactccatcccccacagtcgcacggtgggcctccacagggggcagtgccccagagtggcgttcctgctctctctgcatcgacaccgagtccatacccatatatcggccaccctcaggctcctctccctcctcccggagagttaaaaattgttcttgcggctacttag

SEQ ID NO: 215046 - DNA, 3294 bp, synthetic construct
  misc_feature 1..3294: note = Description of Artificial Sequence: Synthetic coding sequence
  source 1..3294: mol_type = other DNA
atgttgaagccgcagcctctgcaacagcctagccagccccaacagccgccaccgactcagcaagcggtggccagaaggccacccggaggaactagccctcccaacgggggtctccctggccctcttgctacgtccgctgcacctccaggtcctccagctgcggcatcgccgtgtctcggaccagttgcagccgctggatcaggtcttcgccgtggtgcagaggggatccttgccccacagcctccgccaccacagcaacaccaagagcgtccgggtgcagcagccatcggctctgctcgaggacagagcactggcaagggtccacctcagtcgcccgttttcgaaggcgtgtataacaacagcagaatgctccacttcttgactgctgtggttgggtcgacgtgcgatgttaaggtcaagaacggtaccacctatgaagggatcttcaagaccttgtcctcaaagtttgagctggccgtcgacgcagtgcacaggaaggccagtgagcctgcgggaggtccccgtcgagaggatatagttgataccatggtgttcaaaccttcagatgtgatgctggtacatttccgtaacgtggatttcaactacgctacaaaggacaaatttacagactccgccatcgcaatgaactcgaaggtgaacggagagcacaaagagaaggtcctgcagcgatgggaggggggtgattcaaacagcgatgactacgatcttgagtcggatatgtctaacgggtgggaccccaacgaaatgttcaagtttaacgaggagaattatggagtgaagacaacctacgattcttcactgagtagctacaccgttcccctggagaaggacaacagcgaggaatttcggcagcgggagttacgagcagcacagcttgctagggagatcgagtcctctccccagtacagactacgtattgcaatggagaatgacgatggtaggaccgaggaggagaaacactccgccgtgcaaagacaagggtcggggcgtgaaagcccgtctctcgccagcagggagggcaagtatattcccctgccgcaaagagtgcgggagggccctcgtggcggagtgcgatgtagctctagtcgcggaggaaggcctggattgtcaagcctcccccctcgtgggcctcaccacctggacaattccagtcccggaccagggtcggaagctagaggtatcaatggaggacccagtaggatgagcccaaaggcccagagacccttgaggggagcgaaaactctctccagcccaagcaaccgaccaagcggcgaaacttcagtgccgcctccccctgctgtgggcagaatgtaccccccacggagtccgaagtctgccgcacccgcacccataagcgcctcttgccccgagccgccaattgggtcagccgtgccaaccagcagcgcgtcaattcctgtgacgagtagcgtgagtgatcccggtgtggggagcatctctcctgcctccccaaagatctcgctcgcgccaacggatgtcaaggaactgtcaactaaagaaccgggacgcaccttggaaccccaagagcttgcgcgaatcgcgggaaaagtgccagggctgcagaatgagcaaaaaaggtttcagttagaggagctgagaaagtttggggcacagtttaaactccagccttcaagctcacctgaaaatagccttgacccctttcctccacgtatcctgaaggaggagccaaaaggaaaggaaaaggaagtggatgggttgctgacatcagaaccgatgggctcaccggttagcagtaagaccgaatctgtgtccgataaggaggacaagcctcccctggcacccagcggtgggaccgaagggcctgagcagccccctcctccctgcccctcccagaccgggagcccccctgttggcctcatcaagggtgaggataaagatgagggccctgtcgccgaacaggttaagaagagtacactgaatccaaacgccaaggaattcaaccccacgaagcccttgctcagtgtgaacaagagcacatcaacacccacgagccccggaccccgtacgcattcaactccttcaatccccgtcctgaccgcgggacaatcaggcttatacagtccacagtatattagctatatcccccagatacacatgggccctgctgtccaagcgcctcagatgtacccatatcctgtcagtaattccgtgcccggtcagcagggcaaatacaggggagctaaggggtcattgcctcctcaaagatctgatcaacatcagccagcgagtgcccctcctatgatgcaagcagccgctgccgctggtcccccacttgtggccgctacgccctacagctcgtacattccgtacaatcctcagcaattccccggacagccagcgatgatgcaacctatggcacattatcccagtcagccggtcttcgcccctatgctgcagagcaacccacgtatgctgacaagtggatcacatccacaggccatcgtctcttcctcaacccctcagtaccccagcgccgagcaacctacacctcaggccctgtacgcaactgtgcaccagtcctatccgcaccacgctactcagctgcacgcgcatcagccgcagcctgccacgacgcccaccggatcccaaccgcaatctcagcatgccgctccaagtcctgtgcagcaccaggccggtcaagcaccgcacttgggctccgggcaacctcagcagaatctgtatcaccctggcgcactcaccggaacgcctcccagtcttcctccaggcccatctgcgcaaagcccccaatccagctttccacagcccgcagctgtatacgctatacaccatcagcagttgcctcatgggttcaccaatatggcacacgtgactcaggctcacgttcaaactggcattaccgccgctccgccacctcaccctggcgctccgcacccccctcaggtcatgctgctacatcccccacagtcccacggcggacctcctcagggggctgtgccccaatcaggcgtgcctgctctgagcgccagcacaccttccccctacccctatattggacatccccaaggagagcagcccggacaggccccaggctttcccggaggggcagacgataggatcctgtgccgcgtcggcagaagccactcccgcaggcgacaaggactagcgccagggtccgtattatgctttcccccatcttcactctcctgcgacccagcagccccactgcctacagcctccccagccctgtcggacccggactgtctgctgacatag

SEQ ID NO: 215047 - DNA, 2679 bp, synthetic construct
  misc_feature 1..2679: note = Description of Artificial Sequence: Synthetic coding sequence
  source 1..2679: mol_type = other DNA
atgagcgagagggccgctgacgacgtgcggggtgagcccagacgagctgcagccgctgccggaggagctgctgctgccgcagcccgtcagcaacaacagcagcagcagcagcagcagccaccccctcctcagccgcagcgccagcagcatccgccacctccccctagaaggactcgcccagaggatggcggacccggagcggcatcaacatccgcggcagccatggccaccgtgggtgagcgaagaccacttccgtcacccgaagtgatgctcggccagtcctggaacctttgggtagaagcatcgaagttgcccggtaaggatggcactgaactagatgagagcttcaaggagtttggcaagaaccgcgaggtgatgggcctgtgtagagaagacatgcccattttcggcttttgccctgctcatgatgacttttacctggtggtatgcaacgattgcaaccaagtggttaagccgcaggcttttcagtctcactacgagcggaggcacagcagcagctcaaagcctcctctggctgtgccacctacctctgtgttttcattcttccctagtctctccaaaagtaagggaggcagtgcgagcggtagtaataggagcagcagcggcggagtactgtccgccagttcgagtagctcgaagctgcttaagagccctaaggagaagctccagttaaggggtaacacaagacccatgcatcccatccagcaatcgagagtcccccatggaaggatcatgacaccaagcgtgaaagtggagaaaattcacccaaaaatggatgggactttactgaagtcagcagtggggccaacctgtcctgccactgtcagtagcctggtgaaaccaggtttgaactgcccttcaataccgaaacccactctgccaagcccaggtcaaatcctcaacggaaaggggctgccggcaccacccaccctggagaaaaagcctgaagacaactctaataacagaaagtttttgaataaaaggctgagcgaaagagaattcgacccagatatccattgtggagtgatagatctggatacaaaaaaaccctgcacccgctccctgacttgcaagactcatagcctgacacaaaggagagccgtgcagggcaggcgaaagagattcgacgtcctgctggccgagcacaaaaacaaaactcgcgaaaaagagttaattcgacatccagacagccagcagcctccgcagcccctgagggacccacaccctgccccacccaggacctctcaggagccacaccaaaacccgcacggggtgataccctccgagtcaaaaccttttgtggcctccaagccgaaaccccataccccatccttgcctagaccgcctggctgtcccgctcagcaagggggaagcgcccctatagaccccccaccagttcacgagagccctcatcctcctttacccgcaaccgaacctgcatcaaggctgagctccgaagagggagagggagacgacaaagaggaatcggtggagaagctggattgccactatagcggtcatcaccctcaacccgcttcattttgcacttttggcagccgtcaaataggcaggggctactatgttttcgattcaagatggaatcgcctgaggtgtgcactgaatctgatggtggaaaagcatctgaacgctcagctgtggaagaaaatcccgcctgtcccatctaccacctcaccgatttctactaggatacctcacaggaccaacagtgtaccaacctcccagtgtggggtgtcttacctggccgctgccacggtgagtaccagccctgtgctgctgagttccacatgcattagccccaacagcaaatctgttcctgcgcacggaacaactttgaatgcccagcctgcggcttccggggctatggaccctgtctgtagcatgcagtcccggcaggtcagctcatcttcctccagtccttcgacaccgtctggtctgagcagcgttccctcttccccaatgtcacgtaaaccacagaaactaaaaagtagcaagagcttgcggccaaaggagtcttctggcaatagtaccaactgccagaatgcctcgtcctccaccagcggcggaagtggtaaaaagcgaaaaaattcatcccccctgttggtgcactcgtcaagctctagttcttcctcctcctcctcatctcactcaatggagtcctttcgtaagaactgcgtggcccactctggtcccccttacccctccaccgtcacttcctcccattcgattggattgaactgtgtcacaaacaaggccaatgctgttaacgttcggcacgatcagagtggcagaggacctcctacaggatccccagccgagtctatcaaaaggatgtcagtgatggtgaactcttccgattcaacactctcccttggccctttcatccaccagtcgaatgagctaccagttaacagccatgggagcttcagtcacagccatactccgctggacaaactgatcgggaaaaaacggaagtgctcaccctcgtccagctcaatcaataactcctcgagcaaacctaccaaggttgcgaaggtgcctgccgtgaacaacgtgcacatgaaacacaccggtacaattcctggggcacagggcttgatgaactcttctctgcttcaccagcctaaggctcgtccctag

SEQ ID NO: 215048 - DNA, 2838 bp, synthetic construct
  misc_feature 1..2838: note = Description of Artificial Sequence: Synthetic coding sequence
  source 1..2838: mol_type = other DNA
atgtctgagagagcagccgacgacgtccggggtgaacctcgaagggccgctgccgcagcgggtggcgctgctgccgcagcggcacgccagcagcaacagcagcagcaacaacagcaacccccacccccacagccacagagacaacagcatccacccccacctcctcggaggactagacccgaggacgggggtccaggagctgcatccactagcgctgccgcaatggccacagtaggcgagagacggcctcttccctcaccggaagttatgcttggtcagtcttggaacctctgggtagaagcgtctaagctgccgggtaaggacggaactgagttagacgagtctttcaaagaatttgggaaaaatcgagaggtcatggggttgtgccgcgaagatatgcctatctttggattttgccccgcacatgacgacttttatcttgttgtgtgtaacgactgtaatcaggtggtcaaaccacaggcattccaaagccactatgagagacgccactcctcttccagtaagcctccacttgctgttcctcctacctccgtgttcagtttttttccctccttgtccaagtccaaaggtggctcggcctccggtagcaacagaagtagtagcggcggtgtgctgtccgcaagctcttcctccagtaagctgcttaagagcccaaaggagaaacttcagctaagggggaacactcggccaatgcaccccattcagcagtccagagtaccacacggccgaataatgacgccatctgtcaaggtagagaagatacaccccaagatggacggcacactgttaaaatcagcagtgggcccaacgtgcccagctaccgtcagctcacttgtcaagcccggactaaactgccccagtatacccaagcctacgctgccttctcctggccagatcttaaatgggaagggactacctgctcccccaacacttgaaaagaaaccagaagacaacagtaacaatagaaagttcctgaacaaacgattgagtgaaagggagtttgatcctgacattcactgtggagttatcgacctcgacaccaagaagccctgtactcggtccctgacctgtaaaacccattccctaacccaaaggcgggcagtccagggtagacgaaagcggttcgacgtgctccttgccgagcacaagaacaagactcgggagaaagagctgatacgacacccagactcccaacaacctccccagcccttgcgtgacccacaccccgctccacctcggaccagtcaggagcctcatcagaaccctcatggagtgataccgagtgaatctaaacccttcgtggcctcaaaacctaaaccgcacacacccagcttgccacgcccaccaggctgtccagctcagcaaggagggtccgcccctattgatccccctccagtgcacgagtccccccatcctccccttccagccactgaacctgcttctcgactgtcttctgaggagggggagggagatgataaagaggagtccgtggaaaagttggactgtcattactccggccatcaccctcagcccgcatcattttgtaccttcggctccagacagattgggagaggatactatgttttcgatagccgatggaatcgcctgaggtgcgctcttaatctgatggttgaaaaacacctgaacgcccagctttggaaaaagattccaccagtgcctagcactacctctcctattagcacaagaatcccccacagaacaaactccgtgcctaccagccagtgcggagttagctaccttgccgctgccaccgtcagtacgtcccctgtgctgctcagctcaacttgcatcagccccaattctaagagtgtgcctgcccatggcactaccctgaacgcgcagcctgcagctagcggggcaatggatccagtgtgttctatgcagtctcgccaagttagctccagttccagttccccctcaacacctagcggtctgtcaagtgtaccgagctcgccaatgagtagaaagccacagaaattgaaatcatctaaatcactgcgacctaaggaaagttccggtaattcaacaaactgccagaacgcgtcttcgtccaccagcgggggtagtgggaagaaacggaagaactctagtccactcttggtccatagcagctcaagctccagttcatctagttcctccagccactctatggagtctttccggaaaaactgtgtggctcattcaggacctccatacccatctacggtgacaagcagtcacagcattggtctgaattgcgttaccaataaagcgaacgcggtaaacgtgcggcacgaccagtcaggaaggggaccacccaccggcagccctgccgagagcatcaagcgaatgtcagtcatggtgaattccagcgatagcactttatccctcggcccattcattcatcaaagcaacgagcttcccgtgaacagccatgggtcattctctcattcacacaccccattggataagctgatcgggaagaagcggaagtgtagcccatcgagctcgtccattaacaatagttcttccaagcccacaaaggtcgctaaagtccccgctgtgaacaatgtgcacatgaagcatactggcactatcccgggagcacagggcttgatgaactcgagtctcctgcaccaggatatctcgtcaccctgcctgcgcactggaatatcagctaccagcccacagtctcctgatcttaaatctaaaggaacgtctctcactgccgagaatagtaccggacgaaataatgccgatacttttgaagacaaactgcatctgcattcagccctgtggaccccaaggtgtctttag

SEQ ID NO: 215049 - DNA, 81 bp, synthetic construct
  misc_feature 1..81: note = Description of Artificial Sequence: Synthetic coding sequence
  source 1..81: mol_type = other DNA
atgtcagagagggccgctgatgacgtgcgcggagagcccaggagagctgcagccgctgctgggggtgcagctgctgcatag

SEQ ID NO: 215050 - DNA, 2679 bp, synthetic construct
  misc_feature 1..2679: note = Description of Artificial Sequence: Synthetic coding sequence
  source 1..2679: mol_type = other DNA
atgtcagagagagctgctgatgatgtgaggggcgagccccgacgcgctgctgccgctgccggaggagctgctgctgcagccgcacgccagcaacagcaacagcagcaacagcaacaacccccacctccgcagccccagagacagcaacatccgccacctccaccaagacgaaccagacctgaggacgggggtcccggagcggcttctacatccgcagctgcaatggcaaccgtgggggaaaggcgaccgctcccgagtcccgaagtgatgctggggcagagttggaatttgtgggtcgaggccagcaagctccctgggaaagacggcaccgaattggacgaaagctttaaggagttcggaaagaaccgtgaggtcatgggcctctgcagagaagacatgcctatcttcggattctgtcccgctcatgacgatttctacctggttgtttgcaatgactgtaatcaagtggtgaagcctcaggcgttccagagccactatgaaagacgacactcttcttcttccaaacccccacttgcggtacctccaaccagtgtgttttctttctttccatcactaagcaagtccaagggcggaagcgctagtggctcaaaccggagctcctcaggcggtgtgttaagtgcctcatccagtagcagcaagctgctcaagtcccctaaggaaaagctacaattgcgagggaataccaggcccatgcatcccattcaacagtcccgcgtcccacacggccgtataatgactcctagcgtcaaggtggaaaagatccatcctaagatggacggcacccttctcaaaagtgccgttgggccaacctgccctgctactgttagcagtttagtgaagccaggactaaattgtcccagtatacctaaaccaactctaccaagtccagggcagatcttgaacggcaagggccttccggcaccccctacactggaaaaaaagccagaggacaacagcaataataggaaatttctcaacaagaggctgtctgaaagagagtttgacccagatattcactgtggtgtaattgacctcgatacgaagaagccttgtacccgatctttgacctgcaaaacgcactccctgacccagcggagggctgtccagggccgacgaaagaggttcgacgtactgctcgccgagcataagaataaaacccgcgagaaggagttaatcagacaccctgattctcagcaacctccgcagccacttagagatccacacccagctccgcctaggacatcccaagaaccccaccagaaccctcacggtgttattcctagtgagtccaagccctttgtggctagcaagcctaaaccacatacgccctcgctgcccagacccccagggtgtccagcacagcagggaggctcggcgccaatcgatccccctccagtgcatgaaagccctcacccccctctcccagctaccgaacctgcgtcgagattgtcttccgaggagggcgaaggcgacgacaaggaagaatctgtggagaaacttgattgccactatagtggtcaccaccctcagcccgcttcgttctgtaccttcggttctagacagatcggcagaggatattacgtatttgatagcaggtggaatagactccgttgcgcactaaatctgatggtggaaaaacaccttaatgctcagctgtggaagaaaatccctccagtccctagtacaaccagtcccatcagtactaggatacctcatcgcacaaactcagtccccacatctcaatgcggagtcagttacctggccgcagccaccgtgtcgacaagccctgtgctcctctcaagcacatgtattagtccaaattctaagtctgtgccagcgcacggtacaactctaaacgcccagccagctgcatctggggcaatggatcctgtgtgcagtatgcagtcgcggcaggtgtccagctccagcagctctccctcgacaccctccgggttgagcagcgtaccctcatctccgatgtctcgtaagccccagaaactcaaaagctcaaagtcactgagacctaaggaatcttcagggaattcaactaactgtcagaatgcttcttctagcaccagtggaggctccggcaaaaaaaggaagaatagcagcccactactggttcactcttcgagctcaagctcttcatcgtctagttcgagccatagcatggaaagcttccggaaaaactgtgtagcacacagcgggcctccttacccgagcacagtaacatctagccatagcattggtttgaactgcgtgacgaacaaggctaatgcggtcaatgtgaggcatgaccagtcaggtagaggaccgcctaccgggagccccgctgagagcatcaaacggatgagtgtcatggtgaattcctctgatagcacactctccctgggcccttttatccaccaatcgaacgaacttcctgtgaatagccacggatcttttagccactcccatacacctttggacaaattaattggcaagaaaaggaaatgttccccatcttcatccagcatcaataatagctccagcaaacctaccaaggtagccaaggtaccggcagtcaacaacgtgcacatgaaacatactggcaccattccaggcgctcagggactgatgaattcttcccttcttcatcaaccaaaggcgaggccatag

SEQ ID NO: 215051 - DNA, 2838 bp, synthetic construct
  misc_feature 1..2838: note = Description of Artificial Sequence: Synthetic coding sequence
  source 1..2838: mol_type = other DNA
atgtcagagagagcagctgatgacgtacgcggtgagcccaggcgcgcagcagctgcggcaggaggggcagctgcagcagcggctagacaacagcaacagcagcaacagcagcagcagccgcctcccccacagccccagcgtcagcaacaccccccacccccaccgagacgtaccaggccagaggatgggggaccaggcgcagcgtctacatccgctgcagctatggcaactgtaggagaacggagacctttgccttctccagaggtgatgctggggcagtcttggaatttgtgggtcgaagcatccaaactccctggcaaggatggcaccgagttagacgaatctttcaaagagttcgggaagaatcgcgaggtaatggggctctgccgggaagacatgcccatcttcggcttttgtcctgctcacgacgacttctatctcgtggtttgcaacgactgtaatcaggtcgttaagccccaggctttccagagccactatgagcgcaggcacagcagctcgtctaaacctccactcgccgtgccgcctacgagcgtattctccttcttcccaagtctttccaagtctaagggcggtagcgccagcggctctaaccgctccagctccggcggtgtgctaagtgcgtcttcgtcctcgtccaaactgttaaaaagccccaaggaaaaactccagttacgtgggaacacaagacccatgcatccaattcagcagtcccgcgtgccacatggtcggattatgaccccaagcgtgaaagtcgaaaaaatccacccgaaaatggatgggacactactgaagtcagccgtcggtcctacatgtccggctacagtgtcctcactggtgaaacctggtctgaattgcccctccatcccaaaaccaactcttccatccccagggcaaatcctgaatggaaaaggcctgcctgcaccccctactctagagaagaaaccagaagataattcgaacaatcggaaattcctgaataaacgactcagcgagcgggaatttgatcctgatatccattgtggcgttatagatctggacactaagaagccctgcacaagaagcctcacatgtaaaacccattcccttactcaacgaagagccgtccagggacggagaaagagatttgatgtgctcctcgcagagcacaagaacaaaacaagggagaaagagctgatccggcatcccgattcccagcagcctccccagccgttgagggacccccaccctgcgcctccacgcacttctcaagaaccacatcagaatccacacggagtcatcccttccgaatcgaaaccttttgttgcttcgaagcccaagccccacactccatcactgcctcggcctccaggatgccccgcacagcagggtgggagtgctccaattgaccctccccctgttcacgaatcaccccatcctcccctaccggctaccgagcccgcttctagattatcctctgaggaaggggagggggatgacaaagaggaatccgtagaaaaactcgattgtcattattccggccaccacccacagcccgcatccttttgcacctttgggtctcgacagatcggaaggggatactacgtcttcgattcaagatggaaccgtctgagatgtgctctgaatctgatggtggagaaacacctcaatgctcaactgtggaaaaaaattccacctgtcccatcgacaacttctcctatcagtacaagaatcccacaccgtacaaacagcgtgccgacttcccaatgtggcgtgtcatatttggccgcagcaactgtgtctacttcccctgtcctgctcagttcaacctgtatctcacccaattctaagtccgtaccagcccatggaactacattgaatgcgcagccagccgctagcggtgccatggaccctgtgtgctctatgcaaagtagacaggtgtccagctcctctagttcaccgtcaactccgagcggcttgtcaagcgtgcccagctcaccgatgagccgtaagcctcaaaagttaaagtcctcaaagagcctcaggccgaaggaatcgtctggaaacagtactaactgccagaatgcgtcatcaagtaccagcggcggatccgggaagaaacggaagaactccagtcctttgctggtgcatagctcctcaagctcgagcagtagctcatctagcagccacagcatggagtccttcaggaagaattgtgtggctcatagtggacccccataccccagtactgtaacgagctcacactctatcggcttgaattgtgtgacaaataaagccaatgctgtcaatgtgcggcatgaccaatccgggagaggacctcccacagggagtcctgccgagagcattaaacgcatgtcagttatggtcaactcctcagatagtacccttagcctgggaccattcatacaccagtccaatgagctacctgtgaattctcatggaagtttcagtcattcccataccccactggataaactgatcggcaaaaagcgtaagtgtagcccttcatcttccagcatcaacaattcaagcagcaagcccaccaaggtggcgaaggtgcccgctgtgaataacgttcacatgaaacatacaggcacaattcccggtgctcagggcttaatgaacagctcacttttgcatcaggacatttcatccccatgtcttagaacgggtatcagcgccactagtccccagtcaccagacctcaagtccaaaggcactagcctgaccgccgaaaactcaaccgggaggaataacgccgacacatttgaggacaagctgcacctccatagcgcactgtggacgccacgatgtctttag

SEQ ID NO: 215052 - DNA, 393 bp, synthetic construct
  misc_feature 1..393: note = Description of Artificial Sequence: Synthetic coding sequence
  source 1..393: mol_type = other DNA
atgtcagaacgcgcagctgatgacgtgcgaggagaaccaagacgtgcagcagccgcagcaggcggagccgcagccgcagctgcacggcagcaacagcagcagcaacaacaacagcaaccacccccaccccagccacaacgccagcagcaccccccacctccacccagacgcaccagaccggaggacggaggtcctggggctgcctcgactagcgccgcagctatggccacagttggggagcgtcgaccactcccgagtccggaggtcatgctgggacaaagctggaacctatgggtagaggcttccaaactgccagggaaagatggagaccggatcggcagaaaattccaaggcgtctggaaccgagaggtcatgggactgtgccgggagtag

SEQ ID NO: 215053 - DNA, 2244 bp, synthetic construct
  misc_feature 1..2244: note = Description of Artificial Sequence: Synthetic coding sequence
  source 1..2244: mol_type = other DNA
atggagggctctaagacacccctgcagagtagtccctccgcgcaggaactcaaggcccctctggagagaagacattcctccagcagcaagcctccgctggccgttcctccaacatctgtcttttccttcttcccctccctttccaagtcaaaaggcggatcagcgagtggatcgaacagaagcagttctggcggagtcctttcagcaagcagctcctcctctaagctcttgaagagccctaaggagaaactgcagctgcgtggtaatactagaccaatgcacccgatccagcagtcccgcgtcccccatggaaggataatgactccgtcggtcaaagtggaaaaaattcaccctaagatggacggcacactgttaaagagtgcggttggcccaacgtgcccagccaccgtttcatcccttgtgaaaccgggtctaaattgtccttcaatcccaaaacccactctgccatcaccaggccagattctcaatggcaaaggactccctgctcctcccacgttggagaagaaacccgaggacaactcgaataaccgcaaatttctgaacaaaagactctctgagcgtgaatttgatcctgacatccattgcggagtcatcgacctcgataccaagaagccctgtacgaggtctctcacttgtaagacccattcactcactcagagaagagctgtacaggggagaaggaaacgcttcgatgttctgctagcggagcacaagaacaaaactagggaaaaggaactaatccggcaccccgatagccaacaaccccctcagcccctgagggatccccatcctgctcctcccagaacgtctcaagagccccatcaaaaccctcacggtgtcatccccagcgagtctaaaccttttgtagctagcaaacccaaacctcatactccgtccctcccaagaccccctggatgtccagcgcagcagggaggatctgctcctatagaccctccaccagttcatgaaagccctcatcctccacttcccgctactgagcctgcaagccgcctttcaagcgaggagggagagggagacgacaaggaggaatccgtcgagaaactggactgtcattacagcggccaccacccccaaccagcttcattttgcacctttgggtccagacaaattggcagaggttactatgtttttgacagcaggtggaacagactacggtgcgcattaaatctgatggtggagaagcacctgaacgctcagctgtggaagaagatccctccagtccccagcacgacgagtccaataagcacccggattccacatcgtaccaattctgtgccaacctcccagtgtggagtcagttacttggcagcagccactgtgagtacgtcaccggtgctgttgtcttcaacttgtatctcaccgaatagcaagagcgtacccgctcacggcacaacgctgaacgcacagcccgctgcctcaggagctatggaccccgtgtgttctatgcaaagccgtcaggtttcgtcatcaagttcttccccctcaaccccaagtggtctgtcatctgtccccagctcacccatgagccgaaagcctcagaagcttaaatcttctaagtccctgaggccaaaggagtcttccggaaacagcacaaactgtcagaatgccagctcctccacgtccggaggctcagggaaaaaaagaaagaatagcagcccacttttagtgcactcctctagctcctccagctcgtcttcttcctcaagccactccatggaatcttttcgaaagaattgtgtcgcacacagcggcccaccctacccatctactgttacctcttctcacagtattgggttgaactgcgtgaccaacaaggccaacgccgtcaacgttagacacgaccagtccgggaggggccctccgacgggtagtccagctgagagtataaagagaatgtctgttatggtcaattcctccgacagcaccctcagcttgggcccttttattcatcagtccaacgagttgccagtcaactcccacggcagcttctcccattcccacaccccgctagacaagctgatcggcaagaagcgaaagtgctccccgtccagttcaagtattaacaatagctcaagtaaacctactaaggtggcgaaggtgccagccgttaacaatgtacatatgaaacacacaggtacaatacccggagcccagggcttgatgaacagctccctccttcatcagcctaaggcaagaccatag

SEQ ID NO: 215054 - DNA, 663 bp, synthetic construct
  misc_feature 1..663: note = Description of Artificial Sequence: Synthetic coding sequence
  source 1..663: mol_type = other DNA
atggaggaggatgagttcattggggaaaaaacctttcagcggtactgcgcagaatttattaaacattcacaacagatcggcgattcgtgggaatggcgtccatcaaaggattgctctgatggttatatgtgcaaaatccatttccagattaaaaacgggagcgttatgtcccatttgggggctagcactcatggacagacttgtctgcccatggaagaggctttcgagttgccactggatgattgtgaagtgatcgaaactgcagccgcatccgaagtaataaagtatgaatatcatgtgctttactcctgtagctaccaggtcccggtgctgtacttccgcgcatcttttctggatggacggccactgacgctcaaagatatttgggagggcgtgcacgaatgttacaaaatgaggctgcttcagggcccttgggacactatcacccaacaggagcaccctattttaggacagcccttcttcgtactacatccctgcaaaacaaatgaattcatgacgccagtgctcaagaacagccaaaaaatcaataagaacgtgaactacattacctcttggcttagcatagtggggccagtcgttggtctcaatctcccattgtcttacgctaaagcgacctcacaggatgagagaaatgtcccctag

SEQ ID NO: 215055 - DNA, 378 bp, synthetic construct
  misc_feature 1..378: note = Description of Artificial Sequence: Synthetic coding sequence
  source 1..378: mol_type = other DNA
atggaggaggacgagttcatcggcgagaagacctttcagcgctattgtgcggagtttatcaagcattcccaacagataggagatagctgggaatggcgtcccagcaaggattgcagcgacggttatatgtgcaagatacactttcaaatcaagaacggaagcgtcatgtcacacctgggagcctccacacatggccagacctgcttacccatggaggtgaaatcctgctctgtgacacaagcaggagtgcaactccgagatttatcttccctgcagcctccgccttccggctttaagcagttttcttgcctgtctctaccgagtaactgggattatcgcggttccccgctccatctcgcaaatttcctctacttctag

SEQ ID NO: 215056 - DNA, 663 bp, synthetic construct
  misc_feature 1..663: note = Description of Artificial Sequence: Synthetic coding sequence
  source 1..663: mol_type = other DNA
atggaggaagatgaatttattggagagaaaactttccaaagatactgtgcagagttcataaaacattctcaacagattggagacagttgggagtggcgcccatctaaagattgctcggatggttacatgtgcaaaattcatttccagattaaaaacggctctgtgatgtcacatctaggcgcttccactcatggtcagacctgtttacctatggaggaggcctttgagctgccactagacgattgcgaggtgatcgaaacagccgctgcctccgaggtgatcaaatacgagtatcatgtgttatactcttgctcttaccaagtgccagtgctgtattttcgcgctagcttcttggatggcagacccttgacccttaaagatatctgggaaggcgtacacgaatgttataagatgcggcttctgcaggggccatgggacaccatcacacaacaagaacacccaatcctgggacagccctttttcgttctgcacccctgcaaaacaaatgagtttatgaccccagtgcttaaaaatagccagaagattaataagaacgtgaactacattactagttggttgtcaattgtggggccagtggtagggcttaacctgccactgagttacgctaaggctacatctcaagatgagagaaacgtaccctag

SEQ ID NO: 215057 - DNA, 882 bp, synthetic construct
  misc_feature 1..882: note = Description of Artificial Sequence: Synthetic coding sequence
  source 1..882: mol_type = other DNA
atggacaggcgagtgaaactctgggaagtgtttggcgagaagtgcgagttcaaggggtctctaagtggatcaaacgccggaattacctctatcgagtttgacagcgctggcagctaccttctggcggcaagtaatgatttcgcatctcgaatttggaccgtagacgactatagactgcggcacaccctaactgggcacagcggtaaggtcctgagcgccaagtttctccttgataacgcgagaatcgtatccggctctcacgatcggactctcaaactgtgggacctgcgcagtaaggtctgcataaaaaccgtgttcgcgggttccagctgtaatgacatcgtgtgcacagagcagtgcgttatgtccggccactttgacaagaagattagattctgggatattcgaagtgaaagcattgtgcgagaaatggagttacttgggaaaattaccgccttggatttgaatccagaaaggaccgagctcctttcgtgttccagagacgacttactgaaagtcattgacctgagaacaaacgctatcaagcaaacattcagtgcgcctggattcaagtgcggctctgactggactcgcgtggtgtttagccctgacgggtcttatgtagctgcgggttctgctgagggctcactgtatatttggagtgtgctgaccggtaaggtggagaaagtgttgtccagctcaaccgcacaccccagtatgcgctggcgagggcgtccactggcccgaacactaagcgtgtggaccaaggacgcaaagctgtgttgtgggcatagcacagacggggctttacgagccggaaggacgccggtgccttcctcagaagaggcccatggcctcttgcagccgtgtccagggagatag

SEQ ID NO: 215058 - DNA, 1335 bp, synthetic construct
  misc_feature 1..1335: note = Description of Artificial Sequence: Synthetic coding sequence
  source 1..1335: mol_type = other DNA
atgtcaagtggcctgcgggcagctgatttccccaggtggaagcggcacatatcggagcagctgagacggagagatcgcctccagagacaggcctttgaagagattatactgcagtacaacaagcttctagaaaagtcagacctacacagcgtgttagctcaaaagttgcaggccgaaaaacacgacgtaccaaataggcacgaaatcagacggcgtcaagcgcgtctgcaaaaggagctggcagaggccgcaaaagaaccattaccagtagaacaggacgacgacatcgaggtgatagtggatgagaccagtgatcatactgaagaaacttcacctgtcagggccattagcagagccgcaacacgtcggagcgtcagctcatttccagtacctcaagataatgttgatacacaccccggttccggcaaagaggtgagggtcccagcgactgcactgtgcgtatttgatgctcacgatggggaagtgaacgctgtacaatttagccccggtagtaggctcctagcgacaggaggaatggacagacgggtcaaattgtgggaagtctttggcgagaagtgcgaattcaaggggagtctctcaggctctaacgccggaatcacctccatagagtttgactctgccggatcatacctgttagcagcctccaatgacttcgcctcacgcatatggaccgtggacgattaccgtctaaggcacaccttaactgggcactcgggtaaagtgctgagtgctaagttcctgctggacaacgccaggatagtcagcggttcccatgatcgtacactgaagctgtgggacttgcggtctaaagtgtgcattaagactgtgtttgccggaagttcatgtaacgatatcgtctgcacagaacagtgcgttatgtcaggccacttcgataaaaagattcgcttctgggatatcagatcggagagcattgtaagggagatggaactcctggggaaaatcacagcgctagatcttaacccggaacgcaccgagctcctatcctgttcgcgtgatgacctactcaaggtaatcgatctaaggacgaatgccatcaaacaaactttttctgctccaggattcaagtgcggctctgactggacaagggttgttttctcgcctgatggtagctacgtagctgcaggttccgcagaaggttcactgtacatttggtccgtgctgacagggaaggtcgaaaaagtcctctccaagcaacattcatcaagcattaatgccgtagcctggtccccatccggtagtcacgtcgtgtcagtggacaaagggtgtaaggccgtgctgtgggcacagtattag

SEQ ID NO: 215059 - DNA, 1287 bp, synthetic construct
  misc_feature 1..1287: note = Description of Artificial Sequence: Synthetic coding sequence
  source 1..1287: mol_type = other DNA
atgtcctcgggactgcgagcggcagacttccctcgatggaaacggcacatttctgagcaactccgcagacgggatagactccagcggcaagcattcgaggaaatcattctacagtacaacaaactgctcgagaaatcagacctgcattccgtgttggcgcaaaagcttcaggcagaaaagcatgacgttcccaatcggcacgagatcagaagacgtcaggcccgactgcagaaagagctggcagaagctgctaaggaacccctgccagtggaacaggacgacgacattgaagtgatagtggacgagaccagtgatcacactgaagaaacgagcccagtgagagcgatctcacgcgctgccactaaacggctgagccagcccgcaggcggtctgctcgacagtattacaaatatcttcggaagacggtccgtctcttccttcccagtgccccaagataatgtggatacccaccctggatctggcaaggaggttcgggtccctgcaacagccctgtgcgtattcgacgctcacgatggtgaggtcaatgccgtgcagttctctcctgggataacttccatcgagttcgatagcgccggatcctacctattggccgcatcaaatgacttcgctagtcgcatctggacagtcgacgactaccggctgcgccacactctaaccgggcactccggaaaagttctgagcgccaagtttctcctggacaacgccaggatcgtcagtggcagccatgataggactctgaagctttgggacctgcgtagcaaagtgtgcattaagacagtattcgctggaagcagttgcaatgacatcgtatgcactgagcagtgcgtcatgagcggccacttcgacaaaaagatccgcttttgggatatccggagtgaatctattgtcagagagatggagctgctcgggaagattactgcactcgacctgaatcccgaaaggactgagctgctgtcctgcagccgggacgatctgctcaaagtgatcgacctaagaacaaatgctatcaaacagacattcagcgctccaggattcaagtgtggtagcgattggacccgcgtagtgtttagcccagatggatcctacgtagccgctggaagcgcagagggcagtttgtacatctggtcagtcctgaccggcaaggttgagaaggtccttagtaaacagcacagctcaagcatcaatgcagtggcttggagtcctagcgggtcccatgttgtctccgtagataaaggatgcaaagctgtcttgtgggcccagtactag

SEQ ID NO: 215060 - DNA, 1824 bp, synthetic construct
  misc_feature 1..1824: note = Description of Artificial Sequence: Synthetic coding sequence
  source 1..1824: mol_type = other DNA
atgagcagcggcctgagggccgcagactttccccgatggaagcggcacatcagcgaacagctgcggaggcgtgacagactgcaaaggcaggcatttgaggaaattattctgcagtataataagctcctggagaagagcgacctgcacagtgttcttgctcagaagcttcaggcagagaaacacgacgtgcctaacagacacgaaatctcgcccggacacgacggaacctggaacgacaaccagcttcaggagatggctcagctgcgtataaagcatcaggaggagctgaccgagctccacaagaagaggggagaactagctcagctggtcattgatttaaacaaccagatgcagagaaaagacagagagatgcaaatgaacgaagccaaaatcgcagagtgcctccagacaatcagcgatctggagactgaatgcttggatctccgaactaagctgtgcgatttggagcgggcaaaccagactcttaaagacgagtacgacgccctgcagattactttcacggctctcgagggcaaactgcgaaaaacaactgaggaaaatcaggagcttgtgacgagatggatggccgagaaggctcaggaggcaaatagactgaacgctgagaacgagaaggacagtcgacggcgacaggcacgactgcagaaggagctcgctgaggctgccaaagaaccactgccagtggagcaagatgatgacatcgaggtcatcgtggatgagacatctgaccacactgaggagacctcacccgtcagagccattagccgtgccgcaaccaaacgcctctcacagcctgccggaggcttgctggattctatcacaaatatctttgggagacgcagcgtgagtagtttccctgtacctcaagataacgtcgacactcatccaggttccggtaaggaggtcagagtgcccgctaccgccttgtgtgtgttcgacgcacacgatggcgaagtgaatgccgtacagttttccccaggttcaagactgctcgctacagggggaatggatcggcgagttaagctctgggaggtgtttggcgagaagtgcgagtttaagggatctctgagcggttcaaatgccggtattacgagcatagaatttgactcagccggatcataccttctggcagcctcaaatgatttcgcctctagaatctggactgtggatgactaccgtctgcggcacaccttgacagggcactctggtaaggtcctgtctgcaaagttcttgctggacaacgcacgcatcgtctccggaagccacgaccggactctaaaattatgggatctccgcagcaaggtctgtataaaaacagtgtttgccggatcatcctgtaacgacatcgtgtgcacagagcagtgcgtaatgtccggacacttcgataagaagatccggttctgggacataagaagcgagtcaattgttagggaaatggaactgcttggaaagataactgcattggatctgaaccccgaacgcaccgaactgctgtcctgttcccgagacgaccttctcaaggtgattgacctgagaaccaacgcgattaagcagacttttagcgcaccgggttttaaatgtggctccgactggactagggtcgtgttctctcctgacggttcatatgttgctgccggttctgccgaaggtagtctgtatatctggagtgtcctgactgggaaggtggagaaggtcttaagcaagcagcattcttcatcaatcaatgcagtagcgtggagcccgtcaggttcacacgtggtgtccgtcgacaaaggatgtaaagcagtcttatgggctcaatactag

SEQ ID NO: 215061 - DNA, 1875 bp, synthetic construct
  misc_feature 1..1875: note = Description of Artificial Sequence: Synthetic coding sequence
  source 1..1875: mol_type = other DNA
atgagttcaggattacgggctgcggacttccctcggtggaaacgacacatatcagagcagttgaggcggcgagacaggctgcagcggcaggcctttgaggagattattctgcaatataacaaattactggaaaagtccgacctacatagtgtgctcgcccagaaactccaggccgagaagcacgacgtgcccaatagacacgagatttcgcctgggcatgacggtacgtggaatgacaaccagctccaggagatggctcagttgaggataaagcaccaagaggagttgactgagttacataaaaagcgcggtgagctggcccaactggtgatcgatctgaacaatcaaatgcagagaaaggacagagaaatgcagatgaacgaagccaagattgcagagtgcctgcagaccatatcagacctggagactgaatgtctggatctgagaaccaagctctgcgacctggaacgagcgaaccagactctgaaagatgaatacgatgccctgcagattactttcactgcgctggaaggcaaactccgtaagacaacagaagagaatcaagagttggttactagatggatggccgagaaagcccaggaagccaataggctgaacgctgaaaacgaaaaagactctaggagacgccaagctaggctccagaaagaactggctgaagccgcaaaagagcctctgccagtggagcaggacgatgatatagaggtgattgtggatgagacctctgaccacactgaggaaactagcccagtgcgagccattagccgtgcggctaccaaacggctctctcagcctgcaggcggactgttagacagtatcactaatatttttggtctctcagagtcccccctgctgggacaccatagctcaagtgacgcagcccgaagacggagtgtctcctcttttccagtgcctcaggacaacgtcgatactcatcccggatctggcaaagaggtgcgagtgcccgcaacggccctctgcgtttttgatgcacacgacggggaagtcaatgcagttcagttctccccagggtcccggttactggccaccggcggtatggaccggagagttaagttatgggaggtgttcggagagaagtgtgaattcaagggaagcctgagtggtagtaatgccggtattacttctatcgagttcgactccgccggatcttacctgctggccgcttcaaacgatttcgcctcaagaatatggaccgttgacgactatagactcaggcatactctgaccgggcactcaggcaaggtacttagtgcgaagttcctgctcgataatgcccgaattgttagtggctctcatgataggacactgaagctttgggatctcaggagtaaggtttgtatcaagaccgtgttcgccggaagctcgtgcaatgacattgtttgcaccgaacagtgcgtgatgagcggacacttcgacaagaaaattcgattctgggacattaggtctgagtccatcgtgagggaaatggagctccttgggaaaattactgctctggacctaaaccctgagcgtaccgagttattgtcgtgcagccgggacgatctgctcaaagtaatcgatctccgcacgaacgccatcaagcagacatttagcgcccctgggttcaaatgtggatcagactggacgcgggtggtgttttcacccgatggctcttacgtcgcggcaggatcggccgagggctctctgtacatctggtccgtgcttaccggcaaggttgagaaagtgctgagcaagcaacactcttcctccattaacgctgtggcctggtccccttctgggagccacgtagtttctgtagacaaaggatgtaaggcagtcctttgggcccaatactag

SEQ ID NO: 215062 - DNA, 1767 bp, synthetic construct
  misc_feature 1..1767: note = Description of Artificial Sequence: Synthetic coding sequence
  source 1..1767: mol_type = other DNA
atgtcctctggcctgagagcagcagactttcccaggtggaagaggcacattagcgaacaattgcgccgacgcgacagactgcagcgccaggccttcgaggagatcatcttgcagtataataagctgctagagaaatctgacctccattcggttttggcgcagaaactgcaagcggagaagcacgatgtgccaaatcggcacgagatcagtcctgggcacgatggcacctggaacgacaatcagctacaggaaatggcacagctgaggataaaacaccaggaggaactcactgaactgcacaaaaaacggggtgaactggcccaactcgtcattgatctgaacaaccagatgcaacgcaaggaccgagaaatgcagatgaatgaggccaagatcgcagagtgcctgcagaccatctctgacctggagacagagtgtcttgacctgagaacgaagctttgtgaccttgagcgcgctaatcaaaccctcaaggatgaatacgacgctctgcagatcacattcactgccctggaaggcaaattacggaaaaccaccgaggagaaccaggaactggtcacacgctggatggcagaaaaagcccaagaagccaatcgcctgaacgccgagaacgaaaaagattcccgtcgacggcaagcaaggctccagaaggaactggcagaagccgcaaaggagccgctccccgtggaacaggacgacgacattgaagttatcgtcgacgagactagtgatcataccgaggagactagtcccgttagggctatcagtcgcgcagcaacccggaggtctgtgtcttcctttccagtcccacaagacaacgtagacactcaccccggatctggcaaagaggtacgcgtaccagcgactgcactttgcgtttttgatgcccatgacggtgaagtgaacgcagtgcaattcagcccaggttcacgactgctggccaccggcggaatggaccgacgggtgaagctttgggaggttttcggtgagaagtgtgagtttaaaggaagcctgtccggttctaacgccggtatcacctccattgaattcgactcagccggaagttacctgttggccgcatctaacgacttcgcttccagaatttggaccgtggatgattataggttgcgccacacactcacaggtcactccggcaaggtgctttctgccaagtttcttctagacaacgctcgcatcgttagtgggtcccacgaccgcacgttaaagctctgggaccttagatctaaagtatgcatcaaaacagtgttcgctggcagctcttgcaatgacatcgtatgtaccgaacagtgtgtgatgagcggccactttgataagaagatcaggttttgggacatccgttcagagagcatagtccgagagatggagctactggggaaaataactgcactggatctcaaccccgagagaactgagctgctgagctgttctcgcgatgacttgctgaaagtcatcgacctgaggactaacgcaatcaagcagaccttcagtgcgcctgggtttaaatgcgggagcgattggacccgggtggtgtttagccctgatggatcctatgtggctgccggaagcgctgagggttccctctacatatggtccgtgttaacagggaaagtcgaaaaagtactttcaaagcagcactcttcctctattaacgctgtggcctggtccccttctggtagtcatgttgtgagtgtagataaagggtgtaaggccgtgctctgggcccagtactag

SEQ ID NO: 215063 - DNA, 2520 bp, synthetic construct
  misc_feature 1..2520: note = Description of Artificial Sequence: Synthetic coding sequence
  source 1..2520: mol_type = other DNA
atggcccaattcgataccgagtatcaacgcctggaagcttcatactctgacagcccaccaggagaggaggatttgctggtgcatgttgccgagggttccaagtctccgtggcatcacatagagaatttggatctgttcttttccagagtgtataacctgcatcaaaagaatggatttacatgcatgctgatcggagagattttcgagctgatgcagtttctgtttgtggttgcctttacaacttttctggtgagctgcgtagactatgatattctgtttgccaacaagatggtgaaccattctctacatcctactgaacccgtgaaggtgaccttgccagacgcattcctgcccgctcaggtgtgctcagcacgcattcaggagaatggctccctcattaccattctcgtgatcgctggtgtcttttggatccaccgcttgattaaatttatatacaacatttgctgctattgggagatacactctttctatctgcatgccttaagaattcctatgagcgcattgccttactgcacatggcaggaagttcaggccaggattgttcagacacagaaagagcaccagatctgcatccataaacgtgaactgacggagctggatatttaccaccggatactaaggttccagaattatatggtggctctggttaacaagtcactgctcccactccggttcaggttgcccggactgggtgaagccgtttttttcacccgcggactcaagtataactttgaactcatccttttttgggggcctggaagcctgttcctgaatgagtggtccctcaaagctgaatacaagcgcggtggtcagcgcctggagctagcccagcgcctcagtaaccgtattctttggatcggaatcgcaaatttcctgctgtgccccttgatcctgatttggcagatcctgtatgccttctttagttacgccgaagtccttaaacgcgagccgggtgccctgggcgcacggtgctggagcctgtatgggagatgttacctgcggcatttcaatgaactggagcacgagcttcagtcgcgtctgaataggggttataagcccgcatccaagtatatgaattgctttcttagcccactgctgacactgttggctaagaacggcgcttttttcgcgggaagtatcctcgctgtcctcatagcactgaccatttacgacgaggacgtgctcgctgttgaacacgtgctcactacggtgactctgctaggggtgactgtcactgtgtgccgcagtttcattcctgaccagcacatggtcttctgccccgaacagctgctgcgcgtcatcctggcccatatacactacatgccggatcactggcaaggcaatgcccatcgctctcaaacgagggatgagttcgcacagttgtttcagtacaaagctgttttcatactggaggaactactcagtcccatagtaactcctctcatactgattttctgcctccgcccacgggctttggaaataattgactttttccgaaatttcaccgtagaagtggtgggggtaggagacacctgttcttttgcacagatggacgttcgtcaacatgggcatcctcagtggctgtctgccggtcagactgaggcctccgtctaccaacaggcagaagacggtaaaaccgaattatcactgatgcatttcgcaataactaaccccggttggcagcctccacgcgagagtacagcgttcctgggatttcttaaggagcaagttcagcgcgatggagctgccgcatcactggcccagggagggctactacctgagaacgctctatttacatccatccaatccttgcagagcgagtctgaacccctgagtctaattgctaacgtcgtagctggcagttcctgccgaggcccaccactgcccagagacctccaaggctcccgtcatcgagccgaggtggcctcagcgttgcgttccttctctcccctgcaacccggtcaagccccaactggtcgcgcacactcaaccatgacaggttccggcgtggacgcccgaacagcgtcctcgggcagcagtgtatgggagggacaactgcagtccctggtgctctctgaatatgcttcaaccgaaatgagcctacatgccctgtatatgcatcaacttcataaacagcaagctcaggcagaaccagagcgtcacgtttggcaccggcgagaaagcgatgagtccggtgagagtgccccagatgaggggggagagggggctagagcgcctcaaagcatcccacgcagcgccagttacccgtgtgccgcaccccgtccaggagcccctgaaaccactgcactgcacgggggattccagaggaggtatgggggtataactgaccccggtacagtccccagagtgcccagtcacttctctcgcctgcccctcggtggctgggctgaggatggtcagtcagcgagtcgccatcccgagcccgtacccgaagagggctctgaggacgaacttccaccacaggtgcacaaggtgtag

SEQ ID NO: 215064 - DNA, 2520 bp, synthetic construct
  misc_feature 1..2520: note = Description of Artificial Sequence: Synthetic coding sequence
  source 1..2520: mol_type = other DNA
atggcgcagtttgacacagaatatcaacgcctggaggcctcctacagtgatagtcctccaggggaagaagatctgctcgtgcacgtcgccgaaggcagcaagtctccttggcaccacatcgaaaacctcgacctcttcttctctagagtctacaacttacatcaaaagaacggctttacctgcatgcttattggagagatcttcgagcttatgcagttcctatttgtggtcgccttcacgacctttcttgtatcgtgtgtagattacgatatccttttcgcaaacaaaatggtaaatcattctttgcaccccacggaacctgtaaaggtgactctgcccgacgcgtttctgccagcccaggtgtgtagcgccagaatccaggagaacgggtccctgattacgattctggtcatcgcaggcgtcttttggatccacaggcttatcaagtttatctataacatatgctgctactgggaaattcactccttttatctgcatgccctgcgcattcccatgtcagccctgccatattgcacgtggcaggaggtgcaagcaagaatcgtccagactcagaaggagcaccagatttgtattcataaaagagagctgaccgaacttgacatctaccatagaatcctgcgatttcagaattatatggtcgctctggtgaacaaatcactgcttcccctgagatttaggctccccggactgggcgaggccgtcttctttactcggggtttgaaatataattttgaactgattcttttttggggtcccggtagcctctttctgaacgaatggagcctgaaggctgaatacaaacggggtgggcagcggcttgaactggcccaacggttaagtaaccggattctttggataggcattgcaaatttcctcctctgtccacttatcctcatctggcagatcttgtacgcattcttctcgtacgcagaagtgcttaagcgtgagcccggtgcgttaggagcgagatgttggtcactgtacggcagatgttatttgcgacacttcaatgaattagagcatgagttgcagagccgccttaacaggggctacaaacccgcaagcaagtacatgaactgtttcctgagtcccctgctgaccctgctggctaaaaacggggcattctttgccggatccatattggcagttcttatcgcgctgaccatctatgacgaggacgtgctggccgtcgagcatgtactgaccaccgtgacactcctgggggtcactgtaactgtgtgtcggagttttattcctgatcagcatatggtcttttgtcctgagcaactgctgcgggtcatactggcccacatccactatatgccagaccattggcagggcaacgcccatcggtcacagaccagggacgagtttgcacaactctttcagtacaaggccgtattcatcctcgaggagctgctctctcccatagtgacgcccctcattctaatcttctgcttgaggccgagagcattggagattatcgacttttttcggaattttaccgtcgaggtggtcggagtcggcgacacctgttcgttcgcccaaatggacgtgagacagcacggccacccacagtggctgtctgccggtcagactgaggcgagcgtgtaccaacaggcggaagacgggaagacagagctgtccctgatgcattttgctatcacaaacccaggctggcagcctcctagagaaagcacagccttcctggggttcttgaaggaacaggtgcaacgagacggtgccgctgcctcactggcccaggggggactgctgcctgagaacgcgctgtttacctcaatacagtctctccaatctgagtccgagcccctttctttgattgccaacgtcgtggctggcagttcatgccgagggcctccgttgcccagagatttacagggcagccgtcatagagctgaggtggcgtccgccctgcgatcattctcgcccctgcaaccaggtcaggcccctacaggtagggcccattccaccatgactggctccggagtggatgccaggaccgcctcctccgggtcttccgtttgggaaggacagctccaatccttggtgctcagcgaatatgcttccaccgaaatgtcccttcatgcattatatatgcatcagctccacaagcagcaagctcaggctgaacccgaaagacatgtatggcatcggcgagagagcgacgagagtggtgaatccgccccagacgagggtggagagggcgcaagagccccacagagtataccccgatcagcatcctacccttgcgcagcaccgcgaccaggcgctccagagacaacagccctccacggcggattccagcgacgatatgggggaataacggatcccggaacggtgccacgggtgcccagtcacttctcacgcctgcctctcgggggatgggcagaggacggacagtctgcatcgaggcatccggagccggttccagaggaagggtcagaggatgagttacccccacaggtgcataaggtgtag

SEQ ID NO: 215065 - DNA, 2337 bp, synthetic construct
  misc_feature 1..2337: note = Description of Artificial Sequence: Synthetic coding sequence
  source 1..2337: mol_type = other DNA
atgctcattggagaaatctttgagctgatgcagtttctgtttgtggttgcttttactacctttctggtcagttgtgtggattacgatatacttttcgcaaataagatggtgaaccactctctgcaccccaccgagcccgtgaaggtcactttgccagatgcttttctcccagcacaagtatgttcagctcgcatccaggaaaacggaagcctgatcacaatactggttatcgctggcgtcttctggatccatcgcttaattaaatttatttacaacatatgctgttattgggaaatccactctttctatctccatgccctcagaataccaatgagcgcgttgccttattgcacctggcaagaggtgcaggctcggattgttcagactcagaaagaacaccagatatgcattcataagagagagttgacggaactagacatataccaccggattctgagatttcagaattatatggtggccctggtcaataagagtctgctgcctctacgtttcaggctcccagggctgggtgaagccgtgttcttcactaggggactgaagtataactttgaactcatactgttctggggccctgggtccttatttttaaatgagtggagcctgaaagcagagtacaaaagaggaggccagagactcgaattggcacagcgactgtctaaccggatactatggatcggcatcgctaacttcttgctgtgcccactgatcttgatttggcagatcctgtatgctttcttctcttatgctgaggtcctcaagcgggagccaggcgctctgggcgctcgatgctggagcctgtacggcaggtgctaccttcgccactttaacgagctggaacatgagcttcagagtaggctgaatcgtgggtacaagccagcttccaaatacatgaattgctttctgtcgcctctgcttaccctgttggccaagaatggagccttctttgcagggagcatactggcggtgctcatagctttaactatttacgatgaagatgtgctagcggttgaacacgtgctcaccactgttaccctcctcggggttacggtcactgtttgccgatcgttcattcctgatcagcatatggtgttttgccccgaacagttgctgagagtgatactcgctcacatacattatatgccagatcactggcaaggaaacgcgcaccggagccagactcgcgacgagtttgcccagctgttccagtacaaggctgtgtttatccttgaagagctcctcagcccaattgtgacacccctaattctgatcttttgtctgaggcctcgagccctggagataatcgacttcttccgaaacttcaccgttgaagtcgttggggtaggggatacgtgctccttcgctcagatggacgttcgacaacacggccacccccagtggctctctgcgggacagactgaagcaagtgtgtatcagcaggctgaggacggtaaaacggagctgagcctgatgcattttgcgattacaaaccccggatggcaaccccctagggagtccaccgcattcctggggtttctaaaggagcaggtccagagggacggcgcagcagcttcgctcgcacaggggggtcttctgccggaaaatgctctatttaccagcattcagtcattacagtctgagagtgaacccctatctctcattgccaatgtcgttgccggaagctcttgcaggggccctcccctgccaagagacttgcaggggtctaggcatcgagctgaggtggcctctgctctgcggtctttttcgccactccagcccggacaggcacctacaggcagggcgcatagcaccatgactggcagcggcgtggatgctcgaacagcttcctccggcagcagtgtgtgggagggtcagctccagagtcttgtactctccgagtacgctagcaccgagatgagtctccatgctctttatatgcatcagctccacaagcagcaggcacaagctgagcccgaaagacacgtgtggcatagacgagaatcggacgagagtggcgaaagcgcccctgacgaaggaggcgagggagctcgcgcacctcagagtattccacggagcgcctcttatccctgtgcagcaccgagacctggcgcaccggagactacagccctccacggtggctttcaacgtaggtacgggggtatcacagatccgggaaccgtgcctagagtccctagccacttcagtcgcctgccactgggtggctgggcggaagacggacagtccgcatcccggcatcccgaacccgtacccgaagagggaagtgaagatgaactgcccccacaggtgcacaaagtgtag

SEQ ID NO: 215066 - DNA, 2520 bp, synthetic construct
  misc_feature 1..2520: note = Description of Artificial Sequence: Synthetic coding sequence
  source 1..2520: mol_type = other DNA
atggcgcagtttgatactgagtaccaacgcttggaagcctcctattctgatagtccaccaggggaggaagatctgctggtccatgtcgcagaaggttccaagagtccttggcaccatatagagaatcttgatctgtttttctcacgtgtatacaatctccatcagaagaacggatttacatgcatgctgattggcgagatattcgaactcatgcagtttctatttgttgtggccttcaccaccttccttgtgagctgcgtcgattacgatattttgtttgccaacaagatggttaatcactctctccacccgacggagccagtgaaggttacccttcccgatgctttcctgccagcccaggtgtgcagcgctcgtatacaggaaaatggtagcttgataacaatcctcgtgattgctggcgttttctggattcaccgactcataaagtttatctataacatatgttgttattgggaaattcactctttctatctgcacgctctgaggatccctatgtccgctctcccctactgtacctggcaggaggtgcaggcccgtatcgtacagacgcagaaggagcatcagatttgtattcacaaaagggagctgactgagctcgacatataccacagaatcctgcgattccaaaattatatggtggccctagtgaacaagtccttgttgcctcttaggttccgtctgcccggattgggtgaggccgtgttcttcacccggggactgaagtataatttcgagcttattctgttttgggggcctggctctcttttcttgaatgagtggagcctgaaggcggagtacaagcgaggcggtcagagactagagctggcgcagcgtctgtccaaccggatcctctggatcgggattgctaatttcttactctgtcctctcattctgatttggcagatcctttatgctttcttctcatacgcagaggtgctgaagcgcgagccaggtgcattaggcgctaggtgctggtccttgtatggacggtgctacctgcggcacttcaacgagctggagcacgaacttcagagtaggctgaaccgtgggtataagcccgcatccaagtacatgaactgcttcctgtcccccctcctcaccctgctggccaaaaacggggcattttttgccggtagcattttagctgtattaatcgccctcactatttatgatgaggacgtgctcgccgtggaacacgtgttaactacagtcacattacttggcgtgacagtgaccgtctgcagaagctttattccggaccagcacatggttttttgtccagaacagcttttgagagtgattctggcacatatccattacatgcctgaccattggcaggggaacgcccataggagtcagacaagagacgagttcgcccagttgtttcagtataaagccgtttttatccttgaggagttactgagccccattgtgacccctttgatcctgatcttttgtctgagaccaagagcgctggaaatcatagacttctttcgcaatttcacggtagaggtggtgggcgtaggggatacgtgcagctttgctcagatggatgtgcgacaacatgggcacccccaatggctaagtgcaggccagaccgaggcgagcgtttaccagcaggccgaagacggtaagactgaactctctctgatgcactttgcaattacaaaccccggttggcagcctcctcgggagtcaaccgcttttctggggttcctgaaagagcaagtgcagagggatggagcagcagcaagcctcgctcaaggaggacttttacccgagaacgcactcttcacaagtatccaaagcctgcagagcgagtccgagcctctctcgcttatcgccaacgtggtcgcaggttcttcctgtcggggacctccactgcccagagatttgcaaggcagtcgacatagagccgaagttgcttcggccctgagaagcttttctccattgcagccaggtcaggcacctacaggacgagcacacagcacaatgacagggtctggggtcgacgccaggactgccagttctggcagttctgtgtgggagggtcagctccagtcgctggttctgtccgaatacgcctctaccgaaatgagtcttcatgcactttatatgcaccagctccacaagcaacaggctcaggcagagcctgagaggcatgtatggcaccgacgggagtccgacgagagtggagagtcagcccctgatgaaggaggcgagggagctcgggcaccccagtctatccccagatccgccagctacccatgcgccgcacccagacctggcgcaccagaaactaccgccttgcacgggggatttcagaggcgttatggaggcattactgatcccggaacagtcccgagagtgccctcccatttttcaagactgccattgggtgggtgggccgaggacggtcagagtgccagccgacaccctgaaccggtgcccgaagagggaagcgaggacgagctccctccccaggtgcacaaggtgtag

SEQ ID NO: 215067 - DNA, 510 bp, synthetic construct
  misc_feature 1..510: note = Description of Artificial Sequence: Synthetic coding sequence
  source 1..510: mol_type = other DNA
atggcccagttcgataccgaatatcagcggctcgaggcaagctactctgattcgccaccaggagaggaggatttgctcgtgcatgtcgcagaaggctcaaagtccccctggcaccacatcgagaatctggacctcttttttagtcgggtgtacaatctgcaccaaaagaacggattcacgtgcatgctgattggggaaatttttgaactgatgcagtttcttttcgtggttgctttcaccacattcttagtatcctgcgtggattacgatatactgttcgcgaataagatggtcaaccattcattgcatcctacagaaccggttaaggtgacccttccagacgcctttctgcctgctcaggtgtgcagcgctaggatacaagaaaacggcagtcttatcacgatcctggtgattgcaggcgtcttctggattcatcgccttatcaaatttatttataacatttgttgctactgggaaattcacagcttctacctccacgccctgcgatag

SEQ ID NO: 215068 - DNA, 435 bp, synthetic construct
  misc_feature 1..435: note = Description of Artificial Sequence: Synthetic coding sequence
  source 1..435: mol_type = other DNA
atggcccaattcgacaccgagtatcagcgattggaggcttcatatagtgactctccacccggtgaggaagacttactggttcacgtggccgaggggtcaaaaagtccctggcaccacattgagaatctggatctcttcttcagccgcgtgtacaatcttcatcaaaagaacggattcacctgtatgctgattggggagatatttgagctgatgcaatttctcttcgtagtagcctttaccacattcctagtgtcatgtgtggactatgacatcctctttgccaacaagatggtgaaccacagcctccaccctaccgagcctgtgaaagttacactccctgacgcgttcttaccagcacaggtctgttccgctcggatccaagaaaacggcagcctaattacaatcttggtcatcgctggagtcttttggatctag

SEQ ID NO: 215069 - DNA, 282 bp, synthetic construct
  misc_feature 1..282: note = Description of Artificial Sequence: Synthetic coding sequence
  source 1..282: mol_type = other DNA
atggcccaatttgacacagaatatcagaggctagaagcatcctattctgactcaccgcctggcgaggaggacctgctcgtgcatgtcgcagaaggctccaagtccccatggcaccatatcgaaaacctggatctgtttttcagccgggtctataatcttcaccagaagaatggcttcacctgcatgctcattggtgaaattttcgagctaatgcagtttctctttgttgtggcatttacaacttttctggtgagctgcgtggactacgacatcctcttctag

SEQ ID NO: 215070 - DNA, 567 bp, synthetic construct
  misc_feature 1..567: note = Description of Artificial Sequence: Synthetic coding sequence
  source 1..567: mol_type = other DNA
atggctcagttcgataccgaatatcaacggctggaggcatcttacagcgacagccctcctggtgaagaagacctccttgtgcacgtagctgaaggatcgaaatcaccttggcatcacatcgaaaatttggatctgtttttctccagagtttataatctccaccagaaaaacggcttcacatgcatgctaatcggcgaaatatttgagctgatgcagtttttgtttgtcgtcgcttttacaactttcctggtcagttgtgtggattatgatatcctgtttgctaataaaatggttaaccactcccttcacccgactgagcccgtaaaagtgactttgcccgatgcattcctgcctgctcaagtgtgctccgcacgaatccaggaaaacggaagcctgattaccatactcgtgatagcaggtgtgttttggatccatcgactcataaagttcatttacaatatttgttgttattgggaaattcattccttctatctacacgctcttaggatccctatgtccgcattgccctactgcacgtggcaggaagtgcaggcacggattgtctag

SEQ ID NO: 215071 - DNA, 396 bp, synthetic construct
  misc_feature 1..396: note = Description of Artificial Sequence: Synthetic coding sequence
  source 1..396: mol_type = other DNA
atggcccagttcgacaccgagtaccagcggctggaagcgtcttattccgattcccctcctggcgaagaggatctactcgtgcacgtggcagagggttcgaaatccccctggcatcatatcgagaatctggatctgttttttagtagagtttacaatctgcaccagaagaatggattcacttgcatgctgatcggcgaaatttttgaactgatgcaattcctcttcgtggtggcttttactacctttctggtaagttgtgtcgactacgacattctgtttgccaacaagatggtcaatcactcgctccatcctactgaacccgttaaggttactctacccgacgccttcctgccagctcaggtgtgcagtgccaggattcaggaaaatggtagctag

SEQ ID NO: 215072 - DNA, 294 bp, synthetic construct
  misc_feature 1..294: note = Description of Artificial Sequence: Synthetic coding sequence
  source 1..294: mol_type = other DNA
atggcccagtttgacaccgaatatcagcggctggaggcgagttacagtgatagtccacctggtgaggaagacctgctcgtgcacgtcgctgaaggcagcaagagcccatggcatcacatagaaaacttagacctgttcttcagtcgggtatacaacctgcatcagaaaaacggctttacttgtatgctgatcggagagatttttgagctaatgcagtttctctttgttgttgcttttaccacttttttagtaagctgcgtcgactacgacatcttgttcgccaataaaatgtag

SEQ ID NO: 215073 - DNA, 519 bp, synthetic construct
  misc_feature 1..519: note = Description of Artificial Sequence: Synthetic coding sequence
  source 1..519: mol_type = other DNA
atggcccaatttgacacagaataccagcgactcgaggcctcatactctgatagccctcctggagaggaggatctcttggtgcatgtggcagaaggctcaaaaagtccttggcaccatatcgaaaatctcgacctattcttctcccgcgtctataatctgcaccaaaagaatgggttcacctgcatgctgatcggggaaatcttcgagttgatgcagttcctcttcgtggtcgccttcacaacttttctcgtttcctgcgtggattacgatatcctctttgccaataagatggtgaaccattcactgcaccctacggagccggttaaggtcactctgccagatgcatttttgcccgcacaggtgtgtagcgcacgcatccaagaaaatgggtcactaattaccattctggtcattgcgggagtattctggatccaccgtttgatcaaatttatctacaacatttgctgctactgggaaatccattctttctatctccatgcactgcggatccccatgtag

SEQ ID NO: 215074 - DNA, 1662 bp, synthetic construct
  misc_feature 1..1662: note = Description of Artificial Sequence: Synthetic coding sequence
  source 1..1662: mol_type = other DNA
atggcaaaaaacagacgcgaccggaactcctgggggggttttagcgaaaagacctatgagtggagctctgaagaggaggagcctgtgaagaaggccggacctgtgcaggtactgatcgtcaaggacgatcattctttcgaactggatgagaccgcattaaataggattctgctgtcggaggctgtccgcgacaaggaggtcgttgctgtctccgttgccggtgcatttcgaaaaggaaagtcattcctgatggactttatgctgcggtatatgtacaaccaggagtcagtggattgggtgggtgattacaacgagcctctaaccggctttagttggcgcggaggatctgagagagaaaccaccggcatccagatttggtccgagattttccttatcaacaagccggacggaaagaaagttgccgtgttgctcatggatacacaaggtacattcgactcccagagtactctaagggatagcgcaactgtgttcgcactgtcaacaatgatttcaagtattcaagtgtataatctctcacagaatgtccaggaggatgatctgcagcacctacaactgtttaccgagtatgggagactggccatggaggaaaccttccttaaacctttccaatctctgatattcttagtgcgcgattggagctttccatacgagttctcctatggagccgatggtggggcaaagtttctcgagaaacgacttaaggttagcggcaatcaacacgaagagctgcagaacgtccggaaacatatacactcctgctttactaacattagttgctttttactaccccacccagggcttaaggtggccaccaacccgaactttgatggcaagctgaaagaaatcgacgacgaatttataaagaacctgaagatcttgattccctggctcctttccccagaatctcttgacattaaggagattaatggaaacaagataacctgtagggggctcgtcgagtattttaaggcatatattaagatctaccaaggagaagagcttccccatccaaagagcatgctgcaagccaccgccgaggcaaacaaccttgcagctgtcgctaccgcaaaagacacttacaacaagaaaatggaggaaatttgcggtggggacaagccctttctggcccctaacgacctccagacgaagcacctgcagctcaaagaagagagcgtgaagctgtttcggggtgtgaagaagatgggaggtgaggaattttcgcgacgctatctccaacagctcgaaagtgagatagacgagctatatatacagtacattaagcataacgattctaagaatatttttcatgcagcaaggacacctgcaacactgtttgtggttatttttataacatacgtgatcgccggagtaacgggctttatcggacttgacatcatcgcctcactgtgtaacatgattatgggcctgacccttataaccctatgtacatgggcatacattaggtattctggggaatatagggaattgggggcagttatcgaccaggtcgctgcggctctttgggaccaagcactgtataaactgtacagtgcagccgcaactcatcgacacctttaccaccaggcattcccaacccctaaatcagagtcaacagagcaatccgagaagaagaaaatgtag

SEQ ID NO: 215075 - DNA, 1677 bp, synthetic construct
  misc_feature 1..1677: note = Description of Artificial Sequence: Synthetic coding sequence
  source 1..1677: mol_type = other DNA
atggcgaagaatcggagggatagaaatagctgggggggtttttctgaaaagacctacgagtggtctagcgaagaagaggaacccgtcaagaaagccggtcctgtgcaggtgttaattgttaaagacgaccatagctttgaattggacgagacggccctcaacagaatcctgctgagtgaggccgttcgcgataaagaggttgtcgccgtgagcgtggcaggggctttcagaaaaggcaaaagtttccttatggactttatgcttagatatatgtacaaccaggaatcagtggactgggtgggcgattataacgaacctctcaccggcttcagttggcgaggtggctcagagagggaaacgactggaattcagatctggagcgagatcttcctgatcaacaaaccagacggaaagaaggtggccgtcctcctcatggatacacaggggacgtttgactcgcaatcaaccctgagagattccgcaaccgtgtttgctctgtccaccatgattagcagcatccaagtctacaatttatcgcagaatgtgcaggaagacgacctgcagcatctgcaactgttcacagagtatggtagactcgctatggaagaaactttcctcaagccgttccagtcgcttatctttctagttagggactggtcattcccctatgagttcagctatggagccgacggaggagccaagttcttagagaagcggttgaaggtttcaggtaatcagcacgaagaattgcagaatgtgcggaaacacatccatagctgtttcacaaacatctcatgcttcttgctgccccatcctgggctgaaagtggctactaatccaaactttgacggaaagcttaaggaaatagatgacgaattcatcaaaaacctgaagattcttataccatggctgttgtcccctgagagcttggatattaaggaaatcaatggcaacaagatcacatgcagaggcctggttgaatactttaaagcatatattaaaatttaccagggagaggaacttccccacccaaagtccatgctccaggccacagcggaggctaacaatctggcagctgttgccaccgccaaagacacgtataacaaaaagatggaagaaatatgtgggggagacaagccgtttctcgcgcctaatgacttacagactaagcatctgcaactgaaagaggagtccgtcaaactgtttagaggtgttaagaagatgggaggtgaggagtttagtcgcagatacctacagcagctggaatcagagattgatgagctctatattcagtacattaagcacaacgacagtaagaacattttccacgcagctaggacacccgctacactcttcgttgtgatattcatcacttatgttattgccggagttactggattcataggcctcgacattatcgcaagcctgtgcaacatgataatgggcctcacactaataactctttgcacatgggcatatatcaggtattccggcgaatacagggaattgggggctgtgatagaccaagttgccgctgcactgtgggaccagggcccttctcatcaggcattgtacaaattatactccgcggctgccacacaccgccacctgtatcatcaagcctttcccactccaaaatctgagtctaccgaacagagcgagaaaaagaagatgtag

SEQ ID NO: 215076 - DNA, 1677 bp, synthetic construct
  misc_feature 1..1677: note = Description of Artificial Sequence: Synthetic coding sequence
  source 1..1677: mol_type = other DNA
atggcgaaaaaccgtagagaccgcaactcctgggggggattttcagagaaaacatatgagtggtccagtgaagaggaggaacctgtaaaaaaggcaggccctgttcaggtccttatcgtcaaggatgatcactctttcgagctcgatgaaacggcactcaaccgcatcctgttgtctgaggccgtgcgagacaaggaagtggtcgcagtcagcgtggcaggcgctttcagaaagggaaaatccttcttgatggactttatgctccggtacatgtataaccaggagtctgtggactgggtcggcgattacaacgagcccctgaccggattctcttggcgcggaggatcagagcgagaaacaacagggattcagatctggtctgaaatctttctgataaataagcccgatggcaaaaaagtggccgtgctgctgatggatactcaggggaccttcgactctcagtcaaccttgcgggactctgccacagtgttcgcgctatccaccatgatctcgagtattcaggtttataacctgagccaaaacgtgcaggaagatgatttgcagcacttgcagctgttcactgaatatgggagactggccatggaggaaacttttctcaaacctttccaaagtcttatctttctggtgcgcgattggtcatttccctacgagttttcctacggcgctgatgggggtgcgaaatttctcgaaaagagacttaaggtgtctggaaaccagcacgaagagcttcagaatgtccgcaagcacatacattcttgcttcacgaatatttcctgcttccttctcccacatcccggtttgaaggttgcgaccaaccccaatttcgacggaaagctgaaggagatcgatgatgagttcatcaaaaacttaaagattctaatcccatggctactctcccccgagtctctggatattaaggagatcaacggtaacaaaattacttgtcggggtctggtagagtacttcaaggcatatataaagatttaccagggcgaagagctgccacatcccaaaagtatgctgcaagcgacagcggaagctaacaatctagccgcagtcgccacagccaaggacacatataacaagaagatggaggaaatctgcggtggggacaagccttttttggcccctaatgacttgcagaccaagcacctgcagctcaaggaggaaagcgtcaagttgttcaggggtgtcaagaaaatgggcggagaggaattctctcgcagatacctgcagcagcttgagtctgaaatcgacgaactatacatacaatatattaaacataatgactccaaaaatatctttcatgccgctagaacaccggcaactctcttcgtggtgattttcataacttacgttatcgcaggcgttacaggtttcatcggtctggatattatagcatcactatgtaatatgattatggggttgacactcataacattatgcacatgggcttacataagatactctggggaatacagggagctgggagccgttattgaccaggtggccgctgccctctgggatcagggaagtaccaatgaagcactgtacaaattatactccgcagcagccacacacagacacctgtaccaccaggccttccctacgcccaagtctgaaagcaccgagcagtcggaaaaaaaaaaaatgtag

SEQ ID NO: 215077 - DNA, 1662 bp, synthetic construct
  misc_feature 1..1662: note = Description of Artificial Sequence: Synthetic coding sequence
  source 1..1662: mol_type = other DNA
atggcaaagaataggcgtgaccgaaattcctggggcggtttttccgagaaaacgtatgagtggagctctgaagaagaagagccagtgaagaaagctggcccagtccaggtgctaatcgttaaggatgatcactcatttgagcttgatgagaccgccttgaaccggatcctgctttcggaagctgttcgtgataaggaagtggtggccgtgtccgtcgccggtgccttccgtaaagggaagagctttctaatggacttcatgttgcgatatatgtacaaccaggagagtgtcgattgggtcggggactacaatgagcctcttacagggttctcttggagggggggaagcgagcgggagacaaccgggatccagatttggtccgaaatatttttaatcaacaagcccgatgggaagaaagttgctgtgctgctaatggacacacaagggacgttcgattctcagagcacccttagggacagcgcaaccgtgttcgctctctccaccatgataagctccatccaggtctataacctgtcacaaaacgtgcaggaagatgacctgcagcacctgcagctattcacagaatatggccgattggccatggaggagactttcctgaagccatttcagtctttgatattcctggtgagagactggtcctttccatatgaattctcctacggagcggatggtggagcaaaatttctggagaagcgactaaaggtgagcggaaatcagcacgaggagctgcagaatgtgcgaaaacacatccactcatgcttcacgaacatcagttgctttctgctgccacacccgggtctgaaagtcgctacaaatcctaacttcgatgggaaactgaaagagattgacgacgaattcatcaaaaatctgaaaatactgatcccatggttactcagccctgagtctctcgacatcaaggagatcaatggcaacaaaatcacctgtcgtggcctcgtggagtattttaaggcctatattaagatctatcaaggagaggaactgcctcaccctaagtctatgctccaggccacggccgaggccaataaccttgctgccgtggccaccgctaaggacacttataacaaaaagatggaggagatttgtggtggcgacaaaccgtttcttgcacctaacgatttacaaactaaacatctgcaactgaaggaagaatctgtgaaactgttcagaggagtgaaaaaaatgggcggagaggagttctcaagaaggtatcttcagcagctagagagcgagatcgatgagctgtatatccagtatatcaaacataatgatagcaagaacatatttcatgctgccaggactcctgccacactgttcgtggttatcttcattacctacgttatcgcaggggtcactgggtttatcgggctcgatattattgcgtctctctgtaacatgattatgggactgactctcatcacgttgtgtacctgggcctacataagatatagcggtgaatatcgcgagctgggagcggtgatcgaccaggtagctgccgctctatgggatcaggccttgtataaactctattctgccgcagccacccaccggcatctttatcatcaggccttccctacccctaagagtgagtccacagagcagagtgaaaaaaagaaaatgtag

SEQ ID NO: 215078 - DNA, 90 bp, synthetic construct
  misc_feature 1..90: note = Description of Artificial Sequence: Synthetic coding sequence
  source 1..90: mol_type = other DNA
atggcaaaaaataggagggataggaattcctgggggggattttcggaaaaaacatacgagtggtcttccgaagaagaggagcctgtgtag

SEQ ID NO: 215079 - DNA, 303 bp, synthetic construct
  misc_feature 1..303: note = Description of Artificial Sequence: Synthetic coding sequence
  source 1..303: mol_type = other DNA
atggctaagaaccgcagggataggaattcttggggcggattttccgaaaaaacctatgaatggtctagtgaagaagaagagcccgtgaaaaaggcaggccctgtgcaagtactgatcgtcaaagatgaccactcgtttgaactggacgaaaccgcactgaaccgaatcctgttaagcgaggccgtgagggataaagaggtggtggccgtcagtgtggccggagctttcaggaagggtaagagcttccttatggatttcatgttacgctatatgtacaaccaggagtccgtggactgggtgtag

SEQ ID NO: 215080 - DNA, 1701 bp, synthetic construct
  misc_feature 1..1701: note = Description of Artificial Sequence: Synthetic coding sequence
  source 1..1701: mol_type = other DNA
atggtgctcaagaaaggaataaaatttttccagcggcttatcaactctaaaagtctccgattcggcgaaaactatgaggatgacgatcttgtaaactccgacgaggttatgaaaaagccctgtcctgtccagattgttcttgcccacgaggatgatcataactttgagttggacgaagaagcattggagcaaatcctgctgcaggagcatattagagatctgaatattgtggtcgtaagtgtggccggagccttccggaagggaaagtcttttcttctagattttatgctgcgatatatgtacaataaagactctcaaagctggattggaggtaataacgagcccctcactggctttacctggcggggtggctgtgaacgggaaacaaccggtatccaggtatggaacgaggtctttgtgattgaccggcctaacgggactaaagtggcggtgctcttaatggatacacagggtgcatttgattcacaatccactattaaggattgtgccacggtttttgcacttagcaccatgacatcatccgtgcaggtgtacaacctcagccagaacatccaggaagacgatctgcaacacctgcagctctttaccgaatacggcagattagcaatggaggagatctatcagaagccttttcagacgttgatgttcctgatcagagactggtcctatccatatgaacacagctatggcctggagggtgggaaacagtttctcgaaaagcggctccaggtgaaacagaatcagcacgaagagctgcaaaacgtgcggaaacatattcacaattgtttctctaatcttggctgcttcctactgccccaccccggactaaaggttgccactaatccgagcttcgatgggcgtttgaaagacattgacgaagatttcaaacgggagctgagaaacctggtcccattgctactagcgccagaaaacctggttgagaaggaaatctctggttccaaagtgacctgtagagacctggtggaatactttaaagcatatattaagatttatcagggagaagaactgccacacccaaagagcatgcttcaagccaccgcggaggcaaataatctcgccgctgttgctggagctagagatacttattgtaaatccatggaacaggtatgtggaggcgataagccctatattgcgccatcagacctggaacggaagcacttggaccttaaggaggttgccataaagcagttcaggagtgtgaagaaaatgggaggggatgagttttgtcggagatatcaagaccaactagaagccgaaattgaagagacctatgcaaacttcatcaaacacaacgatggtaagaacatattctacgcggctcgcaccccagccacattgtttgcggttatgtttgccatgtacattatctctggcctgacaggcttcattggtctcaactctatagctgtattatgtaatctggtgatgggtcttgccttgatctttctgtgtacatgggcatatgtgaaatactccggcgagtttagggagatcgggaccgtaatcgaccagatcgctgaaacattgtgggagcagcgcagtcctcgtaaggtgttttcaaaactcttcgaggtcactagacgcaggatggtgcaccgggctctgtcatccgcccagcgacagagactatcttctaacaataataagaagaagaattag

SEQ ID NO: 215081 - DNA, 1752 bp, synthetic construct
  misc_feature 1..1752: note = Description of Artificial Sequence: Synthetic coding sequence
  source 1..1752: mol_type = other DNA
atggctgagggcgacgaagccgcacgaggtcagcaacctcaccagggactatggaggagaagaaggacgtcagacccatctgctgcagtgaatcacgtatcgtcaacaaccagcttgggtgaaaactacgaagacgacgacctggtgaatagtgatgaggtaatgaagaagccctgtccagtgcagattgtgctcgcgcatgaggatgaccataacttcgagctcgatgaagaggcgcttgaacaaattctcctacaggagcatattcgcgatttgaatatcgtggttgtgtccgttgcgggagccttcaggaaaggaaaatcttttctattagactttatgctgcgctatatgtataacaaagacagccagagctggataggtggaaacaacgagcctctgactgggtttacatggcgaggcggatgcgagcgtgaaacgactggcattcaggtttggaacgaggtctttgtcatagaccggcctaacggaacaaaagtcgccgttttgctcatggatacacagggagcatttgactcacagagcaccatcaaagactgtgccactgtgttcgcgttgtcaaccatgacttccagtgtccaggtttacaatttatcacagaatattcaagaagacgaccttcagcacttgcagctatttacggaatatggccgactggcgatggaggagatttaccagaaaccgtttcagacattaatgtttctgattcgcgactggtcttacccatacgaacattcctacggccttgaaggcggaaaacagttcctagagaaacggctgcaggtaaagcagaatcagcacgaagaactccagaacgtaagaaagcacatccacaactgctttagtaatctgggatgttttcttctgccacatccaggcttgaaggtcgccacaaacccctccttcgacgggcgactgaaggacatcgacgaggattttaaaagagaactgcggaatcttgtccccctcctgctggcgccagaaaatcttgtggagaaggaaatcagtggttcaaaggtgacatgcagagatctagtcgagtactttaaagcctatatcaaaatctatcagggcgaagagctccctcacccgaagtccatgttgcaagccactgcagaagcaaataacctggcggcagttgccggtgcccgtgacacgtattgtaaaagcatggaacaggtgtgcggcggagataaaccatacattgcgcctagtgatctggaacgtaaacatttagatctcaaagaggtggccatcaagcagtttcggagtgtcaaaaaaatggggggagacgaattttgtcgacgataccaggaccagctcgaagcggagatcgaggaaacctatgcaaattttatcaaacacaacgatggaaaaaatattttttacgccgctaggactccagctactctctttgcagtgatgttcgctatgtatattattagcggactgacaggattcattgggctgaactccatcgccgtattatgcaatctcgtcatgggcctggctttgatctttctctgtacctgggcatatgtcaagtattcgggggaatttagggagataggcacagtgatcgaccagattgcagagaccctgtgggagcaggttctgaaaccgctcggcgacaatctaatggaggagaatatccgacagtcagtcactaactctataaaagctggccttactgatcaagtgtctcaccacgcacgattaaagaccgactag

SEQ ID NO: 215082 - DNA, 1239 bp, synthetic construct
  misc_feature 1..1239: note = Description of Artificial Sequence: Synthetic coding sequence
  source 1..1239: mol_type = other DNA
atggacacgcagggagcatttgattcccagtctactatcaaggactgcgccaccgtattcgcactgagcactatgacaagctcagtgcaggtgtacaacttatctcaaaatattcaggaagatgaccttcagcatctccagctgtttactgagtatggcagactcgccatggaggagatatatcagaagccattccagaccctcatgttcctcatccgagattggtcatacccttatgaacattcgtatgggttggaagggggtaagcaattcctggagaaacggctgcaggtgaagcaaaaccaacacgaagaactacagaacgtccgcaagcatattcacaactgtttctccaaccttggttgctttctcctgccacatcccggactcaaggtggctaccaatccatccttcgatggcaggctgaaggatatagatgaagactttaagagggaactgcggaatcttgtgcccctgctcttagcgcctgagaatctagtagagaaggaaataagtggctccaaagtaacatgtcgggatctcgtggaatattttaaagcctatataaaaatctaccagggcgaggagcttccccacccgaagtcaatgttacaggcaactgctgaggccaataacttggcagccgttgccggagcacgtgatacatactgcaaaagcatggaacaagtgtgcggaggagataaaccgtacattgccccaagtgaccttgagcggaagcacctagacctgaaagaggtagcaataaaacaatttcgttctgttaagaagatgggcggagatgaattttgtcggagatatcaggaccagttggaggccgaaatcgaagagacctatgcgaattttatcaagcacaacgacgggaagaacattttctacgcagcccgaacgcccgcaacattattcgccgtgatgttcgctatgtacataatttcggggcttactggattcataggcctgaattccattgctgttctttgcaatctggttatggggctggctctgatctttctctgtacttgggcctacgttaaatactctggggagttccgcgagataggtacagttatcgaccagattgctgagacattgtgggaacaggtcctgaagcccctgggcgataacctgatggaggagaacatccgtcagagcgttactaattcaatcaaagcgggactgaccgaccaggtgtcacatcacgccaggctgaaaacagactag

SEQ ID NO: 215083 - DNA, 1740 bp, synthetic construct
  misc_feature 1..1740: note = Description of Artificial Sequence: Synthetic coding sequence
  source 1..1740: mol_type = other DNA
atggctgagggagatgaagctgcacgtggtcaacagccccaccagggcttgtggaggcggaggagaacctcagatccctcagcagccgtgaaccacgtgtctagtactacctctttgggggaaaactacgaagatgacgatcttgtcaattccgacgaagtcatgaagaagccctgtcctgtccagattgtgctggctcatgaagacgaccacaacttcgagctggatgaagaggcgttggagcagatcctgttgcaggaacatataagagacctgaatatagtggtggtgagtgtcgcgggagctttcagaaagggaaaaagcttcctgttggatttcatgctcaggtatatgtacaataaagattctcagagttggatcgggggtaataacgagccactgacaggtttcacgtggaggggcggatgcgagcgggagacgaccggcattcaggtgtggaacgaggtcttcgtgatcgataggcccaatggaacaaaagtcgctgtgcttttgatggatacccagggggcattcgactctcaatctaccataaaggactgtgctacggtgtttgcactatcaacgatgacctcttctgtgcaggtgtacaacttgagccagaatatccaggaagatgacctgcagcaccttcagctgttcaccgaatatgggcgactggctatggaagaaatatatcagaagccgttccaaacattgatgtttcttatccgagactggtcttacccttatgaacatagctatggccttgagggtggcaagcaatttctggagaaacgcctccaggtcaagcagaatcagcatgaggaactgcagaacgttcgaaagcatatacataactgttttagcaatctcggttgtttcctgctcccgcatcccggactgaaagtggctaccaacccaagtttcgacggcagactaaaggacatcgatgaggacttcaagcgggagttgagaaacctggttccactgctgctggctcctgagaacctggttgagaaggaaatctcaggatctaaggttacttgcagggatctggttgaatactttaaggcttatatcaagatttaccagggggaagagctcccccatcctaagtccatgctacaagccacagctgaggcaaacaatctggccgcagtggcaggcgcaagggacacctactgtaaatctatggagcaggtctgcggcggagacaagccttacattgcccctagcgacctggagaggaagcaccttgacttgaaggaagtcgcgataaaacagtttcgcagcgtcaaaaaaatgggcggtgacgaattctgtagaagatatcaggatcaactggaagctgagatcgaggagacatatgccaattttataaagcataatgatgggaaaaatattttttacgccgctagaacccccgctaccctgtttgcggttatgtttgctatgtatataattagtggtttaacaggttttattggccttaatagtatcgccgttttgtgcaacctggtgatggggctggcgctgatattcctatgtacctgggcctacgtcaaatactctggggagttcagggaaattgggaccgtcatcgaccagattgctgaaacactttgggagcaggtgttcagcaagttgttcgaggtgactaggaggcgaatggtacacagagccttatcgtctgcccagcgacagaggctctcttctaacaacaataaaaaaaagaattag

SEQ ID NO: 215084 - DNA, 1239 bp, synthetic construct
  misc_feature 1..1239: note = Description of Artificial Sequence: Synthetic coding sequence
  source 1..1239: mol_type = other DNA
atggatacgcagggcgctttcgattcgcagagcaccatcaaagactgcgcaactgtgtttgcgctcagtactatgacaagctccgtccaggtgtataatctgtcccagaacatccaagaagacgatttgcagcatttacagctctttacggagtacggcagactcgccatggaagagatttatcagaagccgtttcagacgctgatgtttctgattcgtgattggtcttacccatatgagcactcttacggactcgaggggggaaaacaattcctagaaaagcgactgcaggtgaagcagaaccagcacgaggaactgcagaacgtgcgcaaacatatacacaactgtttctccaacctgggctgcttcttactcccgcatcctggactaaaagttgccacaaaccccagcttcgatgggcgtctgaaagacatcgacgaggactttaaaagagagctgcgcaatctggtgcccctgctgctcgcgcctgaaaacctggtggagaaagagatcagcgggagtaaggtaacatgtagagatttggtcgagtacttcaaggcatacatcaagatttaccagggtgaggagctcccccatcccaagtccatgctgcaagctaccgccgaggccaataatctggccgctgttgcaggtgccagagatacatactgtaaaagcatggagcaggtttgcggcggagacaaaccatacatcgcgccaagtgacctagagcgtaaacatctcgatctgaaggaagttgccattaagcagttccgatcggttaaaaagatggggggagatgaattttgcagaaggtaccaggatcaactggaggccgagatagaggagacctacgcgaacttcattaagcataatgacggcaagaatatattctacgctgcccgaactccagcaacgctgtttgctgtgatgttcgctatgtatattatctccggcctcacgggattcataggccttaactccatcgcagttttatgcaatctggtcatgggactcgccctcatattcttatgtacctgggcttatgtgaaatactctggtgaattcagagagattgggacagtcattgatcagatcgctgagacactgtgggaacaggtgctgaagcctctgggagataatcttatggaggaaaatattcgtcagtcggttaccaacagcataaaagcaggtctgaccgaccaagtctcgcaccacgccaggcttaaaaccgactag

SEQ ID NO: 215085 - DNA, 1242 bp, synthetic construct
  misc_feature 1..1242: note = Description of Artificial Sequence: Synthetic coding sequence
  source 1..1242: mol_type = other DNA
atggatactcagggtgcctttgactcccaatccacaatcaaggactgcgcaaccgtgtttgccctgagcaccatgacctccagcgttcaggtgtataacctgagccaaaacatccaggaggacgatctacagcacctgcaattgttcactgaatatggcaggcttgccatggaagagatttaccagaaacccttccagaccttaatgttcctgatcagggattggagctacccttatgagcactcatatggtcttgaggggggtaaacaatttcttgagaaaagactccaggtgaagcaaaaccaacatgaagaactccagaatgttaggaaacacatccacaactgcttctctaacctggggtgcttcttgctcccacaccctggtctcaaggtggcaacaaatcccagtttcgacggcaggctcaaagacatagacgaggactttaaacgagagcttcgaaaccttgtccctctgctgcttgctccagagaatttggtggaaaaggaaatttctgggtcaaaagtgacctgtcgggatctcgtggagtattttaaggcgtacataaaaatctaccaaggcgaggagttacctcatcccaaaagtatgctgcaggctaccgcagaagccaacaacctcgctgccgttgcaggagcgcgagacacctattgcaagagcatggaacaggtctgcggaggtgacaagccatacattgccccatcggacctggagaggaaacatctggacttgaaagaggtggctattaagcagtttcgctctgtgaagaagatggggggagatgagttttgccggaggtaccaggaccagctggaggcagaaatcgaggagacgtacgctaattttatcaagcacaacgatggaaagaatatcttctacgccgctcggaccccagcgacattattcgctgtcatgttcgcaatgtatatcattagcggtctaacagggttcattgggctgaacagcatcgcggtactttgcaacctggttatggggctggccctgatcttcctctgtacgtgggcctacgtgaagtattcgggagaattccgggagatcggtaccgttatcgaccagattgctgaaaccctttgggagcagaggtctccgcgaaaggtgttttcaaagctattcgaagtaaccagacgccgtatggtgcacagagccctgagctccgcgcagagacaaaggctcagcagcaacaataacaaaaagaagaactag

SEQ ID NO: 215086 - DNA, 1707 bp, synthetic construct
  misc_feature 1..1707: note = Description of Artificial Sequence: Synthetic coding sequence
  source 1..1707: mol_type = other DNA
atgagaaccgccggtcgagaccctgtgagcgccggtctgcagttccccaaggatggcagcacgcagcggcctgccaaccgcgctcgcttcgtgcctgctcggactagaccttctccgctacacccctgctgcttctgttttgaagggggtggatccatgctatctcctcaaagagtggcagccgcagcgagcaggggagccgacgatgccatggagtccagcaatatcttgcttcaggatcacatcagggatttggatgtggtcgtcgtttcagttgctggggctttccgaaagggtaagtcatttatactggacttcatgctaaggtacctctactcccagaaagagagtggtcacagtaattggcttggagatccagaggaaccactcactggtttctcttggcgcggaggtagcgatcctgaaacgacgggcatccagatctggagtgaggttttcaccgtcgaaaaacccggtggcaaaaaggtagcagtggtgctgatggatactcagggggctttcgactcacaaagcacagttaaggactgcgcaacgatctttgccctctcaacgatgactagcagcgtgcaaatatacaacctctcacagaacatccaagaagacgatttacagcaattgcaactgtttaccgagtacggaagattagcaatggatgagatatttcagaagccgttccaaactctgatgtttttagtgagagactggagcttcccttacgagtatagctacggacttcaagggggtatggcatttttggacaagcgcctgcaagtcaaagagcatcagcacgaggaaattcagaatgtgagaaaccacatacattcttgctttagcgatgtgacctgcttccttttgccccaccctgggctgcaggtagcgacatcgccggatttcgacggaaaacttaaagatattgcaggcgaattcaaagagcagctgcaagctctgattccctatgtattgaatccgagtaaattgatggagaaggagatcaatggttccaaagtgacctgtcggggtctgttggaatattttaaggcttatattaagatttaccagggtgaagacctgccacaccctaaaagtatgcttcaggcgaccgctgaggccaataatctagccgcagcagcaagtgccaaagatatctactacaataatatggaagaagtgtgtgggggtgaaaaaccttatcttagccccgatattctggaagagaagcattgcgaatttaagcaactcgcgctcgaccactttaaaaagacaaagaaaatgggaggcaaagatttctctttccgataccagcaggagctggaggaggaaatcaaagagctgtatgaaaatttttgcaaacacaatggaagtaaaaacgtgtttagcacattccgaactccggcagtgctgttcacaggtattgtggcgctctatatcgcttcaggactgaccgggtttatcggtctcgaagtggtggctcagctgtttaactgtatggttgggctgttattaatagcactgcttacttggggttacataaggtactctgggcagtacagagaactggggggtgctattgacttcggcgctgcttacgtcctcgaacaggcatccagtcatataggcaactcaacccaggcaactgtacgcgatgccgttgttggcaggccaagcatggacaagaaggcacagtag

SEQ ID NO: 215087 - DNA, 1626 bp, synthetic construct
  misc_feature 1..1626: note = Description of Artificial Sequence: Synthetic coding sequence
  source 1..1626: mol_type = other DNA
atgctgagccctcagagagttgcagccgcagctagccggggagccgacgacgctatggaaagcagtaaacccggtccggtacaagtggtgctcgtgcagaaggaccagcatagttttgagcttgatgagaaggcactcgctagcatccttctacaagatcacatcagggatctcgacgtagttgttgtgtccgtcgccggagcttttcgaaaagggaaatcttttattttggattttatgctacggtacttatattcccagaaggagtccgggcacagcaattggttaggggatcccgaagagcctctgaccgggttttcatggcggggaggttccgacccggagaccaccggaatacaaatttggagcgaggtcttcactgttgaaaagcccggaggtaagaaggtcgccgtggttctaatggacacccagggggcttttgattctcagtctacagtcaaagattgcgctacaatctttgctctaagtactatgaccagctctgtccaaatttacaacctctcccagaatatacaagaagacgacctacagcaactgcagctttttaccgaatatggcaggctcgcaatggatgagatcttccagaagccttttcaaacacttatgtttttagtgcgggactggtcttttccatatgagtattcctacggccttcagggcggaatggcattccttgataagcgcctgcaagtgaaagagcaccagcatgaggaaattcagaatgtccgcaaccatatacactcatgtttctccgacgtgacgtgctttctccttcctcatcccggactgcaagttgctacaagtcccgacttcgacgggaaacttaaggacattgcgggagagtttaaagagcagttgcaggcactgataccctacgtcctcaatccgtctaagttgatggagaaggagattaatggatccaaggttacctgtcgcggactgttagagtattttaaagcctatataaaaatctaccagggagaagacctccctcaccctaaatccatgctgcaagccacagcggaagcaaacaacttagctgctgccgctagtgccaaggacatctattacaacaacatggaggaagtctgtggcggagagaagccctatctgtcacccgatattctggaggagaagcactgcgagttcaagcaactggcattagaccattttaagaagacaaagaaaatgggcggaaaagacttcagtttcagatatcaacaggaacttgaagaggagatcaaggagctgtacgaaaacttttgtaagcacaacggcagcaaaaatgttttttccacgttccggactcccgctgtgctcttcaccggcatcgtggctctgtacatagcctctggtctgactggcttcatcgggctcgaggtggtggcgcaactgttcaactgcatggttggccttttacttatcgcgctcctaacgtggggatatattaggtattccggccagtacagggagctgggcggtgctatcgacttcggtgcagcgtacgtgttggagcaggcctccagccatatcggcaactcaactcaggccaccgtgcgggatgcagttgtgggacgaccgtccatggacaagaaagctcaatag

SEQ ID NO: 215088 - DNA, 1065 bp, synthetic construct
  misc_feature 1..1065: note = Description of Artificial Sequence: Synthetic coding sequence
  source 1..1065: mol_type = other DNA
atgtcccggctactgcatgctgaagaatgggctgaggtgaaggagcttggggatcaccataggcagccacaaccccatcaccttcctcagccgccaccgccaccacagcccccagctactctccaggccagagagcaccccgtgtatcctccagagctgtctttactggacagcactgatcccagggcttggctggcaccaactctacagggcatctgtacagctcgcgcagcccaatacctcctgcactctcctgaactgggagccagcgaagcagcagcacctagggatgaggtcgatggcagaggcgaactggttcggaggagctctggtggagcgtcctctagcaagtccccaggccctgtcaaggtaagggaacagctctgcaaactgaagggcggagtcgtagttgatgagcttgggtgttcacgtcagcgggcaccctcctccaaacaagtgaacggcgtgcagaagcagcgcagactggcagccaatgccagggaacgccgtcggatgcacggcctgaaccatgcgttcgaccagttacgcaacgtgattccctcatttaacaacgataaaaaactttctaaatacgaaaccttacaaatggcgcagatttatataaacgccttgtcagagttattgcagaccccttctggcggagaacagcctcctccccctcctgctagctgcaagagtgaccatcaccatctgaggaccgcggctagttatgaagggggagcaggcaacgcgaccgccgcaggggctcagcaggccagcgggggatcacaacggcctactccgccaggctcctgtaggacccgtttcagtgccccagctagcgccggtggatactcagtacagctggacgccctgcacttctccacctttgaggactccgccctgacggccatgatggctcagaagaatctctccccgagcttgcctggctctatcctgcagcccgtgcaggaggaaaactcaaaaactagcccacgttcacaccggtcagacggggagttcagtccacactctcattacagcgattccgatgaggcctcatag

SEQ ID NO: 215089 - DNA, 459 bp, synthetic construct
  misc_feature 1..459: note = Description of Artificial Sequence: Synthetic coding sequence
  source 1..459: mol_type = other DNA
atgaagagttgtaaaccctccggaccacccgctggtgcccgtgtggccccaccttgcgccggaggaaccgagtgtgcagggacatgtgccggtgccggtcggttggaatccgcagctcgcaggaggctggccgctaacgccagggaacggcgacgaatgcaggggctgaacacagctttcgacagattaaggcgcgtagtaccccagtggggccaggataaaaagttaagcaagtacgaaactctacaaatggccttaagttacatcatggctctcacaagaatcctggccgaggccgaacggttcgggtccgagagagactgggtcgggctgcattgcgagcactttggacgcgatcactacttgccttttcctggggctaaacttccaggggaatcagaactctatagtcaaagattgtttgggttccagccggagccattccaaatggctacctag

SEQ ID NO: 215090 - DNA, 627 bp, synthetic construct
  misc_feature 1..627: note = Description of Artificial Sequence: Synthetic coding sequence
  source 1..627: mol_type = other DNA
atgtggagatcctgcctacgcctgcgcgacgggggacggaggctcctgaataggccagctggaggccctagcgctagcatgtcccccggtcctacaatcccaagtcctgctcgcgcatacgctccgccaaccgagcggaaacggttttaccagaacgtctctataacccagggagagggcggattcgaaataaatctggaccaccgcaagctgaagacaccgcaggccaagttgtttacggtgccaagtgaagcattggctatcgcagtagctactgaatgggattcacagcaggacacgattaagtactatactatgcacttgaccacactgtgcaatacatctctggacaatccgacccagcggaataaagatcaactcatcagggccgcagtcaaattcttagacactgataccatctgttatcgagtggaagaacccgaaactttagtcgagctgcagcggaatgagtgggacccaatcatcgagtgggcagagaaaaggtacggggtcgaaatcagcagctcaacttctattatggggccatcaatcccagcaaaaactcgggaggtcctggtttcccacctggctagctataacacatgggcactccagggaatggattag

SEQ ID NO: 215091 - DNA, 618 bp, synthetic construct
  misc_feature 1..618: note = Description of Artificial Sequence: Synthetic coding sequence
  source 1..618: mol_type = other DNA
atgtggcgatcttgcctgagactgcgggacgggggtagaaggctgctaaataggcccgctgggggaccaagtgctagcatgtcccctggccctacaattcctagtcccgctcgtgcttatgcccctcctaccgaaaggaagcgtttttaccagaatgtcagcatcacgcaaggtgagggcggatttgaaatcaatctggatcaccgcaaacttaaaactccccaagcaaagctctttaccgtgccttcagaagccttggccatagccgtcgcgaccgagtgggactcccaacaggacacaatcaaatactataccatgcacctgacaacactgtgcaacactagtctggacaacccgacccaaaggaacaaggatcagttaattagggcggcagtgaagttcctggacacagataccatttgctatagggtagaagaaccagagacacttgtggagcttcagagaaacgaatgggacccaataattgagtgggctgaaaagcggtatggagtggagatctcctcctccacctccatcatggggccatctatacccgcaaagacaagagaggtgctggtgtctcacctagcatcatataacacatgggccttgcaatag

SEQ ID NO: 215092 - DNA, 870 bp, synthetic construct
  misc_feature 1..870: note = Description of Artificial Sequence: Synthetic coding sequence
  source 1..870: mol_type = other DNA
atgtggagatcatgcctgcgcttgagggacgggggacgcagacttttaaaccgtccagcaggcggtccctccgcaagcatgagtcccggacccactattccgtctcccgcacgggcatatgccccacccaccgaaagaaagaggttctaccagaatgtatctatcacgcagggggaagggggattcgagataaacttggatcacagaaaactgaaaactccgcaggctaagctattcaccgttccctccgaggcccttgcaattgccgtcgctaccgagtgggacagccaacaggatactataaaatattatacaatgcacctcaccaccctgtgcaacaccagtctggacaacccaacacagcggaacaaggaccagcttattagggcggctgtgaaattcttggacacagacacgatatgttaccgcgtggaagagcccgagacattggtggagctgcagcggaacgaatgggatccaatcattgagtgggcggagaagaggtatggagtggagatcagttcatcaactagtatcatggggccatcaatcccggctaagacacgggaggtgctggtgtctcatttggctagctataacacatgggccttacagggaattgaattcgtggcagctcagcttaagtctatggtccttacactcgggctcatcgacctacgactgacggtggagcaggctgtgttattgtcgcgtctggaggaagagtatcaaatccagaaatggggcaatatcgaatgggcgcacgattatgagctgcaggagctgcgggctcgcaccgcggctggaacactgtttatccacctgtgttctgagagcacaactgtgaagcacaagttgctaaaggagtag

SEQ ID NO: 215093 - DNA, 1590 bp, synthetic construct
  misc_feature 1..1590: note = Description of Artificial Sequence: Synthetic coding sequence
  source 1..1590: mol_type = other DNA
atgctggggttcgtgggcagggtggcggcagcaccggcaagtggggcattgagaaggttgactccatctgcgagcctgcctccggcacaactgctgttgcgtgccgctccaaccgcagtgcatcctgtgcgggactatgccgctcagacctccccctccccaaaagcaggagcagctacagggcgaattgtggcggttatcggcgcagtggtcgatgtacagtttgacgaaggtcttccacccatccttaacgccctcgaggtccagggcagggaaacccggttggtactcgaagtggcgcagcacttgggtgagtcaactgtgaggactatcgctatggacgggacagagggactagtgcgtgggcagaaagtgttagatagcggcgctcccattaagatccccgttggacctgagacacttggtagaataatgaacgtgataggtgagcccattgacgaacgtggccctattaagactaagcagtttgcgcctatccacgcagaagcaccagaattcatggagatgagtgtcgagcaggagattctggtgaccggtattaaggtcgtggatctgctggcgccttatgccaagggtggtaagattggcctctttggcggagccggtgttggtaaaaccgttctgatcatggaactcatcaataatgttgcaaaggctcacggcggatactcagtgttcgcaggcgtgggtgagagaacccgggagggtaacgacctgtaccacgaaatgatcgaaagtggtgtgattaatctcaaagatgcaaccagcaaagtagccctagtctatgggcagatgaatgagcctccgggagctcgtgcccgtgtggcccttactggcctgacagtggctgaatatttccgggatcaggaggggcaagatgtactcctgtttattgacaacatattccgctttacccaggcaggatctgaagtaagcgcactcctcgggagaatcccctccgctgtgggctatcagcccacactggctacagacatgggcaccatgcaggagcgcatcacaacaaccaaaaaaggcagcataacttcagtacaggccatctatgtgccggcagatgacttgaccgaccctgcaccagcaaccacttttgcccacctagacgccaccactgtgctcagccgggcaatcgctgagcttggcatttaccctgcagtggacccactagacagtacctcgcgtattatggatcccaacatcgtgggcagtgagcactacgacgtggctcgcggagtccagaagattttacaggactacaagtccctgcaggacattattgcaattttgggtatggatgagttgtcagaagaagacaaactcactgtgtcccgggcaagaaagatccagaggttcttatcccaaccatttcaagtcgctgaggttttcacaggacatatgggcaaactcgttccactaaaggagacaataaaaggctttcagcagattcttgctggggagtatgaccacttgccagagcaggccttctacatggtgggacccattgaagaagccgtggctaaggctgacaaactggctgaggagcacagctcttag

SEQ ID NO: 215094 - DNA, 156 bp, synthetic construct
  misc_feature 1..156: note = Description of Artificial Sequence: Synthetic coding sequence
  source 1..156: mol_type = other DNA
atggttgcatactggcggcaggcaggcctttcatacattcggtatagtcagatctgtgctaaagcagtgcgcgatgccctgaagactgagttcaaggctaatgccgagaaaacttcaggatctaacgtcaaaattgtgaaagtgaagaaagaatag

SEQ ID NO: 215095 - DNA, 156 bp, synthetic construct
  misc_feature 1..156: note = Description of Artificial Sequence: Synthetic coding sequence
  source 1..156: mol_type = other DNA
atggtggcatactggcggcaggcaggtctgagttacatcagatatagtcagatctgcgccaaggctgtgcgggacgctctgaaaaccgagttcaaggccaatgctgagaaaacctccggcagtaacgtgaagatcgtgaaagtcaagaaggaatag

SEQ ID NO: 215096 - DNA, 156 bp, synthetic construct
  misc_feature 1..156: note = Description of Artificial Sequence: Synthetic coding sequence
  source 1..156: mol_type = other DNA
atggttgcctattggcgacaggcagggttgtcatacatcaggtacagccagatttgtgctaaggccgtccgggatgctctgaaaaccgaatttaaggccaacgcagaaaaaacgtccgggtcgaatgtgaagatcgttaaagttaagaaagaatag

SEQ ID NO: 215097 - DNA, 894 bp, synthetic construct
  misc_feature 1..894: note = Description of Artificial Sequence: Synthetic coding sequence
  source 1..894: mol_type = other DNA
atgttttcgcgtgcaggagtggccggtctgtccgcatggaccctgcagccccagtggatccaagtcaggaatatggcaacccttaaggatattacccgtaggctgaagagcattaagaacattcagaagatcactaaatccatgaaaatggtagctgctgccaagtatgcgagagccgaacgtgagcttaagcccgctcgcatctacgggcttggatccctggctttatacgaaaaggccgatatcaagggccctgaagacaaaaagaaacacctcctgattggcgtctcatccgataggggattatgcggcgcaattcattcgagcattgctaaacaaatgaagagcgaagtggccactctgacagccgcaggcaaggaggtcatgctggtcggtatcggcgataagatacgagggatcttataccggactcacagtgaccagtttctagtcgccttcaaggaagtcggtcgcaagccgcctacatttggggatgcctccgtcattgcattagagctgctgaatagcggctacgagttcgatgaggggagtataatcttcaacaagttcaggtcggtaatcagttacaagacagaggagaagcctatctttagcctgaacactgtggcaagtgctgactctatgagtatatacgacgatatcgatgccgatgttctgcagaattaccaggaatataacctagccaacattatatactactcacttaaagagtccaccacctcggaacagtctgctaggatgacggccatggacaacgctagcaaaaacgcctccgaaatgattgataagctgactctgacatttaaccgaactcgtcaagccgtgattacgaaggagttgatcgagatcattagcggcgctgccgctctttag

SEQ ID NO: 215098 - DNA, 897 bp, synthetic construct
  misc_feature 1..897: note = Description of Artificial Sequence: Synthetic coding sequence
  source 1..897: mol_type = other DNA
atgttcagccgcgctggggtggcgggactgagtgcttggacgttgcagccacagtggatccaggtgcgcaatatggccacattaaaggacatcacgagacgcctaaagagcatcaaaaatattcagaagattaccaagagcatgaaaatggtggcagccgcaaaatacgccagagctgagcgggagctcaagcctgctagaatctacggtctgggttcactagcattgtacgagaaagctgatatcaaaggccctgaagacaagaagaaacaccttctaattggggtgagttccgaccgcggactgtgtggagctatccactcaagcatcgccaagcagatgaaatccgaagtagcaacattaactgcagctggcaaggaggtgatgctggtcgggattggcgataaaataaggggcattctgtacaggacccatagtgatcagttcctggtggccttcaaagaagtagggaggaaaccccctacattcggagacgctagcgtgatcgcactggaattgctcaactctggatacgaattcgacgagggttccattatatttaataaatttagatcggtcatctcctataagacagaggagaagccaatctttagtctgaatacggtggcttcagctgatagcatgagcatttacgatgatatcgatgcggatgtgctccagaattatcaggagtataatctggctaatattatctactatagcttgaaggagtctaccacctctgagcagtcggccaggatgacagcaatggataatgcatctaagaacgctagtgaaatgattgacaaattaactctgacgttcaaccggacccgacaggccgttatcaccaaagaacttattgaaatcatctccggagccgctgcgcttgactag

SEQ ID NO: 215099 - DNA, 753 bp, synthetic construct
  misc_feature 1..753: note = Description of Artificial Sequence: Synthetic coding sequence
  source 1..753: mol_type = other DNA
atgaaaatggtagctgcggcaaagtatgctcgtgcggaaagggagttaaaaccagccaggatttatggcctaggtagcctcgccctgtacgagaaggctgatattaagggccctgaagataaaaagaagcacttacttattggcgtgtcctctgacagaggactttgtggtgcaatacatagcagcatagcaaaacagatgaaatctgaagttgccacattaaccgcagcaggcaaagaggttatgctcgtgggaataggcgataagattagggggatcttatacaggacgcactctgaccagtttctagtggcctttaaagaggttggaagaaaaccccctacatttggcgatgcctctgttatcgccctcgaattgctgaattcagggtacgaattcgacgaaggctctattatattcaataagtttcggagcgtgattagctacaagaccgaagaaaagccgattttttccctgaacacagtagcttccgccgactccatgtctatatacgatgacattgacgctgacgtgctccagaactatcaggaatataacctagctaacataatttactactcactgaaggagtccaccacttccgagcagagtgctaggatgacggcaatggataacgctagtaagaacgcgtctgagatgatcgataaacttaccctgacattcaaccgcacccggcaggccgtgatcacaaaggagttgatcgaaatcatctctggggcagccgcactctag

SEQ ID NO: 215100 - DNA, 642 bp, synthetic construct
  misc_feature 1..642: note = Description of Artificial Sequence: Synthetic coding sequence
  source 1..642: mol_type = other DNA
atggcggcaccggcagtctccggcctctcaaggcaagtgcgctgtttttctacctcggtggtgcgcccttttgcaaaactcgtccgaccacccgtgcaggtatatggaatcgaaggtcgctatgcgactgcactgtactccgcagcttctaaacagaataagctggagcaggttgaaaaggaactgctgcgtgtcgcccagatcctgaaggagcctaaggtcgcagccagtgtgttaaatccttacgtgaaacgtagcataaaagtgaagtcactcaacgacattacagccaaggaacgattttctcccctcacgacaaatcttataaatctgctggcagagaacgggagactgagcaacactcagggagtggtgtccgctttctcaaccatgatgtcagtacataggggtgaagtcccctgcaccgtcacctccgcttcgccccttgaggaagcgacgctctccgagctgaagactgtgttaaaaagcttcctcagccagggacaggtgcttaagctggaagcgaaaacagacccctccattttgggcggaatgatcgtccgcattggggaaaagtatgttgacatgtctgtgaagacaaagatccagaagctggggcgtgctatgcgcgaaatcgtgtag

SEQ ID NO: 215101 - DNA, 411 bp, synthetic construct
  misc_feature 1..411: note = Description of Artificial Sequence: Synthetic coding sequence
  source 1..411: mol_type = other DNA
atgcaaacagcaggcgctctgttcataagtcctgcattgattagatgctgcactcggggattgatccgaccggtctccgcctcttttttgaactcacctgtgaactctagcaagcagccatcctactctaattttccactgcaggtggcccgtagggagtttcagactagtgtggtgtctagagatatcgataccgccgcaaagtttatcggcgctggggctgcaactgtaggggtggccggttccggagccggaatcggtactgtctttggctctctgattattggttatgccaggaatccatcactgaagcagcagctgttctcttatgccattctggggttcgccctgtccgaggccatgggattattctgcctcatggtcgcattcttgattctgtttgccatgtag

SEQ ID NO: 215102 - DNA, 411 bp, synthetic construct
  misc_feature 1..411: note = Description of Artificial Sequence: Synthetic coding sequence
  source 1..411: mol_type = other DNA
atgcaaaccgccggagctctgttcattagccccgcattaattcgttgctgtacacgtggtctcattagaccggtttcagcttcgttcctgaactctccggtgaattctagcaaacagcctagttactctaattttccgctgcaagtcgccaggcgggaattccagacctcagtggtgtcccgtgatatcgatactgctgcaaaattcatcggcgcaggagccgctactgttggtgtggccggatccggagctgggattggcacagtgtttggctcgcttatcatcgggtacgccagaaatccctccctgaagcagcaactgttcagttacgcaatccttggatttgctctctcagaggccatgggactgttttgcctcatggtcgctttccttattctgtttgcgatgtag

SEQ ID NO: 215103 - DNA, 474 bp, synthetic construct
  misc_feature 1..474: note = Description of Artificial Sequence: Synthetic coding sequence
  source 1..474: mol_type = other DNA
atgcctgaactgattctgtctcctgctactgccccacaccccctgaagatgttcgcttgttctaagtttgtttccacaccttcattagtcaaatctacttcccagcttctttccaggcctctgagtgctgtcgtcctgaagcgaccggagatcctgaccgacgaatcactgagctcactcgctgtctcctgcccactgactagcctggtcagcagccgcagcttccagaccagtgcgatctcccgggacattgacactgccgctaagtttattggggctggggctgccactgttggagtggccggttcaggagcaggaattggaaccgtgtttggatccttgatcattgggtacgccaggaacccttcactcaaacagcagctcttcagttatgcaatcttaggttttgcactgtccgaagctatgggcctcttctgcttgatggtcgcctttctgatactgtttgccatgtag

SEQ ID NO: 215104 - DNA, 597 bp, synthetic construct
  misc_feature 1..597: note = Description of Artificial Sequence: Synthetic coding sequence
  source 1..597: mol_type = other DNA
atgcccgaattgatcctgtacgtggcaatcacactatccgtagcagaacgactcgtggggccagggcacgcctgcgcagaaccaagctttcggagttccaggtgttccgcacccctttgccttctgtgtagtggtagttcctctcccgctactgcccctcaccccctcaagatgttcgcatgttctaagttcgtatcaactccctctcttgttaaatcaactagccaacttttgagccgtcccctgtcagcagtggtcctcaaaagacctgagatcctcacagatgagtctctgagctcattagccgtctcatgtcccctgacctctctagtaagtagtcggagctttcagacctcggccatttcccgagatatcgacacagctgctaaatttatcggggcaggagccgctaccgtcggcgtggccggatctggagccggaattggtaccgtgtttggctccctgattatcggatatgctcgcaatccatcactgaagcagcagctgttctcctacgccatcctggggtttgctctctccgaggctatggggctgttttgcctcatggtggcatttctgatcctgttcgctatgtag

SEQ ID NO: 215105 - DNA, 426 bp, synthetic construct
  misc_feature 1..426: note = Description of Artificial Sequence: Synthetic coding sequence
  source 1..426: mol_type = other DNA
atgttcgcctgcagcaagtttgtgagcacgccgtctctcgttaagagcactagtcagctccttagtaggccactgagcgccgtcgtgctgaagagacccgagattctcacggacgaatcactgtcttctctggccgtctcctgtcccctgacgtctctggtcagttcgcgaagttttcagacttccgccatcagccgggacatcgacacagctgctaagtttattggggctggcgcagcgaccgttggggttgccggttctggcgcagggatcggtaccgtatttggaagcttgataattggctatgcacgcaatcccagtctgaaacagcagctcttttcttatgcaattcttgggttcgcccttagcgaggccatgggactgttttgcttgatggtggcctttctgatactgttcgctatgtag

SEQ ID NO: 215106 - DNA, 429 bp, synthetic construct
  misc_feature 1..429: note = Description of Artificial Sequence: Synthetic coding sequence
  source 1..429: mol_type = other DNA
atgtttgcgtgtgccaagctcgcttgcacccccagcctcatacgcgctgggagtcgcgtagcctaccgcccaatttcagccagtgtcttatctcgtcctgaggcctcgaggaccggagagggctcaaccgtctttaatggagcacagaatggagtatcccagctgatccaacgggaatttcagacatctgccatcagccgagacattgatactgcggctaagttcatcggggctggcgcagcaaccgtcggtgtggccggatctggtgcgggaatcgggaccgtcttcggaagcctgatcataggctatgccagaaatccgtccctgaagcagcagctgttcagttacgcaatcctgggctttgcgctgtcagaggcaatgggcctgttttgccttatggtggctttcctcatactttttgccatgtag

SEQ ID NO: 215107 - DNA, 429 bp, synthetic construct
  misc_feature 1..429: note = Description of Artificial Sequence: Synthetic coding sequence
  source 1..429: mol_type = other DNA
atgtttgcatgtgccaagcttgcgtgtacaccttccctgatccgtgccggaagtcgtgtcgcataccgacccatcagtgcttccgtcctctcgcgcccagaagcttcccgtaccggggagggatccactgtgtttaacggagcccagaacggggtgtcgcaactcatccaaagagagttccagaccagcgccatctcccgcgacatagatactgcagctaagtttatcggcgctggagccgcaaccgtgggggtggcaggttccggggctggaatcgggacagtgtttggaagcctcataatcggctacgcccgaaacccatcactaaagcagcaactcttctcttacgcaatcctcggctttgccttatcagaggcaatgggtctattttgccttatggtcgcctttttgatcctctttgctatgtag

SEQ ID NO: 215108 - DNA, 429 bp, synthetic construct
  misc_feature 1..429: note = Description of Artificial Sequence: Synthetic coding sequence
  source 1..429: mol_type = other DNA
atgttcgcctgcgctaaactcgcctgcaccccctctttgatcagggccggatccagagtggcctaccggccaatttcggcctccgtgctgagccgacctgaagcctcccgcaccggagaaggctctactgttttcaacggcgcacagaatggggtcagtcagcttatccagagggagttccagacctctgccatttcacgagatattgataccgctgccaaattcatcggagccggtgctgctacggttggggttgccggaagcggagccggtatcggcacagtgtttggttcattgatcatcgggtatgctcgaaacccgagcctgaagcagcagctcttcagttatgctatcctaggctttgccctcagcgaggccatgggtctgttttgcctgatggtggcattcctgatcttgttcgccatgtag

SEQ ID NO: 215109 - DNA, 210 bp, synthetic construct
  misc_feature 1..210: note = Description of Artificial Sequence: Synthetic coding sequence
  source 1..210: mol_type = other DNA
atggttccacctgtgcaggtgagcccactaatcaagctgggccgttattccgccttattcctcggtgtggcatacggtgccacaaggtacaattacttaaagcctcgggctgaagaggagcggaggatagcagccgaggagaagaagaagcaggacgaactgaaaaggatcgcgagagagctagctgaagacgacagcatcctgaagtag

SEQ ID NO: 215110 - DNA, 327 bp, synthetic construct
  misc_feature 1..327: note = Description of Artificial Sequence: Synthetic coding sequence
  source 1..327: mol_type = other DNA
atgattctgcagcgactgttccgattttcttctgtgatacggtccgctgtcagtgtgcacttacggcgaaacataggcgtcactgccgttgcttttaataaagagctggaccctatccaaaaactcttcgttgataagatcagagaatacaagtccaagcggcagacgtctggcggaccggttgacgcttcaagtgagtatcagcaggaactcgaaagggaactgtttaagctaaaacaaatgtttggtaacgccgacatgaacacattcccaacttttaaattcgaggatccaaagttcgaagtgattgagaaaccacaagcatag

SEQ ID NO: 215111 - DNA, 327 bp, synthetic construct
  misc_feature 1..327: note = Description of Artificial Sequence: Synthetic coding sequence
  source 1..327: mol_type = other DNA
atgatcttacagagactctttagattttctagtgtgattcggtcagcagtgtccgtccatcttcggcgaaacatcggggttaccgcggtcgcattcaataaggaattagatcctatacagaagttgtttgttgataaaattagggagtataaaagtaaacggcagactagtgggggtcccgttgatgcgtccagtgagtatcagcaggagttggaaagggagctcttcaagctaaagcagatgtttggcaatgcagacatgaataccttcccaacgttcaagttcgaggacccaaagtttgaagtaatagagaagcctcaagcttag

SEQ ID NO: 215112 - DNA, 327 bp, synthetic construct
  misc_feature 1..327: note = Description of Artificial Sequence: Synthetic coding sequence
  source 1..327: mol_type = other DNA
atgatactgcaacgcctattcagattctccagcgttatccgcagtgccgttagcgtccacctgaggcgaaacattggagttaccgccgtggcttttaacaaggaacttgatcctattcagaagctctttgtcgacaaaatccgggaatataagtccaaaagacagacaagcggaggaccagtcgatgccagctctgagtatcaacaggaactggagcgagaactgttcaaactcaagcagatgttcggcaatgcggacatgaatacatttcctacattcaaattcgaagatcctaagtttgaagtaatcgagaagccgcaggcttag

SEQ ID NO: 215113 - DNA, 327 bp, synthetic construct
  misc_feature 1..327: note = Description of Artificial Sequence: Synthetic coding sequence
  source 1..327: mol_type = other DNA
atgatcttgcaaagattgtttcgattttcttctgtaatccgttctgcggtgagcgtgcacctgagaaggaatatcggggttactgctgtggcttttaacaaggaactcgaccctatccagaagctcttcgtggacaagattcgggagtacaaatctaaacggcagacttccggagggcctgttgacgccagctcggagtaccaacaggagctggagcgggaactgtttaaactaaaacagatgtttggcaacgccgatatgaataccttccctacttttaaattcgaggatcccaaattcgaggtcatcgagaaaccccaggcatag

SEQ ID NO: 215114 - DNA, 327 bp, synthetic construct
  misc_feature 1..327: note = Description of Artificial Sequence: Synthetic coding sequence
  source 1..327: mol_type = other DNA
atgatactacagcgcttgtttcgcttttcaagtgtaatccgatcagcagtttccgttcatttgcgtcgtaacattggggtcaccgctgtagccttcaataaagagctggatccgatccaaaagctgtttgtcgataaaatccgtgaatacaagagcaaacgccagacgtccggaggtcccgtcgacgcatcaagtgagtatcagcaagaactggagcgtgaattatttaagctgaaacagatgttcggaaatgccgacatgaatacttttcccaccttcaaattcgaggaccccaagttcgaagtgatcgagaagccccaggcctag

SEQ ID NO: 215115 - DNA, 351 bp, synthetic construct
  misc_feature 1..351: note = Description of Artificial Sequence: Synthetic coding sequence
  source 1..351: mol_type = other DNA
atgcattgcgacggtgggataagcatgattctgcaacgcttgttccgttttagcagcgtgattagatccgccgtgtccgtgcacctacggcgaaatatcggggttaccgccgtggcattcaacaaagagctggacccaatacagaaactttttgttgacaagattcgagaatacaaaagcaaacgccaaacaagcggcggtcccgtggacgcttcctccgagtatcagcaggagctagaaagagaacttttcaagctgaaacagatgttcggaaacgctgatatgaacacgttccccacttttaagtttgaggatcccaagttcgaggtaattgaaaagccccaggcctag

SEQ ID NO: 215116 - DNA, 567 bp, synthetic construct
  misc_feature 1..567: note = Description of Artificial Sequence: Synthetic coding sequence
  source 1..567: mol_type = other DNA
atgacagcaaaaggttcaacagggatggagatcctcctatctaccctggaaaacactaaggacctgcagacaaccctaaacatactgagcatactggtcgaactggtatccgctggcggtgggaggcgggttagcttcctagttacaaagggtggatcacagatcctcttgcagctcctcatgaatgccagcaaggaaagtcctccacacgaggacctgatggttcagatccatagcatcttagcaaaaataggaccaaaagacaagaagtttggagtcaaggctcgtataaacggtgcactcaatattacgctgaaccttgtcaagcagaatctgcaaaaccacaggttagtactcccctgtctgcagctgcttcgcgtgtattccgccaattccgtaaactcggtatcgctcggaaagaacggagtagtcgaattgatgttcaaaattattggtcctttctccaagaagaattcgagtctaatcaagaacaaatgtcaagagtcttgccgtcagcgtatctgcccctctgctttcaataacctgtgcaggttagccccaccctag

SEQ ID NO: 215117 - DNA, 3681 bp, synthetic construct
  misc_feature 1..3681: note = Description of Artificial Sequence: Synthetic coding sequence
  source 1..3681: mol_type = other DNA
atgtctaagctgaaggttattccggaaaaatctctgacaaataactctaggatcgtaggcttgcttgctcagctcgaaaagatcaatgccgaaccatcggagtctgatacagctcggtacgtcacctcaaagatactacacttggctcagtcgcaggagaaaacacggagagagatgaccgctaagggcagtacgggaatggagatattgctctccactctagagaacaccaaggatctccagactaccttgaacattctaagcatcctggtggaactcgtaagcgcgggaggaggtagaagagtctctttcttggttactaagggaggtagccagatcttactgcagttgcttatgaatgccagtaaggaatctccgccacacgaggatctaatggtacagatccacagcattctcgccaagattggacctaaagacaaaaagtttggggttaaagcccgtattaacggcgctctgaatatcaccctcaatctagtgaagcagaacctgcagaatcacaggctggtcctaccatgtctgcagctcctccgtgtgtactctgcaaactcagtaaattccgtgagtctaggcaagaacggcgttgttgagctgatgttcaagattatcggtccgtttagtaaaaagaacagtagtctgattaaagtggcactggacacacttgccgctttgctgaaaagtaagacaaacgcacggcgagccgttgatcgcggttatgtgcaggtcctcctgacaatttacgtagactggcataggcatgataaccggcacaggaatatgcttattcgtaaaggcattctccagagcttgaaaagcgtgacaaacatcaagctggggcgtaaagcctttattgacgctaacgggatgaaaatcctgtataacacatcccaggagtgtcttgcagtccgtaccttagacccactcgttaacacaagctccttgattatgaggaagtgtttccccaagaaccggctgcccctgcccaccatcaagtcaagcttccatttccagctccctgtaatccccgttaccggtccagtggctcagctttactcattaccacctgaggtagacgatgttgtggatgagagtgacgacaatgatgacattgatgtggaagccgagaacgagacagaaaatgaggacgaccttgaccaaaacttcaagaacgacgacatcgaaacagatattaataaactgaagccacagcaggaacctggtcgcaccattgaagacctgaaaatgtacgaacacctctttccagaactggtagacgattttcaggattatgatctcatcagtaaagaaccaaagccattcgtttttgaggggaaggttagaggtcccatcgtcgtgcctactgccggtgaagaaacatctggtaattctggtaacttgcgcaaggtcgtgatgaaggagaacattagctcaaaaggggatgagggggagaaaaaatcaacctttatggatctggctaaggaagatatcaaggataatgatcgtacactgcagcaacagcctggtgatcagaatcgtaccatatcttccgtgcacggcctgaacaatgacatcgtgaaggccctcgacaggatcacactgcagaacatacccagccagacggcgcctggattcacggcagagatgaaaaaggattgcagcctgccccttaccgtcctcacctgtgcgaaagcttgtccccacatggctacgtgtgggaatgttctgtttgagggcagaaccgttcagcttggcaagctgtgctgcacaggggtggagacagaagacgatgaagacactgaaagcaatagcagcgttgagcaggcttcagttgaagtgcctgatggaccaaccttgcacgatcccgacttgtatatcgaaattgtgaagaacacaaagtcagtgcccgaatattctgaagtggcctatcctgactatttcggacacatccctccccctttcaaggaacctattctagagaggccatacggagtacagcggaccaaaattgctcaagatattgagcgcctgattcaccagtccgacatcatagacagggtggtttacgatctggataatcctaattacacgatccctgaggagggagatatcctcaagtttaacagcaaattcgagtcaggtaacctgaggaaggttatccagatcaggaagaatgagtacgatctcatactcaatagtgacattaacagtaaccattatcaccagtggttttatttcgaggtgtctggcatgagaccaggggtggcctaccggtttaatatcatcaattgtgaaaagtccaatagccagttcaattacggaatgcagcctctcatgtatagtgtgcaggaggcccttaacgctagaccctggtggatccgaatgggcactgatatttgctactacaaaaatcatttctcacgatcttccgttgctgcgggtgggcaaaaaggcaaatcatattacacaatcacgttcacagtaaactttccccacaaggacgacgtgtgttactttgcctatcattatccctatacctactcgaccctgcagatgcacctgcagaaacttgaatccgcacacaacccacagcaaatatattttcgcaaggacgttttatgtgaaaccctgagtgggaactcgtgcccattggttacaattactgcgatgccagagagtaactattacgaacacatctgtcatttccgtaaccgaccttatgtttttttgagtgctcgtgtacatccaggagagaccaatgcctcttgggtgatgaaagggactctggagtatctgatgtccaacaatccaaccgcccagagcttacgggaaagctacatatttaagatcgtcccgatgcttaatcccgacggtgtaatcaatggcaatcatcgttgctccttaagcggggaggacctaaataggcagtggcagtctccatctccggacctgcaccctactatttaccacgctaaagggctgctgcagtacctggccgctgtgaaaaggttgccgctagtgtactgcgattaccacggacactctcgcaaaaagaatgttttcatgtacggctgtagcattaaagagactgtctggcacaccaacgacaatgcaacctcttgtgacgtggtggaggacactggatatcggacattgcccaaaatcttgagccacatcgccccagcattttgtatgtccagctgctctttcgtggtcgaaaagtctaaggaatctacagccagagtcgtggtgtggcgcgagatcggcgttcagcggtcctataccatggaaagtaccttatgtggatgtgatcaaggtaaatataagggcctgcagattggtacaagagagttggaggagatgggcgctaaattctgcgtgggactcctacggctgaagagactcacatctcccctggaatacaatttaccgagcagcttgctcgacttcgaaaatgatctgatagaaagcagctgtaaggttacttctccgactacctacgtattggatgaggatgagcctcgtttcctcgaggaagtggattattccgccgagtctaacgacgaactggatatcgagttagctgagaatgtcggcgactacgagccctctgctcaggaagaggtactcagcgactctgaactcagcaggacctatcttccttag

SEQ ID NO: 215118 - DNA, 567 bp, synthetic construct
  misc_feature 1..567: note = Description of Artificial Sequence: Synthetic coding sequence
  source 1..567: mol_type = other DNA
atgacagctaagggaagtactggcatggagatcctcttgagtacactcgaaaatacgaaggaccttcagactactttaaacattctgtctattcttgttgagctggtctccgccggaggaggcaggcgggtgtcatttttggtgaccaaagggggtagtcagatcttactacagcttctcatgaatgccagcaaggagtcaccaccacatgaagacctgatggtccaaatacactccatcctagctaagatcggaccaaaggacaagaagtttggggtcaaggccagaattaatggggctctgaatatcaccctcaatctggtcaagcaaaatttacagaatcaccgtctggtgctaccatgtctgcagctcttgcgagtatatagcgccaattccgtgaattccgtttctttgggaaagaacggagttgtggaattaatgttcaaaataataggcccattttctaaaaagaatagctctcttattaaaaacaaatgtcaggagtcatgtcgacagcgcatctgtccttcggcctttaataacctctgcagacttgccccaccctag

SEQ ID NO: 215119 - DNA, 714 bp, synthetic construct
  misc_feature 1..714: note = Description of Artificial Sequence: Synthetic coding sequence
  source 1..714: mol_type = other DNA
atgagcaagctcaaagtcattcctgaaaagtctctgaccaataacagccggattgtgggtctgctggcgcagctggagaagatcaatgccgagccgtccgagtccgatacggcaaggtacgtcacttctaagatcctccatttagcccagagccaggaaaaaacccgccgagagatgacagcaaagggcagcactgggatggagattctcctgagcacactggaaaatacaaaggatctccaaaccactctcaatatcctgtcaattctggtggaactcgtgtctgctgggggtgggcgtagggtgtccttcttagtgacgaaaggcggatctcagattctgttacaactgctcatgaatgcgtcaaaagagtccccacctcacgaggacctcatggtgcagattcactcaatactagcaaagatcggacccaaggacaaaaaatttggcgtcaaagcacggatcaacggcgcattaaatattactttgaatctggtaaagcagaatctgcagaatcatagactggtcctcccttgtctgcagcttctgcgagtctattcagcgaattccgtgaattccgtgtctctgggaaagaacggcgtcgtggagctaatgtttaagatcattgggcctttcagcaagaagaatagtagtctaataaagaatgtctggcagagcggactctggatccttttaagtatccccccagtatag

SEQ ID NO: 215120 - DNA, 3561 bp, synthetic construct
  misc_feature 1..3561: note = Description of Artificial Sequence: Synthetic coding sequence
  source 1..3561: mol_type = other DNA
atgtccaagctgaaagtaatacccgagaagtctctgaccaacaattccaggattgtcggtctccttgcccagttggaaaagatcaacgccgagccgagtgagagtgacactgcacgatatgtgacaagcaagattctgcacctggcacagagccaagaaaagacacgcagagagatgaccgctaagggctcaacggggatggagatcctgctatctaccctcgagaatactaaggacttacagacaacactcaacatcctgtcaatcctggtggaactcgtatcggccggagggggacggcgtgtatcttttctcgtgaccaaaggcggatctcagatcctgttacagctcctgatgaacgcttccaaggaatccccaccacacgaggatttaatggttcagattcattcaatcctcgcaaagatcggacctaaggataaaaaattcggggtgaaagctaggattaacggcgctctgaatatcacacttaacctggtgaaacagaacctgcagaatcacaggctggttcttccttgcctccagctgttgagagtgtacagcgcaaattctgttaactccgtcagtctgggaaagaacggagtcgtggagctgatgtttaaaatcattggcccattttccaagaaaaactcaagtttgattaaagtggctctggatactctggctgccctgctcaaatctaaaactaatgctcggagggcagtcgacagaggctatgtgcaagtattattgacgatctacgtcgattggcaccgacacgataatcggcatcgaaacatgttgattaggaagggcatcttgcagtcactgaaaagtgtgaccaatattaaactgggtcgcaaagcctttatcgatgcaaatggcatgaaaattctgtataatacaagtcagctcccagtaatcccagtgactggccctgtggcacagttgtatagcctcccccctgaagtggatgatgtggtggatgagtcagacgacaatgacgacattgacgttgaggccgaaaatgagaccgagaatgaagacgacctggaccagaactttaagaatgatgatattgagaccgatatcaataagctgaaaccccagcaagaacccggtcgcactattgaggacctcaagatgtatgagcacctattccctgagctcgtggacgactttcaagattatgatctgataagcaaggagcccaagccctttgtgtttgaggggaaggttcgaggacctattgttgttcccaccgccggtgaggaaacctctgggaatagcgggaacttgcgaaaagtggtgatgaaggagaacatatcttcaaagggagacgaaggcgagaagaagagtaccttcatggaccttgccaaggaggatataaaagataatgatcggaccctgcagcaacaacccggtgatcaaaatcgaaccatttcttctgtccacgggctgaataatgatattgtaaaggccctggatagaatcacgctgcaaaacatcccctcacagacggcacccggttttacggccgagatgaagaaggattgtagcctccctctcactgtgctgacatgcgcaaaggcatgtccacacatggccacctgcggcaatgttctattcgaaggaaggactgtccaacttgggaagctctgctgtactggcgtggagaccgaggatgacgaggacaccgaatctaatagctctgtagaacaggcctcagttgaagttcccgatggcccaactctgcacgatcccgatctttacattgagattgtgaagaacactaagtccgtgccagagtacagtgaggttgcttatcctgactactttgggcatatccctccaccctttaaagaacccattctagagagaccgtacggagtccagagaacaaaaatcgcccaggacatcgagcggctaattcaccagagcgatattatagaccgcgtggtctacgacctcgataacccaaactatacgatcccagaagaaggggacattttgaagtttaacagcaagtttgagtccggaaatctgcgcaaagtgattcagattaggaaaaacgagtacgatctcatcctgaacagcgatatcaactcaaaccactaccaccagtggttttactttgaggtcagtgggatgcggccaggggtggcctatcggtttaatatcatcaactgcgaaaaaagtaacagtcagtttaactacgggatgcagccattgatgtactccgtgcaggaagccctcaatgcgaggccttggtggattcgaatggggacagacatatgttattacaaaaaccactttagtagaagctcagtggcagcgggtggccagaaagggaaaagctattacacaattacttttacagtgaacttcccacataaggatgatgtctgttactttgcataccattatccttatacctacagtactctccagatgcacctacaaaaattggagagcgctcacaacccccagcagatatactttcgtaaagacgtgctctgtgagaccctgagcggcaatagctgccctctcgttaccatcacagctatgccagaatctaactactacgagcacatctgccacttccgcaaccgtccttacgtttttctctcagccagggttcacccaggagagaccaacgccagctgggtgatgaaaggcaccctcgagtatttgatgtctaacaaccccacagcccagagtctgcgggagagttacattttcaagatcgtcccaatgctcaatcccgacggagtgataaacgggaatcatagatgctcactgagtggcgaggacctgaatcgccagtggcagtcaccctcacctgatcttcaccccacaatctatcacgccaagggactgctgcagtatttggcagcggtgaaacgactcccacttgtctattgtgattaccacggacactctcgtaagaaaaacgtgttcatgtatggctgcagtatcaaggagaccgtatggcacaccaatgacaacgctacctcctgcgacgtggtggaggacactggctatagaacactgcctaaaattctaagccacatcgccccagctttttgtatgtcctcttgcagtttcgtggttgagaagtccaaggagagtaccgcccgtgtcgtcgtctggagagaaatcggcgtccagagaagttacacaatggagagcactctgtgtggctgtgaccagggtaagtataaaggacttcaaattggcacaagagagctcgaagagatgggtgccaaattctgtgtgggtcttctaagactgaaacgtcttacaagtccacttgagtacaatttgccatcctctttgctggacttcgagaacgacctcatagaatccagctgtaaggtgacctctccaaccacctatgtcctagatgaggacgagccacgttttctggaggaggtggattactccgccgagagtaatgatgaactggacatcgagttggcggaaaacgtgggggactatgagcctagcgcccaggaagaagtcttgagcgactctgagttgtcccggacttacctcccctag

SEQ ID NO: 215121 - DNA, 3717 bp, synthetic construct
  misc_feature 1..3717: note = Description of Artificial Sequence: Synthetic coding sequence
  source 1..3717: mol_type = other DNA
atgcggactgggtcagccgcttcatccgccgctgcagcggcagctgccgcagctgcaagtgcctcgcccgctacaggagtctgcatgaagacaccaggagggggacggaggggaatcaggcgggaccccggagctgagccgggtgccgctgctctgaggggtccaaggcaacggcctatactgtcccgtctgaccaataacagtcggatagttggactgctggcacagctcgagaaaatcaacgccgagccgtccgagagtgatacagccagatacgtgacatccaaaatattgcatcttgcccagagccaggagaaaacgcgcagggaaatgaccgcaaaaggcagcactggcatggaaatccttctctcaacactcgagaacacaaaggacctgcagaccaccctgaacatcctgtccatcctggtggaactggtctccgctggtggagggagacgtgtatctttcttggtgaccaaagggggatcccagatcttactacaattgttgatgaatgcttcaaaggaaagcccaccgcacgaggatcttatggtccagatacactccattctggccaagataggtccaaaagataagaaatttggcgtcaaggccaggatcaacggggctctaaacatcaccctgaatctagttaagcagaatctgcagaatcatcgccttgtactgccctgtctgcagctgctacgggtgtattctgctaattccgtgaactccgtttctctcgggaagaatggagtggtggaactgatgttcaagatcattggtcccttcagcaagaagaactcttccttgattaaggtagcactggacaccctcgccgcacttttaaaatccaaaaccaacgcgaggcgcgctgtcgatagaggatatgtgcaggtgctgttaactatttacgttgactggcaccgccacgacaacaggcatagaaacatgctgatccgtaaaggtatcctgcaatctctgaaaagtgtgacgaacatcaagctgggccgaaaagccttcatcgatgccaatgggatgaaaatattatataatacatctcagctccccgtcatccctgtcacaggcccagtcgcccagttatattccctcccgccagaggtggatgatgtcgtagacgaatctgatgataacgacgacattgacgttgaggcagagaatgaaacagaaaacgaggatgaccttgaccagaatttcaagaatgatgatatagaaaccgacatcaataaacttaaaccacaacaggagcccggacgcaccatcgaagacctgaagatgtatgaacatctgttccccgaattggtggacgatttccaggattacgacctgataagcaaagagcctaagcctttcgtattcgagggaaaggtgcgcggacccatcgtagtccccacagctggtgaggaaacctctggcaacagcgggaacttacgtaaggtcgttatgaaggaaaacatcagctccaagggcgacgagggggagaagaagtctacgtttatggacttagcaaaagaggatatcaaagacaatgaccggactcttcagcagcagccaggcgatcagaatcgcactatttcaagtgtacacggacttaataatgatattgtaaaggccctggatcggataaccttgcagaatatccctagccagacagccccagggttcaccgctgagatgaagaaggactgcagcctccccttaacagtactgacgtgcgccaaagcatgcccccatatggctacctgtggcaatgtgctttttgaaggccgtaccgtacagctgggtaagctttgttgcaccggcgttgagacagaagacgatgaagacacggagtctaactcaagcgttgagcaggccagcgtcgaagtccctgatggtcctacactgcatgaccctgacctatatatcgaaatcgtgaaaaacactaaaagcgtacctgaatatagcgaggtagcatatcctgattatttcgggcatatcccccctccattcaaagaaccaatcttggagcggccttacggtgtgcagcggactaagattgcccaagacatcgagaggctgattcatcagtctgatatcatcgaccgagtcgtgtacgatttggacaacccaaactacactattcccgaggaaggagacatattgaaattcaattctaagttcgagagtggcaacctgcgcaaggtaattcagatacgcaagaatgaatatgacctgattttgaactccgatataaattctaaccactatcaccaatggttctatttcgaggtgagtggcatgcgccctggggtggcttatagatttaacatcatcaactgcgaaaagagtaacagccagtttaactacgggatgcagcctctgatgtattccgtacaggaggccctgaacgccagaccatggtggattcgtatgggcacagacatctgctattacaagaatcactttagtcggagtagcgttgctgccggtggtcagaagggaaagtcatattacaccattaccttcaccgtcaattttcctcataaagacgatgtctgctatttcgcttatcattatccctacacttactctaccctgcaaatgcacctgcagaaactggagtccgcgcacaacccgcagcagatttatttccggaaggatgtcctatgcgaaactctctccggcaacagttgccctctcgtgaccataacagccatgcccgagagcaattactacgagcatatttgtcactttaggaatcgaccgtatgtgtttctctcggcccgtgtgcaccctggagaaaccaatgccagctgggtgatgaaggggacactggaatatctgatgtcaaataatccgaccgcgcaaagcttgagggagtcctatatctttaaaattgtacccatgctgaatcccgacggggtcattaatgggaaccacagatgttctctgagcggcgaggatctgaaccgtcagtggcagtccccctctcctgatctccacccgacaatctatcacgcgaaaggactcttgcagtacctggctgccgtgaagagattgcccctggtgtattgtgattaccacggacactcaagaaagaaaaacgtgtttatgtacgggtgttccattaaagaaacagtgtggcacacaaacgataacgccacatcgtgtgacgtcgtcgaggacacaggataccggaccctgcccaagatcctctctcacatcgctccagccttctgcatgagttcttgttcgtttgtcgtcgaaaaatctaaggaatcaaccgcacgcgtggttgtgtggcgcgagatcggagttcaaagaagctacacaatggagtcaacgctgtgcggttgtgaccagggcaaatataagggattacagataggaactagagaacttgaagaaatgggagctaaattctgcgttggcttattacggcttaagaggctcactagccctttggaatacaacctgccatcaagcctgctcgactttgaaaacgacttgatcgagagtagctgcaaagttacatcacccacaacatatgtgctggatgaagatgagccacgcttcctggaggaagtggactactcagccgagtcaaacgatgagctggacattgagctggccgagaatgtgggcgactacgaacccagtgcacaggaggaagtgctgagcgactcagagctctctaggacttatctcccctag

SEQ ID NO: 215122 - DNA, 1932 bp, synthetic construct
  misc_feature 1..1932: note = Description of Artificial Sequence: Synthetic coding sequence
  source 1..1932: mol_type = other DNA
atgaatgctagcaaagaaagcccccctcacgaggaccttatggtgcagatccattcaatcctggcaaagatcggtccgaaggccgttaatagtgtatcactggggaaaaatggtgtagtggaactcatgttcaaaattattggaccattctcgaagaaaaactcctctttaatcaaggttgccctcgatacacttgcagccctgttgaaatccaagacaaatgccaggagagccgttgaccgcggatacgtgcaggtcctgctcacgatctacgtcgattggcatcggcacgataacagacaccggaacatgctgatccgcaagggcattctgcagagccttaagagcgtgactaatataaagctgggccgaaaagccttcatcgatgcaaatggaatgaagattctctataacacctctcaggagtgcctggccgtcagaacacttgacccccttgtcaacacctcttcactgatcatgagaaaatgtttccccaagaatcgccttcctctccccacaatcaagtcctctttccatttccaactgccggtcatccctgtgacagggccagtggcccagctttattcactgccgccagaagttgacgatgtagtggatgagtccgatgataacgacgacattgatgtggaggccgagaatgaaactgagaatgaggatgatctggaccaaaattttaagaatgatgacatcgaaaccgacataaataagctgaaacctcaacaagagccgggtagaaccattgaagacttgaaaatgtacgagcacctctttccagaactagtcgatgacttccaagactacgatctaatatctaaggagccaaaacccttcgtattcgaaggaaaagtccgtgggcctatagtcgtgccaactgccggagaagagacctcgggcaatagtgggaatctccgcaaagtggtgatgaaggaaaacatctcctccaaaggagatgaaggagaaaagaagtcaacctttatggatctggccaaggaagacatcaaggacaatgaccgaacattacagcagcagcccggagaccagaaccgaacaatctcctctgtacatggtctaaacaacgatatcgtgaaagccctggaccggattaccctccaaaacatcccctcccagaccgcacctggcttcacagctgaaatgaagaaggattgttcactccccctcactgtgctcacatgcgctaaggcctgccctcatatggctacatgtggcaatgtgctttttgagggaaggaccgtccagctgggtaagctctgttgcacaggagtcgagaccgaggatgatgaggacactgaatcgaactcttctgtggagcaggcctccgtggaggtgcctgacggtcccacactccacgatcctgatctttatattgagatcgttaagaataccaagtccgtgccagaatattcagaggtcgcttatccagattatttcggtcatattcctccaccctttaaggaacctatccttgaaagaccatatggagtgcagcgaacgaaaatcgcacaggatatcgagaggctgatccatcaatcggacattatcgaccgagtggtatacgacctggacaacccaaactacaccattcccgaggagggcgacattctgaagttcaactctaagttcgagagtggcaacttgaggaaggtgatccagattcgaaagaatgaatacgacctcattctcaatagtgacattaatagtaatcattaccaccagtggttttacttcgaggtctccggcatgaggcctggtgtggcataccggttcaatattatcaattgtgaaaaaagcaactctcagttcaactacgctctgccgctcatgagttggatgaaaatgaatctggatagtctcaagaaattgatcacggtccagaaggttatgatgagctag

SEQ ID NO: 215123 - DNA, 1086 bp, synthetic construct
  misc_feature 1..1086: note = Description of Artificial Sequence: Synthetic coding sequence
  source 1..1086: mol_type = other DNA
atggtccatgccgaggcctttagtaggcccctgtcccgaaacgaagtagtaggcttgatcttcagactcacaatcttcggggcagtcacatatttcaccatcaagtggatggtggacgcgatcgatccaacccgaaaacagaaggtggaggcccaaaaacaggccgagaaactgatgaaacagatcggagtgaagaatgttaaactcagcgagtatgaaatgtcaattgcggcacacctcgtggatccacttaacatgcacgtcacttggagtgacattgcagggctggacgatgttatcacagatctcaaggacacagtcatcctcccaataaagaagaagcacctttttgaaaacagtcgcctgctccagcctcccaagggcgtgcttctgtacggccctccgggatgcggcaagaccttgatagctaaggcaactgcaaaggaagccggatgccgctttattaatctgcagcccagcaccctcaccgacaagtggtatggagaatctcaaaagctggcggcagccgtgttctccctggctatcaagctccagccatccatcatattcatcgacgaaatcgattctttcctgcgtaatcgctccagctccgatcatgaagccaccgcgatgatgaaagcccagtttatgagtctttgggacggcctggacactgatcattcatgccaagtcattgtgatgggagcgaccaatagaccccaggatctcgactccgctatcatgcgaagaatgccaacccgtttccacattaaccagcccgctctcaagcagagggaagccatattgaagttgattctcaagaatgaaaatgtggataggcacgtggacctgctagaagtcgctcaggagacagacgggttctcagggagcgatctgaaagagatgtgccgggacgctgcccttttatgtgtgagagagtacgtgaactcaaccagcgaggagtctcatgatgaggatgaaatcaggccagtgcagcagcaggacctgcatcgcgcaatcgagaaaatgaagaaatcaaaggatgccgcttttcagaatgtacttacccatgtatgcttagactag

SEQ ID NO: 215124 - DNA, 1086 bp, synthetic construct
  misc_feature 1..1086: note = Description of Artificial Sequence: Synthetic coding sequence
  source 1..1086: mol_type = other DNA
atggtacacgctgaggccttctcccggcctctctccagaaatgaggtggttgggttgatctttcgattgacgatcttcggcgcagtgacatacttcacaattaaatggatggtagacgccattgatccgaccagaaagcagaaggtcgaagctcaaaagcaggccgagaagcttatgaagcagatcggagtgaaaaatgttaagcttagtgagtatgaaatgagcatagctgcccacctggttgaccccctaaacatgcacgtgacgtggagtgacattgccggtctcgacgacgtcattaccgacctgaaggatacagtgatccttcctatcaagaagaagcatctgtttgaaaactctcgacttttacagcctccaaagggcgtgctgctttacggccctccgggatgcggaaagaccctaatcgccaaagccactgcgaaggaggcaggttgccggtttatcaacctgcagccatccacactgacggataagtggtacggggagagccagaaactggccgctgctgtgttttccctcgcgatcaaactgcagccatctattattttcatcgatgaaatcgattcgtttctgcggaataggtcatctagcgatcacgaggcgaccgcgatgatgaaagcgcagttcatgtcactgtgggatggcctagatactgaccattcttgccaggtgattgtgatgggtgcaacaaatcgccctcaagacctggacagcgccattatgcggagaatgcccacgagatttcacatcaatcagcctgcgctgaagcaacgcgaggccatacttaagttaattttgaagaacgaaaacgtggaccgccacgtggatttgttggaagtcgctcaagagacagatggattttcagggtctgacctgaaggagatgtgtagagatgctgccctgctgtgcgttcgtgagtacgtgaattctactagtgaggagtctcatgatgaggacgagatccggccagtccagcagcaggatctccacagagcgattgagaaaatgaagaaatccaaggacgctgctttccagaacgtgctcactcacgtgtgcctggattag

SEQ ID NO: 215125 - DNA, 822 bp, synthetic construct
  misc_feature 1..822: note = Description of Artificial Sequence: Synthetic coding sequence
  source 1..822: mol_type = other DNA
atgaaacaaatcggtgtgaagaatgtgaagttatcggagtatgagatgtccattgccgcacatctcgtggatccattgaatatgcacgtaacctggtctgatatcgccggtctcgatgacgtcattaccgacctgaaagatacggtgatactccctatcaaaaagaaacatctgttcgaaaattcgcggctcctccagccgccaaagggcgtcctgttatatggaccgccaggatgcgggaaaactctcatcgcgaaagcaactgccaaggaagcgggatgccggttcatcaacctacagccgagcacgctgaccgacaagtggtatggcgagagtcagaagctagccgcagccgttttctcactcgctatcaaactacaaccctcaatcatttttattgatgagatagactcctttcttaggaaccggagtagctccgaccatgaagcaactgcgatgatgaaagctcagttcatgtccttgtgggacgggctggatactgaccacagctgccaggctcttaaacagagggaggcaattctgaagctgatcctcaaaaacgagaacgtggacagacatgtcgacctcctagaagtcgctcaggagacagacggtttctcaggatccgacctgaaggaaatgtgtcgcgatgccgcactgctgtgcgtaagagagtacgtcaattccacaagtgaggagagccacgacgaggacgaaattcgccctgtacagcagcaggatctgcatagggctattgaaaaaatgaagaaatccaaggacgctgccttccagaatgtgctcacccacgtgtgcctggactag

SEQ ID NO: 215126 - DNA, 864 bp, synthetic construct
  misc_feature 1..864: note = Description of Artificial Sequence: Synthetic coding sequence
  source 1..864: mol_type = other DNA
atggtgcatgcggaagcattctcacgcccactatcccgcaacgaggtcgtaggtcttatctttagacttacaatttttggagctgtcacctacttcactataaagtggatggtcgatgccattgaccccactcggaagcaaaaagttgaggcccagaaacaggcggaaaagctgatgaagcaaatcggggtgaagaacgtgaagctcagcgagtacgaaatgtccattgcagctcatctcgtcgatccccttaacatgcatgtgacatggtccgatatagcaggtctggatgacgtgataacagacctgaaggacaccgttatccttccaataaagaaaaagcatctgttcgagaattccagactgttacagccaccaaaaggcgtcctgttgtacggccctcccggatgcggcaaaactctgatcgctaaggctaccgccaaagaggccggatgcagattcataaacttacagccgtcaacactgactgacaagtggtacggtgagtcacaaaaactcgctgcagccgtgttttctctggccatcaaactgcagccatctatcatcttcattgatgagatagatagttttcttagaaatcggagcagctctgaccacgaggctaccgctatgatgaaagcccagtttatgagtctatgggatggtctggatacggaccacagttgccaagtgatcgtgatgggagccaccaacagacctcaggacctcgactctgcaatcatgcgacgaatgcccacgcggttccacataaatcagcctgcactgaagcaacgcgaagcgatcctgaagcttatcctgaaaaacgagaacttgagaaaattaaagcccagagaagtcctctag

SEQ ID NO: 215127 - DNA, 4173 bp, synthetic construct
  misc_feature 1..4173: note = Description of Artificial Sequence: Synthetic coding sequence
  source 1..4173: mol_type = other DNA
atggtggttctgcgctcttccctcgagctccacaaccatagcgcagctagcgctactgggtctctcgatttgtcgtctgactttctctctcttgagcatattggtaggagacgcttacggagtgcaggggctgctcagaagaaaccagccgctaccacagccaaagcaggcgatggaagttcagttaaggaagttgaaacttaccacagaaccagagccctgcggagcttgagaaaggatgcacagaatagcagcgactcctccttcgaaaaaaatgtcgagattaccgagcaattggcgaatgggaggcacttcacgaggcagctggcaagacagcaagctgataagaagaaagaggagcacagggaggacaaggtgatccccgtcacaaggtcattgcgagcaaggaacattgtccaaagcacggagcatctgcacgaggacaacggagatgtagaagttagacgttcttgtcgaataagatcccgctactccggcgtcaatcagtccatgctctttgataagttgatcactaatacagctgaagcagtgcttcagaagatggacgacatgaagaagatgaggaggcagaggatgcgggaactcgaggacttgggcgtctttaacgaaaccgaggagtctaacctgaacatgtatacgaggggtaaacagaaggacattcagcgcaccgacgaggaaaccaccgacaatcaggaaggtagcgtggaatcatctgaggagggggaagatcaagagcatgaagacgatggagaagacgaggatgacgaagatgacgatgacgacgacgatgatgacgatgatgacgatgacgaggatgatgaggatgaggaagatggagaggaggagaaccagaagagatactacttaagacagagaaaggcaactgtctactatcaggcgcctctcgagaaaccccgacaccagaggaaacccaatatcttctattcggggcctgccagtcctgctcgaccgcgatatagattatcctctgcgggtcccaggtcaccttattgcaaaaggatgaacagacgcagacatgcaatccacagttctgattctacatcttcatcctccagcgaggacgagcagcatttcgaaaggcgcaggaagcggagccgaaaccgagccatcaatcggtgccttcccctgaactttcgcaaggacgaactgaagggaatctacaaggatcgcatgaaaattggcgcaagcctcgccgacgttgaccctatgcagcttgatagcagcgttagattcgattctgttggaggcttaagcaaccatatcgccgcacttaaggaaatggtggtgttcccattgctctatccggaggtttttgagaaatttaagatccagcccccacgaggttgcctgttctacggccctcccggtactggaaagacgctggtggctcgggctcttgccaacgagtgcagccagggggataagagggtggcattctttatgaggaagggggcagattgtctttctaaatgggtaggcgagagcgaacggcagctcaggttgcttttcgaccaggcctaccagatgcgaccgtctatcatcttttttgacgagattgatggactcgccccagtcagatccagtagacaagaccagatccactcatcaatcgtctctacgctgctggcattgatggatgggctggatagtcgaggggagattgtggtgatcggcgcaacaaatcggttggatagcattgaccctgccctaagacggcctggacgctttgacagggagttcctgttctctctgcccgacaaggaggccaggaaggagatcttgaaaatccacacaagggactggaaccctaaaccccttgacacattcctggaggagctggccgaaaattgcgttggatactgcggggcagacatcaaaagcatctgtgctgaggctgcactctgtgctttacggaggcgctatcctcagatctacaccacttccgagaagctgcaactcgatctaagttctataaacatctcagccaaagacttcgaggtcgcaatgcaaaagatgattcccgcttctcagcgcgcagttacatcccccggtcaggcactgtccaccgtggttaaacccctcctccagaatacagtggataaaatcctggaggccctccagagagtgttcccgcacgcagagttccgaacaaataaaacactcgactctgatatatcctgcccgctcctagagagcgatctggcttactctgacgatgatgtgccctctgtctatgaaaatggtctcagccagaaatcctctcacaaagccaaagacaatttcaacttcctgcatctgaacagaaacgcatgttatcagcctatgagtttcaggccaagaatactgattgtgggtgagccagggttcggacaggggagtcacttggcacccgctgttatacatgccctcgagaagttcacggtgtacacccttgacattccagttcttttcggagtcagcaccaccagccccgaggaaacgtgtgcgcaggtgatccgcgaggccaaacggaccgcaccctccattgtgtatgtgccgcatatccatgtgtggtgggaaatcgtgggacctactctgaaagcgacctttacaaccttactacagaacattcccagctttgcgcctgttctgctgcttgccaccagcgacaaacctcacagcgcactgcccgaggaagtgcaagagctgttcataagggactacggggaaatctttaatgttcagctccccgataaagaagaacggacaaaattcttcgaggacttaattctcaagcaagcagcaaagccccctattagcaaaaaaaaggctgtgctgcaggctttggaggtgctgccggttgctcctcctcctgagccacggagcctgaccgcagaggaggtgaagagacttgaggaacaggaggaggacaccttccgagaattacgcatctttctgcgtaacgtgacccatcgcttagcaatcgacaagcgcttcagagtgtttaccaaaccagtggaccccgatgaggtacccgactatgtgaccgttataaaacaacctatggacctcagttcagtgatatcgaaaattgatctacacaaatacctgacagtaaaggattatctcagggacattgacctaatctgctcaaacgccctggaatacaaccccgatcgagaccctggggatcgcctgatacgccatagagcctgcgctctaagagacacagcgtacgcaattatcaaagaggaactcgacgaagacttcgagcagctgtgcgaggaaattcaggagtctcggaaaaagaggggttgttcttccagcaagtatgcccctagctactaccacgtgatgcccaaacaaaatagtactctggtgggcgacaagagatccgacccggagcaaaacgagaaactcaagacaccaagcaccccagtggcctgctcaacgccagcccagctgaaaagaaagatccgtaagaaatccaactggtatctgggaacaataaaaaaaaggagaaagatttcgcaagccaaagacgactcgcagaatgctattgaccataaaattgaatcggacaccgaggagactcaagacactagtgtagaccacaatgagactggcaataccggtgagtcatctgtcgaagagaacgagaagcagcagaacgcatccgagtctaaactggagctgagaaacaatagtaacacatgcaacattgagaatgagctggaagatagcaggaagacaaccgcttgcaccgagttgagagacaagattgcatgcaatggggacgcttcttcctcgcagattattcatattagcgacgagaatgaaggcaaagagatgtgcgtgctgaggatgacaagggcccgaaggtcacaggtcgagcagcaacagttgatcaccgtggagaaggctcttgcaatattgagccagccaactccgtcacttgtggtggatcatgagcgcttaaagaacctgctgaagaccgttgtaaagaagtcacagaattacaacatcttccagctggagaatttatatgctgtaattagccagtgtatctaccgacatcgcaaggatcacgacaaaactagcctgatacagaaaatggagcaagaggtggagaatttttcatgctccaggtag

SEQ ID NO: 215128 - DNA, 1719 bp, synthetic construct
  misc_feature 1..1719: note = Description of Artificial Sequence: Synthetic coding sequence
  source 1..1719: mol_type = other DNA
tgaggagccctcgccttagccgctcctcgtcgatgtcgccaaccactgcctggtcgcgactgcgcacctggggcaccacccgcaggcgctgtgtcgcgagctggtagaatcggtttattcccatcgccagtttgcaccagcgccgcagtaaggtctgggagtggctatgccaaggatgcactcaacctcgcgcagatgcaagagcagactcttcagctcgaacagcagagtaaactgaaggagtatgaggccgctgtggagcagctgaaaagcgaacaaatccgtgcccaggctgaggagaggcgcaaaacactatcggaggagacccggcagcaccaggccagagcccagtatcaagacaagctcgctcggcagcggtacgaagaccagctgaagcagcagcaactactgaatgaggagaacctaagaaaacaggaggaatccgtccagaagcaagaagccatgcgaagagctacagtggagagggagatggagttgcgccacaaaaatgagatgctccgcgtagaagcagaggcccgagcccgagccaaagccgaaagggagaatgccgacattatcagagagcagattcgtcttaaggccgcagagcatagacagaccgtactagaatctattcggaccgccggtacgctgtttggtgagggatttcgcgcttttgtgacagattgggataaggttactgccaccgtggccggattgacactgttggccgtaggtgtgtatagcgcaaaaaacgctactctcgtggccggtaggttcatcgaagcgaggttaggcaagccatccctggttcgggaaacgtcccgcattactgttttagaggcactccgccaccctatccaggtctcccgacgcctgctgtctcggcctcaagacgccttggagggggtcgttctcagtccttctttagaggcaagggtacgggatatcgctatcgcaacacggaataccaagaagaatcggagtctgtatagaaacatcttgatgtatgggcctcctggcacggggaagacattgttcgccaagaaactagcccttcattctgggatggattacgccattatgaccggcggtgacgtagcccctatgggtagggagggggtcactgccatgcacaaactgtttgattgggctaacacgtcgagaagagggctgctcctgtttgttgacgaagccgatgctttcctgcggaaaagagccacagagaaaatttccgaggacctgagggcgacactcaatgcctttctgtacagaaccgggcaacactccaataaatttatgttggtgctggctagcaatcagcctgagcagttcgattgggccatcaatgaccgaataaacgagatggtccatttcgatttgccaggccaagaggagcgcgagagattggtccggatgtatttcgacaaatacgtgctgaaacctgccacggagggcaaacagcgactgaagctggctcagttcgattatggcaggaaatgtagtgaggttgccaggcttacagaaggtatgagcggtcgcgaaatagcacaattggcggtctcttggcaggccacggcctatgcaagcgaggatggcgtcctgaccgaagccatgatggatacccgtgtccaggacgctgttcagcagcatcagcagaagatgtgctggctaaaagccgaagggccaggaaggggggacgagccttccccatcttag

SEQ ID NO: 215129 - DNA, 1905 bp, synthetic construct
  misc_feature 1..1905: note = Description of Artificial Sequence: Synthetic coding sequence
  source 1..1905: mol_type = other DNA
atgtcctggctgttcggtattaacaagggaccgaagggcgaaggcgcaggtccacccccaccactgccgcctgcgcagcctggcgcagaaggagggggagatcggggactgggagatcgaccagccccaaaagacaagtggtcgaattttgaccccaccgggctcgagcgcgcagctaaggccgctcgggagttagaacattcccggtatgctaaggatgccctcaatctggcacagatgcaggagcaaacactgcagcttgagcagcagtctaagctcaaaatgaggcttgaggccctgagcctgttgcacacgctggtgtgggcgtggtccctatgtcgcgctggtgcagtacaaacccaagagagattgagcggctccgccagtcctgaacaggttccagccggagagtgctgtgctctgcaggagtacgaggcggcagtggaacagctaaagagtgaacagattagggcacaggcagaggaaaggagaaaaacactgagtgaagagaccaggcagcatcaggctagggcgcagtaccaggacaaacttgcgagacagcggtatgaagaccagctaaaacaacagcaactcctaaatgaagagaacctcagaaaacaggaggaatctgtgcaaaagcaggaggccatgcgcagggcgaccgtggaaagggagatggagcttagacacaaaaacgaaatgcttcgggtggaggccgaagccagggctcgagctaaggcagaacgggaaaacgccgatattattcgtgagcaaatacgtctgaaagctgcggaacaccgacagaccgtgctggagtcaattcggactgctggcactctctttggagaaggcttcagagcattcgtgacggattgggacaaggttactgcaacggtggccggtctgacgttgttggccgtgggcgtttattctgctaagaacgcaacgctagtcgcaggcagatttatcgaagctagactaggaaagccgagcctggtgcgggagacgtcccgcatcacggtgcttgaagcactccgccatccaatccaggtttctcggcgtctgctgagccggcctcaggacgcactcgaaggtgtggtgctgagtccctcattagaggcccgagttcgggatattgccatcgccacccgaaacaccaaaaaaaatcgctcactgtatcgtaacatcctaatgtatgggcctccaggtaccggtaaaacactcttcgctaagaaactggcactccactccggcatggattatgccatcatgactgggggagacgtggctcctatgggccgagagggagttaccgccatgcataagttgtttgactgggccaacacgagccggagggggctcctgctctttgtggatgaggctgacgccttcctgaggaagcgagcaacagagaaaatttcagaagacctccgggctactctcaatgcatttctctaccgcacggggcagcacagtaacaaattcatgctcgtgttagcttcaaaccaacctgagcaatttgactgggccatcaacgaccgcataaacgagatggtgcattttgaccttccgggacaggaggagcgggagcggctcgtacgcatgtactttgataagtatgttttgaaacccgctacagagggaaagcaaagactcaagctggcccaattcgactatgggagaaaatgctctgaagttgccagactaacggaaggtatgagcggtcgagagatcgctcagctcgctgtctcctggcaagccaccgcatatgcatccgaagacggggtgttgactgaagccatgatggacactcgcgtgcaggacgctgtgcagcaacatcagcaaaagatgtgctggctcaaagccgaaggcccaggacgcggagacgagcctagcccttcctag

SEQ ID NO: 215130 - DNA, 1761 bp, synthetic construct
  misc_feature 1..1761: note = Description of Artificial Sequence: Synthetic coding sequence
  source 1..1761: mol_type = other DNA
atgagctggctattcgggatcaataaggggccaaagggggagggtgccggtcctcctccccctctgcctcccgcacagccgggtgccgaagggggtggagaccgcggtctgggagatcgaccggcaccgaaggataaatggagcaatttcgaccccaccggactggagagagccgctaaagccgctcgggaactggagcacagcagatatgcgaaggacgccctgaatttagctcagatgcaggagcagactctccagcttgaacagcagtctaaactaaaggaatatgaggcagctgtggaacagctgaaaagtgaacagatccgtgcgcaggcagaggaacggcgaaaaacattgagcgaagagacaaggcagcaccaagcgagggcccagtaccaggataagctcgcacggcaaagatacgaggatcagctgaaacagcagcagctccttaatgaagaaaatctgcgcaagcaagaggaaagcgtgcaaaagcaggaggctatgcgacgggctacagttgagagggagatggaactaagacacaaaaatgagatgttgcgcgtggaagctgaggccagggcaagagccaaagccgaaagagagaacgctgacattatccgggagcagatcaggctgaaagccgctgagcaccggcagaccgtcctcgaaagtatacggacagccggaacgctgtttggagaggggtttagggcatttgtgacggactgggataaggtcactgcgacagttgctggcctcaccctccttgctgtcggtgtgtattcagctaagaacgcaacactggtcgcaggccgatttattgaggctagattgggaaaaccaagcctggtccgcgaaacctctcgaataaccgtactggaggctctgagacacccaattcaggtgtcaagaagactgctcagcagaccgcaggacgccctggaaggtgttgtactgtctcctagcctcgaagctcgtgtgcgggatatcgcaattgcgacccgaaacacaaaaaaaaataggagtttgtaccgaaacatcctgatgtacgggcctcccggaacagggaagacactttttgccaaaaagctcgccctccactcgggaatggactacgcgatcatgacgggaggagacgtcgctcctatggggagagaaggtgttaccgcaatgcacaaacttttcgattgggccaatacttctaggagggggttgctgctgttcgtagacgaggcagatgctttcctgaggaagcgggctactgaaaagatctccgaagaccttagagccacgctgaatgccttcctgtaccgcactggacagcactctaacaaattcatgctggttttagcctctaaccagccagagcagttcgactgggccattaacgatcggattaacgaaatggtgcactttgacctgcccggacaagaggaacgggaaaggctggtgcgcatgtatttcgacaagtacgtgctcaaaccggctacggagggcaaacaacgcctaaaattagcacagttcgattacggtcggaaatgtagtgaggtggccagacttaccgaagggatgagcgggagggaaatagctcagctcgcagtcagttggcaggccacggcttatgcgtctgaagatggagtgctaacagaggctatgatggatactagagtgcaggatgccgtgcagcagcaccaacagaagatgtgttggctgaaagccgaaggccctggcagaggggacgaaccaagtccatcttag

SEQ ID NO: 215131 - DNA, 792 bp, synthetic construct
  misc_feature 1..792: note = Description of Artificial Sequence: Synthetic coding sequence
  source 1..792: mol_type = other DNA
atgtacggcccaccaggcactggaaaaaccctttttgcaaaaaaactggcactgcactcaggaatggactatgctatcatgactggtggcgacgtggcacccatgggcagagaaggcgtgactgccatgcataaactgtttgactgggccaacacatcacggagaggattgctactgttcgtggacgaagcagatgcgttcctccggaagcgtgcaacagaaaagatctccgaggatctgagggcaaccctaaatgcctttctctacaggacagggcagcatagcaacaatccctctcacgtgtcccatggaggatcatctccagctggacgcccttggctcacaccgcaggctaggtgggctccaagatttatgcttgtgctcgcctctaaccagcccgagcagttcgactgggccatcaatgatcggataaatgaaatggtccactttgacctccccggtcaggaggagcgcgagaggttagtgaggatgtatttcgataaatatgtactcaagcctgctacggaaggcaaacagcgccttaagcttgcacagttcgactacggcaggaaatgttcagaagtagctaggctcacggagggaatgagtggtcgggaaatagctcagctcgccgttagttggcaggcaactgcatacgcttcggaggacggagtcttgaccgaggcgatgatggatactagagtccaggacgctgtccagcagcatcagcagaagatgtgttggctcaaagcagaaggacccggacggggtgatgagcctagtcccagttag

SEQ ID NO: 215132 - DNA, 606 bp, synthetic construct
  misc_feature 1..606: note = Description of Artificial Sequence: Synthetic coding sequence
  source 1..606: mol_type = other DNA
aaactggccttgcactccggtatggattatgcgattatgactggaggtgacgtggccccaatgggcagagaaggtgtgactgctatgcacaaattgttcgactgggcgaacacttctcgccgaggcctcctcttatttgttgacgaggccgacgcattccttcggaaacgggctaccgagaagattagcgaagatctgagggctaccctgaacgcttttctgtacagaacaggacagcactccaataacccttcacatgtctcacatggcggaagctcgcctgctggaagaccctggctgacccctcaggcaaggtgggcccctagatttatgttggtcttagccagcaatcaacccgaacagtttgactgggcaatcaatgatcgtattaacgagatggttcactttgacctcccaggccaggaggagcgggaaaggctcgtgcgcatgtatttcgacaagtatgtgctgaaacccgctacagaagggaaacaacgtctgaagctcgcccagtttgactatggacgcaaatgttccgaggtggcacgactaactgaaggcatgtctggaagagagatcgcccaactggcagtgtcatggcagtag

SEQ ID NO: 215133 - DNA, 435 bp, synthetic construct
  misc_feature 1..435: note = Description of Artificial Sequence: Synthetic coding sequence
  source 1..435: mol_type = other DNA
atgtgtctttgtcgtccactactcccccagagagcacagtaccaagataaactggctagacagcgttacgaagatcaactgaaacagcaacaactgctgaatgaagagaacctcaggaagcaggaagagagtgttcagaagcaggaggcaatgaggcgggcaactgtagaacgagagatggagttgagacacaagaacgagatgctgcgggtggaggcggaggcaagagctagagcgaaggcagagcgcgaaaatgccgatatcataagggagcagattcgcctgaaggccgcagaacacaggcagacagtactggaaagcattaggaccgccggtacactctttggggagggctttcgggcttttgtaactgattgggacaaggtcactgctaccgttgcaggtcttactctcctggccgttggggtctactag

SEQ ID NO: 215134 - DNA, 309 bp, synthetic construct
  misc_feature 1..309: note = Description of Artificial Sequence: Synthetic coding sequence
  source 1..309: mol_type = other DNA
atgcggctcgaggccctgtcacttctgcacacgctcgtctgggcctggagtttatgtagggccggtgccgtccagacccaggaacggctttctggtagcgcctcccccgagcaggtccccgctggggagtgttgcgcactgcaagagtacgaagcggcagttgagcagttgaagagcgagcagatcagagcccaagccgaagagaggaggaagacactctccgaggaaacaagacagcaccaggcccgtgcacagtaccaagataaactcgcccgacagcggtacgaggaccagctgaagcagcaatag

SEQ ID NO: 215135 - DNA, 1524 bp, synthetic construct
  misc_feature 1..1524: note = Description of Artificial Sequence: Synthetic coding sequence
  source 1..1524: mol_type = other DNA
atgcaggagcaaaccctgcagctcgagcaacagtcaaagcttaaagaatacgaagccgcagtggagcagctgaaatcagagcagatccgagcccaggccgaagaaaggagaaaaaccctcagcgaagagacaaggcagcaccaagctcgagcccagtaccaggacaaattggccagacagaggtacgaagatcagctgaagcaacagcagctcttgaacgaagaaaatctcaggaagcaggaggagtccgtccaaaagcaggaggccatgaggcgtgccacagtggagcgggaaatggaactgcgccataaaaacgagatgctgcgggtggaggcagaggcacgcgcacgagcaaaggctgaaagggaaaacgctgatattattcgcgaacaaattcgcctcaaggcagccgagcacaggcagaccgtcttagagagcatccgaacagctggcacgctatttggcgagggcttcagggcctttgtgacggattgggataaggttaccgctaccgtcgctggtctgactcttctagcggtgggagtgtatagcgccaagaacgcaacacttgtcgctggtcgatttattgaggcaaggctcggtaaaccatctctggtgcgtgagaccagccgcatcaccgttctcgaagccctgagacaccctatccaagttagccgccgactgttatccaggccacaagacgccctcgagggtgtggtgttgtccccttctttagaagccagggtccgcgatatcgcaatcgcgacccgaaataccaaaaaaaacaggagcctgtacaggaatatcctgatgtacggaccccctggcacagggaagaccttgttcgccaaaaaacttgccttacacagcggtatggactatgcaattatgacaggcggtgatgtggctcctatgggacgagaaggcgtgaccgctatgcacaagctatttgattgggcaaacacctctagacgcggactgctgctctttgtcgatgaggctgacgccttcttacggaagagagcaaccgaaaagatatcagaggatctgcgcgcaaccctcaatgcctttctgtatcgtacaggccaacacagcaacaagttcatgctcgtgcttgccagtaaccagcccgaacagtttgattgggctataaacgaccgcataaatgagatggtgcacttcgacctgcctggccaggaagagagagagagactcgtgcgcatgtactttgataaatatgttctgaagccagctactgagggaaagcaacgtctaaaacttgctcagtttgactacgggcgtaaatgcagtgaggtggcccgtctcaccgaggggatgagcgggagggaaattgcacaactcgccgtcagctggcaggcaacagcgtatgcttctgaagatggagtgctcacagaagcaatgatggacacacgagtgcaggatgccgttcaacagcaccaacagaagatgtgttggctcaaagccgagggtcccggaagaggagatgagccctccccttcatag

SEQ ID NO: 215136 - DNA, 1947 bp, synthetic construct
  misc_feature 1..1947: note = Description of Artificial Sequence: Synthetic coding sequence
  source 1..1947: mol_type = other DNA
atgagttggttatttggagtcaataaggggccaaagggcgagggggctggtccaccccctcctcttcctcccgctcagccaggtgccgagggaggtggtgatcgaggtttgggtgataggcctgcgcctaaggataagtggtccaactttgaccccaccggacttgagagagctgccaaggcagcacgagagctggaacactctaggtatgcaaaggaagcacttaaccttgcacaaatgcaggagcagacgctgcagctggagcagcaaagtaaacttaaggagtatgaggcagctgtggagcaactcaagtcggaacagatccgagcccaggcagaggagcgcagaaagactctttccgaagaaaccagacagcaccaggcccgtgcacagtaccaggacaagctggcacgtcagcgctatgaggatcaattaaaacaacagcagctgctgaatgaagagaacctccgcaaacaggaagagagcgtgcagaagcaggaagccatgcgcagagctacagtggagagagaaatggaactgcgccataagaacgagatgctgagagtggagaccgaggccagggccagagctaaagcagagagagagaatgccgacatcatccgcgaacagatccgactaaaggcttcggagcatcgccaaactgtgttggaatccattcgcacggccggaacacttttcggtgagggcttccgtgcttttgtgactgaccgcgacaaggttactgccactgtcgcaggcctgactttattagcggttggcgtctactccgccaaaaatgctacagctgtgacgggacgattcatagaggcccgactggggaagccctccctggtgcgcgagacttctcgtataactgtgctggaggcactgcgtcatccaatccaggtgtcccgtagacttctaagcaggccgcaggatgttcttgagggagtagtgctgtcgccttctctggaagctagggtccgggatatcgcgattgccaccaggaacaccaagaagaatagggggctttacaggcacattcttctgtatggcccacccggaactggtaagaccctctttgctaaaaagctggccctgcactcaggaatggactacgccatcatgactggcggtgatgtggccccaatgggacgcgagggagttacagcaatgcacaagctgttcgactgggcaaacacctctaggagaggcctgctgttgtttatggacgaagcagatgcattcctaaggaaaagggcgactgaagaaatttctaaggacctcagggctacactcaatgccttcctgtaccacatggggcaacattccaataaattcatgctcgtacttgcttctaatctgcccgaacaattcgattgcgccataaactctaggatagatgtcatggtgcactttgatctgccacagcaggaggaacgcgaaaggctggtccgcctgcatttcgataactgtgtgctgaaacctgcgaccgagggaaaacgcagactgaagctggctcagttcgactacggcaggaagtgttccgaagtagctcggttaacagaaggaatgtcagggagagaaattgcgcagcttgcagtctcctggcaggctaccgcatatgcctcaaaggatggcgtgttgaccgaggctatgatggacgcctgcgtccaggacgctgtgcagcagtaccgccagaaaatgaggtggctgaaggctgaaggcccaggacgcggtgtcgaacaccccctcagtggggttcagggggaaacgcttacaagttggagtctcgccacagacccttcctatccttgtctggcgggaccctgtacattccgcatatgttcatggatgggaactggattatgcccaggccctttatctccgagaatgagctgtggagggggacgccctttctgtcctcccggacatcctttactctag

SEQ ID NO: 215137 - DNA, 900 bp, synthetic construct
  misc_feature 1..900: note = Description of Artificial Sequence: Synthetic coding sequence
  source 1..900: mol_type = other DNA
atgtcctggctcttcggggtgaataaggggccaaagggcgagggagcaggacctcccccacccctgcccccagctcagccaggtgcggaaggtggcggagataggggactgggggatagaccagcaccaaaggataagtggagtaatttcgaccctaccggtctcgaacgggctgcaaaggccgctagagagttggagcattcgcgctacgccaaggaagcactgaacctcgcacagatgcaggagcagacactgcagctggagcagcaatcaaagctgaagcagctgttgaacgaagaaaacctgcgtaagcaggaagagagtgtgcagaaacacaggcagaccgttctggagtccattaggacagccggtacgttattcggagagggtttcagggcattcgttacagaccgggacaaggttaccgcgacagttgcagggctaacattgttagctgttggcgtgtattctgcaaaaaacgcgaccgctgtgactggaagattcattgaggcgagactgggaaaacctagtctggtgagagaaacgtctcgcatcacggtgctggaggcactacgacatccgatccagcaggtttcccggagactattatcacggccacaggacgtgctcgaaggagtcgtattgtccccctcactggaagcacgggtccgcgacattgcgatcgctacacggaacaccaagaaaaatcggggtctatataggcacatcctgctgtatggaccaccaggcaccggcaaaaccttgtttgccaaaaaactggccctccatagcggaatggactatgcaatcatgacaggaggcgacgtggcacccatggggcgtgaaggagtgacggctatgcacaaactctttgattgggcgaacacatctagaaggtag

SEQ ID NO: 215138 - DNA, 351 bp, synthetic construct
  misc_feature 1..351: note = Description of Artificial Sequence: Synthetic coding sequence
  source 1..351: mol_type = other DNA
atgagaagagcaaccgttgagagagagatggaacttcgccataaaaacgagatgcttcgggtcgaaaccgaggctagagcccgtgctaaggcagagagagaaaatgccgatatcatcagggagcagatcagacttaaagcctcagaacacaggcaaacagtgctggaaagtattcggaccgccggaactctgtttggggaaggattccgtgcattcgttaccgaccgggacaaagtcacagctactgttaatattttcatcaagcagggttggcaggtggcagaacggcagcattttcggcgacgtagatgggccgaccatgaagtccgtaggtctcgtagttcatggtag

SEQ ID NO: 215139 - DNA, 1449 bp, synthetic construct
  misc_feature 1..1449: note = Description of Artificial Sequence: Synthetic coding sequence
  source 1..1449: mol_type = other DNA
atgttgagggtcgaaacggaggcaagagctcgagccaaagccgaacgagaaaacgcggacatcataagggaacagatccggctgaaggcaagtgaacacaggcagacagttcttgagagcattcgaacagctgggacactgtttggcgagggtttcagggctttcgtcaccgatagggacaaggtaactgctacagttgccggtttgacactgttagctgtcggggtttacagtgctaaaaacgctacagccgttaccggcagatttattgaggcccgactcggaaaaccctctctggttagggagacctctcgaattactgtcctggaggcccttagacatcctattcaggtgagcagaagacttttatcccgcccacaagatgtactggaaggagtcgtcctgtcagttagcccgagcctagaggcacgagtgagggatatcgcgatcgccaccagaaatacgaaaaagaatagagggttgtacaggcacatcctcctttatggcccacccggaaccgggaagacactctttgccaagaagctcgcactccacagtggcatggactacgcaatcatgactggcggtgatgtggcccctatgggcagagagggagtgactgcaatgcacaaactgtttgactgggctaatacgtcacggaggggactgcaagaggaaattagcaaggatttgagggccacgctgaatgcctttttgtaccacatgggacagcactcaaacaatcgtttcatgctggtgcttgctagcaacctcccagagcagtttgattgtgctattaactccaggattgatgttatggtccactttgaccttccgcaacaagaggaacgggaacggctggtgaggctgcacttcgataattgcgtgctgaaaccagctactgagggcaaacgcatgggtgtgggtcagctccccgtgtttcggcctcccccacacggtgtgggcagtgcagccctggctgcttctctcggaaattccttccctaggagactgaaactggcccaatttgattatgggaggaaatgcagcgaagtcgcaagattaaccgagggcatgtcaggtcgagagatcgcgcagctggccgtttcttggcaggctacagcttacgcctctaaggacggggttttaacagaggccatgatggacgcatgcgtgcaagacgccgtgcagcagtataggcagaagatgcgttggctcaaggctgagggaccaggcagaggtgttgaacaccctcttagcggcgtgcaaggcgagacactcacctcgtggtccctggccactgacccctcctatccttgcctcgccggaccctgcacttttcgcatatgctcctggatgggcaccggcctttgcccgggacccttaagcccccgtatgagctgtggaggcggtaggccattctgcccgcctggccaccccctcctatag

SEQ ID NO: 215140 - DNA, 354 bp, synthetic construct
  misc_feature 1..354: note = Description of Artificial Sequence: Synthetic coding sequence
  source 1..354: mol_type = other DNA
atgaggagggcgaccgtcgagagagagatggaattaaggcacaaaaatgagatgctgagagtcgagactgaagccagggctcgggcaaaagccgaacgggagaacgccgacatcatccgggaacaaatccgccttaaggcaagcgaacatcgacagactgtgctcgaaagtataagaacagccggaactctgtttggcgaaggcttcagagcatttgtgacagatagggataaagtgactgccaccgtcaatatcttcatcaagcaggggtggcaggtggctgagcgacagcatcactttcgccgtagaagatgggccgaccatgaggtgcgtcgaagcaggtcctcttggtag

SEQ ID NO: 215141 - DNA, 5534 bp, synthetic construct
  misc_feature 1..5534: note = Description of Artificial Sequence: Synthetic coding sequence
  source 1..5534: mol_type = other DNA
atggttggagtcctggcgatggcagccgctgctgcaccccctccagtgaaagattgcgaaattgaaccatgtaagaagaggaaaaaggatgatgacacctccacttgtaaaacgataacaaaatatctgtctcccctcggcaaaactagggaccgcgtgttcgctcctcctaagccatccaatattctagactatttcaggaaaacttcacctaccaacgagaaaactcaattaggcaaagagtgcaagataaagtcgcctgagtcggtacccgtggacagtaataaggattgtaccactccgctggagatgttctccaatgtcgaatttaaaaagaaacgtaaacgcgttaatctgagtcatcagctgaacaatataaagacagagaatgaggcaccaatcgaaattagcagtgacgattctaaagaagattattcgctgaacaacgatttcgtggagagttccacatcagttttacggtataaaaagcaggtggaagtcctcgctgagaatattcaggataccaaaagtcagcctaatactatgactagcctccaaaattcaaagaaggtgaaccctaaacagggaacaacaaaaaacgacttcaagaaactcagaaagaggaagtgtcgtgacgtggtcgatctttcagagtctcttcccttggccgaagagcttaaccttctaaagaaagacgggaaagatacaaagcaaatggagaatactacaagccacgccaatagtcgcgacaacgtaactgaagccgctcagctaaatgactctattatcaccgtaagctacgaggagtttcttaagtctcacaaagagaacaaagtcgaggagatccctgattcgacaatgtccatctgtgtcccaagcgaaaccgtggacgagatcgtgaaatcaggatatattagcgagagcgaaaactcggaaatatcccagcaggttcgcttcaaaactgtcaccgtgctggctcaggtgcatcctattcctccaaagaaaactggcaagatccctcggatctttctcaaacagaagcagtttgagatggaaaacagccttagcgaccctgagaatgagcaaaccgtgcaaaaacgaaagtccaatgttgtgattcaagaggaggagctggagttggcggtcctagaggctggctcttccgaggccgtgaagcctaaatgcacactggaggagaggcaacagttcatgaaggctttcaggcagccagcttctgacgccctcaaaaacggcgttaagaaatcgtctgataagcagaaggaccttaatgaaaagtgtttatacgaggtgggccgagacgacaacagcaaaaaaatcatggagaacagcgggattcagatggtgtcaaaaaacgggaaccttcagctgcacaccgataaaggaagtttcctgaaggagaagaataagaaactgaagaaaaagaataaaaaaacccttgataccggggcaatcccaggtaagaacagagaagggaatacacagaagaaagaaacaacgttcttcctgaaggaaaagcagtaccagaatagaatgagcctgcgccagcggaagacagaattcttcaaatcttcaactctgtttaataatgagtcgttggtctatgaagatattgctaacgatgacttattaaaagtttcatcattgtgcaacaacaacaagttaagccgcaaaacttccataccagtcaaggatatcaaactgactcaatcaaaagccgaatccgaggcctcactgttgaacgtctccacccccaaatccactcggaggtctggcaggatatctagcactccgaccacagagacaataagaggcatcgactccgacgatgtccaagacaattcacagctgaaggcctcaactcagaaggccgcaaacctgagcgaaaagcactccttatatacagcagagctgattaccgtccctttcgattccgagagccccatcaggatgaagtttacaaggatctccacacccaaaaaaagtaagaaaaaaagcaacaagcgctcagaaaaaagtgaggcaaccgatggaggctttacctctcagattcggaaggcttccaatacatcaaagaatatatccaaggccaagcaactcattgaaaaagccaaagcactgcatatctcacgctccaaggtcactgaggagattgccatcccattgcgcagaagcagtagacaccaaacgctccccgagcggaagaagctttccgaaacggaggatagcgttatcattatcgactcttctccgacagcgctgaagcaccctgaaaaaaatcagaaaaaacttcagtgtcttaatgatgttttgggaaagaagctgaatacctcaacgaagaacgttccaggcaagatgaaagtggcccctctgtttctcgtcaggaaggcccagaaggctgcagaccccgtcccgtctttcgatgaaagttcccaggatactagcgaaaaaagccaagactgcgacgttcaatgcaaggccaaacgggactttcttatgtcagggttgccggaccttcttaaaagacagatcgctaaaaaggcagctgcactagatgtgtacaatgccgtgagtacttccttccagcgagttgtgcacgtgcaacagaaggatgatggatgttgcctgtggcacttgaaacctccaagctgtcccctgctgacaaagtttaaggaactcaacacaaaggtcattgacctttctaaatgcggcattgcgctgggggaattctcgacactgaactctaagctgaagtctggcaacagcgctgctgtgtttatgcgaactcgtaaagagttcaccgaggaggtacgtaacctattgcttgaagaaataagatggagtaaccctgaattctcactcaaaaagtacttcccactcctactaaaaaagcaaatagagcaccaggtgttgtcttccgaatgccacagcaaacaagagctcgaagctgatgtcagccacaaagaaaccaagcggaaactcgtcgaggctgagaactctaaaagtaagcggaagaagccaaacgagtattcaaaaaatcttgagaaaacaaataggaaatccgaagaactttcaaagagaaataacagctcaggtatcaaactagatagtagtaaggattccggaacagaggacatgctctggacagagaagtaccagcctcagaccgctagcgaactgattgggaatgaattagcaataaagaagctccatagctggctcaaggattggaaaagacgagccgaactagaagaacgacagaatctcaaagggaagagagacgaaaagcatgaagatttctctgggggaatcgattttaaggggagctcggatgacgaagaggagagtcgcctgtgtaatacagtgcttattaccgggcctaccggagtaggcaagactgccgcagtgtacgcatgtgcgcaggagctggggtttaagatcttcgaggtgaatgctagctctcaaagatccggcaggcagatactgagtcagttaaaggaggctacccagagccatcaggtagataaacaaggggtgaatagccagaagccctgcttttttaatagctactacatcggaaaatcacctaagaagatatcgagccccaagaaggtggtaaccagtcccagaaaagtgccgccaccaagcccaaaatctagtggccctaaaagagccctgcctcccaagacgttggccaactatttcaaggtgtcaccaaagccgaagaataacgaggaaatcgggatgctgctggagaacaataagggtattaagaattcttttgaacaaaagcaaattacgcaaacgaagagcacaaacgccacgaatagtaacgtaaaagatgtgggcgctgaagaaccctctcgaaaaaatgcgacttcattgatcctcttcgaggaggtcgatgtgatattcgacgaagatgccggtttcctcaacgccattaaaacatttatggcgacgaccaagaggccagtcattctcactacttcagacccaactttctcattgatgtttgatgggtgctttgaggaaataaagttttctaccccctcgctccttaatgtggcgagttatctgcaaatgatttgtctcacagagaactttaggacggacgtcaaagatttcgttaccttattgaccgccaatacttgtgatatccgaaaaagtatcctttacctgcaattttggattcggtctggaggcggagtcctggaagaacgacccctgactctctaccgcggaaattcaagaaacgttcagctggtgtgctcagaacacggcctcgacaataagatctatcctaaaaacactaagaaaaagagagttgacctcccaaagtgcgacagcggatgtgccgagacactgttcggactcaagaacatcttctccccttcagaggatttgttctcatttcttaaacacaagatcaccatgaaggaggagtggcacaagtttattcagctgctcactgagtttcagatgcgtaacgtggacttcctttactccaatctggagttcatccttcctttacctgtggacactattccagagacgaagaacttctgcggcccatccgtgaccgtggatgcctctgcagctacaaagtcaatgaactgtctcgctcggaaacattctgaacgcgaacaacccttgaagaagtcacagaagaaaaaacaaaaaaagactctcgttatactggacgatagcgaccttttcgacacagacttagatttccctgaccagagcatttcactgagcagcgtatcatccagtagcaatgccgaggagtccaagaccggagatgaggaatcaaaagccagagacaaagggaacaacccagagaccaagaagtctataccatgcccccctaagaccacggccggtaaaaagtgctctgcactcgtctcacattgtctgaattcactcagcgaattcatggacaacatgtctttcctggacgctctcctaaccgacgtgagggagcagaacaaatatgggagaaatgacttctcttggacgaacggcaaagtcacgagcgggctatgcgatgaatttagtctggagagcaacgacggttggacaagtcaatcctctggtgaactgaaagccgcagccgaagctctgtccttcactaagtgctcaagcgccatctcaaaggcactggagaccctgaactcgtgtaagaagcttggccgagaccccacgaatgacctgactttttatgtgagccagaagagaaataacgtgtatttttcacagtcggctgcgaacctcgacaatgcatggaagagaataagcgtcattaagtctgtcttctcttcaaggagtctgttgtacgtgggaaaccgacaggctagcattatcgaatacctgccaaccctgagaaacatttgtaagactgaaaagctaaaggaacaaggcaagagcaaacgaaggttcctgcactattttgagggcatccacttagacataccaaaggaaacagtgaacaccctggccgctgattttcctta

SEQ ID NO: 215142 - DNA, 3543 bp, synthetic construct
  misc_feature 1..3543: note = Description of Artificial Sequence: Synthetic coding sequence
  source 1..3543: mol_type = other DNA
atgtctgccgactctagtcccctggtgggctctactccaactgggtacggaacactcactattggaaccagcattgatcctctgagttccagtgtttcttccgtgcgcctctctggctactgcgggagcccttggagggtaatcggatatcacgtcgttgtttggatgatggcagggattcctctgttgcttttccgctggaagcccctctggggtgttcgactgagactgcgcccatgcaatcttgctcacgctgaaactctcgtgattgagatacgagataaggaagattcttcttggcagctgtttacggtgcaggttcagacagaggccataggagagggttctctggaaccttccccacagtctcaggccgaagacggaagatcccaagccgctgtgggcgctgtaccggaaggtgcatggaaggacacagcccaactgcacaagtccgaagaagccgtgtctgtgggccaaaagcgggtgctcaggtattatctgttccagggccaacgctatatttggatcgagacgcagcaggccttttaccaagtctctcttttggatcatggtcggagctgtgatgacgtccacaggtcgcgccatggactctctctacaggatcagatggtacgaaaggccatctacggtcctaacgtaatttccataccagtgaaatcttaccctcagttactggtcgatgaagctctgaacccttactatgggttccaggccttcagcatcgcactctggttagccgatcattactattggtatgccctgtgcatcttcctgatctcttctatcagcatttgcctaagcctttacaaaactcgaaagcaaagtcagacgctgcgagacatggtaaagctctctatgagggtgtgcgtgtgtcgtcccggaggtgaagaggaatgggtcgactcatctgaattggtccccggagattgcctggtgctgcctcaggaaggagggctcatgccatgcgatgcggcactggtcgcaggtgagtgtatggtgaacgaatctagtctaactggtgagagtattcccgtgctcaagacagctctacctgaaggtctgggaccatactgtgcggagacccaccggaggcacacgcttttttgtggcaccctcatcctacaggctagagcctacgttggaccacatgtattggcggtagttacccgaaccggattttgtacggccaaaggcggtctcgtcagtagcatcctacaccctagacctataaacttcaagttctataaacactccatgaagttcgtggctgcattgtctgtgcttgcgcttctagggacgatctacagcatcttcatattgtatcggaatcgggtgccactaaatgaaattgtaattagagccctcgatctggtgacagtcgttgtgccccctgccctgcccgcagccatgacagtctgcactctttacgcccaaagcaggctgcgaaggcagggcatcttctgtatccacccactacgcataaacctgggaggaaaacttcaactcgtctgctttgataagacagggacactcactgaagatgggttggatgtgatgggtgtcgtgcccctgaagggtcaggctttcctacctcttgtgcccgaacctagaagactgcccgtgggtcccttgctgagagcgctagcgacatgccacgcacttagtcgattacaggacacacctgtgggtgaccctatggacctgaagatggtcgaaagcactggctgggtgcttgaagaggagccagctgccgacagtgcctttggaacccaggttctggccgttatgaggcccccactgtgggagccacaactgcaagcgatggaggaacccccagtgccggtgagtgtgctgcaccggtttccattctcctcagccctacagagaatgtccgtcgttgttgcctggccaggcgctactcaacctgaggcttacgtgaaaggttctccagagctagtggccggactgtgcaaccccgagaccgtgcccacagactttgcccaaatgttgcagagttacactgctgctggttacagggtggtggccctggcttctaagccactacctaccgtccccagccttgaagccgcacagcagctcactagggatactgtggagggagacctgtctctgctcgggttgttggtcatgcggaacctactcaaaccccaaaccacacccgtcatccaggccttacgccgaacaagaatccgggcagtgatggttaccggagacaaccttcagaccgcagtgacagttgcccgaggatgtggaatggtggcccctcaggaacatttaattattgttcacgcaactcacccagagcgcggacagcccgcttcgctagagttcctgccaatggaatcaccaaccgccgtgaatggagtcaaagacccagaccaggctgcatcgtacactgtcgaacccgaccctaggtctaggcatctggcactgtcgggtccaaccttcggaatcatcgtgaaacactttcccaaattgctgccaaaggtgctggtgcagggaacggtgtttgccaggatggccccagaacagaagaccgaacttgtgtgcgagctgcaaaaactgcagtactgtgtggggatgtgcggggatggcgcaaatgactgcggagccctcaaagcagccgacgtaggaattagcctgtctcaagccgaggcatcagttgtgagcccgtttacgagttctatggctagcattgagtgtgtgcccatggtgatacgcgaaggcagatgcagcctggacaccagcttcagtgtattcaagtacatggcattgtattccttgactcagttcatttctgtgctgattctttacaccattaacactaatctcggcgatttgcaatttttggctattgatctggtgataaccacaaccgtcgcggttctgatgagtaggactggacccgctctggttctcggaagggtccgacccccaggggctctcttgtccgtccctgtcctctctagtttattactccagatggttctcgttactggcgtacaacttgggggttacttcctaacactggcccagccttggtttgtgcctctgaatcgaacagtagccgctccggataatttacccaattacgagaatactgttgtgttctcactgtccagctttcagtatctcatcctagccgctgccgtgtccaagggagcccctttcaggcggcctctctacacaaatgttccctttttggtggctcttgccttgcttagttcggttctggtgggtctggtcctggtgcccggattgttacagggaccattagcgctgaggaatatcactgacaccggattcaagctgcttctgctgggactggtcacattaaatttcgtgggcgctttcatgttagaaagcgtgttggaccaatgcctgcctgcttgcttacggcgtcttagacctaagcgcgcatcaaagaagaggttcaagcagcttgagagggagcttgcggagcagccctggccccctctgcccgcagggccactacgatag

SEQ ID NO: 215143 - DNA, 3477 bp, synthetic construct
  misc_feature 1..3477: note = Description of Artificial Sequence: Synthetic coding sequence
  source 1..3477: mol_type = other DNA
atgtccgctgacagctcccctcttgttggcagcacccccacgggctatggcaccctgaccattgggaccagcatcgaccccctgagtagctctgtatcttctgtccgactgtccggctactgcggttccccatggcgcgtaatcgggtatcacgtcgtggtatggatgatggctggcatcccactgttgctgttccgttggaaacctctgtggggcgttaggctccgcctgaggccctgcaacctggcccatgccgagaccctggtgatagagattcgggataaggaagatagcagctggcaactgttcaccgtgcaggtacagaccgaggccataggagagggtagtctggagccttcaccacagtctcaggcagaggacgggcgaagccaagccgctgtgggcgctgtgccagaaggagcatggaaggacaccgctcagctgcacaagtccgaggaagccaaaagggtccttcgatactatctgttccagggacagcgctatatctggatagagacacagcaggcgttctatcaagtcagcctgctcgatcacggcagatcctgcgacgacgtacatcgctctagacatggcctcagcctgcaagaccagatggtgcggaaagcgatttacggaccaaatgtgatctctattccagtgaaatcttatccacaacttctcgtagatgaagcattgaatccatattatggcttccaggcattctctatagctctttggttggcggaccattactattggtatgccctctgcatctttctgatttccagcatttctatttgccttagcctttacaagactcggaagcagtcacagaccctgagggatatggtgaagctcagtatgagggtctgcgtctgccgcccagggggagaggaggagtgggtggattcttctgagctggttcccggtgattgtctcgtcttgcctcaagagggcggactcatgccttgcgacgctgcactggtggctggcgaatgcatggtgaatgaatccagcctgaccggggaaagcattcctgtgctgaagaccgctttgcctgagggtctagggccttactgcgccgagacccatcggcgacacaccttgttttgtggtacactcatccttcaagcgagagcgtacgtcggtccccatgttctcgcagtggtgacccgcacagggttctgtacggcaaaaggcggacttgtctcatccattttgcaccccagaccaattaatttcaagttttacaagcatagtatgaagttcgtcgccgctctcagcgtgctagccctgctaggaaccatttactctatttttatcctctaccgaaacagggtgccgttgaatgaaattgtaattagagctctggatttggtaactgtcgtggtgcccccagcgcttcccgcagctatgaccgtatgtacactttacgcccagagccgcttacgccgacaaggtattttttgcattcatcctctaagaattaaccttggcggaaaattacaactggtgtgctttgacaaaactggcacgctgactgaagacggtctggacgtaatgggcgtggtacccctgaagggccaggccttcttaccccttgtacccgaaccccgtcggttgcctgtggggccacttcttcgagctctggccacatgtcacgctctgtctagactacaagacacacccgtaggagatcccatggatctgaaaatggtggagtcaacagggtgggtcctggaggaagagccagccgctgattctgcctttggcactcaggtcctcgccgtgatgcggccaccgctttgggaaccacagctccaagcgatggaggagccaccagttccagtgtctgtgctacacaggtttcctttctcttcggccctgcaacgtatgtcagtggtggtagcctggcctggggcaacccaaccagaggcctatgtgaagggttcacctgagctggtcgcagggttgtgtaatccggagactgtgccgaccgacttcgcgcagatgctgcagtcttataccgctgccggttatcgtgtcgtggcgcttgccagcaagccactccccacggttccaagcctcgaagctgctcagcaactcacacgtgataccgtggagggggaccttagtctccttgggctgttggtgatgcggaaccttcttaagccccagaccactccagtgattcaggctcttcgaaggacgcggattagggcggtgatggtgaccggagataatcttcagaccgccgtgaccgtggccagggggtgtggaatggtggctcctcaggagcacctgatcatcgtccacgcaactcacccagaaagaggccaaccggctagcctggagttcctccccatggagtctcctactgctgttaatggcgtgaaggtgctcgtccaaggcacggtattcgccagaatggcacccgagcagaaaacagaactcgtgtgtgagctccagaagttgcagtattgcgttggcatgtgtggagatggggctaatgactgcggggctctcaaagctgctgacgtgggcatatcactgagccaggcagaagcttctgtagttagtcctttcaccagctcaatggcatccattgagtgcgtgcccatggtgatacgagaaggacgctgcagcttagacacctcctttagtgtgttcaagtacatggcattgtattctttgacccagttcatatctgtgttgatcctctataccattaacacaaacctgggcgacttgcagttccttgcgattgaccttgtgataacgactacggtcgcggtgctcatgagcaggacaggaccagcactggtgctaggacgggtccgccctcctggcgctctattgtccgtaccagtgctttccagccttctgttgcagatggtcctggtgactggcgtccagttgggcggttacttcctcactctcgctcagccttggtttgttccactgaacagaaccgtggctgccccagataacctccccaactacgaaaatacggtggtattcagcctctccagctttcagtacctgattctcgcagccgctgtgtctaagggggctccttttcggaggccattatacacgaacgaaagggccagaccggtcccaccgaggttgcctgccccaccacctgcccaagcaggccttcaggaagcccttcaggcagcgggaacgcgggctggtcgcgctgccctagctgcagcggcaaggcgccctcccgaggtagttcaggcccatgggcacccccgacactggaactccctgccccttagtcaccagctagacccctctccagccacaccacctcctccccctccaaccagcttgaggctggccaccgtgtatacccccccaccacgccctccacctccgtggggtagcgtcgattactgtcccttgccgtggacaatcccccgaaggggcggtagtcctcaacttccgagcgtgctgctgtcagtttag

SEQ ID NO: 215144 - DNA, 3528 bp, synthetic construct
  misc_feature 1..3528: note = Description of Artificial Sequence: Synthetic coding sequence
  source 1..3528: mol_type = other DNA
atgagtgcagatagtagcccactggttggttctacacctacgggctacggcaccctaaccattggtactagtatagaccccttgtccagtagcgtttcctctgttcgcctgtccggctactgtgggtccccctggagggttatcgggtatcacgtggtggtgtggatgatggccggaattcctctcctgcttttcaggtggaaaccactatggggtgttcggctccgactgcggccatgcaacctggcccatgctgaaacgcttgtaattgaaatcagagacaaggaagactctagttggcagctgttcaccgtgcaagttcaaacagaggctattggcgaaggctcattggagccatccccgcaaagtcaggcagaggacggcagaagtcaggctgccgtcggagctgtccctgaaggagcttggaaggacactgcacaactgcataagtcagaggaggcaaagcgtgtgctgaggtattatctttttcaggggcagaggtatatctggatcgagactcagcaggcattctaccaggtgagcctgttggaccacgggaggtcttgtgatgatgtgcaccgaagccggcacggccttagtttgcaggatcagatggtccgcaaggcaatttacggaccgaatgtgatcagtatccccgtgaagagttaccctcaactcctggtggatgaggctcttaacccgtattatgggttccaggctttctcaattgccctgtggttggccgaccattattattggtatgcactctgcatctttctcatcagtagcataagcatctgccttagtctctacaagacccggaagcagtcccagacactccgggacatggtgaagttatccatgcgggtctgtgtgtgcagacctggaggagaagaggagtgggtagacagctccgaattagtgccgggtgactgtctcgtgcttcctcaggaggggggtttaatgccctgtgatgccgcattagtggcgggagaatgcatggttaatgagtcttccctgactggcgaatccatccccgttctgaagacagcattacccgagggtcttggtccctactgcgctgaaacgcatcgtagacataccttgttttgtgggacactaatcctgcaggcacgtgcatacgtaggtccacacgtcttagcggtcgtgacaaggacaggcttctgcactgccaagggaggtctggtatcaagcatcctccaccctcggcctatcaactttaagttctacaaacatagcatgaagttcgtcgcagccttgagtgttctggctctgctgggaactatatacagtatatttattctataccggaaccgagtgcctctgaatgagatcgtgatccgggctctcgacctggtgactgttgtagtgccaccggcactaccagcagccatgaccgtatgcactctttatgcccagtcacggctgaggcggcagggcatcttctgcattcatcccttgagaatcaacttgggaggaaaactgcagctggtttgctttgataagactggtacactgacagaagatggtctggatgtcatgggtgtggtgcctctgaaggggcaggctttcttacctttggtccccgaaccgagacggctccctgtgggccctctgctgcgcgctctcgctacctgtcacgcacttagtcggctgcaggacacccctgtaggagatcccatggatctcaagatggttgaatccacaggctgggtgctagaggaagaacccgcagccgattctgcctttggcacgcaagtgctggcagtgatgagacctcctctctgggagccacagcttcaggcaatggaggaaccgccagtgcctgtgagcgtcctccaccggttccctttcagtagcgctttacagcgcatgtcagtcgtcgtagcctggcctggcgctacacaaccagaagcgtacgtcaaaggtagcccggagcttgtggcgggtctctgcaatccagagaccgtgccaactgatttcgctcaaatgctacagtcatacacagccgctggttatcgggtggtggctcttgcatcgaagcctctgccaacagttccttcacttgaagccgctcagcagctcacacgcgacactgtagagggtgacctgtctctgctgggcctgctggtcatgcgcaatctgctgaagccacagaccaccccggttatccaggccctgcgcagaactaggataagagccgtcatggtcaccggcgacaatttgcaaacagctgtgacggtggcacggggttgtgggatggtagcccctcaagaacacctcatcattgttcatgcaacccatccagagcgcggacagcctgcaagtctcgaatttcttcctatggaatctccaaccgcggtgaatggggtcaaagacccagaccaagctgcgagttatacggttgagcctgaccctaggagcagacacttggcactgtcaggacccacattcggcattatcgtcaaacatttccctaaacttcttcccaaagtgctggtccagggaacagtgtttgcgagaatggcgcctgaacaaaagactgagctggtctgcgaactgcaaaaactccagtactgtgtgggaatgtgtggggacggggcaaatgattgtggcgctctaaaagccgcagatgttgggatctcacttagccaagctgaggcatccgtggtgtccccgttcactagttcaatggctagcatagaatgcgtcccaatggtaataagggagggcagatgttccctagacacgtcttttagtgtttttaaatatatggcattgtactcactcacccaattcatttctgtgctaatcctctatactatcaacaccaacctcggagacttgcagttcctcgccatcgatctagtgataactactactgtggcagtgttgatgtccaggaccggcccagcccttgtgctgggaagggttcggcctcccggagcgttgctgtctgtgcctgtgctatctagtctgctcctgcagatggtactggtcaccggagttcagcttggagggtacttcttgacattggcacagccatggtttgtccccctgaataggacggtggccgctcccgacaacttgcccaactatgaaaatactgtggtcttttccctgagcagcttccagtacttgattttggctgctgcggtgagtaaaggtgcgccatttcgcagacccctctatacaaatgtgcctttcctagtggctctggctctgttatcaagcgtccttgtggggctcgtgttggtgcctggcctcctgcagggccctctggctctcaggaacataaccgatactggatttaagttgcttctgttgggcctcgtaacactgaactttgtgggagcatttatgctggagagtgttctggaccaatgtctccctgcctgtttacgccgacttaggcccaagcgggcaagtaagaagcgctttaaacaactcgaaagggaattagcagaacagccgtggccccctctccccgcaggtcccctgaggtag

SEQ ID NO: 215145 - DNA, 3372 bp, synthetic construct
  misc_feature 1..3372: note = Description of Artificial Sequence: Synthetic coding sequence
  source 1..3372: mol_type = other DNA
atgtcccgggcaacctctgtaggtgatcaactggaagcgcctgccagaactatttacttaaatcagccacaccttaataaatttagagacaaccaaatttccaccgccaagtacagcgtattgacctttctgccacggttcctgtatgagcaaatcagacgggcagccaacgccttttttctatttatcgctctcctccaacaaattccagacgtgagcccaacaggcagatatacaacccttgtgcctctgattattattctgacaatcgcgggaattaaggagatagtagaagacttcaagcggcacaaggctgataatgccgtcaataagaagaagacaattgtactgagaaacggaatgtggcacaccatcatgtggaaggaagtggcagtcggcgatatcgtgaaagtagttaacgggcagtacctccccgcagacgtggtgcttttgagctcctccgagcctcaggcgatgtgttacgtagagacggccaacctcgatggcgagactaatctgaagatcaggcaaggcttgagccatacagccgacatgcaaaccagggaggtgttaatgaaactctcagggactatcgagtgcgaggggccaaaccgtcacttgtatgactttaccggcaacctgaacctagacgggaaaagcttggtggctctgggccctgatcagatcttgttgaggggcacgcaattacgcaatactcagtgggtgttcgggatcgtggtgtacaccggccacgacaccaaactgatgcagaactccactaaggcacctctgaagcggtcaaacgttgaaaaggtgaccaacgtgcagatcctagtcctcttcggcattttgcttgttatggccctggtgtcctctgcaggggctttgtattggaatcggtcccatggagaaaagaattggtatattaagaagatggatactacctcggacaactttggatataaccttctaactttcattatcttatacaataacctgatccccatctccctgctggtgaccctcgaagtagtcaagtatacccaggccttgttcatcaactgggacaccgatatgtactatattggaaacgacacccctgctatggctcgtacctctaatctgaacgaagagctaggacaggtcaaatatctgttttcggacaagacaggcacactgacatgtaatatcatgaacttcaagaagtgcagcatagcgggtgttacatacggccacttccctgaattggcacgtgagccctcatccgacgacttttgcagaatgccaccaccgtgttcagatagttgtgacttcgacgacccaaggctcttaaagaatattgaggaccgccatcctaccgccccttgtattcaggagtttctgacgctgcttgccgtctgccatacagttgtgccggagaaagatggcgacaatattatctatcaagcatcctcccctgacgaggcggctcttgtcaagggggctaagaagctgggattcgtcttcacagctaggacacccttttcagttataattgaggcgatgggacaggagcaaacattcgggatcttaaacgttctggagttcagctctgacagaaaacgtatgtcagtgatcgtgcgtactccctccggcagactgaggctgtattgcaagggagcagacaacgtgatttttgagcgactgtctaaagattctaaatacatggaggagactctgtgccacctggaatactttgcgacagaggggttacggacactctgcgtggcatatgccgacctgtcagagaatgagtacgaagagtggctgaaggtttatcaggaggccagcaccatcctcaaagatagggcgcagagattagaggagtgttacgaaatcatcgagaaaaacctacttctgttaggcgctaccgctatcgaagatcgcttgcaggctggagtgccggagacgattgccaccctcctgaaagcagagatcaaaatttgggtgttgacaggcgacaagcaggagacagctattaacatcggttactcttgccgactggtgtcacagaacatggccctcatcctccttaaagaagactccctggacgccactagggcagcaatcactcagcattgtactgatctgggcaatctcctgggaaaggagaacgatgtggccttgatcatcgacggacacacgctaaaatacgccctgagtttcgaggtgcggaggtcctttttggaccttgccctgagctgcaaggcagtgatctgctgcagagtttccccactccagaaaagtgaaatcgtggacgttgtgaagaaaagagttaaagcaatcacccttgccataggggacggcgcaaatgatgtgggaatgatccagacggctcatgtgggggtcggcatcagcgggaatgaggggatgcaggcaaccaacaactccgactacgccatcgcacagttctcttaccttgagaagcttctgctcgtgcatggggcatggagctataaccgggttacgaaatgcattctctactgtttttacaaaaacgtagtcttatacattatcgaaatcttcacggccctgccaccttttacactgggtattttcgagaggtcatgtacacaggaatcaatgcttcgcttcccgcagctctacaagattacccagaatggggagggctttaatacaaaggtgttctggggacattgtattaatgcgctggttcatagcctgatattgttctggtttcccatgaaagcgctggaacacgataccgttcttacgtctgggcatgccaccgactatctgtttgttgggaacatagtctacacatatgtggtggtgactgtgtgcttaaaggctggtctggagacaaccgcatggacaaaattctcccatctcgcggtgtgggggtcaatgctgacatggctggtgttttttggaatttactcaaccatatggcccaccatccccatcgcccctgacatgcgtggtcaggccacgatggttctctctagcgcgcacttctggctgggtctgtttcttgtcccgactgcttgtctaatcgaggatgtcgcatggcgggctgcaaaacatacgtgcaaaaaaaccctgctggaggaggtgcaggagctagaaacaaaatcccgggtgctgggaaaggctgtgttgagagactcaaatggtaaacgcctgaatgagcgcgataggttaattaaacggcttgggcgtaagacacctcccacgttatttcgtggaagcagcctacagcagggcgtcccacatgggtacgcgttctcccaggaggaacacggagccgtgtcacaggaggaagtgatccgtgcatatgataccactaagaaaaaaagccgaaaaaaatag

SEQ ID NO: 215146 - DNA, 426 bp, synthetic construct
  misc_feature 1..426: note = Description of Artificial Sequence: Synthetic coding sequence
  source 1..426: mol_type = other DNA
atgtcgagggctactagtgtgggcgaccagctcgaggctcctgctagaaccatctacctgaatcagccacacctgaataagttcagggataatcagatttctaccgcgaagtactccgtgttgacgttcctccccagattcttatacgagcagattaggagagcggctaatgcttttttcctgttcatcgctctcctacaacagattccagatgttagcccgactgggagatacactacactcgtgcccctgattatcatcctgacgatcgccggtataaaagagatagtcgaagacttcaagcgccacaaggctgacaacgccgtaaacaaaaagaagacgattgtgctgcggaacggaatgtggcacactataatgtggaaagaggaaaactcaccacccttcaaggaaatttccccactgtag

SEQ ID NO: 215147 - DNA, 3567 bp, synthetic construct
  misc_feature 1..3567: note = Description of Artificial Sequence: Synthetic coding sequence
  source 1..3567: mol_type = other DNA
atgttgaatggtgctggactggacaaggccctgaaaatgtctttgccccgtcgatccagaatccggagcagtgttggtcctgtgcgctcaagtctgggttataagaaggccgaggacgaaatgagccgggcaacatctgttggggaccagttggaagcacctgcaagaacaatttatctcaaccagccccatctgaacaaatttagggataatcagatttccacagccaagtattccgtcctgaccttcctaccacggtttctttatgagcagattcgcagggccgctaacgcattcttcctgtttattgctttgttacagcagattccagatgtctcacccacagggagatacaccactttagtacccctgattatcatactgacgatagcaggtatcaaggagatagtggaggatttcaagcgacacaaggccgataatgccgtgaacaagaagaagaccatagtccttaggaatggtatgtggcataccattatgtggaaagaagttgctgtaggcgatattgtcaaagttgtgaatggtcaataccttcccgcagatgtggttctcctgtcttcttcagagcctcaggccatgtgctacgtcgagaccgccaacctcgacggggaaacaaatcttaaaatccggcaggggctatcgcatacagccgacatgcagacgagggaagtactcatgaagctgagtgggaccatagagtgtgaggggccaaacaggcacctgtatgacttcaccggcaatcttaatctggacgggaagagcctggtggctcttggtcccgatcagatactgctgaggggtactcagttgcgaaacacccaatgggtctttggtatcgtggtatacactgggcatgacacaaaattgatgcagaatagtacaaaggccccactgaagagaagcaacgtggagaaagtaactaacgtgcagattctggtcctttttggaatactactcgttatggcacttgttagtagtgcgggtgccctatactggaatagatcacacggagaaaagaactggtacataaaaaaaatggacaccactagcgacaattttgggtataatcttctcacgttcatcatcttatataacaacttgatcccaatcagtctcctcgtgactctggaagtggtgaaatacacccaagctctctttatcaattgggacactgacatgtattacatcgggaatgatacacccgctatggctcggacgagtaatctgaatgaagagttgggtcaggtgaagtatctcttctctgacaaaactggaacactcacatgtaatatcatgaattttaagaaatgtagcattgccggtgtcacttatggtcacttcccagagctcgcaagggaacctagtagcgacgacttctgcaggatgcctcctccatgcagcgattcatgtgactttgacgaccccagactgcttaagaacatagaggataggcaccccaccgcaccctgtatccaagaattccttaccctcctggcagtctgtcacaccgtggtgcccgagaaagatggggacaacatcatataccaagcctcatcccctgatgaagccgctctcgtcaagggagctaagaagcttggattcgtgtttacagcgaggactcccttttctgtgattattgaagctatgggtcaggagcagacatttggtatacttaatgtgctcgagttttcttccgataggaagagaatgtctgttatcgtcagaactccatctggtcggttacggctgtactgtaagggagcagacaacgtgattttcgagcgtctcagtaaggattcaaaatacatggaggaaaccttatgccatctggagtattttgctacagagggactgaggactctttgcgtcgcctacgccgacctgtccgagaatgagtacgaagagtggctgaaagtgtaccaggaagccagcaccatcctgaaagaccgcgctcaaagactggaagaatgctacgaaattatcgaaaaaaacttattactgctaggcgcaactgccattgaggatcgtttgcaggccggagttcccgaaaccattgcgactttgctaaaggctgagatcaaaatctgggtgttgacaggcgataaacaggagacggccatcaacattggatatagctgtaggctagtatcccaaaatatggcactgatcctccttaaggaagacagcctggatgccacacgcgctgctataacccagcattgcacagatctcgggaacctgttaggtaaggaaaatgatgtcgcactaatcatcgatggacatactctcaagtacgcattaagcttcgaggtcaggcggtcctttctcgacctggctctcagctgcaaagccgtaatatgttgtagagtgagccctctgcagaaaagcgagatagtggatgtagttaaaaaaagagttaaagcaatcactctggccatcggggatggcgcaaatgacgttggaatgattcagaccgctcacgtcggggtgggaatttccggcaacgagggtatgcaagcgacgaacaatagtgactacgctatagcccagttctcttatttagagaagctcctgctcgtgcacggcgcttggtcttataatcgcgtgacaaagtgtattctgtactgtttttacaagaatgtcgtgctttacataatcgagctgtggttcgcttttgtgaacggattctctggacagatcctattcgaacggtggtgcatcggcctatacaacgttattttcactgccctgcccccttttaccctgggtatcttcgagaggagttgcacccaagaatctatgcttcggttcccacagctctataagatcacgcagaacggagaagggttcaatactaaggtgttctgggggcattgcatcaacgcacttgtccacagtctcattctcttttggttcccaatgaaggcattagagcacgacacagtgctgacatccggccacgccacagactacttgttcgtcggtaatatcgtttacacatatgtggtggtgacagtttgcctcaaagccggactagaaactacagcctggactaagttttcgcacctcgcggtctggggaagcatgttaacctggctggtcttctttggcatttactccaccatatggcctactatccctatcgcgcctgatatgaggggccaggccaccatggtgctcagctctgcccatttttggctgggtctcttccttgtccctaccgcttgtctcatcgaggacgtggcctggcgcgcagctaaacatacatgcaagaagacactgttggaggaggttcaggaactcgagaccaaatctagagtacttggcaaagctgtcctcagagattctaacggcaagcggttgaatgagagagacagactaataaagaggctgggacggaagacaccacctacacttttccggggatcgtctctacaacagggcgttcctcatggctacgctttcagccaggaggagcacggggctgttagccaggaggaggttatccgtgcttatgataccaccaagaaaaagtcacgcaagaagtag

SEQ ID NO: 215148 - DNA, 2907 bp, synthetic construct
  misc_feature 1..2907: note = Description of Artificial Sequence: Synthetic coding sequence
  source 1..2907: mol_type = other DNA
atgagatgtcctggacccaggttactggaaaccagttggcggcaccctcctgcaccttttacatccactaatcgacacctgtatgacttcacaggaaatctgaatctggacggcaagtctttggttgcactgggcccagaccagatcctgttgcggggaacccaattaagaaatactcagtgggtcttcgggattgtggtatacactgggcacgatacaaaactcatgcaaaattccactaaagccccactgaagcgctctaatgtggagaaggtcacaaatgtgcaaattctggtcctgttcggtatcctcctggttatggccctggtgagcagtgcgggtgcattgtactggaatcgtagccatggcgaaaagaactggtatatcaaaaagatggacaccacatctgacaatttcgggtacaatctcctgacgttcatcatactttacaataatcttataccaatttccctgttggtgactctggaggtggtgaagtacacacaagccttattcatcaactgggacaccgatatgtattacatcggaaacgatactcccgcaatggcacggaccagtaatctgaacgaagaactggggcaggtgaagtacctgttctcagataagacaggcacactgacttgtaacatcatgaatttcaagaaatgcagtatcgctggtgttacctatggccacttcccagaactggcgagggaaccaagctctgacgacttctgcaggatgcccccaccatgctctgacagctgcgattttgatgatccccgattacttaagaacattgaggaccgacaccccacagcaccatgtatacaggagttccttactctgctggcagtgtgccatacagtcgtccccgagaaggatggtgacaatatcatataccaggcaagttctcctgatgaggcggcactggttaaaggggcaaagaagctgggattcgtgtttacggcccgtacccccttcagtgtgataatagaggccatggggcaggaacagaccttcgggatcctgaacgtcctggaattcagttcagatcgcaaacgtatgagcgtcatagttcggactccatcaggcagactgagactttattgcaaaggagccgacaacgtgatcttcgagcggttatccaaggactcaaaatacatggaggaaactctttgtcacctggagtactttgccacagagggactccggaccttatgtgtggcttatgctgacttaagtgagaatgagtacgaagagtggttgaaggtgtatcaggaggccagtacaattttgaaggatcgggctcagcgcttagaagagtgctatgaaatcatcgagaagaatctcttgcttttgggtgctaccgccatagaagacagactgcaggcaggtgtgcctgagactattgctactcttctgaaagctgaaatcaaaatttgggtgctaacaggagataagcaggagactgctataaacatagggtacagttgcaggctagtgtcccaaaacatggccttaatacttttaaaagaggattctctcgatgccacccgcgctgccataactcaacactgcacagacctcggaaatctcctcggaaaagagaacgacgttgcactgattatcgacgggcacaccttgaagtatgccctctcatttgaggtgcggaggagttttctggacctggcactgtcatgcaaggctgtgatttgctgcagggtgagcccattgcagaagtcagaaattgtggacgtggtgaagaagagggttaaagccatcactctcgcgattggggatggagctaatgacgtgggtatgattcagaccgctcatgtcggagtgggaatcagcggaaacgaggggatgcaagccacaaacaacagtgattacgcaatcgcgcagttttcatacctggaaaaacttttgttggtccacggagcatggagctataatcgggtgacaaaatgtatcttgtactgcttctataaaaatgtcgtgttgtatataatcgagctgtggttcgccttcgtgaacggtttttctggccagattctgttcgagagatggtgtattggcctttataacgtgatatttactgctttacccccatttactctgggaatcttcgagcgatcctgtacgcaggaaagcatgcttaggttcccacaattgtacaagatcactcaaaacggagagggtttcaatactaaggtgttctggggacactgcattaacgcacttgtgcatagcctgatactgttctggttccccatgaaagccctcgagcatgacaccgtcctgacatctggtcacgctaccgactacttatttgtgggtaacattgtgtacacttacgtggtcgtcacagtttgcttaaaggctggacttgagacaaccgcctggacaaaattctcccacctcgccgtttggggaagtatgttaacgtggctggtgttctttggcatctattccacaatttggccaaccattccaatcgccccagatatgagggggcaggcaactatggtgttatcttccgctcacttttggcttggtctgttcttggtacccacagcttgtctcatcgaagacgtcgcctggagagccgctaaacacacctgtaagaagactctcttggaggaagtgcaggagttggagacaaaaagcagagtgctgggaaaagccgtccttagggactccaatggtaagaggctgaatgagcgcgatcgactgatcaagcgccttggtcggaagactcctccaaccctgttccgcggatccagcttgcagcaaggcgttccacatggatatgcttttagtcaagaggaacatggcgctgtaagccaagaagaagtcatcagagcttacgatactacgaaaaagaaatcaaggaagaagtag

SEQ ID NO: 215149 - DNA, 3903 bp, synthetic construct
  misc_feature 1..3903: note = Description of Artificial Sequence: Synthetic coding sequence
  source 1..3903: mol_type = other DNA
atgggtaccggacccgctcagacgccgaggtctacaagggccggaccagaacccagcccagccccacccggtccaggggacactggtgactcagacgtgacccaggagggctccgggccagctggaatccgtggtggcgagactgttattcgcgcaggcatgggagatagtcccggacggggagctccagagaggaggcataaggcccagcccggacgggcaagaaagtacgagtggaggccagaaggcccaacctccatgggctccctcgggcagagagaagacttgcaggacgaagatcgtaatagcgcatttacatggaaagtccaggccaacaaccgggcttacaacggccagttcaaggaaaaggtgatcttgtgctggcagaggaaaaaatacaaaacaaacgtgatacgtaccgcgaaatacaatttttattctttcctgcccttaaacctttacgagcagtttcatagggttagcaacctgtttttcctgattataataatcttgcaatctataccagacattagcacactcccttggttttctctgagcacacctatggtgtgtctgttatttatacgggcaacccgggacctggttgacgacatggggagacacaagtccgaccgggctataaataacaggccatgccagatcctgatgggaaaatctttcaaacagaagaaatggcaggacctctgcgtgggcgatgtggtgtgcctcagaaaggataatattgtccccgctgatatgctgctgttggcatcaacagagccttcgagcctatgttacgttgagacagtggacattgatggggaaaccaacctcaagttccgccaagctctgatggtgactcacaaagaactggcgaccataaagaaaatggcatcattccagggaacagtgacttgcgaagcccctaattctcgtatgcaccactttgtgggttgcctggagtggaacgacaaaaaatatagtctcgacatagggaatctgctactgagaggctgccggatccggaatacagatacctgttatgggctagtaatctatgccggattcgatactaagatcatgaagaattgtgggaagatccatttgaaaagaaccaaactggacttattaatgaataaactggtcgttgtcatatttatcagcgtggttctggtttgtcttgttttggcttttggattcggattctctgtgaaggaattcaaagaccaccactactacttgagcggggtgcatgggagctccgtggctgcagaatcttttttcgtgttttggtcctttctgatattgctgtctgtgacgattcccatgagtatgtttatcttgtcggagtttatctacctcggcaacagcgtcttcatcgactgggatgtgcagatgtactataaacctcaggacgtgcccgctaaggcgagatctacgtccctgaacgatcaccttggtcaggttgagtacatcttctctgataaaacaggaacactgactcagaacatactgacatttaacaagtgctgtatctcaggtagagtttatggaccggattctgaggccacaacacgtcctaaagagaatccttatctatggaacaaattcgctgatggcaaactcttatttcacaacgccgctctcttgcatttagttcgcacaaacggggacgaggccgtaagagagttttggcgcctgcttgctatttgtcacaccgtgatggttagagagagcccaagggagcgacctgatcagttgttatatcaggccgcatcccccgacgagggagcattggtcacagccgcacgtaactttggttacgtcttccttagtaggacacaagatacagtgactatcatggaactgggggaagagcgggtctatcaagttctagcaattatggatttcaacagtactaggaaacgaatgtccgtgttagtgagaaaaccagagggcgctatttgtttgtacacaaaaggcgctgataccgtgatcttcgaaaggctccatcgccgaggtgccatggagttcgcaacagaagaagctttagcagctttcgcccaggagacactgcgaacactgtgcctcgcgtacagggaagtggccgaagatatttacgaggattggcagcaaagacatcaggaggccagcttactcctgcaaaatagagcacaagctctacagcagctgctaggagcgacagcgatcgaggatagactgcaggacggcgtcccagagaccatcaaatgcttgaagaaatctaatatcaagatctgggtactcaccggagacaaacaggagacagcggtcaacatcggattcgcatgcgagttgctgtctgagaacatgttaatcctggaagaaaaagagatctcccgcattttagaaacatactgggagaactctaacaacctgctgacaagagagtcactgtctcaggtaaagcttgcgttggtgatcaacggagacttcctcgataagctcctcgtaagcctgagaaaggagccacgggcactggcacaaaacgtgaacatggatgaagcttggcaagaactgggacagagtcgtagggactttctatacgcccgacggctgtctctcctgtgtaggcggtttggcctgccactggcagccccacccgctcaagatagtcgcgctcgccgaagcagcgaggtactgcaagaaagagcttttgttgacctcgcatctaagtgtcaggcggtgatttgttgcagggtgacccccaagcagaaagcccttattgtggcacttgtgaagaaataccatcaggtggttacactggctattggtgatggtgcaaacgacatcaatatgatcaagaccgcggatgtgggcgtcgggcttgcaggccaggaggggatgcaggcggtacagaacagcgactttgtcctgggtcaattctgctttctccagaggctactgctcgtgcatgggagatggagttacgtaagaatttgcaagttccttcggtattttttttataagtctatggcatccatgatggtgcaggtgtggtttgcctgttacaacggattcactggacagcccttgtacgagggatggtttttagctctgttcaatctcctgtacagcactctcccagtcttatacatagggctattcgaacaggatgtcagtgccgagcagtccttggagaaacccgaattgtacgtcgttggtcaaaaggatgagctgtttaattattgggtctttgtgcaggcaatagcgcatggcgttaccacctcacttgtcaattttttcatgacactctggatcagccgagacactgccggaccggcatcattttctgaccaccagagctttgctgtagtggtggcactttcatgtttgctttctatcactatggaggtcattttgataatcaagtattggacagccctgtgcgtagccacgattctcctgtccctcggattctacgccataatgactacaactactcagtcattttggctttttagagtaagtccaaccacgtttccgttcttatacgctgatttgtctgtcatgagttcccctagcatcctgttagttgtcctcttatccgtatcaataaacacatttccagtgctagctcttagggtgatcttccccgctctaaaggagctgcgggcaaaggaggaaaaagtggaggaaggcccttctgaggagatttttactatggaacccctacctcatgttcaccgggagagcagagccaggcgatcctcttatgccttttcccacagggagggctacgctaatctgattactcagggtaccattctgcgacggggacccggagtaagttccgacatcgcctcggagtctctggatcccagcgacgaggaggccgcaagttcacccaaagagtctcagtag

SEQ ID NO: 215150 - DNA, 1737 bp, synthetic construct
  misc_feature 1..1737: note = Description of Artificial Sequence: Synthetic coding sequence
  source 1..1737: mol_type = other DNA
atgggggattcacccggtagaggggcaccagaacggagacataaagctcagcccggtagggccagaaaatatgagtggcggcctgagggcccaaccagcatgggctctctgggccaaagagaggacttacaggacgaagatcggaactctgcgttcacctggaaggtccaggccaataacagggcatataacggacagtttaaagaaaaggtcatcctctgttggcagcggaagaagtacaaaacaaacgtcatcaggacagccaaatataacttctactccttcttacccctgaatctgtatgaacagtttcacagagtgagtaatctgttttttctaatcatcatcattctccagtccattcccgacattagcacattaccctggttctcgctgtctacacctatggtttgcttacttttcattagggcaaccagggatttggttgatgatatgggcagacataaatccgatagggcaatcaacaaccgcccttgtcagatcctgatgggcaagtcttttaaacagaagaaatggcaggacctgtgtgtcggagatgtagtttgcctgcgaaaggacaacatagttccagccgacatgttgttgcttgcttctacggagcccagtagcttatgttacgtggaaactgtggacatcgatggagaaacaaatcttaaatttcggcaggctctaatggtgactcataaggagctcgcaaccatcaagaagatggcctcattccagggcacagttacttgtgaggcccctaattcacggatgcatcatttcgtcgggtgtctcgagtggaatgacaagaagtactctctggatattggcaatctcctcttgcgcggttgtcgcatcagaaataccgacacttgctacggcctggtgatctacgcgggtttcgacaccaagataatgaaaaattgtgggaaaatacacctgaagcgcaccaagctcgatctgcttatgaacaagctggttgtcgtcattttcatcagcgtggtgcttgtgtgtttagtgctggcatttggcttcggcttttcggtcaaggagttcaaggatcatcattattatctctctggagtccatggatccagtgtggccgctgagagtttctttgtcttttggagctttctgatacttttgtctgtcacgatccctatgagtatgttcatactttccgagtttatctatctaggcaactccgtcttcattgattgggatgttcagatgtactacaagcctcaggatgtccctgctaaggctcgtagcacgagcctgaatgatcacctgggacaggtagagtatatttttagtgacaagaccggaacactgacccagaatatcctgactttcaataagtgctgcatcagcggcagagtgtatggggcagcgccaactcccgagctgccagccggaagtagcatctttaaaggcctgagggtacccgagaaccagtctcacgtttggcctcatgcgcagcacctaagacctaatttgaatcaggggactgtggccagatggcctggctttctgtggagggggccaggcaagttcttcttttttcttcgccaatccctcactttgagcacccaggccggtatgcagtggtgtaatcttgggtcactccagtcaccaccgccaagatttaagcggttttcttggctttccctgccatccagctgggattaccgacaccttcctcctcatctgattttcctttatttttag

SEQ ID NO: 215151 - DNA, 3792 bp, synthetic construct
  misc_feature 1..3792: note = Description of Artificial Sequence: Synthetic coding sequence
  source 1..3792: mol_type = other DNA
atgggggattcgccaggacgcggagcccctgaaagacgacacaaggcccagccaggcagagcacggaagtatgagtggcggcctgagggcccaactagcatggggagcctgggtcaacgggaagatctgcaagatgaggatcgtaatagcgctttcacatggaaagtccaggcaaataatcgagcgtacaacggccagtttaaagagaaagtgattctgtgttggcagaggaagaagtataaaacaaatgtaattaggaccgccaaatacaatttttattccttccttccgctgaacttgtacgaacaattccaccgtgtcagcaatctcttcttcctcatcatcatcatcctccagtcaattccagacatcagcacgctcccatggttctctctgtccacccctatggtgtgcctactttttataagggctacccgcgacctggtagacgatatggggcgacataagtccgacagagccattaacaatagaccatgccagatcctaatgggcaaaagctttaaacagaaaaagtggcaagacctgtgcgtgggggacgtcgtttgcctgagaaaagataatatcgtgccagctgatatgttactgctcgcctctactgagccctcttccctttgctatgtggaaactgttgatattgatggcgagactaatctcaaatttcgacaggcacttatggtgacgcacaaagagctggcaaccataaagaagatggcctcttttcaaggaaccgtcacgtgtgaggccccaaatagtcgcatgcatcacttcgtcggctgcctggaatggaacgataaaaagtacagcctcgatattggaaatcttctcctgcggggatgccggatccgcaacactgacacttgctatgggctggtgatatatgccgatggctatatgtttgtaggcttcgacacgaagataatgaagaactgcggaaaaatccatttgaagagaactaagctggaccttctaatgaacaaactcgtggtcgtgattttcatttccgtggtgttagtttgtctcgtgctcgctttcggttttggattctcagtgaaggagttcaaggatcaccattactatttatcgggggtccacggctcgagcgtggccgctgaaagcttctttgtcttctggagcttcttgattctgttgtccgtcaccatccccatgagcatgttcatcctgagcgaattcatatacctcggcaatagtgtgtttatcgattgggacgtacaaatgtattataaaccgcaggatgtgccagccaaagccaggtccacttccctgaacgatcacctgggccaggttgagtacatctttagcgacaaaacaggaacattgacacagaatattcttacatttaacaaatgctgtataagcggtagagtttacgggccagattcagaggcaactactcgccctaaagagaatccctatctctggaacaaatttgctgacgggaaactgttgttccacaatgcagccctgctacatctggtacgcactaacggcgacgaggccgtgcgcgaattctggcgcttactggcaatctgtcataccgtgatggtgcgagagtcaccacgcgaaaggcccgaccagttactgtatcaggcagcctcaccggatgaaggggctttggtcaccgcagctagaaactttggatacgtgtttctttctaggacccaggatacggtgacgatcatggaattgggggaagagcgggtgtatcaggtactagccataatggacttcaattccacaagaaagcgtatgagtgtactggtgaggaagccagagggcgcaatatgtctttacaccaaaggagcagacactgtgatctttgagaggcttcatcgtcgaggtgccatggaatttgctacagaggaagcactagctgcatttgctcaggaaaccctgaggactctctgcctcgcatacagggaggtagctgaggacatctatgaagattggcagcaaaggcaccaggaagcttcgctcctgctgcagaatagagctcaggcgctccagcaggtgtacaatgagatggagcaggatctgaggctgctcggggctactgctatagaagaccgcctccaagatggagttccagagacgatcaaatgcctgaagaaaagcaatataaagatctgggtcctgaccggagacaagcaagaaaccgcggtgaatatcgggtttgcctgtgaactactttctgagaacatgctgattctggaggaaaaggagatcagccgaatcctggaaacctattgggaaaacagcaataacctgcttactagggaaagtttgagtcaagtgaaactggccctggttataaacggcgactttctggacaaactgttggtcagtctgcggaaagaaccaagggccttagcacagaatgtgaatatggacgaggcttggcaggagttgggtcagtcaaggcgtgactttctctacgcgaggagactctcactgctgtgtagacggtttggcctgcctctggccgctcctcccgcacaggacagtagagccagacgctcttcggaggtgcttcaggagagggctttcgtggatctggccagcaaatgccaggcagtcatttgctgcagagtaacgcctaaacaaaaggccttgatcgtggccctggtgaagaagtaccaccaagttgtgacgctagcaattggggacggcgcaaatgatattaatatgatcaagacagcagatgtaggagttggcctggctgggcaggaaggaatgcaggcggtgcagaatagcgattttgtgctggggcagttctgctttcttcagcggttgctactggtgcatggccgttggagttacgtccgaatctgcaagttcctgcgctactttttttacaaaagcatggccagcatgatggtccaggtctggtttgcttgctacaatgggtttaccggtcagcccttgtacgaggggtggttcctggccttgttcaatctactgtatagcactctccccgtcctatatatcggactgtttgagcaggacgtatctgccgagcagtccttggagaaacctgagctgtatgttgttggacagaaagacgagcttttcaattactgggtctttgtgcaggccattgcacatggcgtgactacctctctggtgaacttttttatgacactgtggatcagccgcgataccgctggtcctgcctccttctctgaccatcagtcattcgcggtggtggttgctctgtcatgtctgctctctattaccatggaggtcattcttattattaaatattggactgctctatgcgtcgcaacaatcttactgtcactgggcttttacgcaattatgacgacaaccacgcaatccttctggctgttccgcgtctcccccactacattccctttcctctacgccgacctgagcgttatgagttccccttctatcttgctcgttgttttactgagtgtgagcattaacactttcccagtgttagcccttagagtcatctttcctgccctgaaggagctccgtgctaaggaggagaaggtggaggagggaccctccgaggagatctttaccatggagccccttccccacgttcatcgcgaaagccgggctaggagatcctcgtacgccttctcacaccgggagggctacgcaaaccttattacacagggcactatcctgaggcgaggtcccggagtctctagcgacatcgcctcagaatcacttgacccaagtgacgaagaggccgctagctcccctaaggaatctcagtag

SEQ ID NO: 215152 - DNA, 3933 bp, synthetic construct
  misc_feature 1..3933: note = Description of Artificial Sequence: Synthetic coding sequence
  source 1..3933: mol_type = other DNA
atgggaaccgggcctgctcagacgcctcggtcaactagggccggtcccgagccaagccccgcacctccgggtcctggggacacaggcgactctgatgttacacaggagggttctggtccggctggcatccggggtggcgagactgtgatcagagccggaatgggcgactctcctgggagaggcgctccagagaggcgccacaaggcacagcccggaagggcccgtaaatatgagtggcgcccagagggtcccactagtatgggtagtctgggccagcgggaagacctgcaggacgaagacagaaactctgccttcacgtggaaagtgcaagcgaacaaccgggcttataatggtcagtttaaggaaaaagtgatactctgctggcagaggaaaaagtacaagacaaacgttattcgaacagcaaaatacaacttctacagcttcctgcctctcaatctgtatgaacagtttcatcgggtgtcaaatcttttcttcttgattatcattatactccaaagtatacccgacatttccactctgccatggttttccctgagcacaccaatggtgtgcttgctctttatccgagccacccgggacctggtggacgatatgggcagacacaaaagcgatagggccatcaataaccggccatgccagattctgatgggtaaatcattcaaacagaaaaaatggcaggacttatgcgttggagacgttgtgtgcttgcggaaagataacatcgttccagccgacatgttgctattagcaagcacagaaccgagctcattatgctacgtggagaccgtagatatcgacggcgagactaacctgaagtttcgacaggctttgatggtgacccataaagagcttgcaactataaagaaaatggccagctttcaaggcactgttacatgtgaagccccaaattctcgaatgcatcactttgttggatgcctcgagtggaatgacaagaagtattcccttgacatcggcaatctcttgctgcggggttgtcgcattcgtaatacagacacctgttatggcctagtcatttacgcgggatttgacaccaaaattatgaagaactgtggcaagatccaccttaagagaactaagctcgatttgttgatgaacaagctggtcgtcgtcattttcatatcggtagttctggtttgcctggtgctcgccttcggcttcgggttctcagtcaaggaattcaaggaccaccactactacctgagtggtgtacatggcagttcggtggctgctgagagcttttttgtgttctggtccttccttattctactctccgtcacaattccaatgagcatgttcattctgagtgaattcatctaccttgggaacagtgtttttatcgactgggatgtgcagatgtattacaagcctcaggacgtgccagccaaggccaggtccacgtccctcaacgatcacctcggccaagtggagtatatcttttccgataaaacagggaccctaactcagaacattttgacttttaataagtgctgtatcagtgggagagtatatgggcctgatagcgaggcaaccactcggcctaaggagaatccgtacctttggaataagttcgccgatgggaagctcctctttcacaacgccgcattgttgcacttagtgagaaccaacggagacgaggctgtgcgggagttctggaggctcctagcgatttgccatactgtcatggtccgcgagtcacctcgtgaacgaccagaccagttgctgtaccaggccgctagtcccgacgagggcgctctggtcacagccgctcggaatttcggatacgtgtttctctcacgcactcaggacaccgtcactatcatggaactgggagaagaaagggtctatcaggttctggccattatggattttaattccaccaggaagcggatgtctgtacttgtccggaagcctgagggcgctatctgcctctatacaaaaggggctgacaccgtgatttttgagagactacataggcgtggcgcaatggaattcgccactgaagaagcgctcgccgcttttgctcaggaaacactgcggaccttatgccttgcctacagagaagtggccgaggacatttatgaagattggcagcagagacatcaggaggcaagtctcctgctccaaaacagagcacaggctctgcagcaggtttacaacgagatggagcaggacctgagacttctcggcgctaccgccattgaggaccggctgcaagacggcgtgcccgagaccatcaaatgcctcaagaaaagcaatatcaaaatttgggtcttgaccggggacaaacaggaaaccgctgttaatatagggtttgcttgcgagttgctgtctgaaaacatgttaatacttgaggaaaaggagattagtaggatcctggaaacctactgggagaactccaataatctgctcacccgagaatctttatcccaagttaaactggctctcgttattaatggagattttctggataagcttcttgtaagcctccgaaaagaaccacgagctctagcccaaaatgttaatatggatgaggcatggcaggagctggggcagagcagacgggacttcctgtacgctaggcggctgagtctgctctgtcgcagattcggactcccccttgcggcacccccagctcaagattcaagggctaggcgttcaagtgaagtgctccaagagagggcctttgtggacttggcctcaaagtgccaggccgttatctgctgtcgtgtgacaccaaagcagaaggcgttgatcgtcgccctcgtgaaaaaataccaccaggtcgtcacgctcgctataggagatggcgcaaatgacattaacatgattaagacagctgatgtgggcgtgggattagccggacaggaggggatgcaggccgtgcagaattcagactttgtgctaggtcaattctgtttcctacagagactgcttcttgtgcacggtagatggtcgtacgtccggatatgcaaatttctcaggtatttcttttacaagagtatggccagcatgatggtgcaggtgtggttcgcttgctacaatggctttaccgggcagcctctgtacgagggctggttcctggctctgtttaacctgctgtactctaccctgcccgtgctctatatcgggctgttcgaacaggacgttagcgcggagcagagcctcgagaagccggagctctacgtcgtggggcagaaggatgagctgttcaattattgggtgttcgttcaagccatagcccatggcgtgactactagcctggtaaattttttcatgactctctggataagccgtgacactgccggtccagccagcttcagcgaccaccagtcatttgctgtggtggtggccctgagctgtttgctgtcaatcacaatggaggtgattctgattataaaatattggacagctctgtgcgtggccacaattctgctatctttaggattctacgcaataatgaccaccaccacacaaagtttttggctgtttagagtgtcccctacaacgttccccttcctatacgccgatctgtcagtcatgtcttccccctctatattgctggtggtgttgctgtccgtctctatcaacaccttccccgtactggcccttcgcgtgatattccccgcactgaaagagttgagagctaaggaggaaaaggtggaggaaggcccatctgaagagatctttacgatggagcctttaccgcacgtgcatagagagtcccgagctcggaggagctcatacgcattctcccaccgcgagggttatgccaatttaatcacacaagggacaatcttacgcaggggcccaggagtgtcttccgacatcgcatcggagtctcttgatcctagtgatgaggaggccgcaagtagcccgaaagagtctcagtag

SEQ ID NO: 215153 - DNA, 3006 bp, synthetic construct
  misc_feature 1..3006: note = Description of Artificial Sequence: Synthetic coding sequence
  source 1..3006: mol_type = other DNA
atggaagcagcacacgctaagaccaccgaagaatgcctcgcatactttggcgtctctgaaactacaggtcttacccctgatcaagtcaagcgaaaccttgagaagtatggactgaatgagctccccgctgaggagggcaagacactgtgggaactggttattgaacagttcgaagacctcctagttcggattctactgttagccgcatgtatttcatttgtgctcgcctggtttgaagagggagaggaaactattaccgcttttgtggagccttttgtgattttactgatcttaatcgccaatgccattgtaggtgtgtggcaggagcggaacgccgaaaacgcaattgaagcactcaaagagtacgagccggagatgggcaaagtttacagggctgaccggaagtctgtgcaacggatcaaagctcgcgacatagtacccggagacatagtggaagtcgctgtgggcgacaaagtccctgctgatattcgaatcttggcaatcaagagcacaactctccgggtcgaccagtcgatcctgaccggtgagtcagtctctgtcatcaagcacacagagccagtgccagaccctcgggctgttaaccaggacaaaaagaacatgttgttttctggtacaaatattgcagctggcaaggcgttagggatcgtggcaacaacaggcgtcggcaccgagattggtaaaattcgtgaccagatggccgctacggagcaggacaaaacacccctgcagcagaagctagacgaattcggagagcagctcagcaaggtgattagtctgatctgcgtagccgtatggctaatcaacattggacattttaacgaccctgtgcatggagggtcatggtttcggggagcgatctattatttcaagatagccgtggccctggcagtcgccgctatcccagagggcctacccgcagtgatcaccacctgtcttgccctgggcaccagaaggatggcaaagaagaacgccatcgtccgcagtttgccttctgtggaaacgttgggatgcacgagcgtaatttgttccgacaagaccggtacactgaccactaaccaaatgtctgtctgcaagatgtttattatcgacaaggtggacggagacatctgcttgctgaatgagttttccattaccggatccacctacgctcctgaaggggaggtcctcaaaaacgacaaaccggttcgcccaggtcaatatgacgggcttgtggagcttgcaactatttgcgcactgtgtaatgactcctcactcgacttcaatgaagctaagggagtgtatgaaaaagtcggcgaagcaacggagacagcactgacgacattagtagagaagatgaacgtgtttaatacggatgtgcgaagtctgtccaaagtcgaacgcgcaaacgcttgcaactccgtgatccgccagctcatgaaaaaagagttcaccctcgagttcagtcgggataggaagtccatgtctgtgtactgctcgcctgccaaatcatctagagctgcagtgggcaacaagatgtttgtgaagggcgctcccgagggcgtaattgatagatgcaactatgtcagagttggaactaccagggtccctttgacaggcccagtcaaagaaaaaataatggctgtgatcaaggagtggggcactggaagagatactcttcgttgtctggcacttgccactcgggatactcctcctaagcgtgaagaaatggttctcgacgacagcgccagattcctggaatatgagacggacctcacatttgtaggggttgtagggatgcttgatccaccaagaaaggaggtgactggaagcatccagttgtgcagagatgccggtatccgtgtgataatgattaccggggataataaagggacggcgattgccatttgtcggcgtattgggatcttcggagaaaacgaagaagtggcggaccgggcatatacagggagagagttcgatgatctgcccttagccgagcaacgcgaggcatgccgtcgtgcctgctgctttgccagggtcgaaccttcgcataagagcaagattgtagaatatctgcagtcgtacgacgagataaccgccatgacaggagatggtgtgaatgacgctcctgccctgaagaaagcagagatcggcatcgctatgggcagcggtaccgcagtagcgaaaaccgcttctgagatggtacttgccgacgacaatttctcgacaatcgtagccgcagtggaagagggacgcgctatctataacaacatgaagcagtttataagatatctcatctcaagtaatgtgggagaggtggtatgtatcttcctgacagcggctttgggactcccagaagcccttatcccggtccaacttctctgggtaaacctggtgactgacggccttccggctacagcacttggcttcaacccccctgatctggacatcatggacagacccccacgttcacctaaggagcctctgatatcagggtggttattttttcgatatatggccatcggcggttatgtcggtgcagctaccgtgggcgctgccgcttggtggttcctgtacgccgaagatgggcctcacgtcaattatagtcagttaacccatttcatgcagtgtacagaagacaacactcatttcgaaggcatagactgcgaggtcttcgaagcacccgagccaatgactatggccctgtccgttctggttaccattgagatgtgcaacgcgctgaactccctctcggagaatcaatctctccttaggatgccaccgtgggttaatatttggctgctggggagcatttgtctgagtatgagcctgcacttcttaatattgtacgtcgacccactacccatgattttcaagctgagagcccttgatcttactcagtggttgatggttcttaagattagccttccagttatcggacttgacgagatcctgaaatttgttgctaggaattatctcgaggacccagaggatgagcgaaggaagtag

SEQ ID NO: 215154 - DNA, 2535 bp, synthetic construct
  misc_feature 1..2535: note = Description of Artificial Sequence: Synthetic coding sequence
  source 1..2535: mol_type = other DNA
aaaaggaggaaccctgggaggcaggccgttggtcatactgaagaggacccccctagggttggaactccatggaaagaacacacaggtcccggaccccaggaaggatctacgatggaagctgctcatgctaagacaaccgaagagtgtttagcctactttggcgtcagtgagaccaccggtctgacccccgatcaggtcaaacggaacctggaaaagtacggactgaatgagctgcccgctgaggaggggaaaacgctgtgggaattggtgatagagcagtttgaggatctgctggtgaggattttgctgctagcagcatgcatatctttcgtgctcgcgtggtttgaagagggcgaggagactattaccgcgtttgtggaaccattcgtgattctgctgatcctgatagccaacgcaattgtgggggtgtggcaggagagaaatgctgagaatgccatcgaggcccttaaggaatatgagcccgaaatgggcaaggtctatcgagctgatagaaagtctgtgcaaagaataaaagccagagatatcgtgcccggagacatagttgaagttgcggttggggacaaagtaccagccgacattagaatcctggccattaaatccacaaccctgcgagtggatcagagcattctcaccggcgaatccgtcagcgtcattaaacatacggagccagtccctgaccccagggccgttaatcaagataaaaagaacatgctgtttagcggaactaacattgccgcagggaaagctctggggatcgtggcaactacgggagtcggcacagaaattggaaaaatccgggatcaaatggcagccacggagcaggacaagaccccactgcagcaaaagctcgacgagtttggcgagcagctgtcaaaggtgatttccctgatatgcgtggccgtctggctgataaacatcgggcattttaacgaccccgtacacgggggatcctggtttaggggcgcaatctactattttaaaattgccgtcgctcttgccgtagcagccataccagagggcctccccgctgtgatcacaacctgccttgccctcggtacgagacgcatggccaaaaaaaatgccatcgtgaggagcctacccagtgtggagacattaggctgcacctccgtgatatgctcagataaaacaggcacattgacaacgaatcagatgtcagtgtgcaaaatgttcatcatcgataaggtagatggagacatctgtctcttgaatgagttctccattacggggagtacctacgctcccgagggcgaggtcttaaagaatgacaagccagtgagacctggacagtatgatggtttggtcgagctggccaccatatgtgcgctctgcaatgacagtagcttagatttcaacgaagccaagggcgtgtacgagaaggtaggcgaagccacagaaacggctctcacgacactggttgaaaagatgaatgtgtttaatacagatgtccgctcactgtcgaaggtggagcgcgctaatgcatgcaactcggtgattaggcagcttatgaaaaaggaattcaccctggaattcagtagggatagaaagtcaatgtccgtgtattgcagtcccgctaagtcgagtcgcgcagctgtagggaacaagatgttcgtgaagggggctcctgaaggggtgatcgatcgctgtaactacgtccgtgttgggacgaccagagtccccctcaccgggcctgttaaagagaagattatggcagtaatcaaagaatggggtacggggagagacacccttcgatgccttgccctggctacccgggatacacctcctaaacgggaggagatggtcttggacgattcagcacggtttcttgagtacgagacagacctgactttcgtcggcgttgtagggatgctcgaccccccaagaaaagaggtcactgggtccatccagctctgtagggacgccggaatcagggtgattatgattaccggagataataaaggaacagccatcgccatctgtcggaggattggcatctttggagaaaatgaggaagtcgcagatcgggcatatacgggacgcgaatttgacgatcttcctcttgccgaacagcgggaagcctgcagaagagcttgctgcttcgctcgtgtggaaccttcgcacaaaagcaaaatagtcgagtacctgcagtcctatgacgaaattactgctatgactggcgatggagtaaatgatgccccagctttgaagaaggccgagataggcatcgccatgggctcagggacggccgtcgctaagacagcatcagagatggtgttagccgacgacaacttctctaccatcgtggccgctgtcgaagagggaagagctatatacaacaacatgaaacagtttatccggtacctgatttccagtaacgttggagaggttgtgtgcatctttttgacagcagcattagggctccctgaggcccttatcccagtgcagctactttgggttaacctggtgactgattgcgccgagctacttatatactag

SEQ ID NO: 215155 - DNA, 2985 bp, synthetic construct
  misc_feature 1..2985: note = Description of Artificial Sequence: Synthetic coding sequence
  source 1..2985: mol_type = other DNA
atggaggccgctcacgccaagaccacagaagagtgcctggcctatttcggcgtgagtgaaaccacgggattaacccctgaccaggtgaaaagaaacctggagaagtatggcttgaacgaactcccagctgaggagggtaaaacactgtgggagctcgtaattgagcagttcgaagatcttctggtgcggattctcctccttgcggcttgcatcagcttcgtgctcgcctggtttgaggagggcgaggagaccattactgctttcgtagagcctttcgttatactcctaatcctgatagccaatgccatagtaggggtctggcaggaacgcaatgcagaaaatgcaatagaggctcttaaagagtacgaacctgagatgggcaaggtgtacagggctgacaggaaatcagtccagagaatcaaagcaagagatatcgtgcctggggacattgtcgaagttgctgtgggcgacaaggtgcctgcggacattcgcatcctggctattaagagtacaaccctccgtgtcgaccagagcattttaactggcgagtcggtgtctgtgataaagcatacagagcctgtgcccgaccccagggcggtgaatcaagacaagaaaaatatgctgtttagcggcactaacatagccgcagggaaggccctgggcatcgtggcaactaccggggtgggcactgagatcgggaaaatcagagatcagatggccgctaccgaacaagataaaacacctttacagcagaagctggacgagttcggtgagcagctttcgaaagtgatttctctcatttgtgtggccgtgtggctcattaacatcggccattttaacgatccagtccatgggggatcttggttcagaggcgcaatttactacttcaaaattgccgtggcattggcggttgcagcaataccagaaggactgcccgcagtgattacaacttgcttggctctaggcactcgccgaatggccaagaaaaacgcaattgtccggagtctcccttcggtggaaactctgggctgcacctccgtcatttgctccgataaaaccggcaccctcaccaccaaccagatgtctgtttgcaaaatgttcatcatcgataaagtggacggcgatatttgcctgctgaacgaattttccattacagggtcaacctacgctccggagggagaagttttgaaaaacgacaagccagtgaggcctggacaatacgatggtttggtcgagctggccactatctgtgcattatgtaacgacagctcccttgacttcaacgaggccaagggagtgtacgagaaagtcggagaggcaacagagaccgccctgactacgctagttgagaagatgaacgtgttcaacaccgacgtccggtctctgtccaaagtagagcgggcaaatgcatgcaattcagtgataagacagctgatgaagaaagagtttactttagagttctcgagggatcgaaaaagtatgtccgtctattgtagccccgcaaaatccagtcgtgctgcagtcggtaacaaaatgttcgttaagggagcacccgagggtgttatcgacagatgcaactacgtccgcgtaggaacaacacgtgtgcctctgactgggcctgtgaaggaaaaaatcatggccgtcatcaaggagtggggtacgggcagggacacccttaggtgtctggccctcgccactcgggatacccccccaaagagagaagaaatggtattggacgacagtgccagatttctggagtacgagaccgacttgacgtttgttggggtggtggggatgctggaccctcccaggaaggaggtgacaggttctatccaactgtgcagagacgccggaattcgggtaattatgatcacgggcgacaataaaggtactgctattgcaatatgtcgtagaattgggattttcggggaaaacgaggaagtcgccgatagggcatatacgggcagagaattcgacgatctccccttggccgaacagcgggaggcctgcaggagggcttgctgttttgctagagttgagccttcacataaaagtaagatcgtggagtacctgcagagctatgacgaaataaccgctatgacaggagatggtgtgaacgacgccccagctctcaaaaaggctgaaattggcattgccatggggtctggtacggctgtggctaagacagcctctgagatggtactcgcggacgacaacttctccacaattgtggctgcagtagaggaaggacgggctatatataacaacatgaagcagtttatcaggtacctgattagctctaacgtcggagaagttgtgtgtatctttctcactgccgcactgggactgcctgaagctttgattccggtccagttgctgtgggtgaacctcgtgaccgatggcctacctgcaacagctctggggtttaacccccctgatctggacatcatggacaggcctccccgtagccctaaggagcccctcatcagtgggtggttgttttttcgatatatggccattggtggatacgtgggagcagctaccgtgggagccgctgcctggtggtttttatatgccgaggatggcccacacgtgaattatagccaactgacgcattttatgcaatgtacagaagacaatacccattttgagggcattgactgtgaggtctttgaagcccctgaacctatgaccatggcgctctctgttctcgtcacgattgaaatgtgtaacgccctcaatagtctttcagagaaccagtcactgctgcgcatgccaccctgggtcaatatatggctgctgggatccatttgccttagcatgtcgctccattttctgattctctacgtcgatcctctcccaatgatttttaagctgagagccctggaccttactcagtggctcatggtcctgaaaatcagcctacctgtgattggcctggacgaaatactgaaattcgtggctaggaactacctggaaggttag

SEQ ID NO: 215156 - DNA, 2610 bp, synthetic construct
  misc_feature 1..2610: note = Description of Artificial Sequence: Synthetic coding sequence
  source 1..2610: mol_type = other DNA
atggggaaagtgtaccgagcggaccgcaagagcgtccagaggatcaaagccagggacattgtgcctggtgatatcgtcgaggtggccgtcggggataaggtgccggcagatatcagaatcttggcaatcaagtcaaccaccttgcgggttgatcagtctattttaactggtgagagcgtgtccgtgataaagcacacagaaccagtgcccgacccaagagctgtgaaccaagacaagaaaaacatgctgttcagcggcaccaatattgctgccggaaaggctctgggcatcgttgctactacaggtgtggggacggaaattggcaagatcagggatcagatggcagccacagagcaggataaaacacccctccagcagaagcttgatgaatttggcgaacagctcagtaaagtgatcagcctgatctgtgtggctgtctggctcattaacattggccacttcaacgatccagttcacggcggtagctggttcaggggcgcaatatactatttcaaaatcgctgttgccctcgccgtcgccgcaattcccgaaggtctacctgcggtcatcactacatgtttagcactaggcacacgcaggatggccaaaaaaaatgccatcgtacgctccctgccttccgtggaaactctgggatgcaccagcgtcatatgctccgacaagaccggcactctgacaaccaatcaaatgagcgtttgcaaaatgtttatcattgacaaagtggatggtgacatctgcttactcaacgaattttctattacaggatcaacatacgccccagagggggaggttctcaaaaacgacaagccagtccgaccaggccaatatgatgggctggtggagctggccaccatttgcgcattgtgcaacgattcatctctggatttcaatgaagctaagggggtgtacgagaaagtgggtgaggcaactgagacggcacttacaacgctagtggaaaagatgaatgtgttcaacaccgacgtccgcagcctgtctaaagttgagcgggctaacgcttgtaacagtgtaatccgccagttaatgaagaaggagttcactttggaattttcccgcgaccggaaaagtatgtctgtctattgttcaccagctaagagcagcagggcagccgtgggcaataagatgtttgtcaagggcgcaccagaaggggtaatcgataggtgcaattacgtgcgcgtcggaactacgcgggtccccctgactgggccagtgaaagaaaaaattatggccgtaattaaagagtggggcaccggacgcgacaccctccggtgcctggccctcgctacccgcgacacccctcccaaaagagaggaaatggtactcgacgactctgcgagatttttagaatacgaaaccgatttgactttcgtcggcgtggtcgggatgctcgacccacccagaaaggaagttacgggatcaatccagttgtgtcgagacgccggaattcgtgtgattatgataaccggcgataacaagggcacagcaatcgccatctgtagaagaataggaattttcggcgaaaacgaggaagtcgccgatagggcgtatactggaagagagtttgatgatttgcctctggctgagcaaagagaggcatgcagaagggcctgttgcttcgccagggtcgagccttcccacaagagcaaaattgtcgagtacctccaatcatacgacgaaattactgccatgactggcgacggtgtaaacgatgcaccagctcttaagaaagcagaaatcgggatcgccatggggtccggtacggccgtggcaaaaactgctagcgaaatggtgcttgctgacgacaatttttcaaccatcgttgcggctgtggaagagggcagagccatatacaacaacatgaaacagttcattcgttacctgataagctcaaacgttggggaggtggtgtgtatcttcctgacggctgcattaggcctgcctgaggcactaatcccagtgcaactgctgtgggtcaatttggtcacagatgggcttcctgctactgccctgggcttcaatcctccagaccttgacatcatggatcgtccccctagatctcctaaagaacccctgatctctggctggctgttcttccgctacatggccatcggtggctatgtcggtgcagcaacagtgggcgcagccgcttggtggttcctgtatgctgaagatgggcctcatgtaaactattcccagctgacccatttcatgcagtgtacggaggataatactcatttcgaggggatcgactgcgaagtctttgaggctcccgagcctatgactatggccctgtctgtcctcgttaccatcgaaatgtgcaacgctctgaacagcctttcagaaaatcagtccctgttgaggatgcccccttgggttaacatctggctcctgggcagcatatgtctatctatgtcactgcacttccttatactgtacgttgaccctctgccaatgattttcaagctaagggccctggatctgacccagtggcttatggtgctgaagataagcttgcctgtgatcggccttgatgagattttaaagttcgtggccagaaattaccttgagggatag

SEQ ID NO: 215157 - DNA, 2994 bp, synthetic construct
  misc_feature 1..2994: note = Description of Artificial Sequence: Synthetic coding sequence
  source 1..2994: mol_type = other DNA
atggaaaacgctcacactaagaccgtggaagaagtcttgggtcattttggggttaacgaatccactgggttatctttagaacaggttaagaagttgaaggagcgatggggcagcaacgaattgccagctgaggaggggaagactctgctggaactcgtgatcgaacaatttgaggaccttcttgtacggattttgttactggcagcctgcatatcttttgtactggcttggtttgaggagggcgaagagactattactgcttttgtcgagccatttgttattctattgattctcgtggccaacgcaatcgtcggagtgtggcaagaacgcaacgccgagaatgctattgaggcactcaaggagtatgagccagagatgggcaaagtgtatcggcaagatcgaaaatcagtgcagagaatcaaagccaaggacattgtgcctggcgacattgttgagatagcagtgggggataaggtgccagctgacatccggctgaccagcattaagtcaactactcttagagtggatcagtctatcctgaccggcgagagcgtgtctgtcattaaacatacggacccagtccctgatcctcgcgctgtcaaccaagacaagaaaaacatgcttttttctggcactaatatcgccgcaggaaaagcgatgggtgtggtcgttgcgactggggttaatactgaaataggtaaaatccgcgacgaaatggtcgccaccgaacaggagagaacccccctccaacagaaacttgatgaattcggagagcagttaagtaaagttatatctctaatttgtatagcagtgtggattatcaacattggccacttcaatgaccccgtgcacggtggctcctggatccgcggagccatatattactttaaaatcgctgttgccctggccgtagctgccattccagagggactccccgcagtgatcacaacttgtcttgctctgggcaccagacgcatggccaagaaaaatgcgattgtgcgatctcttccttccgtggagacacttggatgtacaagcgtgatctgctctgataagactggtacactcaccaccaatcaaatgagcgtttgcaggatgttcattctggatagggtggaaggcgacacctgctctttaaatgaatttactatcacgggcagcacttacgcccctatcggtgaggtgcacaaggatgacaagccagtgaattgccaccagtacgatggtttggttgaattggcaactatctgcgcattgtgtaacgacagcgcactcgattacaacgaggctaagggcgtgtacgaaaaagtcggggaagctaccgagacagcactaacctgtttggtcgagaaaatgaacgtgttcgacaccgaattgaagggactgtctaagatagaacgcgctaacgcatgtaattctgtgatcaaacagcttatgaagaaggagtttacacttgagtttagccgcgatcgcaagagcatgtctgtgtactgcaccccaaacaaaccgtccaggaccagcatgtcaaaaatgttcgtcaaaggggcacctgaaggcgtgattgaccggtgtactcatattcgggtcggtagcaccaaggtgcctatgacatccggggttaaacagaagatcatgagtgtaattcgggagtggggttcagggtccgacacactgcggtgcctggccctggcgactcacgacaaccctctgcggcgagaggagatgcatctcgaagattcagctaactttatcaagtacgaaacaaacttgaccttcgtcggttgcgtgggcatgctggaccctccgcgaatcgaagtggcttcatccgtcaagctgtgtagacaagctggaatccgcgtgataatgatcaccggtgataataaaggtacagcagttgccatttgtaggcggatcgggatcttcggtcaggacgaggatgttacttccaaagcttttacaggccgtgagttcgatgagctgaatccttccgcacagagagatgcgtgcctcaacgccagatgtttcgcaagagttgaaccatctcataaatccaagattgtggaattccttcaatcttttgacgaaattactgcgatgactggtgacggagttaacgacgcaccagctctgaagaaggctgagataggcatcgcaatggggagtggtactgctgtcgcgaagacagcatctgaaatggtccttgccgacgacaacttttccaccatcgtcgccgcagttgaagagggacgcgcaatttacaacaacatgaagcagtttattaggtacctgatatccagcaatgtgggcgaggtcgtctgtatctttctcactgccgctctgggctttcctgaagctctgatccctgtccaactcctctgggttaacctggtaaccgacggcttacctgcgacagcactggggttcaacccacccgatttggacatcatgaacaaaccacctcggaacccaaaagaaccactgatttctggctggctctttttccgctaccttgccatcggttgttacgttggcgctgctacagtgggcgcagcagcttggtggttcatcgcggctgatggcggaccgcgtgttagcttctaccagttgtcgcattttctgcaatgcaaagaggataatcccgattttgagggggtagattgcgcaatcttcgaatccccttatccaatgacaatggccctgtctgtgttggtcacaatcgagatgtgtaacgccctgaattccctatccgagaatcagtcgcttctcagaatgcccccttgggagaatatttggttggtcgggtctatttgtctctccatgtctctccactttcttatcctctacgttgaacctctcccgctgatcttccagatcaccccgcttaatgtgactcagtggctgatggttttgaaaatcagtctacccgtcatattaatggatgagacactgaaattcgtggcacgaaactatctggaaccagcaatcctcgagtag

SEQ ID NO: 215158 - DNA, 3048 bp, synthetic construct
  misc_feature 1..3048: note = Description of Artificial Sequence: Synthetic coding sequence
  source 1..3048: mol_type = other DNA
atggagaacgcccacacgaagactgtcgaggaagtgttgggacactttggggtcaacgaatccactggcctcagccttgagcaggtgaagaaactcaaggagaggtggggatcgaacgaacttcccgctgaggagggaaaaaccctgctcgagttggtgattgaacagttcgaggatcttctcgtacgcatccttctgctggcggcttgtatatcctttgtcctggcttggttcgaagagggcgaggaaacaatcactgccttcgtcgagcctttcgtgatcctcctcattttggttgccaacgcaatcgtgggggtgtggcaggaacggaatgctgaaaatgccattgaggccctgaaggaatacgagccagaaatggggaaggtgtaccggcaggatcggaaatcagttcagcggatcaaggccaaagacatcgttcccggtgatatagtcgaaattgctggagaatctgtgtcagtgattaagcacaccgacccagtaccggaccccagggcggtcaaccaggataagaagaacatgctcttttccggtaccaatatagccgcagggaaagcgatgggcgttgtggtggccaccggtgtcaacactgagatagggaaaattagagacgagatggtagccactgaacaggaacggacaccactgcagcagaagctggacgaatttggagaacagcttagcaaggtaatctccttaatctgcattgccgtctggatcatcaatattggacatttcaacgacccagtgcacgggggttcatggattaggggtgctatttactacttcaaaattgcagtggccctggcagtggccgcaattcccgagggtttgcccgctgttatcaccacatgtctcgccctgggcacccgtcggatggccaagaagaacgccattgtacgtagcctcccatccgtggagactcttggatgtaccagtgtgatttgctctgataagactggtaccctcacaaccaaccagatgagtgtatgtcgcatgttcatcctggaccgcgtggaaggggatacttgcagtctaaacgagttcaccataactggcagcacttatgcaccgattggggaggtccataaagacgacaaaccagttaactgccaccagtacgatgggctggtagaactggccaccatctgcgcgttatgtaatgattctgctctggactataacgaggcaaagggagtctatgaaaaagttggcgaggccaccgaaactgcactaacctgtctcgttgagaagatgaatgtcttcgacacagagttaaaaggattgtcaaagatcgagcgcgctaatgcctgtaattccgtgattaagcagctgatgaagaaggaattcacccttgagttctcacgtgacaggaaatcgatgagcgtgtactgcacacccaacaaaccctcgcgcacttccatgtctaagatgttcgttaaaggcgcacctgaaggcgtaatcgatagatgtacccacatccgcgtgggcagcacaaaagttccaatgaccagtggtgtgaaacagaagatcatgagtgtgattcgcgagtggggttcagggagcgataccctcaggtgtctagccttagccactcatgataatcctctgcgcagggaggagatgcatctcgaagattccgccaattttattaaatacgagacgaacttaacgttcgttggctgcgtaggcatgctggaccccccaaggattgaagtggcatcatctgtcaaattgtgtcgccaggcaggcatcagggtcataatgattactggtgacaataagggcaccgccgtcgcaatatgccgacgcatcggaatcttcggccaggacgaagacgtgaccagcaaggccttcaccggcagggagttcgatgagctcaatcctagtgctcagcgtgacgcttgcttgaatgcacgttgcttcgcccgagtggagcccagtcacaaatcaaaaatcgttgagtttctgcagagcttcgacgagatcaccgccatgacaggggacggtgtcaatgacgccccagcccttaaaaaggccgaaataggcatcgctatgggctctggcaccgccgttgcgaaaacagcgagtgaaatggtactcgcggatgataatttttctaccatagttgcagccgtggaggaaggtcgtgccatttataataatatgaagcagtttatccggtatcttatcagctcaaacgtcggcgaagtcgtgtgcatctttcttaccgccgctcttggctttcccgaagctctgatccctgtgcaattgctgtgggttaacctggtcactgacggactcccggctaccgcccttggattcaaccccccagacctggatataatgaacaagccccctaggaacccaaaagaacccctgatcagtggttggctgttcttcaggtatcttgccattgggtgttatgtgggagccgcaacagtcggggcagcggcttggtggtttattgcagccgatggaggtcctcgggtctctttctaccagctcagccacttcttacagtgtaaggaagacaatcccgacttcgagggtgtagattgcgcaatattcgagtccccatatcccatgaccatggcactcagcgttctcgtgaccattgaaatgtgcaacgccttgaacagcctgtccgagaaccagtcattgctgcggatgcccccatgggagaatatttggctggttggtagtatttgcctatcaatgtcccttcacttcctgatactctatgtggagccactgcctcttattttccagatcaccccactaaacgtgactcaatggctgatggtcttgaaaatttctttgccggttattctcatggacgaaactctgaaatttgttgcacggaattacctcgagccaggaaaggagtgcgtccagcctgcgacgaagagctgctccttcagcgcttgtactgacgggatttcttggccatttgtactcctgatcatgcccctggtgatttgggtgtactctactgacactaatttttccgatatgttctggagctag

SEQ ID NO: 215159 - DNA, 3129 bp, synthetic construct
  misc_feature 1..3129: note = Description of Artificial Sequence: Synthetic coding sequence
  source 1..3129: mol_type = other DNA
atggagaatgcccacacaaagacagtggaagaagttctgggacacttcggcgtaaatgaaagcacaggtctctccctggaacaggtgaagaagcttaaggaacgctggggatccaacgaactgcccgctgaagagggtaagaccctcctcgagctcgtgattgagcagttcgaggatctgttggtccgcatcttgttgctggccgcttgcattagtttcgtcctggcatggttcgaggagggcgaggagacgatcactgcattcgtggagcccttcgtgattctcctcatcttggtggccaacgcgatcgtcggtgtgtggcaggaacgtaatgccgaaaatgccatcgaggccctgaaagaatatgagccagagatgggcaaggtctataggcaggaccggaagtccgttcagcgtattaaagccaaagacatagtgccaggcgacatcgtcgagatcgccgtgggcgacaaggtgcccgctgacattcgtctgacaagcatcaagtccacgacgctgagagttgaccagtcaatcctgaccggagaatcagtgtccgtgatcaaacacaccgatcccgttcccgatcctagggctgttaatcaggataagaagaacatgctgttctccggtacaaatattgcagccggaaaagctatgggcgtggtcgtggccaccggggtgaacaccgagatcggtaagatccgcgacgagatggttgctactgaacaggaaaggactcctctgcagcaaaagctggatgagtttggcgagcaactgtccaaggtgatctctcttatctgtattgcagtctggataatcaacatcggtcatttcaatgaccccgtacacgggggttcatggatcagaggagccatctattactttaagatcgccgtcgctctcgctgtcgcagccattcccgagggactccctgcagtcattaccacctgtctcgctttgggcacccgcagaatggctaaaaagaatgctatagtccgttctcttccgtctgtggagaccttagggtgtacctctgtaatctgtagtgacaaaaccggcactttgactactaatcaaatgtcggtatgtcgcatgtttattctggaccgtgtcgagggagacacatgcagtcttaacgagtttactataaccgggtctacttacgcacccatcggtgaggttcataaagacgataaacctgtcaactgtcaccagtatgacggcttggtcgagctggctaccatttgtgcattatgtaatgacagcgctctcgactataacgaggcaaagggggtgtacgagaaagtcggcgaagccaccgaaactgccttaacctgtctcgtcgaaaaaatgaatgtgtttgacaccgaactaaagggtctgtctaagatagagcgggctaacgcatgtaattctgtgattaaacagctgatgaagaaggagttcaccttggagttcagcagagaccgcaaaagcatgtcagtgtattgtacacctaataagccatcacggacctcgatgtcaaaaatgttcgtcaagggcgctcccgaaggtgtcatcgacaggtgcactcatatacgcgtcgggtcaacgaaagtcccgatgactagtggcgtcaaacagaagatcatgtcagtcataagagagtgggggagcggctccgatacgttacgctgcctggccctggctacgcacgataaccctcttaggagagaggagatgcacctggaagatagcgccaactttatcaaatacgaaactaacctcacttttgtgggctgtgttggtatgcttgaccctccacgcattgaagtagcttcatccgtaaaactgtgtaggcaggccggaatacgagtgatcatgatcaccggagataataagggaacagccgtggctatatgccggagaatcggcatcttcggtcaggatgaggatgtgacgagtaaagcctttaccggcagagaattcgacgaactcaatccgagtgctcagagggacgcatgccttaatgctagatgttttgcgcgtgtcgaaccaagccacaagtctaagattgtggaattcttgcagtccttcgatgagatcactgccatgactggcgacggcgtgaacgatgcacccgcactgaagaaagccgaaataggaattgccatggggtccggcaccgccgtggctaaaacagcgtccgagatggtattggcagacgacaacttctcaactatcgtcgccgctgtggaggagggtcgggctatctacaataacatgaaacaatttattaggtacctgatttccagcaacgttggagaagttgtgtgtatcttcctgactgccgcactgggatttcctgaagctctcattcctgtacaactgctctgggtaaacctggtgacagatgggctgcctgctaccgccctgggctttaaccccccagatctcgacatcatgaacaagcccccacgtaatccgaaagaacccctcatctcagggtggctcttctttcggtacctggccatcggatgctacgtgggagccgcaacagtgggtgcagccgcttggtggttcattgcagctgacggaggtccacgcgtttccttttaccaactttctcatttcctacagtgtaaggaggataacccggactttgaaggcgtggactgtgccatttttgagtcaccataccccatgacgatggctctgtccgtactcgtgactatcgagatgtgcaatgcactaaacagtctgtccgagaatcaaagcttactgaggatgcccccttgggagaacatttggctggtggggagtatatgcctgagtatgagcttgcactttctgatcctgtatgtggagccactcccgcttatttttcagattactcccctcaatgtaacacagtggcttatggtactaaagattagtctccccgtgattctcatggacgaaacattgaaattcgtggctcgtaactacctggagccagggaaagagtgtgtgcagccagctactaagagctgtagcttttctgcgtgcacggacggcatctcttggcccttcgtgctgcttattatgcctttagtcatctgggtctactccacagataccaatttctccgatatgttctggagctag

SEQ ID NO: 215160 - DNA, 2802 bp, synthetic construct
  misc_feature 1..2802: note = Description of Artificial Sequence: Synthetic coding sequence
  source 1..2802: mol_type = other DNA
tagactatcactgctttcgttgagcccttcgtaatattgcttatacttgtggcaaatgcaatcgtcggggtgtggcaggagcggaatgccgagaatgccattgaggcgctgaaggagtacgaacccgaaatgggcaaggtttatcgccaggacaggaaatccgtgcagaggattaaggcaaaagatatagtccctggggacattgtcgagatagccggagaatccgtgtcagttataaagcacacagaccccgtaccggacccacgtgccgtgaaccaggacaaaaaaaacatgttgttttcagggacaaacatcgccgcaggtaaagccatgggggtcgtggtcgccacaggcgtgaatacagagatagggaagatccgggatgaaatggttgcgacggagcaggaaagaacgccactgcagcagaagctggacgaattcggcgagcagctcagcaaagtgatctccctcatttgtattgccgtatggatcataaacatcggccacttcaacgatcccgtgcatggcggttcctggatcagaggtgcgatttactactttaagatagccgtggccctagccgtagcggctattcccgaggggcttcctgcagtgataaccacatgcctcgcattaggaactagaaggatggcaaagaagaatgctattgtgaggtccctgcccagcgtggagacactaggctgcacgtccgtcatatgttctgataaaactgggacacttaccacaaaccagatgagcgtttgtaggatgttcattctggacagggtggaaggggacacctgttcattgaacgagttcacgatcaccggaagtacctatgcgccaatcggtgaggtacacaaagacgataagccagtcaactgccatcaatacgatggactggtggagctcgccacaatttgcgcactgtgtaatgactctgctctggattacaacgaggcaaaaggtgtatacgagaaagtgggtgaagccacagagacagctctcacatgcctggtagaaaagatgaatgtgttcgatacagagctgaaggggcttagtaagatcgaacgcgctaatgcttgtaatagtgtcatcaaacagcttatgaagaaggagtttacgctggagtttagccgcgaccgcaaatccatgtccgtgtattgtacacccaacaagccctcaaggacctctatgtccaaaatgttcgtgaaaggtgcaccagagggagtcattgatcgatgtacccatattcgtgttggctccactaaggtgcccatgactagtggcgtgaagcagaagattatgtcggtgattcgcgaatgggggtcgggttccgatacccttaggtgtctcgcgctggcaacccacgataaccctctaaggagggaggaaatgcacctggaggattcggctaatttcatcaagtatgagacaaatcttaccttcgtgggttgcgtgggcatgctcgacccgcctaggatcgaagtagcctcctcggtgaagctgtgtcgtcaggctgggatccgcgtcatcatgattacgggggataacaagggtaccgctgtggcaatttgccggcgaatcggtatcttcggacaggacgaagacgtgacatcaaaggcattcacagggcgagaatttgacgaattaaatcctagtgcacaacgggatgcctgtcttaacgctcgatgtttcgccagagtcgaaccttcacataaaagcaagatagtggagttcctccagagctttgatgaaatcactgcgatgacaggggacggagtgaacgatgcacctgctctcaagaaagcagagatcgggattgccatggggagtggtaccgccgtggccaaaaccgccagcgaaatggttctagccgatgataacttttctaccatcgtggcagcggtggaagaagggagggcaatatacaataatatgaagcaatttattagatacctgataagctccaacgtcggagaggtggtgtgtatctttctcacagccgcattggggtttcccgaggctctgattcctgtacagctcctctgggtgaatttggtgactgatggcctccccgctaccgccctcggcttcaatccaccagatctggacattatgaataagccaccgagaaatcctaaggaacctctaatttccgggtggctgttcttcagatatctggccattgggtgttatgtgggtgccgcaacagtgggcgcagctgcctggtggtttattgctgctgatggcggaccccgtgtctctttctaccagctgtcacacttcctgcagtgtaaggaggacaacccagatttcgaaggtgtcgactgtgccatcttcgagtcgccgtatccaatgactatggccctctctgtactcgttactattgaaatgtgcaacgcactcaacagcctttctgagaatcagagtctgctaagaatgccaccttgggagaacatctggctggtgggcagtatctgcctcagcatgtcattgcacttcctgatcctgtacgtggaacctctgcctcttatttttcagatcacccctctgaacgtcactcagtggttgatggtcctgaaaatttcactgcctgtcatcttaatggacgaaactcttaaatttgtcgcaagaaattacttggaacccggtaaggagtgtgtccagccagctacgaaatcatgctctttcagcgcatgtacagacggcataagctggcccttcgtactgttaatcatgcctctggtgatctgggtttacagcacagacaccaacttttccgacatgttctggtcttag

SEQ ID NO: 215161 - DNA, 3663 bp, synthetic construct
  misc_feature 1..3663: note = Description of Artificial Sequence: Synthetic coding sequence
  source 1..3663: mol_type = other DNA
atgggtgacatggccaataacagcgtggcttactcaggggtgaaaaatagcctgaaggaggcaaaccacgatggcgatttcggaataaccctggccgaacttagagccctcatggaacttaggagcacagatgccctgaggaaaattcaggagtcgtacggcgatgtctacggcatctgtaccaagctaaagacctccccgaacgaaggtctttctgggaatccagcagatcttgaaaggcgagaagccgtcttcggcaaaaatttcatccctcccaagaagcccaagacatttctacagttggtgtgggaagcactacaagatgtgaccctgatcatcctcgaaattgccgcaatagtgtcactgggcctgtcattttaccaacctccagaaggagataatgctctttgtggagaagtttctgttggggaagaggagggagagggggaaacgggctggatcgagggagccgcaattttgttgagtgtagtctgcgtggttctggttacagctttcaatgattggagtaaggagaaacagtttcggggactgcagtctagaattgagcaagaacaaaagttcacggtcattcgcggaggacaagtgatccagattccggtggctgatatcaccgtcggcgatattgcacaagtgaagtacggcgatctgttgccagctgacggaatcctgatccagggaaatgatcttaagatagatgagtcttccctcactggcgagtccgaccatgtcaaaaagtccctcgataaggaccctctgctcctatctgggactcatgtgatggagggcagcggtaggatggtggtcactgcagtcggtgttaattcgcagacaggtatcatttttaccctgctgggagccggaggtgaggaggaggaaaagaaggacgagaagaaaaaggagaagaagaacaagaaacaggatggagcaatcgagaaccggaataaagcgaaggctcaggacggcgcagcaatggagatgcagcccttaaagagcgaggaaggtggcgacggcgatgagaaagataaaaagaaagctaacctccctaaaaaagagaagtcagtgctgcagggaaaacttactaagctagcagttcagattggaaaggccggattgctcatgtccgccatcaccgttattattctggtgctctacttcgttatagatacgttctgggttcaaaagaggccatggctggctgaatgcacaccaatctatatccagtacttcgtaaaatttttcattattggtgtcaccgtcctggtggtggccgttcccgaaggccttcccctggctgtcaccataagcttagcatacagcgtcaagaagatgatgaaggataacaatctggtccgtcacttagacgcatgcgaaactatggggaatgccactgctatttgcagtgataaaactggaacactgacgatgaatcggatgacggtggtccaggcctacataaatgaaaaacattacaaaaaggtgccagaacccgaggcaatcccaccaaatatcttatcctacctggtgaccgggataagtgtgaactgcgcttacactagcaagatactgccccctgagaaggaggggggactgcccaggcacgtggggaataagaccgagtgcgccttgttaggcctcttactcgatttgaagcgcgattatcaggacgtcagaaatgagatcccagaagaggctctttacaaagtgtatacattcaattctgtgaggaagagcatgagtaccgtgttaaagaacagtgacggaagctaccgcatcttcagtaaaggcgcttctgaaattattctcaagaaatgcttcaagatcctatcagcaaatggggaagctaaggtgttcaggcctcgagatagggacgatatcgtcaaaactgtgatagagcccatggcctccgagggtctccggacgatctgccttgcgttcagagacttccctgccggagagccagaaccggagtgggacaacgagaatgacatcgtgacaggcctaacttgcatcgccgttgttgggattgaagaccccgtccgcccagaggtgccagacgctatcaagaagtgccagcgggctggtataactgtcaggatggttacgggagataacatcaatacagcaagagcaatcgctaccaagtgtggcatacttcaccctggggaagactttctgtgtcttgaaggcaaggattttaatcggaggatcaggaacgaaaagggagagatcgagcaggagagaatcgataagatctggcctaaactacgtgtgctcgctcgctccagccctacagataaacataccctcgtgaagggcatcattgattcgactgttagcgaccagagacaggttgtggcagttacaggcgatggaacgaacgacggacccgcactaaagaaggccgatgtgggctttgccatggggattgctggcacggatgtggccaaagaggcctctgatatcattcttactgacgacaacttcactagcatcgtaaaagcggtgatgtgggggcgaaacgtatacgattctataagtaagttcctgcagtttcagttgactgtcaatgtcgtggcagtgatcgtggcgtttacaggagcttgcatcacccaagactcccccttgaaagccgtacaaatgctgtgggtcaacctgattatggacaccctggcctcactcgcattggccaccgagccgccaaccgaaagtctgcttttgcgcaaaccgtacgggcgaaacaaaccgctgatcagccgaaccatgatgaagaatatccttgggcacgccttttatcagctggtggtcgtttttactctgctgttcgccggagagaaattcttcgatattgacagcggaagaaatgcgccactccatgcgcctccctctgaacactacacaatcgtgtttaacactttcgtgctgatgcagctgttcaatgagattaatgcacgaaaaatccatggtgagcgcaacgtgttcgaagggatctttaataatgctatattttgtacaatcgtgttgggaacgtttgtcgtacagatcattatcgtgcagttcggtgggaaaccttttagttgtagcgagctcagcatagagcagtggctgtggtctattttccttggcatgggaacactactttggggacaattaatatccactatccctactagcaggcttaagtttcttaaagaagccggtcacggcacacaaaaagaggaaatccctgaagaggaactggccgaagatgtcgaagagatcgatcatgcagagcgggaattgcgccgtggccagatactgtggttccgcggactgaatagaatccagactcagattcgagttgtgaatgcatttagatcaagtttatacgagggcctggagaaacccgaatcccggtcttccatccataattttatgacacatcccgaattcagaattgaggattctgaacctcacatccctttgatagatgacaccgatgctgaagatgatgcccctaccaagaggaattcctccccccctccaagccccaacaagaacaataatgccgtggatagcggaattcatctgactattgaaatgaacaagagcgctacatcctccagccctgggtctcctcttcattcattggagactagcttgtag

SEQ ID NO: 215162 - DNA, 3555 bp, synthetic construct
  misc_feature 1..3555: note = Description of Artificial Sequence: Synthetic coding sequence
  source 1..3555: mol_type = other DNA
atgggagacatggccaacaacagcgtggcatacagcggtgtgaaaaactcgctgaaagaagctaatcacgacggcgattttgggatcacattagccgaactgagggccctgatggagctccgctccacagacgctcttaggaaaatacaggagagttatggagatgtgtacgggatatgtaccaagctcaaaacctctcccaatgaggggctgagtggaaacccagccgatctggagcgacgcgaggccgtattcgggaaaaactttatccctcccaagaagccaaagaccttcctgcagttagtctgggaggctctgcaggacgtaacactcatcatcctcgagatcgccgcaattgtcagcttaggtctgagtttctaccaaccccctgagggggacaatgcactgtgcggagaggttagtgtgggagaggaagagggagagggtgagacgggatggattgaaggggctgccatactattgtccgtggtctgcgtagtgttggttacagcatttaatgattggagtaaagagaagcagttcagagggctgcagtcgcggattgaacaggagcagaaattcacagtgatccggggtggacaggtgattcagatcccagtggcagatatcacggtgggggacatcgcccaagtaaaatatggtgatctgctcccagccgatggtatcctgatacagggcaatgatttgaagattgatgagagttctcttactggagaaagcgaccacgtgaaaaaaagcctagacaaggatcctttgctcctgtcaggcactcacgtgatggaaggcagcggccgtatggtggtgactgccgtcggcgtgaactctcaaacaggaattatcttcactctacttggtgcgggaggcgaggaagaagaaaaaaaagatgagaagaagaaagaaaagaagaacaagaagcaggatggggcaatcgagaaccgtaacaaagcaaaagcacaggacggcgctgcaatggagatgcagcctctgaagtccgaagaaggcggagatggcgatgagaaagacaaaaagaaagccaatctgccaaaaaaggagaaatcagttctgcagggaaaactaactaagctcgcggtccagattggaaaggctggcctgctgatgtctgccataaccgtgataatacttgtcctctattttgtgatcgacacattctgggtacagaagcggccatggcttgcagagtgcacccctatttatattcaatatttcgtgaagttttttattattggggtgacagtgctggtagtagcagtgcctgagggcctgcctctggccgtgacaatcagcctcgcatatagcgttaaaaagatgatgaaagataacaacctggtgaggcacttagatgcttgcgagactatggggaacgctaccgctatctgctctgacaagacagggactctgacaatgaacagaatgaccgttgtccaggcgtacattaatgaaaagcactataagaaagtccctgagcccgaggctatacccccaaatattctgagttacctcgtcaccggaatatcagtgaattgtgcctatacatccaaaatcctgcctcctgagaaggaagggggactccccagacatgtcggcaacaagacggaatgcgctcttttagggctcctcttagaccttaaacgcgactatcaagacgtgagaaatgaaatcccagaggaagctctgtacaaggtgtatacattcaactccgtgcgaaaaagtatgagcaccgtgctcaagaattccgatggctcgtacaggattttcagcaagggagctagcgagattattctgaaaaagtgttttaagattctgtctgcgaatggtgaagctaaggtgttcaggccacgcgatagagatgatatcgtgaaaaccgtgatcgagcctatggctagtgagggactgaggactatttgtttggcgttcagggacttccctgccggagaacctgaacctgagtgggataacgagaacgacatcgtaaccgggctcacttgtatagcagtagtcggcattgaggaccctgtgcggcctgaggtgccagacgccatcaagaagtgtcaacgcgcaggcataacggtgagaatggtgaccggcgataatattaataccgccagagctatcgcgacaaagtgtgggatactgcaccccggagaagattttttatgtttggagggcaaggattttaacagacgcattcgcaatgagaaaggggagatcgaacaggagcgcatcgataagatctggcctaagttgagggtgctcgcaagatcatcccccaccgataagcacacactcgtcaaagggatcatcgattccaccgtttctgatcagcgccaggtggtggcggtaacaggggacggtacgaatgatggaccagccctgaagaaggctgacgtcggatttgccatgggaatcgcagggactgatgtggccaaggaagcatccgatatcatcctcacagacgacaactttacatctatcgtgaaggccgtaatgtgggggagaaacgtgtatgattccattagtaagttcctgcagtttcagttgaccgtgaacgtagtagctgtcattgtcgcattcactggcgcatgtataacgcaggatagtccattgaaggccgtgcaaatgttgtgggtgaatctgatcatggacaccttggcctctctggccctcgcaaccgaacccccaacagaaagtctactgctgcgcaagccatatggacggaataaacccctgatcagccgaacaatgatgaaaaacatcctcgggcatgccttttatcaactggtggtcgtgtttacgctccttttcgcaggggagaaattcttcgacatcgactccggacgcaacgcaccactgcacgcaccaccctctgaacactacaccatcgtgtttaatacattcgtgctcatgcaactgttcaatgaaattaacgccagaaagatccacggagagcgcaacgtctttgaagggatctttaataacgctatcttctgcactatagtactgggaacttttgtagtgcagttaatttctacgatccccactagcagactgaaattcctgaaagaagctggacacggcacacagaaagaggaaatccctgaggaggaacttgccgaggatgtagaggaaatcgaccatgcggagcgcgagctgcgacgcggacagattctctggttccgtggtctgaatagaattcagacccaaattagggtggtgaacgcatttcgctcctctttgtacgagggcctggagaagcctgaatctcgcagcagcatacataattttatgacacatccggagttccggattgaggactctgaaccccatataccactgatagatgacaccgacgcagaagacgacgcccctaccaagagaaattctagccccccaccctcccccaacaagaacaacaatgccgttgactctggcatccatttaacaattgagatgaacaaaagtgctacttcttcttcacctggctcgccactacattctcttgaaacaagtctgtag

SEQ ID NO: 215163 - DNA, 3531 bp, synthetic construct
  misc_feature 1..3531: note = Description of Artificial Sequence: Synthetic coding sequence
  source 1..3531: mol_type = other DNA
atgggtgatatggccaataactcagtcgcatactcaggagtaaaaaactccttgaaagaagctaatcacgacggagactttggcattaccctcgcagagctgcgcgctctgatggaactgcgcagcaccgatgctctgagaaaaatccaggaatcctatggagatgtgtacgggatttgcacaaagctgaagacctcacccaacgaaggcctctccgggaatcccgcagatctggagaggcgcgaagccgttttcgggaagaattttattcctcctaagaagcccaaaacttttttacagctggtgtgggaagctctgcaggatgtaactttgattatccttgaaatcgccgcaatcgtctccttgggcctgtctttctatcaaccacccgaaggggataacgcgctctgcggggaagtaagcgtgggtgaagaggagggggagggcgagacgggctggatagagggagcagctatcttactgtccgtggtttgcgttgtgctcgtgaccgccttcaacgactggtcgaaagagaaacagtttagagggttacagagtcgcattgaacaggaacaaaaattcacagtgatacggggaggccaggtgatacagatcccagttgccgacattaccgtaggtgacattgcgcaagtcaaatatggagatctgctgcctgccgacggaattctcatccaagggaatgatcttaaaatcgatgagagttcactgactggcgaatctgaccacgtcaagaagagcttagacaaggatccgctcctgttgtcagggacccatgtaatggaaggatccggcagaatggtcgtgactgccgtgggagttaacagtcagaccgggattatcttcacactgctgggggcaggaggggaagaagaagaaaagaaagatgagaaaaagaaggagaagaaaaacaagaaacaagacggggcaattgaaaatagaaacaaagctaaagcccaagatggggcagctatggagatgcagcccctgaaatctgaagaagggggagacggcgatgagaaggacaagaagaaggccaacctgccgaaaaaagaaaagagcgtcctgcagggcaagctgactaaactagccgtgcagatcgggaaagccggattgctgatgtccgcgatcaccgtcatcatccttgtcttgtacttcgtaatcgataccttctgggtccagaaaagaccatggctggctgaatgcactcctatctatattcaatacttcgtgaagttttttatcattggtgtgactgttcttgtagtggccgtcccggaggggttgccactggccgtgactatatctctcgcctatagtgttaagaaaatgatgaaggataacaacctggtacgacacctggatgcatgtgaaaccatgggcaatgcaaccgcaatatgcagtgacaaaacaggcaccctgacaatgaacaggatgacggtcgtccaagcatacatcaacgagaaacactataagaaggtcccagagcctgaagccattccccctaatatccttagctacctggttacaggcataagtgtgaactgtgcctatacgtcgaaaatcctgcctcccgaaaaggagggtggactcccccgacatgtcggcaacaagacggaatgtgccctactcggccttctgctggatcttaagagggattaccaagacgtgaggaatgagatccccgaagaagccctgtataaagtgtatacgttcaattcagtaagaaaaagcatgtcaacagtgcttaaaaatagcgacggatcctacaggatcttttccaaaggtgcttccgagatcattttaaaaaaatgctttaaaattttgtccgcgaatggagaagccaaagttttccgacccagggacagagacgacattgtgaaaactgtgattgagccgatggcttccgagggcctccggacaatctgcctcgcttttcgggatttccctgccggagagcctgagccagaatgggacaatgagaacgacattgtgactgggctgacctgcatcgctgtggtggggatcgaggacccagtgcgccctgaggtgccagacgcaatcaaaaagtgccagcgggctggcattactgtcagaatggtgacaggtgataatatcaacaccgcccgtgccatcgccactaagtgcgggatcctccacccaggcgaggactttctgtgcttagaagggaaggatttcaacaggcgtattcgaaatgaaaagggtgagattgaacaggaacggattgacaaaatttggcctaagctgcgggtcctggctcgctcttctccaaccgacaagcacacccttgtgaaagggatcatcgactcaactgtgtccgaccagcgacaagtagtcgcggtcaccggtgacggcacaaatgatggcccagccctgaagaaggccgatgtgggttttgctatgggtatcgcagggaccgacgtggctaaggaagcaagtgacatcatccttaccgacgacaattttacgagcatcgtgaaagccgtgatgtgggggagaaacgtttacgattccatttctaagtttcttcaatttcagctgaccgttaacgtggtggcagtgatcgttgcattcacaggagcctgcattacccaggatagtccgctcaaggccgtgcagatgctgtgggttaacctgattatggacaccctcgcttctctggcgctggctaccgagcccccaaccgaatcactgctcttgcggaagccctatggtcgcaacaaaccattaatctcccgtaccatgatgaaaaatatattaggccacgccttttaccagctagtcgttgtgtttacccttctgttcgctggcgaaaagttctttgatattgacagtggaagaaacgctcccttgcacgcgcctcccagcgagcactatacaattgtttttaacacgttcgtcctcatgcagctgttcaatgagatcaacgccagaaaaattcacggagaaaggaacgtgtttgaaggtatattcaacaacgctatcttttgcaccattgtcctgggaacattcgtcgtgcaaataataatcgtgcagttcggcggtaagccgttctcttgtagtgagcttagtattgaacagtggctgtggtccatttttctcgggatgggaaccctcctgtgggggcagttaatctctaccattccgaccagtaggctgaaattccttaaggaggcagggcatggaacacaaaaagaggagatccctgaggaagagctggccgaagacgtggaggagattgaccacgccgagcgggaactacgtaggggtcagatcttgtggtttcgcggtctgaatagaattcagacccagatggatgtggtgaatgcttttcagagtggcagctccattcagggcgcactgagacggcaaccttctatcgcttcacagcatcacgacgtcacaaatatcagcactcccactcacgtggtgttctcgtcttccacagcttccaccacagtgggttatagtagcggtgagtgtatttcatag

SEQ ID NO: 215164 - DNA, 2892 bp, synthetic construct
  misc_feature 1..2892: note = Description of Artificial Sequence: Synthetic coding sequence
  source 1..2892: mol_type = other DNA
atgttcctggtcatcggaacccacgttatggaaggaagtgggagaatggtcgttactgctgtgggggtcaatagtcagacgggaattatctttacgctgctgggtgcgggaggagaagaggaagagaaaaaagacgagaagaaaaaagagaaaaagaataaaaaacaggacggtgctattgagaaccggaacaaggctaaggcacaggatggcgctgcaatggagatgcagcctctgaagtcagaggagggcggtgacggcgacgaaaaggataaaaagaaagccaacctcccaaagaaggagaaaagtgtcctgcaagggaagctgaccaagctggctgtccagatcggaaaggccggactgttgatgagcgctattaccgtaatcattcttgttctgtactttgtgattgataccttctgggtccagaaacgaccttggcttgcagagtgcacacccatatacattcaatactttgtcaagttctttataattggcgtaacggttctcgtcgtcgcggttccagaaggactgccgctagcagtcacgatttcactggcctattccgtcaagaagatgatgaaggacaataacttggtaagacacttggatgcctgcgaaactatggggaacgctaccgcaatctgctcagacaagaccggcaccctgactatgaatcggatgactgtggtgcaggcttacatcaacgagaaacattataaaaaggtacccgagccagaagcaatacccccaaatatcctcagttacctggtaacagggatttctgtgaattgcgcgtatacttccaagattctgccacctgaaaaagaagggggactccctcgccatgttggaaataaaaccgaatgcgctttgctgggcctcctactggatctgaaacgagattatcaagatgtgaggaatgagatcccagaggaggccctgtacaaagtgtacacgttcaattctgtgagaaagagcatgtccactgtgctgaaaaactccgacggaagttatcgtatcttttccaagggcgcttctgagattatacttaaaaagtgttttaagatcctttcggcaaatggtgaggccaaggtcttccgaccccgagatcgcgacgatatagtaaaaaccgtcattgagcccatggcatctgagggactccgcaccatctgtttagcctttagggacttccccgcaggggagccagagccagagtgggacaacgaaaacgatatcgtgacgggactcacttgcatagctgtggtgggcatagaggatcccgtcagaccagaggtgcccgatgccataaagaaatgccaaagggctggaattacggtgagaatggtcactggcgacaatattaacaccgccagagctatcgctactaagtgtgggatcctgcatcctggggaagacttcctttgcctggagggtaaagactttaataggagaattaggaacgagaaaggcgaaattgaacaagaacgaatcgacaaaatatggccaaagctaagagtcctcgcccgtagcagcccaaccgacaagcacaccctggtgaagggaatcatcgactctacggtgagcgaccagcggcaagttgtcgccgtcacgggcgacggtacgaatgacggccctgctctcaagaaggctgatgttgggtttgccatggggatagcgggaaccgacgtcgccaaagaggcgtccgacattatcctgacagacgacaatttcacatctattgtcaaggctgttatgtgggggagaaacgtgtacgattcaatttccaagttcctgcagtttcagctgaccgtgaatgtggtggccgtgattgtggcatttaccggagcctgtataacccaggactcaccattgaaagccgttcagatgctctgggtgaacctcatcatggacactcttgcatccctggccctggctaccgagccgccaaccgagagccttctcctgcgcaagccatacggtaggaataagcccctcatcagtagaaccatgatgaaaaatatcctggggcacgccttctatcaactggtggttgtgtttactctgctctttgcaggagagaaatttttcgatattgacagtggacgtaatgctcccctgcacgctcctccttcggaacactacacgatcgtgttcaacacgtttgtccttatgcagttgtttaatgaaatcaacgcgagaaaaatccacggggaacgaaacgttttcgaaggcatctttaacaacgctatattttgtactatcgttctggggactttcgttgtgcagattataatcgtccaattcggtgggaaacccttcagctgttcagagctgagtatagaacaatggttgtggtcaattttccttggaatggggaccctgttatggggccagctcatctccaccattccaacaagccgcctcaaatttctaaaggaagccggtcacgggacacagaaggaagagattcctgaggaagaattagcagaagacgtggaagagatcgaccatgccgagcgggagctacgccgtggtcaaatattatggttcaggggtctgaaccgtattcaaacccagatccgggtggtaaacgctttcaggtcaagtctctatgaaggattagaaaagccggagagccgcagctccattcacaactttatgacacatcctgagttcaggattgaggacagtgagcctcacatcccgttgatcgatgacacggacgctgaggacgacgcacccactaaacgcaattcctcacccccaccatcccctaacaagaacaataacgcagtggattctggaattcatttgacaatcgaaatgaataaatctgccaccagttcatcaccaggcagtcctctacacagtctcgaaacaagcctatag

SEQ ID NO: 215165 - DNA, 3663 bp, synthetic construct
  misc_feature 1..3663: note = Description of Artificial Sequence: Synthetic coding sequence
  source 1..3663: mol_type = other DNA
atgggagacatggctaacaattccgtagcgtacagcggtgtcaagaactcactgaaagaagctaatcatgacggtgactttggcataacgctggccgagctaagagccctgatggaactccgtagcaccgatgccctacgcaagatccaagaatcctatggtgatgtgtacggaatctgcaccaaactcaagacttctccgaatgagggtctgtccggcaatcccgcagatttagagagaagagaagctgtattcggaaagaacttcattccccctaagaagcctaagaccttcttacagttggtttgggaagcattgcaggatgtcaccttaattattcttgagattgcggctatcgtatctctgggactgtccttttatcagccacccgagggtgataacgctctttgcggggaggtcagcgtgggcgaagaggagggagaaggcgagactggctggatagagggagctgccatcctgctatctgtggtgtgtgtggtacttgtcacagcctttaatgattggagtaaagagaagcagtttagggggctgcaaagtaggatcgagcaggagcagaagttcaccgtcatcaggggaggccaagtgatccagatcccagtggcggatataaccgtaggcgatatcgctcaggtgaaatacggcgatctcctgcccgctgacgggattttgatccagggcaatgatctgaagattgacgagagcagcctgactggagagtcagatcacgtcaagaagagcctggacaaagatcccctcttgctttcagggacacacgtcatggaaggatcagggagaatggtggtgacggccgtgggtgtaaattcccagaccggcattattttcactttgctgggcgctggcggtgaagaagaagagaagaaggatgaaaagaagaaggaaaaaaagaataaaaaacaggacggcgctatagaaaacaggaacaaagcgaaggcgcaagatggcgctgctatggagatgcagcctctgaagtcggaggagggaggtgacggtgacgaaaaagacaagaaaaaggctaatctacccaaaaaggaaaaaagcgtgttgcaggggaaactgacaaaactggctgtgcaaattggcaaagccggactgcttatgagcgcaattacagtgatcattctcgtcctatacttcgttatagacacgttctgggtgcagaagcgtccatggcttgccgagtgcaccccgatatatatccagtatttcgtaaagttcttcatcattggggttaccgtgttggtggtcgctgttcctgaagggctgcctctggcagtaaccatcagccttgcatactctgtaaagaaaatgatgaaggataacaaccttgttagacacctggatgcctgtgagaccatggggaatgcaacggctatctgctctgacaaaacgggtacgctgacaatgaacagaatgacagtagtgcaggcatacattaacgagaaacactataaaaaggttcctgaaccggaggcaataccgcctaatattctgtcctatctggtgacaggtatttctgtaaattgcgcctatactagcaagattctcccccctgaaaaggaggggggtttacccaggcacgtagggaataagacagaatgcgcccttcttgggctgctccttgatctgaagcgtgactaccaggatgttagaaacgagatcccggaggaagcactctacaaggtgtacaccttcaactccgttcggaagtctatgagcaccgtcctgaaaaattcagatgggtcctacaggattttcagtaagggggcttcagagatcatcttaaaaaaatgcttcaagattctgtccgctaatggggaggctaaggtgtttaggcctagggaccgagatgacattgtcaagacagtaattgaaccgatggcctccgaagggcttaggacaatttgtcttgcattccgcgattttcctgcgggtgagccagagccggaatgggacaacgaaaatgatattgtgacaggcctgacttgcatcgctgtcgtggggattgaggaccctgtgcgccctgaggtcccagacgcgatcaagaagtgccagcgggcaggcatcactgtgcggatggtgacaggggacaacatcaacacggccagagcaatcgccacaaagtgtggaattttacatcccggagaagactttctgtgtctggaggggaaggattttaaccggaggattagaaacgagaaaggcgagattgaacaggagcggatcgacaagatctggcctaagctgagggttctggcgaggtcttccccaaccgacaaacacacattggtcaagggtataatcgactctactgtgtccgatcagcggcaggtggtagctgtcaccggtgacggcactaatgatggaccagctcttaagaaagcagacgttgggtttgctatggggatcgcaggaactgacgtggccaaggaggccagcgacatcatactgacggatgataatttcactagtattgtcaaggcagtgatgtgggggcgaaacgtctacgacagcatttctaagttccttcaatttcagttgactgtcaatgtggtggcggttattgtggcatttactggagcatgcatcacccaggattcccctcttaaagccgtccagatgctgtgggttaatctcattatggacacgctggcctctttggctcttgctactgaacccccaacagaaagcctgctgctgagaaaaccctatggccgtaataagccgctgatcagcagaactatgatgaagaatatcctcggtcatgctttctaccagctcgtcgtcgtctttaccctcctttttgcaggagagaaattttttgacattgactccggcagaaatgcacccttgcatgccccaccttccgaacattacactatcgtgtttaacacgttcgtgttgatgcagttatttaacgaaatcaatgccaggaagatacacggggaaaggaatgtgtttgaggggatcttcaacaatgccatcttctgcaccatcgtgctcggaaccttcgtggtgcaaattatcatcgtgcagttcggcggaaaacctttttcctgtagcgaactgtccatcgagcagtggctctggagtatctttctcggtatgggaaccctgctgtgggggcagctgatctcaactatcccaacaagtcgtttaaagtttctgaaggaagccggacacgggacgcagaaggaagaaattcctgaggaagagctggccgaagatgtggaggaaatcgatcacgcagaacgggaattgcgtagaggtcagatcctgtggttcaggggtctcaacagaatccagactcagatccgcgtggttaacgcgtttcggtcttccctttatgagggactggagaaaccagagtctaggtcttcgatacacaattttatgacccacccagaattccggatcgaggactcagagcctcatattccactgatagacgacaccgatgccgaagacgacgcaccaaccaagagaaacagctccccaccgcctagcccaaataagaataataatgctgttgactccggcattcatcttacaattgagatgaacaaaagtgccacctccagctctcccggtagtccactccattctctcgagacttctctgtag

SEQ ID NO: 215166 - DNA, 306 bp, synthetic construct
  misc_feature 1..306: note = Description of Artificial Sequence: Synthetic coding sequence
  source 1..306: mol_type = other DNA
atgggggacatggccaacaacagcgtggcctacagcggagttaaaaactccctgaaagaagccaaccatgatggagactttggcataacactcgctgaattacgcgcacttatggaactgaggtccacggatgcgctgaggaagatccaagaatcttatggtgacgtgtatgggatttgtaccaaattaaaaacttcccccaatgagggtgagttttactatgcctgcttttggtttttcgtccaaagggtgctgtacatctggttgattaatgaacacgcctatatcattttggcaatcgtttag

SEQ ID NO: 215167 - DNA, 3600 bp, synthetic construct
  misc_feature 1..3600: note = Description of Artificial Sequence: Synthetic coding sequence
  source 1..3600: mol_type = other DNA
atgggggacatgaccaactccgacttctacagtaaaaatcagcggaacgagagctcccacgggggtgagttcggatgcacaatggaggagctgagatcactaatggaactgaggggcactgaagccgtggtcaagatcaaggaaacctacggtgacaccgaggccatctgcagacgcctgaaaacaagccccgtcgaggggctgccaggcaccgcccctgacctggagaagcggaaacagattttcgggcaaaattttattccccctaaaaagccaaagactttcctgcagctggtctgggaagccctccaggacgtgacgctcataatacttgagattgccgctattatctccctaggtctttccttctaccaccctccaggagaggggaatgagggctgcgcaacggcccagggtggcgcagaagacgagggcgaagctgaagccggatggatcgaaggcgctgcaatactgctctccgtcatttgtgttgtgctcgtgaccgccttcaacgattggtctaaagagaagcagttccgcggtctgcagagtcgcatcgaacaggagcagaaatttaccgtagtgagagctggtcaggtggtgcagatccctgtcgcggagatagtcgttggggatatcgcccaggtaaaatatggcgatctgctacctgcggacggcctctttattcaggggaatgatttaaagattgacgaatcttctctgacaggtgagtctgaccaggtacggaaatctgtggataaagaccccatgctcctcagcggcactcacgttatggagggatccggcagaatgttggtgactgccgtgggcgtgaattctcagaccggcatcatctttacactgctaggagccggaggcgaagaggaggagaaaaaggacaaaaagggagttaagaagggcgatggacttcagcttccagccgcagatggagccgctgcctctaacgccgcagacagcgctaacgcgtcattggtaaatggcaaaatgcaggatggcaacgttgatgcatcccagtccaaggctaaacagcaggacggtgccgctgccatggagatgcagcctctgaagtcagctgaaggcggtgatgctgacgatcggaaaaaagcttctatgcacaagaaggagaaaagcgttctgcaggggaagttaacaaaactggccgtccagatcgggaaggccggtctggtcatgtccgccatcactgtgatcatcttggttctgtatttcacggtggacacattcgtggtgaacaagaaaccctggctgcctgaatgcaccccggtatacgtgcaatactttgtcaagtttttcataatcggggtgaccgtgcttgttgtggcggtgcctgaaggactgcctctcgctgtcactatttcacttgcctactccgtgaaaaagatgatgaaggacaacaacctggtgagacatctcgacgcctgtgaaaccatgggtaacgccactgccatttgtagtgataagacgggtacgttgacaaccaatcggatgacagtggttcaggcgtacgtaggcgatgtgcattataaagaaatccccgacccctcctccattaatactaagacgatggaactcctaataaacgcgattgctattaattccgcttacacgaccaagatccttcctcctgagaaagagggtgctcttccacggcaggtcggtaacaagacagagtgtggcctgctgggcttcgtcttggatctcaaacaggactacgagcctgtaaggagccagatgcccgaggaaaaattgtacaaagtgtacaccttcaattcagttcgtaaaagcatgagtacggtgatcaagcttcccgacgagtcttttagaatgtactcaaagggggcatccgaaattgtgttgaagaaatgttgcaagatattgaatggggcaggcgaacctagagtatttcgcccacgggatagagacgaaatggttaagaaggtgattgagcccatggcttgcgacggattgcggacaatttgtgttgcctatcgggattttcctagctccccagagcctgactgggacaatgaaaatgacattctgaatgagctcacgtgcatttgcgtcgtggggattgaggaccccgtgcgccctgaagtacctgaggccatccgaaaatgtcagcgtgctgggatcaccgtaaggatggtgaccggcgacaatatcaacacagcccgagcgattgctatcaagtgcggaattattcacccaggcgaagatttcctttgcttggaaggtaaggagtttaaccgacgcatccgaaacgagaagggggaaattgagcaggaacgaatcgacaaaatctggccaaagctgagagtgctggcacgatcaagtcctaccgacaaacatacattggtgaaaggaatcatcgatagcactcatacagagcagcgccaggtggtcgccgtgacgggcgatgggactaatgacggaccagcgctcaagaaagctgacgtgggcttcgccatgggtattgctggcacagatgtagccaaagaagctagcgacataatcttgactgacgacaatttttcatccatcgtaaaggcggtcatgtgggggaggaacgtttacgatagtatctccaaatttcttcaattccaactgacagtgaatgtcgtcgccgtgatagtagcattcaccggtgcttgcatcacgcaagattccccactgaaagcagttcagatgctatgggtaaacctcatcatggatacatttgccagccttgctcttgccactgaacctccaacagaaaccctcctgctccgtaaaccctacggtcgcaacaagcctctcatctcaaggaccatgatgaaaaacattctgggacacgctgtgtaccagctggcactcatcttcactctcctgttcgttggagaaaagatgttccaaattgacagcggtaggaacgcgcctctgcactctcctccgtcagagcactacacaatcattttcaataccttcgttatgatgcagttattcaacgagattaacgccaggaagatccatggagagagaaatgtatttgatggcattttccgaaatcccatcttttgcacgatcgtactgggtacatttgcaatacagatcgtgattgttcagttcggcggaaagcctttcagttgtagccccctgcagctagaccagtggatgtggtgtatctttattgggttgggtgaactggtctggggccaggttatagctaccatcccgacatctcgtcttaaatttctaaaggaggccggtagactgactcagaaagaagagatccctgaggaagagctgaacgaagacgtcgaagagatcgaccatgccgagcgggagctgcgccgaggccaaattctgtggtttcgaggcttaaataggattcagactcagatcgaagtagtaaacacttttaagagcggggcttcctttcagggtgctttgcggagacagtcttctgtcacctcccaaagccaagacgtggcgaatctgtcctcacctagccgtgtaagtttgagtaacgccttaagctcacctacatccctgccacccgctgccgctggacgtgagtag

SEQ ID NO: 215168 - DNA, 3690 bp, synthetic construct
  misc_feature 1..3690: note = Description of Artificial Sequence: Synthetic coding sequence
  source 1..3690: mol_type = other DNA
atgggggacatgactaactcagatttttattcaaagaaccagcgcaatgaaagttcccacgggggagagtttggttgtacgatggaggaactccggagcttaatggagctgcggggtactgaagctgtcgtcaagataaaggagacatacggcgataccgaggctatttgtagaaggctgaaaactagcccagtggagggactgccagggaccgcccctgatctggagaagagaaagcagatatttgggcaaaactttataccaccaaagaaaccaaagacctttctgcagttggtgtgggaagctctgcaagatgttactctgataattctagaaatcgctgccattattagcctgggtctgagtttttaccatccccctggagagggcaacgaaggctgtgctacagcgcagggaggcgctgaggatgagggagaagctgaagccggttggattgagggagccgctattcttttgagcgttatttgcgtggtcctggtgactgcctttaatgattggtcaaaagaaaagcagttcagggggctgcagagccggattgagcaagagcagaaatttacggtagtgcgagccggacaagtcgttcagattccggtggctgaaattgtggtgggagacattgcccaagtgaaatacggggacctactgcctgcggacggtttgttcatccaggggaatgacttaaaaattgacgaatcaagcctgacaggggagtccgatcaggtgcgaaaatcagtcgacaaggatccaatgcttctgagcggaacgcatgtcatggagggttccggccgaatgttagtgacggctgtgggcgtgaactcccaaaccggaatcatcttcactctgctgggggcagggggagaggaagaggagaagaaggataaaaagggcgtgaaaaagggagatggactgcagttgccggctgccgatggcgctgcagctagcaacgccgcagacagtgcaaatgcctcattggtcaatgccaaacagcaagatggggctgctgccatggaaatgcagcctctgaaaagcgccgagggaggcgatgctgatgatagaaaaaaagctagtatgcacaagaaagagaagtctgtccttcaaggaaaactgacgaaattagccgtccagattgggaaggcaggcctggtcatgtctgcaataactgtgattatcctcgtgctgtacttcacggtagacacatttgtagtgaataagaaaccctggctgccggagtgcacacccgtctatgtgcagtacttcgtgaaattctttataattggtgtaaccgttctggtagtcgccgtgcctgaaggactccctctcgccgtgaccatatctcttgcctatagcgtcaagaaaatgatgaaggataataacctcgtccgccacctggacgcgtgtgaaaccatggggaacgcaacggccatctgttcagacaagactggtaccctcaccacaaaccgaatgacagtggtgcaggcctacgtcggcgatgtgcactacaaggagattcctgatccttcttctataaacaccaaaacgatggaactgctgataaacgctatcgcaatcaatagcgcttacacgacaaaaatcttacctccggagaaggaaggcgctctcccaagacaggtcggaaacaaaaccgaatgcggcctgctgggctttgttctagatctcaaacaggattacgaacccgtgcgatcccagatgcctgaggaaaaactctacaaggtttacacattcaattctgtacgcaagagtatgtctaccgttatcaaattgcctgatgagtcgttcagaatgtactcaaaaggcgctagcgagatcgtcctgaaaaagtgttgcaagattctcaacggcgctggcgaaccccgagtctttaggcctagggatcgtgacgagatggtcaagaaggttatagagccaatggcctgtgatggactgaggacaatctgtgtagcttatcgggattttccgtctagtccagagcctgattgggacaatgaaaacgatatccttaacgaactgacttgtatctgcgtggtggggatagaagaccctgtgaggcctgaagtgcctgaggccatcaggaagtgtcagagggcaggcatcactgtcagaatggtaactggggataacattaacaccgcgagagctatcgctataaagtgcggaattattcatccaggggaagatttcctgtgtctggagggcaaggagttcaatagaagaatccgtaatgagaagggggaaattgaacaagaaaggatcgataagatttggcccaaacttcgggtcctagctaggtccagcccgacagacaaacatacactagtgaagggaatcattgactctacacacacagagcagcgccaggtggtcgccgtgaccggtgatggaacgaacgacggacctgcattaaaaaaagcagacgtgggatttgctatgggtattgctggaacagatgtagcgaaagaagcctcagatataatactgaccgatgacaatttctcatcaatcgtgaaggctgtcatgtggggtcgtaacgtgtatgattccataagtaaatttcttcaattccaattgacagtgaacgttgtggccgtgattgtagcttttacgggcgcttgtattacccaagatagtccattaaaggccgtgcagatgctgtgggtgaaccttatcatggatactttcgcatccctggccctggcgaccgaacctccaaccgagaccctgctgctccggaagccttacgggagaaacaaaccattaatctcaaggaccatgatgaagaacattcttgggcacgctgtttatcagctggctctgattttcaccctgctctttgtcggagaaaaaatgttccagatcgattctggacgaaacgcaccactgcattcccctccgtctgagcactacactataattttcaacacattcgtgatgatgcagctgtttaacgagattaacgccagaaagatccatggggagaggaacgtgttcgatgggattttccgcaaccctatattctgcacgattgttctgggcacctttgccatccagatcgttatcgtgcagtttggtggcaaacctttcagttgctcaccactgcagttggaccaatggatgtggtgcatttttataggactgggggagttagtgtggggacaagtgatagctaccattccaacgtcacgtctcaagttccttaaagaagcgggaagactgacgcagaaggaagagattcccgaagaagagttgaatgaggatgtcgaagaaatcgatcatgccgagagagagctgcgcagaggccagatcctgtggttcaggggcctgaatcggatccagactcaaataagagtagtgaaggcatttcgctctagtttgtacgaaggcttggagaaacccgagagccggacctcaattcacaactttatggcccacccagaatttcgcatagaggactcccagccacacataccattaattgatgatacggacctggaggaggacgccgcactgaagcagaacagcagtccgccatcctcattaaataaaaataactcagcgattgattcaggcatcaacctgaccaccgacacttctaaatccgctactagctccagtcccggtagcccgatacactccttagaaacttcactgtag

SEQ ID NO: 215169 - DNA, 3732 bp, synthetic construct
  misc_feature 1..3732: note = Description of Artificial Sequence: Synthetic coding sequence
  source 1..3732: mol_type = other DNA
atgggagacatgacaaactcagacttttatagcaagaatcagcgaaacgagtcctcccatggcggagagttcggttgtacaatggaagagctgcgctccttgatggagctgcgcggtactgaagccgtcgtgaagattaaagagacttacggcgacacagaagcaatctgtagacgtctcaagacatctcccgtggaaggcctgcctggaactgcacccgacctggagaagaggaaacagatcttcggccagaacttcatcccccctaagaaacccaagacttttctacagctggtatgggaagcattacaggatgtcacactcatcattcttgaaattgctgccattatttcccttggccttagtttctaccacccacctggggagggaaatgaaggctgcgccacagctcagggaggagctgaggatgaaggagaagccgaagccggatggattgagggcgctgcgattctgttaagcgttatatgcgtagttctggtaactgcttttaatgactggtccaaagaaaaacagtttagagggttgcagtctcgcattgagcaagaacaaaagtttacagtcgtccgggcagggcaggttgttcagatcccagtcgccgaaatcgtggtcggggatatcgctcaggtgaaatatggcgatctcctgcccgctgatgggctgtttattcaaggaaacgacctgaagatagacgaaagtagcctgaccggagagagcgatcaggtgcgcaagtctgttgataaggatcccatgcttctcagcggaactcacgttatggagggcagcggcagaatgcttgtcaccgccgtcggggtaaatagccagactggcattatttttaccctcctgggggcaggcggtgaggaggaggagaagaaggataaaaaaggcgtgaagaagggcgacgggttacagctgccggctgcggatggtgcagccgcttcgaacgccgctgactctgcaaacgcgtccctagtgaatggaaagatgcaagacgggaacgtggacgcttcacagagcaaggctaagcagcaggatggcgctgctgctatggagatgcagccactgaagagtgctgagggcggtgacgccgatgatcgaaaaaaagcctccatgcacaagaaggagaaatcagtattgcagggcaagctaaccaagctggccgtgcagatagggaaggccggattagtcatgtcggccatcacagtgatcatactcgtgctgtactttactgtcgacacctttgtggtcaacaaaaaaccctggttacccgaatgcactcccgtgtacgtgcagtactttgtgaaatttttcatcatcggcgtgacagtgctggtagtggccgtgcctgaagggctgccactggcagtcaccataagcctggcttacagtgtgaagaagatgatgaaagataataatctggtaaggcacctggatgcttgcgaaactatggggaatgctactgccatttgctcagataagaccggtacccttaccacgaacagaatgactgtggtccaggcctatgtcggggatgtacattataaagaaatacccgatccttcatctatcaataccaagactatggagctgctgatcaacgcaatcgccattaatagcgcttataccaccaagatcttgccacccgagaaggaaggtgctctacccagacaggtggggaataagacggaatgcggattattaggtttcgtgctagatctgaaacaagactacgaaccagtgagatctcagatgcccgaggaaaagctctacaaggtgtacactttcaactcagtccgcaagtctatgagtacagttataaagctccctgacgagtcttttcgcatgtactccaagggcgcatcagaaattgtactgaagaagtgttgcaagattctgaatggggctggggaaccacgtgttttcagaccccgtgacagggacgaaatggtgaaaaaggtcatagagcctatggcctgtgacggactgcgaacaatctgcgttgcctacagggattttccctccagtccagagcccgattgggataatgagaatgatattttaaatgagttgacatgcatctgtgtcgttggcatcgaggacccagtaaggccagaggtgcctgaagccatccgtaagtgtcagcgtgcaggtatcaccgtgaggatggttactggtgataacattaataccgcacgagccatcgccatcaaatgtggtatcatacacccaggagaggatttcctgtgtctggagggcaaagaattcaatcgtcgcatccgtaacgagaaaggggagatcgaacaggagaggattgataagatctggcctaagctgagggttctggctaggtcatctccaactgacaagcataccctcgttaaagggattattgactctactcataccgagcaaagacaagttgtagcagttacaggtgatgggaccaacgatggacctgcgttgaaaaaagctgatgtgggatttgctatgggcattgccggaaccgacgttgccaaggaagcctctgacatcatactcacagacgacaatttttccagtattgtaaaagctgtgatgtggggacgaaacgtgtatgactccatcagcaagtttcttcagtttcagctcactgtgaacgtcgtcgcagttattgtcgcctttactggcgcatgcatcacacaggattctccattgaaggccgtccagatgctgtgggtgaatctaatcatggacactttcgcgagccttgctctggcgaccgagcccccaacagaaactctgctgctgaggaaaccctacgggaggaataagccgctgatttcaagaaccatgatgaagaacattctggggcacgctgtgtaccaattggcactaatattcaccctgcttttcgtaggagagaaaatgtttcagatagattccgggagaaatgcacctctgcacagcccccctagcgagcattatacaattattttcaatacattcgtgatgatgcagctgttcaacgagatcaatgccaggaagatccatggggaacgtaacgtatttgatggcatttttaggaacccaatattttgcacaattgttctgggcacttttgccattcaaatcgtgattgtgcagtttggcggaaagcccttctcttgctctcccttgcagctggatcagtggatgtggtgtatctttataggccttggagaactggtgtgggggcaggtcatcgccacaattcccacgtcacggctaaagttcctaaaagaagctgggagactcacccagaaggaggagatccctgaggaagagctcaacgaagacgtcgaagaaatcgatcacgcagagcgagagttaagacgagggcagatcctctggtttcggggactaaaccggattcagacccagatcagagtggttaaggctttccgcagctccctgtacgaagggctggagaaaccagagagtaggacgagtattcataatttcatggcccacccagagtttagaatcgaggactctcaaccccatatcccactcatcgatgatacggacctcgaagaagacgctgccttgaaacaaaactccagtcctccttcctcgttgaacaagaacaattcagctattgatagcgggatcaacttaacaaccgatacgtctaagtccgccacaagcagctcccctggtagccctatacactcactggagactagcctgtag

SEQ ID NO: 215170 - DNA, 3732 bp, synthetic construct
  misc_feature 1..3732: note = Description of Artificial Sequence: Synthetic coding sequence
  source 1..3732: mol_type = other DNA
atgggggacatgactaacagcgacttttacagcaaaaatcaaaggaacgagtcttcacacgggggagaattcggatgcacaatggaagagctgaggtccctgatggagctgcgaggtactgaggctgtggtgaagattaaagagacatatggtgataccgaagcaatttgccgcaggttaaagactagtcctgtggaggggctgccgggtacagctcccgacctggagaagagaaagcagatctttgggcagaatttcattccgccaaagaagcctaagacttttctgcagctggtctgggaggccctgcaagatgtaaccctgataatcctcgaaattgccgctataatcagtttaggcctgtcgttctaccatcctcctggcgaaggcaacgaaggttgcgccacagcccagggcggagccgaagacgagggcgaagctgaggcgggatggatagaaggcgcagctatcctgctgtccgtaatctgcgttgtgctcgtgacagcattcaacgattggagcaaggaaaagcagttccgaggactgcagtcaaggattgagcaggaacagaaattcaccgtggttcgtgccggacaagtagtgcagatccccgtggccgaaattgtcgtgggcgacatcgcccaggtcaaatatggtgatttgctgccagcagacggcctttttatccagggtaacgacctgaagatagacgaatcatctctgactggagaaagtgatcaggtgcggaagtcagttgataaggatcctatgttgttaagcggtacccatgtgatggaggggagcggcagaatgctggtgacagcagtcggcgtcaatagccaaacagggataattttcactctgctgggagccggaggagaagaagaagaaaaaaaggataagaaaggagtgaaaaagggagacggcttacagcttccagcggcagatggcgcagctgcaagtaacgccgcagactccgcgaacgcgtccttggtaaacggtaagatgcaagacgggaacgtggacgcttcccagtctaaggccaaacagcaggacggtgcggcagccatggagatgcaacccctgaagtctgccgaaggcggagatgcggacgatcgtaagaaggcctctatgcacaagaaggagaaaagcgtgttgcagggcaagctcacaaaactggctgtgcagattggaaaggccggattagtgatgagtgcgataaccgtcatcattctggtgctgtacttcacagtggacaccttcgtggtcaacaaaaagccttggttgccagaatgcacaccggtgtacgtgcagtatttcgtaaaattctttattatcggggtgactgtgttggtggtagccgtccccgaagggcttcccttagccgtcacaatcagcttggcttacagcgtgaagaagatgatgaaggataacaatttggtgagacacctcgatgcctgtgagacaatgggcaacgcgacggccatatgctccgataagacggggactctgactacaaacaggatgaccgttgtgcaagcttatgtgggtgacgtgcattataaagaaattcctgacccttctagcattaacaccaagacaatggaattgctgatcaatgccattgcaatcaactctgcctatacaacaaagatactgcctccagaaaaggaaggcgcattgccacgacaggtggggaataagactgaatgtggcctccttgggtttgttcttgatttgaaacaagattacgaacctgttaggagccagatgccagaggaaaaattgtataaggtttatacattcaactccgtccgcaagagtatgtccactgttataaagcttcctgacgaatcctttagaatgtatagcaagggcgcatctgagatcgtgcttaagaaatgttgcaagattctgaacggcgcaggtgaacctagggtcttccgaccacgggacagagacgagatggtgaagaaggttatcgagcctatggcctgcgacggattgcggactatatgcgtggcttaccgcgactttcccagttctccagaaccagattgggacaacgagaacgacatcctgaacgagctgacttgtatatgcgtcgtggggatcgaggacccagtgcgccctgaggtgcccgaggcaattaggaagtgccaacgcgcagggatcaccgtccggatggtaacaggcgacaatatcaatacggctcgggcaattgcaatcaagtgtggtattatacatcccggagaggatttcctttgcctggagggtaaagagtttaacagacggattaggaatgagaaaggcgagatcgagcaagagaggatcgataagatttggccaaaactgcgtgtgctcgcccgaagtagcccgactgacaagcataccctcgtcaaaggcataatagattccacccacaccgaacagagacaggttgtggctgtcacgggtgatggaacaaatgacggccctgcactgaagaaagcggatgtcgggttcgctatgggaattgcagggaccgacgttgctaaagaagcatcagacataattctgaccgatgacaatttttcctctatcgtgaaagctgtgatgtggggaagaaatgtgtacgattccatctctaaattcctccagttccagctgaccgtgaatgtagtcgcagtgatcgtcgccttcactggggcatgtatcacacaagactctccattaaaagccgtgcaaatgctttgggtgaaccttatcatggatacctttgcaagtctcgcactggcaacagaacctccaaccgagaccctcttactccgaaagccatatggtcgcaataagccactcatctctcggactatgatgaaaaatatcttgggccatgctgtgtaccagttagcactgattttcaccctgctgttcgtaggtgagaagatgtttcaaatagactcggggaggaatgcccctctccactcacccccttcagagcattatactattatttttaacactttcgtcatgatgcagctttttaacgaaatcaatgctcgcaaaattcacggggaacggaacgtatttgacggtattttccgtaatccaattttctgtacaattgtgctaggcaccttcgccatccaaattgtgatcgtgcagttcggcggaaagccatttagctgttctcccttgcagttggaccagtggatgtggtgtattttcatcgggcttggggagttagtgtggggccaagtcattgctaccattcccacctcaaggttgaagtttctcaaggaggccggaaggcttacccagaaagaagagatcccagaggaggaacttaacgaggatgtcgaggaaatcgatcatgccgagagggaattacgcagaggtcaaattttatggttccgcggacttaatcgcatacagacccagatacgggtagtgaaagctttcaggagtagtctgtatgaagggcttgaaaaaccagagtctaggacctccattcataactttatggcccacccagagttccgaatagaggactctcagcctcacatcccactcattgacgatactgacctcgaagaggacgccgctctcaaacagaattccagcccaccatcctccctgaataaaaacaactccgccatcgacagtggtatcaacctcaccacggacacatctaaaagcgctacttcttcctcccccggatctcccattcacagcttggaaacctccctgtag

SEQ ID NO: 215171 - DNA, 3597 bp, synthetic construct
  misc_feature 1..3597: note = Description of Artificial Sequence: Synthetic coding sequence
  source 1..3597: mol_type = other DNA
atgggggacatgacgaattccgacttctattccaagaatcagagaaacgagagctcccacggaggcgagtttggttgcacaatggaggagttgcgcagcctgatggagctcaggggaaccgaagctgtggtaaagatcaaggaaacatatggtgatacggaggcaatctgccgaagactgaaaaccagcccagttgaggggctccctggaacagccccagacttggaaaagaggaagcagatctttgggcagaacttcatccccccaaagaaacctaaaacgttcctccagttggtgtgggaggcactgcaggatgtaacactgatcattctagagattgcggctatcatcagtcttggtctgtccttctaccaccccccaggggagggaaatgaaggatgtgctaccgcccaggggggagctgaagacgaaggagaagccgaggcaggatggatagagggtgctgccatcctgctctccgtgatctgcgtggtcctggtgactgctttcaatgattggagcaaagagaaacagtttcgagggctgcagagccggattgagcaagagcaaaagtttactgtcgtgagggctggtcaagttgtacagatccctgtggccgaaatagtggttggagacatcgcacaagtgaagtacggcgatctgctacccgctgatggcctgtttatccaagggaatgatctcaagattgacgagagtagcctcacgggggaaagtgatcaggtgcgtaaatctgtggacaaagatcccatgttattgagtggcacccacgtgatggaaggatccgggagaatgttggtgacagctgtcggagtgaactcacaaacaggtatcatattcactctcctgggagccggaggtgaggaggaagaaaagaaagacaagaaggctaaacagcaggatggagccgcagccatggaaatgcaacccttgaaaagcgcggaaggcggtgacgctgatgacaggaagaaggcctcaatgcacaagaaagaaaaaagcgtgctacagggaaaattaactaaactcgcggtgcaaataggaaaggctgggcttgttatgtcagccataaccgtaatcatcctagtactttattttactgtggatacttttgttgtgaataaaaagccttggctgccagaatgcacccctgtgtacgtacagtatttcgttaaattctttatcatcggcgttacagtgttggttgtggcagtccccgaggggctcccactggctgtgaccatttctctagcctattctgtaaagaaaatgatgaaagacaataatctcgtcaggcatttggacgcatgtgaaactatggggaatgctactgctatctgctcagataagacggggacactcaccactaatagaatgacggtggtgcaggcctacgttggggacgtgcactataaggaaattcccgatcccagcagtataaatacgaagacaatggagctgttgatcaatgctatagcaattaactccgcttataccaccaaaattcttcctccagagaaagaaggcgctcttccacgacaggtagggaacaagacggagtgcgggctgctggggttcgttctggacctgaaacaggactatgaacccgttcggtcccaaatgccagaagagaagctctataaagtgtataccttcaattcggttcggaaatccatgagcacagtgatcaaactgcctgatgagtccttcaggatgtatagcaaaggcgcttctgaaattgtgttgaagaagtgttgtaaaattcttaatggagcaggcgagcctcgtgtctttcgaccccgtgatcgtgacgaaatggttaagaaagtcatcgagccaatggcatgcgacggactgcggaccatctgcgttgcgtaccgggacttcccgtcatcacctgaaccagactgggataatgagaacgatattcttaatgaactcacatgtatttgtgtcgtcgggatcgaagatcctgtgcggcctgaagtgccagaagccatcaggaagtgccagcgcgctggcatcaccgtgaggatggttactggggataatatcaacaccgcaagagctatcgcaatcaaatgcggtatcatccatcccggtgaggactttctgtgtttggaaggcaaggaattcaaccgccgaatacgcaacgaaaagggggagattgaacaggaaaggatcgacaaaatctggcctaagcttcgggtcctcgctcggagctcaccgactgacaagcacacactggtaaaggggattatcgacagcactcacacggaacaaaggcaggttgtggccgtcactggagacggaacaaatgatggccctgctctcaagaaggcggatgttggattcgccatgggcatcgccggaactgatgtggctaaagaggcctctgatattatcctcactgacgacaattttagctctatcgtcaaggccgtgatgtggggacgaaatgtatacgatagcataagtaaattcctccaattccaactaacagtcaacgtcgtggccgtgatcgtggcctttaccggggcttgcatcactcaggactccccattaaaggccgttcaaatgctgtgggtgaaccttataatggacaccttcgcttctttagcccttgctactgagcccccaacagaaactctcttgctccgcaagccatacggtaggaacaaacctctcatcagccggacgatgatgaaaaatatcctcggccatgcggtctaccagcttgccttaatatttacgttgctgttcgtgggagagaaaatgtttcaaatcgatagcgggcgaaatgcccctctccatagccccccatccgagcactataccatcatttttaacacatttgttatgatgcagttattcaatgaaataaatgccagaaaaattcatggcgaacgcaacgtgtttgacgggatcttcagaaatcccattttttgtacaatcgtgttgggcacatttgccattcagatcgtgattgtgcaatttgggggaaaaccctttagttgtagccccctccagctagaccagtggatgtggtgcatcttcatcggcctcggagaacttgtctggggacaagtgatcgccactatcccgacctctaggctgaaattcttgaaagaagctggtaggctgacgcaaaaggaagaaatccctgaggaggagcttaatgaggatgtggaggagatagaccacgccgagcgggaactcagaaggggacagatcttgtggttccgaggcctgaatagaatccaaacacaaattcgcgtcgtgaaagcgttcagatcttcattatacgaagggctcgaaaagccagagagcagaacctccattcacaactttatggcacacccagagtttaggatcgaggactcccagccccacatcccgctgattgatgacacggatctcgaggaggacgccgcactcaagcagaattcttcgccgccttcctcgctgaacaaaaacaacagtgcgattgactcgggcattaatctaacaacggacacctcgaagtccgctacgagctcaagccctgggtcccccatccatagcctggagacatccctctag

SEQ ID NO: 215172 - DNA, 3597 bp, synthetic construct
  misc_feature 1..3597: note = Description of Artificial Sequence: Synthetic coding sequence
  source 1..3597: mol_type = other DNA
atgggagatatgaccaactccgacttttacagtaaaaaccagaggaatgagagctcccatgggggtgaattcgggtgtaccatggaggagctgcgttctctgatggagctccggggtaccgaagccgttgtgaaaattaaggagacttacggcgataccgaagcaatatgtcgaagactgaaaacctcccctgtagaggggttgcctggaacagcaccagatcttgagaaacgaaaacaaatctttggacaaaacttcatcccacccaaaaaacccaagactttcctgcagcttgtgtgggaggccctacaagacgtcaccttgatcatcctagagatcgcggcaataatttccctgggcctcagcttttatcacccccctggtgaaggcaatgaagggtgtgccaccgctcaggggggagcagaggatgagggcgaggccgaggcaggttggattgagggggctgcaatcctgctgtctgttatctgcgtggtcctggttacagcctttaatgactggagcaaggagaaacagtttagagggcttcagagtagaattgagcaggagcagaagttcactgtggtgagagccggacaggtggtgcagatcccagtcgcagagatcgtcgttggagacattgcccaagtgaagtatggggacttactgcccgcagatggactcttcatacaagggaacgacctgaaaatcgatgaatctagtttgaccggggagtcagatcaggtgaggaagtctgtcgacaaagaccccatgctccttagcggaacgcacgtgatggaggggagcggtcgcatgcttgttacagccgtgggcgtgaatagtcagaccggcattattttcactttgctgggcgctggaggtgaggaggaagaaaaaaaggataagaaagccaaacagcaagacggcgcagcagcgatggagatgcagccactgaagagcgctgagggtggcgacgctgatgacagaaagaaagcctcaatgcacaaaaaggaaaaaagcgtattgcaggggaaactgaccaaactggctgtacaaatcggaaaggccggactggtcatgtctgcaatcaccgtgattattctggtcctctacttcaccgtggacacattcgtggtgaacaagaaaccttggctgcctgaatgtacccccgtctatgttcagtacttcgttaaattctttattatcggagtaacagtgctggtagtcgctgtccccgagggcctcccgttagcagttaccatttcactggcatattcagtgaagaaaatgatgaaggacaacaatctagttcgccatctggatgcctgtgagaccatgggaaatgccaccgctatttgttcggataagaccggtacgctcacgacaaataggatgaccgttgtccaggcgtatgtcggagatgtacactataaagagattcctgatcccagctccatcaacactaaaacaatggaactcttgattaacgcaatcgcaatcaacagcgcttatacaacaaagatcctgccccctgaaaaggagggcgctctccccagacaagtgggtaacaaaactgagtgtgggctcctgggctttgtgcttgatttgaagcaggattatgagcccgtccgatctcagatgccagaagagaagctttataaggtatatacgttcaactccgtcagaaagtctatgtcaactgtgattaagctccctgatgagtctttccggatgtattcaaaaggcgcatcagagatcgtcctgaaaaaatgctgcaaaatcctcaacggagctggtgagccaagggtgttcaggccccgagacagggacgagatggtgaaaaaagtgatcgaacccatggcatgtgacgggttgcggaccatttgcgttgcgtacagagattttcccagcagccccgagccggattgggacaacgagaacgacatactgaacgaactcacatgcatttgcgtggttggaattgaggatcccgtgcgcccagaggtcccagaagccattaggaaatgccaacgtgccggaataaccgtgcggatggtgacaggagacaatattaatacggccagagccattgcaatcaagtgcgggattattcacccgggtgaagacttcttatgtctggagggaaaggagttcaatagacggatccggaacgagaaaggcgagattgaacaagagaggatagataagatttggcctaagctgagggtcctggctaggtcatccccaaccgacaagcacacactagtgaaaggcattatagacagcacacataccgagcagaggcaagttgtggcggttacgggcgatgggacgaacgacgggccagccctcaagaaggcagacgtcgggttcgcgatgggcattgctgggacggatgtggccaaggaggcctctgacatcatcctgacagacgacaattttagctctatagtgaaagctgtaatgtggggaaggaacgtgtacgactccatttctaagttccttcaattccaactcactgtgaacgtagtggcggtgatagtcgcgtttacaggagcttgcataactcaggactcgcccctgaaagccgtgcaaatgctctgggtgaatttgattatggacacatttgccagtttggcgctggcgacggaaccacccactgagaccctgctgcttcggaagccgtatgggcgtaataaaccgctgatttcccggaccatgatgaagaacatcctgggtcacgcagtatatcaactcgccctgatattcaccctcttgttcgtgggcgagaagatgtttcaaatcgacagcggacgaaatgccccactccattcaccacctagcgagcactatacgatcattttcaatacattcgttatgatgcagttatttaatgaaataaacgccaggaaaatccacggtgagcggaatgtcttcgacggcattttcagaaatcctatcttctgcacgattgtcttggggacattcgcaatccagatcgttatcgtgcagtttggaggtaagccgttcagctgcagccctctgcagctggaccagtggatgtggtgcatctttattggccttggcgagctggtctggggacaggttatagccaccatccccacatctcgacttaaattcctgaaggaggcaggacggctcacacagaaggaggagattcccgaagaggaactgaatgaggatgtggaggagatcgatcatgccgagcgggaactgcggcgaggccaaatactgtggtttcgcggtttgaacaggatccagacgcaaattcgagtcgtgaaggcatttcgaagctcattatacgagggactggagaagccagagtcacgaacgtccatccataacttcatggcacaccctgaattcagaattgaggattctcaaccgcatattccactgatcgatgatactgatcttgaggaagatgccgctctgaagcagaattccagtcctccatctagtctgaacaagaacaatagtgccattgacagcgggataaatctgactaccgacacctcgaagtcagccaccagttctagcccaggatccccaatccacagtctcgagacaagcctgtag

SEQ ID NO: 215173 - DNA, 1299 bp, synthetic construct
  misc_feature 1..1299: note = Description of Artificial Sequence: Synthetic coding sequence
  source 1..1299: mol_type = other DNA
atgaccgtggtgcaagcctatgttggggacgttcactacaaagaaattccagacccctctagtattaataccaaaacaatggagttgctgattaatgcaatcgcaattaacagcgcttataccacaaagatcctccctccagaaaaagagggtgccctaccccgtcaagtgggaaacgtgtatgacagtattagcaaattcctgcagttccagctcactgtcaatgtggtggcagtgattgtggcctttacgggagcatgtataacccaagatagccctttgaaagccgtccagatgttgtgggtgaacttgatcatggataccttcgcgagtctagctctggctaccgaaccgccaactgaaaccctgctcctacggaaaccttacggacgcaacaagccccttatatctaggaccatgatgaagaacattctgggccacgctgtgtaccaactcgctctgatattcacgctattgtttgtgggagagaagatgtttcagattgatagcgggcgtaacgcgcctctgcatagccccccaagcgaacattacaccattatcttcaataccttcgtcatgatgcagctatttaatgaaatcaacgctcgcaagatccacggcgagcgtaatgtcttcgacggcatttttcgcaatccaattttttgcaccatagtgcttgggacatttgcaattcagattgtgattgtccaatttggcggtaagccattttcctgctcaccactgcaactggatcaatggatgtggtgtattttcatcggactgggggagctcgtgtgggggcaagtcatcgctaccattccgacctcaaggcttaagtttctcaaagaagcaggtcgtctcactcagaaggaggagatccccgaggaggagctcaatgaagatgtagaagagatagaccacgccgagagagaactgcggagaggtcaaatcctttggtttcggggactcaacaggattcagacccagatcagggttgtgaaggcctttcggtctagcctgtacgagggacttgagaaacccgaaagcagaactagcattcacaattttatggcacatcccgaatttcgaattgaagactctcagccccatataccacttatagatgacaccgatctggaggaagatgcagcacttaagcagaattctagtccaccgtcatctttgaacaaaaataacagcgcgatcgattctgggatcaatcttactaccgacacatccaagagtgccacaagctcctccccaggatctcccattcacagcctggagacatcgctgtag

SEQ ID NO: 215174 - DNA, 3537 bp, synthetic construct
  misc_feature 1..3537: note = Description of Artificial Sequence: Synthetic coding sequence
  source 1..3537: mol_type = other DNA
atggaattgagaggtacagaggccgttgtcaaaattaaagaaacctacggagacacagaagcaatctgccgccgactgaaaacaagcccggtcgaaggcctgcccggtactgcaccagacctagagaaacgcaagcagatctttggacagaatttcattccacctaaaaaacccaagacattcctccaacttgtttgggaggctcttcaggacgtgactctaattatcctggagatcgctgccatcatatcgctgggcctgtcattctatcatccacccggtgagggtaatgaggggtgtgccaccgctcagggtggggctgaggacgaaggagaggcagaggccggttggatcgagggggcagccatactgctctcagttatatgtgtggtgttggtcacagcctttaatgactggtcgaaagagaaacaatttcgaggactgcagagcaggatagaacaagaacagaagttcacagtggtgcgcgctggccaagttgttcagatccccgtggctgagatcgtagtaggggatatagcccaggtgaagtacggcgacctgctccccgctgacggattattcatccagggcaacgatctcaaaatcgacgaatcgtcactcacaggggaaagtgatcaagtgcgaaaatctgtagacaaggaccctatgctgctctctggtactcatgtcatggagggctccgggagaatgctggtgaccgccgtcggagtgaactcccagacggggattatctttacactgttgggtgctggaggcgaggaagaagagaaaaaagacaaaaagggcaagatgcaggatgggaacgtggatgcgtcacaatcaaaagctaagcagcaggacggtgccgcagctatggagatgcagcctttaaaaagcgctgaagggggtgacgcggacgatcggaaaaaagcttcgatgcacaagaaggagaagtctgtgcttcagggcaaactgaccaagcttgcagtgcagatcggaaaagcagggcttgtgatgtccgctatcaccgtcattatcctggtcttatatttcactgtggacacattcgtagtgaacaaaaagccgtggttgcctgagtgcacgccggtctacgtccaatactttgtcaagttttttatcatcggtgtgactgtcctggttgtcgccgttcctgagggcctccccttggctgtgactattagcttggcttacagcgttaaaaagatgatgaaagataacaacctggtacgacacttagatgcatgtgaaacgatggggaacgccacagccatctgctctgataagacagggaccttgacaacaaatcggatgacggtcgtgcaggcctacgtaggggatgtgcattataaggagattcctgacccctcctcgatcaataccaagaccatggagttactgatcaatgctatcgctataaacagcgcgtataccaccaagattttgcccccagagaaggaaggtgcactcccccgacaagtgggtaataagacagagtgtggactactggggtttgtgttagacctgaaacaagattatgaaccagttagatcacaaatgcccgaggagaaactctataaggtctacacgttcaatagcgtaagaaaaagcatgagcaccgtaatcaagctcccagacgagtcttttcggatgtattcaaagggggctagcgagattgtgctcaaaaagtgctgcaaaattctgaacggcgctggcgagccccgagtgttccggccaagagatcgggatgagatggtgaagaaggtcatagaaccgatggcctgtgacggattacgtaccatttgcgtcgcttatcgggacttcccaagcagcccggaaccagactgggataacgaaaatgacatcctaaatgagctcacgtgtatctgtgtggtgggaatcgaagaccccgtgcgccctgaggtcccagaggctatcaggaaatgccagcgcgctgggatcaccgtgaggatggtgaccggcgataacatcaacaccgcgagggcaattgctattaagtgcggaataatacaccccggagaagattttctctgtctggaaggtaaagagtttaacaggcgcatccgtaatgagaagggggagattgagcaggagaggatcgataaaatttggccaaaattaagggtgctggccaggtctagccccacggataaacataccctcgttaagggtatcatcgactctacccatacagagcagcgacaggtggtggccgtgactggggacggcaccaacgatggcccagcgctgaagaaggccgatgtggggtttgccatgggaattgctggaacagatgtggcaaaagaagcgtctgatatcattttgaccgatgataacttctcttcaatcgtaaaggcagtgatgtggggaagaaatgtttatgactcgatctcaaagtttctccagttccagttgaccgtcaatgttgtcgcggtcatcgtcgctttcactggggcatgcatcacccaggacagtcccctaaaagcggtccagatgctctgggttaacctgatcatggatacgttcgctagcctcgcactagcaaccgagccacctactgagacattgttgctgcgtaaaccttacggacgaaataagcccctgataagtaggacaatgatgaaaaacatccttggccatgccgtatatcagctggccttaattttcaccttactgttcgttggagagaaaatgtttcagatcgattctggacgtaacgcaccccttcactctcctccaagcgagcactacacaatcattttcaataccttcgtgatgatgcaactgttcaatgaaatcaatgctaggaaaatccatggtgaacgcaatgtattcgacggtatctttcggaatccaatcttttgcaccatcgtgcttggcactttcgctatccaaattgtcattgtgcagttcgggggaaagcctttttcttgcagtccactacagctggaccagtggatgtggtgcatctttattggtctgggtgaattggtatggggccaggttattgccaccatacccactagtagattaaagttccttaaagaggccggacgccttacccagaaagaggagatcccagaggaggaactgaacgaggacgtggaagagattgaccacgcagaaagagaactgcgccgtggccagatcctttggttccggggattgaacagaatccagactcagattagggtggtgaaagccttcagaagctctctgtatgagggcctcgagaagcctgagtccaggactagtatccataatttcatggcacatccggaattcagaattgaggactcgcaaccccacattcctctcatagacgatacagatcttgaggaggacgcagcgctgaaacaaaactcatccccgccatccagtctcaataagaataactccgctatcgactccggtatcaatcttaccaccgacacctctaagtctgcgacctcaagttctcctggctcacctattcactccctagagacctccctttag

SEQ ID NO: 215175 - DNA, 3663 bp, synthetic construct
  misc_feature 1..3663: note = Description of Artificial Sequence: Synthetic coding sequence
  source 1..3663: mol_type = other DNA
atgggcgacatggccaactcgagtatcgagttccacccgaaaccccaacaacagcgcgatgtcccacaggccggagggtttggttgcaccctggccgagctgaggactttaatggagttacgaggagccgaggcattgcagaaaattgaagaagcctacggcgacgtctccggactgtgtcggcgtcttaagacaagcccgactgagggcctggcagataataccaacgacttggaaaagcgccgacagatctacggacaaaattttattcctcccaagcagcctaaaacattcctgcagctcgtgtgggaggccctgcaggacgtcaccctaatcatcttagaggtggcggcaattgtctctttaggcctgtccttttacgcccctcctggggaagaatccgaggcttgcgggaatgtaagcgggggagctgaagacgaaggcgaagccgaggccggttggatcgaaggcgctgcaatactgctctcagtgatctgcgttgtgcttgtcacagccttcaacgactggtcaaaggaaaagcagtttcgcggtctgcagagcagaatcgagcaagaacaaaaattcaccgtgatccggaatgggcaactcctccaggtacccgtcgctgccctggttgtgggcgatattgctcaggtgaagtacggtgatctccttcctgccgacggggtgctgatacaggccaacgatctgaagattgatgagagctcactcaccggtgagagtgaccatgtgcgcaaatctgccgataaagatccaatgctgctatccggaacccacgtcatggaagggagcgggaggatggttgttactgcagtgggagtcaatagtcagacaggtataattttcacattattgggggcaggcggagaagaggaggagaagaaggataagaaagggaagcagcaggacggagccatggagtctagccagacaaaggctaagaagcaggatggcgcagtggcaatggagatgcaacctctgaagagcgctgaagggggagagatggaggaacgtgagaaaaaaaaagccaatgcaccaaaaaaagaaaaatctgttctgcagggaaaactgacaaaactcgcggtgcagattgggaaggccggtctagtgatgtctgcaatcacggtgatcattcttgtcttatatttcgtgattgaaactttcgtcgtcgagggcaggacatggcttgctgagtgtacccccgtctacgttcagtacttcgttaaattcttcatcatcggggtgaccgtgttagtggttgctgtgcctgagggccttccccttgcagtgacaatcagcctggcttactccgtcaaaaagatgatgaaggacaacaatcttgtcaggcatctggatgcttgtgagacgatgggcaatgccacagccatctgctcagacaagacagggacactgacgactaaccggatgacagtggtgcagagctatctaggggatacacattacaaggagattccggcaccttcagcgctgacccccaaaatactggatctgctggtgcatgccatttccatcaattcggcctataccactaagatcctgccaccggaaaaagaaggtgcccttccaaggcaggtaggtaataagacagagtgtgctctgctgggcttcgttctcgacttgaagcgcgacttccagccagtgcgcgaacagatccctgaagacaagctgtacaaagtctatacttttaattcggttaggaagtctatgtcaacggtcatccgtatgcctgacggcggtttcaggctcttcagtaagggcgcttcggagatcctgctcaagaaatgcaccaacatacttaattcaaacggagaactgagaggttttaggccgagggatcgtgatgacatggtgcgaaaaatcatagaacccatggcctgtgacgggctgcgaaccatttgtattgcctatagagacttcagcgcaggccaagaaccggactgggataatgaaaacgaagtggtgggcgatcttacctgcattgcagttgtggggatcgaggatccagtccggcctgaggtgccagaagctatccgtaaatgtcagagggccggtatcacagttcgcatggtaacgggagacaatataaacaccgcaagagccatagccgcaaagtgtggaatcatacagccaggtgaagactttctgtgtttggagggcaaggagttcaatcggcgaatacgtaatgaaaagggcgagatcgaacaggagcggctggataaggtatggcccaagctccgcgtgttagcgaggagttcccctacagataaacacaccttggtgaagggcatcatagatagcacaacgggagagcaacggcaagtggtcgccgtgactggcgacggcaccaatgacggcccagcattaaagaaggccgacgtggggttcgctatgggaatcgccggaactgacgttgccaaggaggccagcgatataatactgactgatgacaattttactagcatcgttaaagccgtcatgtggggcagaaacgtatatgattccatctctaaatttctgcagtttcaattgaccgtgaacgtcgtggctgtgatcgtagcctttaccggcgcatgtatcacccaagattcccccttaaaagctgtgcagatgttgtgggtgaacttaattatggatacctttgcttctcttgccctggctaccgaaccacctacagagtccctgctgttaagaaaaccttacggacgtgacaaaccacttatcagtaggaccatgatgaagaacattttggggcacgctgtctatcagttagccatcattttcactctccttttcgtaggtgagctgtttttcgacatagatagtggaagaaatgcccctctccactctcccccatcagagcattacactatcatttttaatacctttgttatgatgcagctgttcaatgaaattaatgccagaaaaattcacggtgagcggaatgtgttcgacgggatcttctccaatcctatattctgtactatagtgctcggcacttttggcatacagattgttattgtccagttcggcggtaaaccattctcttgtagccctttaagcacagaacaatggttgtggtgtttatttgtgggggtgggtgagctggtgtggggacaggtgatagccactattcctacctctcaacttaaatgcctcaaagaggcgggtcacggcccaggaaaagacgagatgacagatgaggaactagcagagggtgaggaagagatcgaccacgccgagcgagaactgcgcagaggtcaaattctgtggttccgaggccttaatcggatacagactcagattagggtggtgaaagctttccggagctcactgtatgagggtctcgagaaacccgagtctaagacctctattcataattttatggccaccccagagtttctcatcaatgattatactcataacatcccacttattgacgatactgacgtagacgaaaacgaagaacgtctgcgggctcctccccctccctcaccaaaccagaataacaatgctattgatagcggtatttaccttaccacacacgttaccaagtccgctaccagctcggttttctcatcatcaccaggatctcctctgcactccgtggagacctcgctgtag

SEQ ID NO: 215176 - DNA, 3663 bp, synthetic construct
  misc_feature 1..3663: note = Description of Artificial Sequence: Synthetic coding sequence
  source 1..3663: mol_type = other DNA
atgggcgacatggctaatagtagcatagagtttcatcccaagccccagcaacagcgcgatgtcccacaggccggagggtttggttgcaccctggccgagcttcggaccctgatggagttgcggggtgcagaagcgttgcagaagatcgaagaggcctacggcgacgtgtccgggctttgtcggagacttaaaacatcacctaccgaaggcctggccgacaacaccaacgatctggagaaacggcgacaaatatacggtcaaaacttcatcccgcctaagcagcccaaaaccttcctccagttagtctgggaggccctacaggacgtgactctcattattttggaggtggcagccattgtctcccttggtttgtctttctatgcgcctcctggggaagagtcggaggcttgcggcaatgtctctgggggagcagaggatgagggcgaggcggaagctggatggatcgaaggtgcggcaatcctgcttagcgtaatctgcgtcgtgctcgtgacagcctttaacgattggagtaaggagaagcaatttcgaggtctgcaaagcaggatagagcaggaacaaaaatttacagtgataagaaacgggcaactccttcaggtcccggtggccgctttggtggttggggacattgctcaagtaaaatacggcgatctgctgcctgcagatggggtactcatacaggccaatgacctgaaaatcgatgagtcctccttgaccggcgagtcagaccacgttagaaagtctgccgacaaggatccaatgctcctctctggtactcatgtgatggagggatctggtcgtatggtagttaccgccgtcggggttaattctcaaaccggcatcattttcaccctgctgggcgcaggcggagaggaggaggaaaagaaggacaagaaggggaagcagcaggatggcgcaatggaaagctcacaaaccaaggctaagaaacaggacggtgccgtggccatggaaatgcaaccactcaagtccgccgagggcggagagatggaggagagagagaagaaaaaagccaatgcaccgaagaaagaaaaaagcgtacttcagggcaaactcaccaaactggccgtgcaaatcggaaaggctgggctagtgatgtccgcgattactgtgatcatcttggtgctgtatttcgtgatcgaaacatttgtggtggagggacgaacttggttagccgagtgtactccggtgtatgtccaatatttcgtcaagttcttcatcattggcgtgacagtgctggtcgttgccgttcccgaagggctccctctggctgtgaccatcagcctggcctattctgtgaaaaagatgatgaaggacaataaccttgtccgccaccttgacgcctgtgagacaatgggtaacgccaccgccatatgctcggacaagacaggaacattaaccactaataggatgactgtggtgcagtcctacctgggcgacacgcactataaggagatccccgctccctcagccctgaccccgaagatcttggatctcctcgtgcacgccatttctataaattcagcttacactaccaaaattcttcccccagaaaaagagggggcactgccacgacaggtgggcaacaagacggagtgcgccctgctcggattcgtgcttgacctgaaaagggactttcagcccgtcagagagcagattccggaggataagctgtacaaagtctacacgtttaactcagtgcgtaaaagcatgagcactgtgatcagaatgcccgatggtggctttcgcctattttcaaagggcgcatcagagatcctgctgaaaaaatgtacaaacatcctgaattctaacggtgaactgcggggatttaggccacgcgatcgcgatgacatggtgcgcaaaatcattgagccgatggcttgtgatggattgaggaccatttgcatcgcgtacagggacttctctgcgggtcaagaaccagactgggacaatgagaatgaggttgttggagacttgacatgcattgccgttgtaggtatcgaggatcccgtccggcctgaggtccccgaggcgatcagaaagtgtcagcgcgctgggatcaccgtgaggatggttaccggcgacaacattaatactgccagggccattgccgcaaagtgtggaatcatccaaccgggagaggactttctctgtttagagggaaaagaatttaatcggcgtatcaggaacgaaaagggcgaaatcgagcaggaaaggctggacaaagtatggcccaaacttcgcgtgcttgctagaagttccccgacggataagcacactctggttaaaggcattatcgactctaccactggtgagcagcgccaagtagtggcagtaactggtgacggcacgaacgatggacctgccttgaagaaggctgacgtcggttttgcgatgggaatcgcaggaactgatgtcgccaaagaagcaagcgacattattcttaccgacgataatttcacaagtatcgtcaaggctgtaatgtggggtcgcaatgtctacgacagcatctcgaaatttttgcagtttcagctaacagtgaacgtggtagcggttattgtcgcgttcaccggggcatgtatcacccaggattcccctctaaaagccgtgcagatgctgtgggtgaacctgataatggacacgttcgctagtctggctctggcaacagagccacctaccgagtctcttctgctcagaaagccttacggccgtgacaaacccctgattagcagaactatgatgaagaacatcctaggacatgcagtgtaccaactcgctattattttcaccctcctattcgtgggcgagctcttttttgacatagatagtgggcgtaacgcccctctccactccccacctagcgaacactatactattatcttcaataccttcgtgatgatgcagctgttcaatgaaattaatgccaggaaaatccatggagagcggaacgtgtttgacgggatattcagtaatcccatcttttgtacaattgttctaggcaccttcggaatccagatcgtcattgtgcaattcgggggaaagccgttcagttgctcccccctgagcaccgagcaatggctgtggtgcttgttcgtgggggtgggggaacttgtgtgggggcaggttatcgccacaattcctactagtcaactgaaatgtcttaaagaagccggtcatggtcccggtaaggacgagatgacggacgaggagctggccgagggcgaggaggagatcgaccatgctgagagggagctcaggcggggacagatattatggttccggggactgaaccggattcagacgcagatccgagttgtgaaggctttccggtctagtctgtacgaggggctggaaaaacccgagagcaaaaccagcattcataattttatggccacaccggaatttctgatcaatgactatactcacaatattccgttgattgatgataccgacgttgacgaaaatgaggaacgcctgagggcccctccaccgccaagtcctaaccagaataacaatgctattgacagcggcatctacctgacaacacatgtgacaaagtcagccacatcttccgtattttcctctagtcctgggagtcctctacacagtgtggagacctcactctag

SEQ ID NO: 215177 - DNA, 3522 bp, synthetic construct
  misc_feature 1..3522: note = Description of Artificial Sequence: Synthetic coding sequence
  source 1..3522: mol_type = other DNA
atgggagacatggctaactcatcaatcgagtttcaccccaagccacagcagcagcgagacgtccctcaggcagggggatttgggtgcaccctggcggagttgcgaaccctcatggagctgcgtggggcagaggctctgcaaaagattgaagaggcctacggcgatgttagcgggttgtgcaggcgattaaagacgagcccgacggaggggcttgccgataatacaaacgatcttgaaaagcgaaggcagatttatggtcagaactttattccacctaaacaaccaaaaacattcctccagctggtgtgggaggctcttcaggatgtgactctgatcattcttgaagtcgctgccatcgtctccttgggtttgtctttctatgcccctcctggggaagaaagcgaggcttgcggaaacgtgagcggaggcgctgaggacgagggcgaggcggaggcaggttggattgagggcgctgcaatattgctcagtgtaatttgcgtcgtacttgtgaccgcatttaacgattggtctaaggagaaacagttccgcggacttcaatcaaggattgagcaggaacagaagttcactgtgatcaggaacggccaactgctgcaggttccagtagcagccctggtcgtcggcgacatcgctcaggtgaagtatggagacctgttgcccgctgacggggtgttgattcaggccaatgatctgaaaattgacgaatcctccctgactggagaatccgaccacgtcaggaagtcagcagataaggatcctatgttactgtccggcactcatgtgatggagggcagtggccgtatggtggtcaccgcggtgggggtaaattctcagaccggtattatatttacactcttaggggctggaggcgaggaggaggaaaaaaaggacaagaaagggaagcagcaagatggggcaatggagagcagccaaactaaggctaagaaacaggacggtgcggtcgccatggaaatgcagccactcaaaagcgcagagggtggagagatggaagaaagagagaaaaagaaagctaatgccccaaaaaaagagaaatcggtgctgcagggcaaactgacaaagctggcggttcagattggcaaagcaggcctcgtaatgtccgcaatcaccgtcatcattttagtcctgtactttgtcatcgagacatttgtcgttgaggggcgaacttggctggctgagtgcacccctgtgtatgtccagtactttgtcaaattctttatcataggcgttactgttttggtcgtagcagtaccagagggattacctctggcagtgaccattagcctggcatattctgtcaagaaaatgatgaaggataacaacctagtaagacacttggacgcttgcgagactatgggtaacgcaaccgccatttgctccgacaagacaggcacgcttacaactaatagaatgaccgtcgtgcaatcctatttgggcgacacccactacaaggagattcccgctccatccgccctcacccccaagatcctcgacttactggtccacgctataagcataaattccgcctacactaccaaaatccttccgcctgaaaaagaaggggctctccccaggcaggtgggcaacaagactgaatgcgccctgctaggcttcgtactggatctgaaaagggattttcagcccgtgcgcgagcagattcctgaggacaagctctacaaggtgtacaccttcaacagcgtccgaaagtccatgtctacggtaatccgcatgcctgatggcggatttcgactgttctctaaaggcgcatcggaaatactactgaagaagtgtaccaatatcctcaactccaatggtgaattaagaggtttccggcctcgggatcgggatgacatggtccgcaagattatcgaacccatggcatgcgacggcttgcgcacaatttgcatagcctaccgcgatttttcagctggtcaagaacctgactgggataacgaaaacgaagtcgtcggagacttgacttgtatcgcggtagttggcattgaagatccggtccgcccagaagtccccgaagctatcaggaagtgccagcgcgctggaatcaccgtgcggatggtcacgggagataacattaatactgccagagccatcgcagctaaatgcgggattattcaacctggcgaggacttcctgtgtctcgagggcaaggagttcaataggcgtatccggaatgagaagggtgaaatagagcaggagcggctcgataaggtgtggcctaaactccgggttctggctaggagttctcctaccgacaagcatactctcgtgaaggggatcattgactctaccactggcgagcagcgccaggtggtggcagtaacaggggacggtaccaacgatggacccgcactgaaaaaggccgatgttgggtttgccatgggaatcgcaggcaccgacgttgctaaggaagcatcggatattatcctcaccgatgacaattttacgtctatcgtgaaagcagtcatgtggggtcgcaacgtctacgactcaatcagcaaatttctccagtttcagttgactgtcaacgttgtggccgtgatcgtggcttttactggcgcttgcattacacaggatagcccactaaaggcagtccagatgctttgggttaacctaattatggacaccttcgcatccctggcactcgccactgagccaccgaccgagtctttattattgcgtaagccttatgggcgagataagccactgatctccaggacaatgatgaaaaacattcttggccacgctgtttatcagcttgccattattttcaccttgctattcgtgggggagctgttctttgatattgactcagggagaaatgcccctctgcattcccctccatccgaacactataccattatttttaacaccttcgtgatgatgcagctcttcaatgaaattaatgcgaggaagatacacggtgaaagaaacgtgttcgacggaattttcagtaatcccattttttgtaccatcgtgcttgggacgtttggcatccagatcgtgatcgttcagttcggcggtaaacctttcagctgcagccctctgtctaccgagcaatggctctggtgtctctttgtgggagttggagagctggtgtggggtcaggtgatagcaaccatccctacaagccaactaaagtgtctaaaagaggctggccacggcccaggtaaagacgagatgactgacgaggaactcgccgagggagaggaggaaattgatcacgcagagagagaactacggaggggacagattctgtggttcaggggcctgaataggattcagacgcaaatggaagtggtctccaccttcaaaagatcgggcagcgtccagggggcagtgcgtagaagatctagcgtactgagccagttgcatgatgtgaccaacctgtctacgcccacccacgctatcctcagcgccgctaatcccacgagcgccgcaggaaatcccggaggcgaatccgtaccttag

SEQ ID NO: 215178 - DNA, 3480 bp, synthetic construct
  misc_feature 1..3480: note = Description of Artificial Sequence: Synthetic coding sequence
  source 1..3480: mol_type = other DNA
atgggggatatggccaacagctcaatcgaatttcaccctaaacctcagcaacagagagatgtgcctcaagccggtggattcgggtgcacactcgctgaactgcgaactctgatggaactaaggggagctgaagctttgcagaaaatcgaagaagcatacggtgacgtgtctggtttgtgtcggagactgaagactagtccaaccgagggtctcgccgacaacacaaatgacttagaaaagagacggcaaatctacggtcagaactttattcctcccaagcaacctaaaactttcttgcaactcgtgtgggaggctctgcaggatgtgacgttgatcattctggaggtcgcagccattgtgagcctggggttaagtttctatgcccctcctggcgaagagtctgaagcttgcggtaacgtctccggtggcgctgaagacgagggcgaggcagaggctggatggattgagggcgctgccatcctgttatcagttatttgtgtggtactcgtcacagcatttaacgactggagcaaggagaagcagttccgtggattgcagagtcgcatcgagcaagagcagaagttcaccgtcataaggaacggacaactcctgcaggtgcccgtggcagcactggtggttggtgacattgcacaggttaagtacggtgacctgcttccggctgatggcgtcttaatccaagcaaacgatctgaagattgatgagtcgagtttgacaggagagagtgaccacgtgcgcaaaagcgccgataaagatcctatgctcctctctggaacccacgtgatggaaggctcaggcaggatggtcgttaccgctgttggcgtcaactcacagacaggaattattttcaccttactgggcgcagggggtgaggaggaggagaagaaggataaaaaggcaaagaagcaggacggtgctgtcgcaatggaaatgcagcctctgaaatcagccgaaggaggggaaatggaagagcgggagaagaaaaaagctaacgcacccaaaaaggaaaaatccgtccttcagggaaagcttactaagctggccgtacaaattggcaaggccggattggtcatgagtgcaattacagtgattatcctggtgctgtactttgtcatcgaaacatttgttgttgaagggaggacatggctcgctgaatgtacgccagtgtatgtgcagtacttcgtgaagttcttcattatcggggtcaccgtcctagtcgtggctgtgccagaagggctgcctctggctgtcactatctccttggcctattctgtgaaaaagatgatgaaagacaataacctggtaaggcatcttgacgcatgtgaaactatgggcaacgcgacagcaatctgttccgataagacaggcacactgactacgaacagaatgacagtcgtgcagtcatacctgggcgacacacactataaagagattccagccccatctgcccttacgcccaaaatcttggatctcctggtccacgccattagtataaatagcgcctacactaccaagatccttccgcctgaaaaggaaggcgcactaccccgtcaggttgggaacaaaaccgaatgtgccctgctggggtttgttttggacttgaaaagagactttcagcctgttcgagaacaaatcccagaagacaagctgtacaaagtgtataccttcaactctgtgcgcaagtccatgtcaaccgttatccgcatgccagacggcggattcagactgttcagcaagggggcatctgagattttgcttaagaagtgtacaaacatcttaaactcaaacggggagctgcgtggattcagaccccgagatagagatgacatggtaaggaaaattattgagccgatggcctgtgacgggttacgaacgatctgtatagcctaccgggatttttcagcgggacaggagcctgattgggacaatgaaaacgaggtggtcggggacctgacatgcattgcggtggtgggcatcgaagaccccgttcggcctgaggtaccggaggctatccggaaatgtcagagggcaggtattacggtcagaatggtaacaggagataatatcaacactgcacgcgctattgctgccaagtgtggtattatccagcctggcgaggactttctctgtctagagggcaaagagttcaaccgccgaatccgcaacgagaagggggaaattgagcaggaacgcttggacaaagtgtggcctaaactgagggtactggccaggagcagtcctactgacaagcataccctagtgaagggcataattgattctactacaggagaacaacgtcaagtggtggctgtgaccggggatgggaccaacgatggccctgctctgaagaaggctgatgtgggatttgccatgggcattgccggaactgatgtagcaaaggaagccagtgacattattctcacagatgacaacttcacttcaattgtgaaagctgtaatgtggggcaggaacgtgtatgactctattagtaaatttctccagtttcagctaactgtcaatgtggtagccgtgatcgtggccttcacaggcgcatgtatcacccaggattccccgcttaaggcggtgcagatgctgtgggtgaacctcatcatggacacctttgcctccctggcactcgcaacagagccgcctacggagtcgttactgcttaggaaaccatacggcagagacaagccattgatttctaggaccatgatgaagaatatcttgggacacgctgtttaccaattagcgattattttcacactcttgttcgtgggagaactgttcttcgacatagatagcggacgcaacgcccctctgcactctcctccatcagagcattatacaatcatcttcaacacatttgtgatgatgcaactgttcaacgaaatcaacgcgcgaaagattcatggtgaacggaatgtgttcgatggcattttttctaatcccatcttctgtaccatagtgctgggcacctttggcatccagattgtcattgtgcagttcggaggcaaacccttctcttgcagccctttgtctaccgaacagtggttgtggtgtctgtttgtgggggtgggcgaactggtatgggggcaagtgattgctactatcccaacctcgcagttaaagtgcctgaaggaagctggccacggtccgggaaaggatgagatgactgacgaggaactcgcagagggggaagaagagatcgaccatgcagagagggaattgcgcagagggcagatattgtggttccgcggactcaatcggatccaaacccagatggaggtagtgtcaacgtttaagaggtcagggagcgtacagggggctgtgcggagacggagcagtgtccttagtcaactgcacgatgtcactaacctgagtacccctacccacgcaattttatcagcggcaaaccctacttccgcagcagggaaccccggtggggaatccgtgccttag

SEQ ID NO: 215179 - DNA, 3480 bp, synthetic construct
  misc_feature 1..3480: note = Description of Artificial Sequence: Synthetic coding sequence
  source 1..3480: mol_type = other DNA
atgggagacatggcaaattcctctatcgagtttcatccgaaacctcagcagcagcgcgatgtgccacaagctgggggatttggttgtaccctggccgagcttcggacattgatggaactgcgcggagccgaagcgcttcaaaaaattgaggaagcctacggagatgtttccggactatgccgtaggctaaaaactagtccgacagaggggttggctgataatacaaacgacctggaaaagcgacgacaaatttacggccaaaacttcatacctccgaaacagcccaagacctttctgcagctggtgtgggaagccctacaggacgtaacattaatcatccttgaagtggcagccattgtctcacttggactgtccttttatgccccacccggagaggagtctgaggcgtgcggcaatgtctctggaggagccgaagatgagggggaagctgaggccggttggatcgagggcgcagcaatcctgctgagcgtgatctgcgtagtgctagtgaccgctttcaacgactggtctaaagagaaacaatttcgaggcctgcagagccgcattgagcaggagcagaaattcaccgtgattcgcaacggacaactgctacaggtgccagtcgcagcattagttgtgggcgacatcgcacaggtgaaatacggcgacctgctgcccgcagacggggtgttaattcaggcgaacgatctcaagatcgacgaaagctctctcaccggcgagtctgatcacgtcagaaagtctgccgataaagaccctatgttgctctcgggaactcatgttatggaagggtcaggacggatggttgttactgcggtcggcgtcaactcacagactggaataatatttactctcttgggcgctggaggggaggaagaagaaaagaaggacaagaaggctaagaagcaagatggcgcagttgctatggaaatgcagccgctgaaaagtgcagaaggtggggagatggaagagagggagaagaagaaagctaacgctcctaagaaagaaaaaagcgttctgcaaggtaagttaaccaagctcgccgtgcagattggaaaagcgggtttagtcatgtcagccattaccgtgataatattagtcctctatttcgtcatcgagacatttgtggtggaagggcgtacttggctggctgaatgcacacccgtctacgttcagtatttcgtcaaattctttattatcggagtcactgtgctcgtagtggctgtgcccgagggtttgccactggcagtcaccatctccttggcatatagtgtgaagaagatgatgaaggacaacaacctggtgagacatctggacgcgtgtgagactatgggtaacgccactgcaatctgctcagacaaaacaggtactctgacgacaaataggatgaccgtggtgcagtcctaccttggcgacacccattataaagaaattccagctcccagtgcgctgacacctaagattttggacctgctggtgcacgccatcagcattaatagcgcctataccactaagatcttaccacctgagaaagaaggagccctgccgcgtcaggtcggaaacaaaaccgagtgtgctctgttaggcttcgtgttagacctgaagcgggatttccagccagttcgagaacaaattcccgaagataagctctataaagtctacacattcaatagtgttagaaaatcgatgtcgaccgtcattcgaatgcccgacggcggtttcagactcttcagcaagggcgctagtgaaatcttgttaaaaaagtgtaccaacattctcaactccaacggtgaactgcgcggattcaggcctagggacagggatgacatggtcaggaaaattattgaaccaatggcgtgtgatggcctgaggactatttgcattgcttatagagattttagtgctggacaggagccagactgggataacgagaatgaagtggtaggtgacttgacgtgcatagcagtggtcggaatcgaggatcccgtgagacccgaggtccccgaagccattcgaaagtgccagcgagctggcatcacagtgcgcatggttaccggcgataacataaacactgcaagggccatagccgctaagtgtggcattatccagcccggagaggatttcctgtgccttgaaggcaaagagttcaaccgaagaatcaggaacgaaaaaggagaaatcgagcaggagcggctggacaaggtgtggccgaaactcagggttttagcaaggtccagcccaaccgacaagcataccttagtcaaaggcatcatcgactccacaacgggagaacagcgccaggtggtggctgtgaccggcgatggcaccaacgacggaccagcattaaaaaaggcagatgtgggctttgccatgggaatagccggaaccgatgtggccaaggaggccagtgacattattttgacagacgacaacttcacatccatcgtgaaggcagtcatgtggggaagaaacgtgtacgactcaatttccaagttcttgcaatttcagcttactgtcaacgtcgtggcagtcattgtcgcatttacgggagcttgcatcacccaagattctcctttaaaggccgtccaaatgctttgggtaaatctcattatggatactttcgcaagtttggccctggcaacagagcctcctaccgagagtttgcttctcaggaaaccatacggacgcgataaaccgctgataagccgaaccatgatgaaaaatattctggggcatgccgtctaccagctcgccatcatcttcacccttctgtttgtgggcgagctcttctttgatatcgactcaggcaggaacgctccactgcactctccgcctagcgaacactacaccatcatatttaatacgtttgtgatgatgcagctatttaacgagattaatgccaggaagatacatggagagcggaatgtgttcgatggtatcttcagcaaccccattttttgcactatagtactgggcaccttcggtatacagatcgtgatcgtgcagtttggcggtaagccttttagttgctctccgttatccactgagcagtggctgtggtgcctgttcgtcggagttggtgagcttgtgtggggccaggtgatagctaccatacctacatcccaacttaagtgtctcaaggaagctggccacggtccaggcaaagatgagatgacggatgaggagttggcagagggtgaagaggaaatcgaccacgcggaacgggaattgagaagaggtcagatcttatggtttagaggtttgaacagaattcagacacagatggaagtagtctccacattcaagagaagcggtagcgttcagggagccgtccggagaaggtcctctgtgctctctcaattacacgatgtgacaaatctgtcgacccccacacacgccattctgagcgctgctaatccaacgagcgcagccggaaatcctgggggagagagcgtcccctag

SEQ ID NO: 215180 - DNA, 3465 bp, synthetic construct
  misc_feature 1..3465: note = Description of Artificial Sequence: Synthetic coding sequence
  source 1..3465: mol_type = other DNA
atgggagatatggccaattcctccattgagtttcacccaaaaccgcagcagcagagagacgtgccccaggcgggaggcttcggatgtactctggccgagttacgcacactgatggaactgagaggcgcagaggcgctccagaagatcgaggaagcctacggagacgtgagcggcttgtgccggagactgaaaacctctccaactgaaggacttgccgacaataccaatgacctcgagaagaggaggcagatctatgggcagaactttataccacccaagcaacccaagaccttcctccagttggtgtgggaggcccttcaggacgttacactgatcatcctggaggtggccgctatcgtgtctctggggttatctttctacgcaccgcctggcgaggaatctgaagcttgtggcaacgtcagcggaggggctgaggacgagggggaggcagaagcaggctggatcgagggtgccgcaatcctcttgtcagtcatttgcgtggttctggtgaccgcatttaatgactggtcaaaggagaaacaatttcggggtttgcaatcacggatcgaacaagagcagaaatttactgtaattaggaatggccagctgctgcaagtccctgtggctgcactggtcgtcggtgacatcgcgcaagtgaaatacggagatctgctgcccgctgatggtgtgctgattcaggcaaatgacctaaaaatcgacgagtcaagcctgacaggagaaagcgaccacgtgagaaaatccgcagataaggacccaatgctgctctccggtacccatgtgatggagggcagtgggagaatggttgtcacagctgttggtgtgaattcccagaccgggatcatcttcaccctgctgggcgcaggtggggaggaagaggaaaagaaagacaagaaagctaaaaagcaggacggcgcagtggctatggagatgcaacctctaaaatccgccgaaggcggagaaatggaggagcgtgaaaaaaaaaaggcgaatgctccaaagaaagagaagtcggtacttcaggggaagttgaccaagctcgctgtccagataggtaaggccggacttgtgatgtctgctatcactgtgattattcttgtgctctacttcgtaatagagaccttcgtagtggaaggtaggacatggcttgcagagtgtacccccgtctacgtgcagtatttcgtgaaattcttcatcattggagtgacagtgctggtggtggccgtgccggaggggttgcctctggccgtgactatcagtctcgcttacagcgtgaaaaagatgatgaaagataataatttagtgagacatctagatgcctgtgaaactatgggtaatgccaccgctatatgctccgacaagactgggacgcttacaacaaacagaatgactgtagtccagagttacctgggggatacacactacaaagagattcccgcaccaagcgcccttactcctaagatcttggatttgcttgtccacgcgatctcaataaactcagcctacacaaccaagatactcccacccgagaaggagggagccctgccacgtcaggttggaaacaagaccgaatgtgcactactgggctttgtgctagacctgaagcgagatttccagccagttagagaacagatccctgaggacaagctatataaggtctatacttttaactcagtgaggaagtccatgtccacagtcatccggatgccagatgggggttttaggctgttcagcaagggagccagcgaaatactcctgaagaagtgcacaaatattctgaattccaatggtgaacttcggggattccgccctcgagaccgggatgacatggtgaggaaaatcattgagcccatggcgtgcgatggacttcgaacaatatgtatcgcctatcgagatttttccgctggccaagagccagactgggacaatgaaaacgaggtagtcggagacctcacgtgtattgcggttgtgggtatcgaagacccagtaagacccgaggtacccgaagcaatccgcaaatgtcagcgagctgggataacggtgcgaatggtgaccggtgacaatattaacacagcacgggcaatcgcggctaagtgtggaattattcagcctggagaagatttcctgtgcttggaaggcaaagagtttaatcgacgcatccgcaatgagaagggcgaaatcgaacaagagagactggacaaggtgtggcccaagcttcgcgtgctggcccgttcatccccgaccgataagcacacgctggtcaaaggcattattgacagtactacaggcgaacagcggcaggtcgtagccgtgacgggcgacgggaccaatgacgggccagctttgaagaaggccgacgttgggtttgccatgggcattgctgggacagatgtagcaaaggaagctagtgatattatactcacagatgataattttactagtattgtcaaggcagtgatgtggggtcgtaacgtgtacgactctatcagcaaatttctacagttccaactgacagtcaacgtcgtggccgtgattgtagctttcactggcgcttgcattacccaggatagccccctgaaagcagtccagatgttgtgggttaatctcatcatggatacattcgcttctcttgcactggctactgagcctcccaccgaatccctgttgcttcgcaaaccctatggacgcgacaagccacttatcagccgcacaatgatgaagaacattctaggtcatgctgtgtaccagctggcaattatattcactctgctcttcgtgggcgagttatttttcgacatcgatagcggcagaaatgccccactccactccccaccctctgagcactacacaataatcttcaacacgttcgtgatgatgcaactctttaacgagattaacgcacgcaaaatacatggtgagaggaacgtgttcgacggcatcttttctaaccccatcttttgtaccatcgtgctcggcacattcggaattcagattgtaatcgtgcaattcggtgggaaaccattcagttgttctccgcttagcactgagcagtggctgtggtgccttttcgttggtgtcggtgagctggtttggggccaggtgatagcaactattccaacctcccagctgaagtgcctcaaagaagcaggccacggcccagggaaggatgaaatgacggacgaagaactggcagaaggcgaggaggagatcgaccacgctgagagggagctgagaaggggtcaaatcttgtggttccgaggattaaatcgaatccagacacagatggaggtggtttctacttttaagcggagtgggtccgtccagggagcagtacggagacggagttccgtgctatcgcagttgcacgatgttacgaacctttctacacctactcacgccatcctgtctgctgccaatcccaccagcgccgctggcagcgagtcttag

SEQ ID NO: 215181 - DNA, 3513 bp, synthetic construct
  misc_feature 1..3513: note = Description of Artificial Sequence: Synthetic coding sequence
  source 1..3513: mol_type = other DNA
atgactaacccatcggatagagtcctccccgctaattccatggctgagtccagagagggggattttggttgcaccgtgatggaactcagaaagctcatggagctaaggagcagagatgccttgacacaaattaatgtgcactacggcggtgtgcagaatctatgctcccgtctcaagacgagccctgtcgaagggctgtctggcaatcctgcagacttggaaaagaggcgccaggtattcggacacaatgtgattcccccaaagaagcccaaaacttttctagagctggtctgggaggcactgcaagacgtcacattaattattctagaaattgctgccattatctcactggtcctgtctttttataggccagccggtgaagagaacgaactgtgtgggcaggttgccactactcccgaggacgaaaatgaggcccaagcaggttggatcgagggagcagccatcttatttagcgtcattatcgttgtcttggtgacagctttcaacgattggtccaaggagaaacagttcaggggactgcagtgccggatagaacaagagcaaaagttctctattattcggaacggccagctgatccagctgcctgtggccgaaattgtggtcggcgatatcgctcaggttaagtacggagaccttctccccgctgatggaatactgatccagggcaacgaccttaagatagatgagtcatcactaaccggagaaagtgatcacgttaagaaaagccttgacaaagatcctatgttgctgtctggaactcatgtcatggagggctccggccgaatggtagtgactgccgtgggagtgaactcccagacaggcatcatcctgactctactgggtgtgaacgaggatgacgaaggcgaaaagaagaaaaaggggaagaagcagggggttcccgagaataggaataaggcaaaaacgcaagacggtgttgcgctggagattcaacctctcaattctcaggaaggcattgacaatgaggagaaagataaaaaggccgtgaaagtccctaaaaaagagaagtccgtgttgcagggaaagctgacacgactggcagtccagattggcaaagccggtttgttaatgtccgctcttactgtgttcattctgatcttgtacttcgtcatcgataatttcgtgattaatcgacgcccttggctgcctgaatgcacccctatctatatccagtattttgtaaagttttttattataggaattaccgtgctggtcgtagctgtccccgaaggccttcccctggcagtcaccatctcactcgcctactccgtaaaaaaaatgatgaaagacaacaacctggtgagacaccttgatgcttgtgaaacaatgggaaacgcaaccgccatttgctctgacaagactggtacattgaccatgaacagaatgaccgtggttcaggcctacatcggcggtattcattacagacagatcccctcccccgatgtttttctccccaaggtgttggacctgatagtgaacggaatctctatcaacagcgcctatacctctaaaatactgccgccagagaaggaagggggactgcccagacaggtgggaaataaaacagagtgcgccctgctgggctttgtgaccgacctgaagcaggattaccaggccgtgcggaacgaagttcccgaggaaaaactgtacaaagtgtacacattcaacagtgtgcgcaagtcgatgtccactgtgatcagaaatccaaatgggggattcagaatgtactcaaaaggtgccagcgaaataatactgcggaagtgcaacagaattctggaccgcaaaggggaagccgtgcccttcaagaataaagacagggacgatatggtgcgcactgttatcgaaccaatggcatgcgacggcctacgcactatatgcatagcctaccgggacttcgacgataccgagccatcttgggacaatgaaaatgaaatcctcacggagctgacgtgcattgccgtcgtgggcatcgaggatcccgttcgaccggaggtccctgacgccatcgctaagtgtaagcaggctggtattaccgtgagaatggtgacaggcgataatatcaatacggccagggccattgccactaaatgcggcattcttacccccggagacgattttctgtgtctcgagggtaaagagttcaaccgactgatcagaaacgagaagggcgaggtggagcaggagaaactggacaagatctggccaaaactcagagtgttggctagaagttctccaaccgataaacatactctggttaagggcattattgacagtacagtaggggagcaccggcaagttgtcgccgtaacaggcgatggtacaaacgacggccctgccctgaaaaaggcagacgttggcttcgctatggggatcgccggaactgacgtggcaaaggaagcatccgacatcattctgaccgacgataacttcacttcaattgtcaaggccgtgatgtgggggagaaacgtgtatgactctatcagtaaatttctccagtttcagctgactgtgaacgtcgtggctgtgatcgtcgcatttaccggtgcctgtatcacacaagactcccccctgaaggctgttcagatgctctgggtgaatctgattatggacacctttgcctccctggccctggcaactgagcccccaacagagagcctgctcaagcgacgcccttatgggcgaaataagccactgatctctaggactatgatgaagaatattctcgggcatgcattttaccagctcatcgttatttttatcctggtgtttgcaggcgagaaattcttcgacattgattccggcaggaaggcaccactgcactctcccccatcacagcactacactattgtcttcaatacatttgtgctaatgcagctttttaatgagattaatagtaggaaaatccacggtgagaagaatgtcttctccggcatataccgcaacataattttctgctctgtggtgctggggacgtttatttgtcagatctttattgtggaatttgggggtaaacctttctcctgtacttcactgagtctgagccagtggctctggtgcctgtttattggcatcggagaattgctctgggggcagttcatctcagcgattccaaccagaagcctcaaattcctgaaagaagccggtcatggcactacaaaggaagaaattactaaggatgctgagggcctggatgagatcgaccatgcagaaatggagctgagacggggacagattttgtggttccgcggactaaaccgaattcagacccagatcgatgtaatcaacacatttcagaccggcgcttctttcaagggcgtgttgcggcgtcaaaatatgggccagcacctggatgtcaaactcgtcccatcctccagttacgtggcggttgcccctgtgaaatctagccctactacttcagtgccagccgtttcgtcgcctcccatgggcaaccaaagcggacaaagtgtgccatag

SEQ ID NO: 215182 - DNA, 390 bp, synthetic construct
  misc_feature 1..390: note = Description of Artificial Sequence: Synthetic coding sequence
  source 1..390: mol_type = other DNA
tgaattggggagctcctctgggggcagttcatatcagccattcccacacgctctctgaagtttctcaaagaggccggacacggcaccacgaaggaggaaattaccaaggacgctgagggactggatgagattgatcatgcggaaatggaactgcgcagggggcagatcctgtggttcagaggtctgaatagaattcaaactcagatcgatgtaatcaatacattccagactggagcctcattcaaaggcgttctacgcagacagaacatgggccagcacctggatgtcaaattggtcccttcgtcgtcttatgtggccgttgctcccgtgaaatcctcaccaacaactagcgttcccgcagtgtcctctccacctatgggctccgaatag

SEQ ID NO: 215183 - DNA, 3618 bp, synthetic construct
  misc_feature 1..3618: note = Description of Artificial Sequence: Synthetic coding sequence
  source 1..3618: mol_type = other DNA
atgaccaatccctctgacagggtactgcccgcaaacagcatggccgaatcgcgggaaggcgactttggatgtactgtcatggagctcaggaaactcatggaactgcgctccagggacgccctcacccagattaacgtgcactacgggggagtccagaacctttgcagccgtctgaagaccagccccgtagaagggctatcagggaacccagcagatttagagaagcggaggcaagtttttgggcataacgtgatcccaccaaagaaaccaaagacgttcctggagttggtgtgggaggccctacaggacgtcacgctcataatcttagagattgccgctatcatcagcctcgtcctctccttctatagacccgctggggaggaaaatgagctctgcgggcaggtggctaccacaccagaagacgagaacgaggcccaagctggctggattgagggtgccgctatcttgttttccgttataattgtcgttttggtgaccgccttcaacgactggagcaaagagaagcagtttcggggactccagtgtaggattgagcaggagcaaaagttttcaattatccggaatgggcagttgattcagctgcccgtggctgaaatcgtcgttggcgatatcgcccaggtgaagtatggagatctgcttcccgctgatggaatcctgatccaggggaacgatcttaaaattgacgagagtagcctgaccggagagagcgatcatgttaaaaaatccctagataaggatcctatgctattgtcgggaacgcacgtgatggaggggagcggcagaatggtggtgacagcagtgggtgtcaactcccagaccgggatcatactcaccctgctaggagttaatgaggatgacgaaggtgaaaagaagaagaagggtaagaaacagggggtgcctgagaataggaacaaagccaaaacacaggatggagtcgctctggaaatccagccccttaatagccaggaggggattgataacgaggaaaaagacaagaaggcagtgaaagtcccaaagaaggaaaagtcagtcctacaagggaagctgacccgcctggccgtacagatcgggaaggccggacttttaatgtcagcactgactgtcttcattctgattctgtactttgttatagataacttcgtcatcaaccggagaccctggctgccagagtgcacgcccatctacatccagtatttcgtgaaatttttcattattggaattactgtcctggttgtggccgtgccagagggcctccctttggccgtgaccatctccctggcttattctgtaaagaagatgatgaaggacaacaacctggtgcggcacctggacgcttgtgaaactatgggcaatgcaactgcaatttgttctgataagacgggaaccttaactatgaaccgaatgacagtagtgcaagcctatataggcggaattcactaccgacagatccccagtcccgacgtctttctccccaaagtgcttgacctcattgtcaatggaatctcaatcaactcagcttatacatctaaaatcctgccacccgaaaaagaaggcggactgcctagacaggtaggtaataagactgaatgcgcgctcctgggttttgttacggatttaaaacaagactatcaggctgttcgcaacgaggtgcccgaggagaagctgtataaggtttacaccttcaacagtgtacgtaaaagtatgagcacagtgatccgcaaccccaatggcggatttcggatgtattccaaaggcgctagtgaaattatcctccgtaagtgtaatcgcattctggatcgtaagggagaagccgtcccttttaagaacaaagaccgcgacgacatggttagaacagtgattgaaccaatggcctgcgatgggctccgcaccatttgcattgcctatagagactttgacgacactgaaccatcctgggacaacgaaaacgagatcctaaccgagttgacatgcattgcggtggtgggtatagaagacccagtaaggccagaagtgcctgacgccattgccaagtgcaaacaagctggcattaccgtccgcatggttaccggggacaacataaataccgcacgggctatagccacgaagtgtggcattctcaccccaggggacgatttcctgtgccttgaaggcaaggagtttaatcgtttaatacgtaacgagaagggtgaggtggaacaggagaaacttgacaaaatttggcctaagctgcgcgtgctggccagatcttccccaacagacaaacatacacttgttaagggtatcattgatagtactgtgggcgagcatcggcaggtggtcgccgtgaccggtgacggtacaaatgacgggcctgctctgaagaaagctgacgtgggtttcgccatggggatcgcagggaccgatgttgccaaagaagccagcgatattattctgactgatgataatttcacttctatagtgaaggcagtgatgtggggacgaaacgtatatgattcaatttctaagtttctgcagtttcagcttactgtgaatgttgttgctgtcatagttgcgtttacaggagcttgtatcactcaggattccccactgaaagccgttcagatgttgtgggttaacttgattatggacacttttgcctcactcgcccttgccacagagccaccaaccgaaagtctgctgaaacgacggccatacggcagaaacaagcccctgatctctaggactatgatgaagaatattttgggccatgccttttatcagctgatagtaatcttcattctcgtgttcgcgggtgagaaattcttcgatatcgacagcggtagaaaggctcccctacatagcccaccgtcacagcactacactatcgtttttaacacgtttgtcctgatgcagttattcaacgaaatcaattctagaaagatccacggtgaaaagaacgttttctctggcatttatcgcaacataatattttgcagcgtcgttttgggaacctttatctgtcagatctttattgtggagttcggcggaaaacctttttcgtgcacctccttaagcctgagtcagtggttgtggtgtctattcatcggcatcggggaactactttggggtcagtttatcagcgcgatccctactagatccttaaagtttctcaaagaggccggacatggaacgaccaaggaagagatcaccaaggatgccgaggggctggatgagattgaccatgctgaaatggaacttcggcgaggacagatcctttggtttagaggcctcaataggattcagacccagatcaaagttgttaaagcctttcactctagtttgcacgagtccattcagaaaccttacaaccagaaaagcatccactcttttatgacccaccctgagtttgcaatcgaggaggaactgccgagaactccgctcctggacgaagaggaggaggaaaaccctgacaaggcctccaagttcggtaccagggtactcctgctcgacggcgaggtgactccttatgcgaacaccaacaacaatgcagtggactgcaaccaggtgcagctcccacagagtgacagttctttgcagtcactcgagactagtgtgtag

SEQ ID NO: 215184 - DNA, 3513 bp, synthetic construct
  misc_feature 1..3513: note = Description of Artificial Sequence: Synthetic coding sequence
  source 1..3513: mol_type = other DNA
atgacaaacccatctgatagagtgctgccagctaattcaatggccgaatctagagaaggggacttcggatgcactgtgatggagctgcggaagctcatggaacttaggtcacgggacgccctgacacagatcaatgtgcactatggcggtgtccaaaacttatgcagtcgactaaaaacatcgccggtggaaggtctgagtgggaaccccgcagacctggaaaaacggaggcaggtgtttgggcataacgtgattcctcccaagaagcccaagacatttcttgagttggtatgggaggccctgcaggatgtaaccctcataatcctagagattgcagcaatcatctcacttgtccttagcttctatcgcccagcgggagaggaaaatgaactgtgtggccaggttgccaccacacctgaggacgagaatgaagcccaagcaggctggatcgaaggcgctgctatcctgtttagtgtaattatagtagtcctagtgaccgccttcaatgattggtctaaggaaaaacagtttaggggactgcagtgtcgaatagaacaggagcagaaattctctatcattcgaaatgggcaattgatccagctccccgtcgcagaaatcgtcgttggtgatatcgcccaggtgaagtacggcgacctcctgccagctgatggaattctaatacagggaaacgacctgaagattgacgaaagctcccttactggcgaaagcgatcacgtgaagaagtccttggacaaagatccgatgctgttaagcgggacacatgtgatggagggctcaggaagaatggtcgtcacagccgtcggggtaaactcccagacaggcatcatattgaccctgctgggcgtcaacgaggacgacgaaggtgaaaagaaaaaaaagggcaagaaacaaggcgtgcctgagaatagaaataaggctaagacgcaggacggtgtcgcgctcgaaatacaacccctgaattcccaggaaggcatcgacaatgaagagaaggataagaaggcggtcaaggtacctaaaaaagagaaatcagtactgcaaggcaagctgactagactggctgtacagatcggcaaagccggactactaatgtcagcactcaccgtcttcatactgattctctacttcgtgatcgataattttgttatcaatagacgtccatggctccccgaatgtacccctatctacatacagtatttcgtgaaattcttcatcatcgggatcacggtcctggttgtggctgtgcctgagggacttccactcgcagtgaccataagcctggcatacagtgtaaaaaaaatgatgaaagataacaacctcgtccgccatctggatgcgtgcgaaacaatgggcaatgcaactgccatctgttctgacaagactgggacactgaccatgaatcggatgaccgtagttcaagcgtatatcggcggaattcactacagacaaatcccatcacccgatgttttcctccccaaagtgttagacctgatagtgaacggaatctcgatcaattcagcgtatacatcaaaaatcctgccacctgagaaagaaggcggtctgcctagacaggtgggcaataaaactgagtgtgcgttgctcggatttgttacggaccttaagcaagactaccaggccgtgagaaatgaagttcccgaggagaagctgtataaggtttatacattcaattcggtaagaaaaagtatgtccactgtgataaggaatcccaacggaggattccggatgtactctaagggtgcctccgagattatcctcagaaagtgcaaccggatcctggaccggaaaggggaagcagtcccattcaagaataaagaccgggatgatatggtgcgtacagttattgagcccatggcttgtgatggccttaggacaatctgcatagcatacagagattttgatgatactgaacccagctgggacaatgaaaatgagattctaacggagctcacctgcatcgcagtggtgggcattgaggatcccgtgcgtcccgaagtacctgacgcgattgccaaatgtaagcaggccggaatcaccgttaggatggtgaccggggataacatcaacacagcacgtgccatagcaaccaagtgtggcattttgaccccaggcgacgatttcctatgtctggaaggcaaggagttcaaccggctgatcagaaacgagaagggcgaagtcgaacaggagaagctagataaaatctggcccaagctccgggttctggccagaagttccccaacagacaagcacacattggtcaagggaattattgacagcactgtgggcgaacatcggcaggtcgtagcggtgaccggcgacgggaccaacgatggacccgcacttaagaaggccgacgtcggctttgcaatgggaattgcaggcaccgatgtggccaaagaagctagcgacattatcctgactgatgacaacttcacttcgattgtcaaggctgttatgtggggtcggaacgtatatgatagcattagcaagttccttcagttccaattgaccgtgaacgtggtggccgttattgtggcattcactggcgcatgcattacccaggattcacccctgaaagccgtgcagatgttgtgggtgaacttgatcatggacaccttcgcaagccttgccctggccaccgagccccctaccgagtccctcttaaaacgcaggccttacggcagaaacaagccgctgatatcccggactatgatgaaaaatatactggggcatgcgttttatcagctgatcgtgatttttattctggtgtttgccggagaaaagttctttgatatcgatagtgggagaaaggcccctctgcactcccccccaagtcaacattatactatagtgttcaatacatttgtgcttatgcagttgttcaatgaaataaattctaggaagatacatggagagaaaaacgtgttctcaggtatatatcggaacatcatattttgtagtgtcgtcttgggtacatttatctgtcagatattcatcgttgagtttggtggcaagcccttctcttgcacttccttgtctttgagtcagtggttatggtgcctatttatcgggatcggagaacttttgtggggtcagttcattagcgccattccaacccgaagtctcaagtttcttaaagaggccggtcacggcacaaccaaagaggagatcacgaaggatgccgaaggactggacgaaatcgatcatgcggagatggaactgagacggggacaaatcctctggtttcgcggactcaaccggatccagacccaaattgacgtgatcaacacttttcagactggcgcttcctttaaaggcgtccttcgacgacaaaacatgggccagcaccttgatgtcaagttagtgccttcctcctcttacgtggcagtggctccggttaagtcctcccccacgacgtccgtgcctgccgtgtctagtcctcctatgggaaaccagagcggccagagtgtgccatag

SEQ ID NO: 215185 - DNA, 3477 bp, synthetic construct
  misc_feature 1..3477: note = Description of Artificial Sequence: Synthetic coding sequence
  source 1..3477: mol_type = other DNA
atgacaaaccccagcgatcgggtcttgcctgccaacagcatggctgaaagtagggagggggacttcggttgtacggtgatggagttgcgtaaactgatggagcttagaagcagggacgctctgacccagattaacgtgcattacggtggagtgcagaacctgtgttcgcgactgaaaacgagccccgtggaggggctttccgggaatcccgctgatctggagaagagacggcaagtctttggccacaacgtcattcctcctaaaaagcctaagacattcctggagctcgtttgggaagcacttcaggacgtgaccctgataatactcgaaatcgcagcgattatctccctcgtgctttcattttaccgccctgctggcgaggaaaatgaattgtgcgggcaagtcgcaaccacgcctgaggacgaaaacgaggcacaagccggatggatcgaaggggctgccattctgttttctgtcataatcgtggtcctagtcacagcatttaacgactggtccaaagagaagcagttccgaggtctccagtgtaggatcgaacaggaacagaaattttccatcatccgtaatggtcagttaatacagctccctgtggccgagattgtcgtcggagacatcgcccaggtaaaatacggagacttgctccctgcggatggcatcttgatccagggaaatgacttgaaaatcgatgaatcctccctgacaggagagtccgaccacgtgaagaaaagcctggacaaggatcctatgctgcttagtgggactcacgtcatggagggatctggcagaatggtggtgactgcggtgggtgttaatagccagacggggattatattaacactgttgggagttaatgaggatgatgaaggagagaaaaagaagaaggccaaaactcaggatggcgtagctctggagatacaaccactgaactctcaggaaggtattgacaacgaggagaaagacaagaaggctgtgaaggtccctaaaaaggagaaatcagttttacaggggaagctgacacgcctggctgtgcaaatcggcaaggcgggactgctcatgagtgccctcacggtgttcattctcatactttactttgtgattgataatttcgtgattaaccggagaccctggctgcccgagtgtacacccatttacatacagtatttcgtaaaattcttcataatcggtatcacggtgctcgtcgtcgctgtccctgagggattacccctggccgttacaatttccctggcctattccgtcaagaagatgatgaaggataacaatctcgtgaggcatttggacgcttgcgagacaatgggcaatgccactgccatctgctcggataaaaccgggaccttgaccatgaaccgcatgacagtggttcaagcctacataggtggcatccactatcggcagattcctagccctgatgtgttcctgcccaaggtgctggatctgattgtgaatggcataagcataaacagcgcatatacaagcaaaatccttcctccagagaaggagggtggtctgcccaggcaagttgggaataaaaccgaatgtgcgctgcttggtttcgtaaccgatctcaaacaggattatcaggccgtgcgcaatgaagtccccgaggaaaagctgtacaaggtctacaccttcaatagcgtccgcaagtctatgagcaccgtaataagaaatccgaacgggggattccgaatgtactcaaagggagctagtgaaatcatcctcaggaagtgtaacaggatcctcgatcgtaagggggaagctgtcccctttaagaacaaggacagagacgacatggtgcggacagttattgaacccatggcttgtgacggccttaggacaatttgtatcgcttaccgagatttcgacgacactgaacccagctgggacaacgagaatgagatactgacagaactaacatgtatcgcagtagtaggcatagaggaccctgtgcggccagaagtccctgatgccatagctaaatgcaagcaagctggtattacagtcagaatggtcaccggcgacaacattaatacagccagagccattgctacgaagtgcggaatcctgacacctggtgacgattttctttgtcttgagggtaaggagttcaacagactcattagaaacgaaaagggagaagtagaacaggagaagttggacaaaatctggcccaagctgcgcgtcctcgccaggagctcacccacggataagcacactttggtgaaaggaatcatcgattcaaccgtaggggagcaccgacaggtcgtcgccgtgacaggagatggtaccaacgatggaccagcgctgaagaaagcggacgtggggtttgcgatgggcattgccggaacggacgtcgccaaagaagcatctgacataattctgaccgatgacaacttcacaagcatcgttaaggctgtcatgtggggcagaaacgtgtatgattcgatttctaagtttctgcagttccagctgactgtcaacgtggttgcagtgatcgtcgcttttaccggagcctgtattactcaagactctcctctaaaagccgttcagatgctctgggtgaatctaattatggacacttttgcttctcttgcgctggctacggagccaccgactgagagcttgttgaaaagacgcccttatggaagaaataagcccctcattagccgcacgatgatgaaaaacatattgggacacgccttctaccaactgatagtgatcttcattcttgtgttcgccggagaaaaattttttgatattgacagcggcagaaaggcaccattacattcacccccttctcagcactatactatcgtatttaataccttcgtcttgatgcagctgttcaatgaaatcaattcaagaaagatacacggtgagaagaacgttttcagtggcatctatcgtaatattattttctgttctgtggtgctgggaacgtttatctgtcagatatttatcgtggagttcggcggaaaacctttttcctgtacatctttgagcctaagccagtggctgtggtgtctattcatcggcatcggtgaattgctttggggacaatttattagcgctatcccaacacgttctctcaagtttctcaaggaagcaggccacgggactacaaaggaagaaattacgaaggacgccgagggcctcgacgagattgaccacgccgagatggaactacggcgaggccagattctttggtttaggggcctgaacagaatccaaacccagattgacgttattaatactttccaaacaggtgcctcatttaagggagtgttgagacgacagaatatgggacaacacctggacgttaagctggtgccaagctcaagttatgttgcagtggcacccgtcaagtcttccccaactaccagcgtacctgccgtgagctcccctccgatgggcaatcagtctggacagtctgtgccctag

SEQ ID NO: 215186 - DNA, 3405 bp, synthetic construct
  misc_feature 1..3405: note = Description of Artificial Sequence: Synthetic coding sequence
  source 1..3405: mol_type = other DNA
atgacaaacccttccgatcgagtgctgccagcaaatagtatggccgaatctcgggagggcgattttggatgcactgtcatggaactaagaaaattgatggagctaagaagcagagacgcgctgacccagattaacgtccactacgggggtgtgcagaatctttgctcacgcctcaaaacatcccccgtggagggactttccggcaatcctgccgacctcgaaaaaaggcgtcaggtgtttggccataacgtgatcccacctaagaaaccaaagacgttccttgaactggtgtgggaagccttgcaggatgttaccctgataatcttggaaattgctgccatcatttccctggttctgtcattttataggccagcgggtgaagagaatgagctgtgcggacaggtcgcaaccacccccgaagatgagaacgaggcacaggctggctggattgagggcgcagcaatccttttcagcgttattatagtagtactggtgacagcgtttaacgactggtctaaagaaaaacagtttcgtgggctccaatgtcggattgagcaggaacaaaaattttcaattattcgaaatgggcagttgatccagctgcccgtcgctgaaatcgtagtgggagatatcgcacaggtcaaatatggagatctcctgcccgcagacggcatcctgattcaggggaatgacttaaaaatcgacgaaagctctctgacaggggaatctgatcacgtcaaaaaaagcctcgataaggacccaatgctgttgagcggaacccacgtcatggaaggcagcgggaggatggtcgtcacggccgtgggggttaactctcaaactggaatcatcctgaccctcctgggagtcaatgaggatgacgagggggaaaaaaagaagaagggcaaaaaacagggcgtgccggagaacagaaacaaagctaagacacaggacggggtggcactcgaaatacagccactgaattcacaggaggggatcgacaatgaggagaaggataagaaagctgtaaaagtaccgaaaaaagagaagtctgttctccaagggaaactgacacgcctagcagttcaaatcgggaaagcaggattgctgatgagtgcacttactgtgttcatcctgatcctgtactttgtaattgataacttcgtaattaaccgccgtccatggctgcccgagtgcactcccatctatattcagtatttcgtaaagttcttcattataggcataacagtcctggtcgtagccgtgcctgaagggctgcctcttgctgtgacaataagcctggcttacagtgtaaagaagatgatgaaggataacaacttggtcaggcatttggacgcttgtgagaccatggggaatgcgacagccatctgctccgacaagacagggacattaactatgaatagaatgactgtggtacaggcctatatcggcggaatccactatcgtcagatcccttcgcccgatgtgtttctcccaaaggtgttagacctcatcgtcaatgggatctccattaattccgcctacacttcaaagatattgccccctgagaaggaggggggacttccccgtcaagtgggcaataaaacggaatgcgccttgttagggttcgtgactgacctgaaacaggattaccaagccgtgcggaatgaagtacccgaagagaaattgtacaaggtgtatacgtttaactccgttagaaagtcaatgagtaccgtgattagaaatcctaatggaggattccggatgtactctaagggggcatctgagatcattctgcggaagtgtaatcgcattctcgacaggaagggtgaggcggtgccatttaaaaacaaagatcgggacgatatggtccggactgttatagagccaatggcgtgcgatggcctacggactatctgtattgcatatcgcgattttgatgacaccgaaccaagttgggacaatgagaacgaaatcctcaccgagttaacatgtatcgccgtggtggggattgaagacccagtgcgcccagaggtgccagatgcaattgcaaagtgtaagcaggccggaatcaccgtgagaatggtgacaggtgataatatcaacactgctcgggctatcgcaacgaagtgtgggatcctaactcccggagatgatttcttatgtctcgagggtaaagagtttaatagactgattcggaacgagaaaggagaggttgagcaggaaaagctggataagatatggcctaagctacgtgtcttggctaggagctctcctactgataagcacaccctggttaagggcattattgactctactgtaggagagcaccggcaggtcgtggctgtgaccggagatggcacaaatgacggtccagctctgaagaaagccgacgttggtttcgcaatggggatcgcgggtacagatgtggccaaggaggcctccgatatcatactgacagacgataacttcacgagtattgttaaggctgttatgtggggcagaaacgtatacgattcaatttcgaagtttttacaattccagctgacggtaaatgtcgttgccgtcattgtggcattcactggagcctgcataacccaggactctcccctgaaggcagtgcagatgttgtgggtcaatctgatcatggacaccttcgcttccttggctctcgctaccgagcctcccactgaaagcctgctcaaacggaggccttatggtagaaacaagccccttatcagccgaacgatgatgaaaaatattctcggccacgcattctatcagctgatagtgattttcattctggtatttgccggagaaaagtttttcgatatcgattccggcagaaaggcacccctgcattcaccaccctctcagcactataccattgtgtttaataccttcgtactgatgcaactattcaacgaaatcaacagccgcaagatacatggggagaaaaatgttttctcgggtatatacagaaacatcattttctgctctgtggtattaggcacctttatttgccagtttatatcagcaataccgaccaggagcctcaagtttctcaaggaggccggacatggcacaactaaagaggagattacgaaggatgcggagggccttgacgaaatcgatcacgctgagatggagctaaggcgcggtcagatcctgtggttcagaggactgaaccgtatccagactcagatagatgtcatcaatacctttcagacaggcgcttcctttaaaggtgtgctgcggagacagaacatgggacagcatctggacgtcaagttggtcccatcttcttcgtacgtagcggttgctcctgtgaaaagctcccccacgacaagtgttccagcagtcagctcaccacccatgggaaaccagtctggacagagcgttccctag

SEQ ID NO: 215187 - DNA, 354 bp, synthetic construct
  misc_feature 1..354: note = Description of Artificial Sequence: Synthetic coding sequence
  source 1..354: mol_type = other DNA
tgaggcggaaagcccttcagttgcacctcgttgtctttatcccaatggctgtggtgtttatttatcggaatcggcgaattgctgtggggccagttcatctcagccatacccacacgcagcttaaaatttctcaaggaggccggacacggcacaacgaaagaggagattacaaaagatgcagaaggattggacgagattgatcatgccgagatggagctcaggcgcggacagattctgtggttccgcggattgaaccggatccaaactcagcacttgctccaagacagcgacttgctccccgacaaagaagaagccatcatctctagcagcctgtttcctagctgcaacttctag

SEQ ID NO: 215188 - DNA, 2667 bp, synthetic construct
  misc_feature 1..2667: note = Description of Artificial Sequence: Synthetic coding sequence
  source 1..2667: mol_type = other DNA
atgaaggtggctcggtttcagaagatccccaacggcgaaaacgaaactatgatccccgtgctgacttccaagaaagcctcagagctacccgtgtccgaggtggcctcaattctccaggctgacttacagaatgggcttaacaagtgcgaggtgagtcatagacgcgcatttcacggctggaatgagttcgatatttccgaggacgaacctctctggaaaaaatatatctcccagttcaaaaacccgctcattatgttactgcttgcttccgccgtcatttcagtcttgatgcatcaatttgatgacgccgtgtcaattaccgttgcgattctgatcgttgtgaccgtggcattcgtgcaggaataccgatccgagaagtctctggaagagttgagcaaactcgtgcctcccgagtgccactgcgtcagagaggggaagctcgagcacacgctggctcgtgacctggtccctggagatactgtgtgtctgtctgtgggggatagggtgcctgctgatcttaggttgttcgaggccgtggatctatccatcgatgagagttctcttaccggggaaaccaccccctgctccaaagtgacagccccacaaccagctgcgaccaacggagacctcgcttcccggagcaatattgcgtttatggggactcttgtgcggtgtggcaaagcaaaaggtgtcgtgatcgggaccggggaaaattccgagtttggggaagtcttcaagatgatgcaagccgaggaagccccaaagacccccctgcagaagagtatggacctgctggggaagcagctgtcgttttatagcttcggcatcattggaataatcatgttggtgggttggttactggggaaggacatcctggagatgttcacaattagtgtttctcttgctgtggcagcaatccccgaggggctgcctattgtggttactgtcaccctcgctctcggagtgatgcgcatggtcaagaaacgtgctatagtcaagaagttgccaattgtcgagactctgggatgctgtaacgttatatgcagcgataaaaccggcaccctaactaaaaacgagatgaccgtgacacacatcttcacctccgacgggttacacgctgaagttacaggagttggatataaccagtttggtgaagtgatagtcgacggggacgtggtacacgggttctacaaccccgctgtgtcacgtatcgtcgaagcaggctgtgtctgcaatgatgccgtgataaggaacaacactttgatgggaaagcccacagaaggtgccctgatcgccctggccatgaaaatgggacttgacggtctccagcaggactatattaggaaagccgaataccctttttcctccgaacaaaaatggatggccgtgaagtgcgtccatcgaactcagcaggatcgcccagaaatttgcttcatgaaaggggcatatgagcaggtgattaaatactgtactacctaccagtccaagggacagaccttaacactgactcagcagcagagagacgtttaccaacaggagaaagcacgcatgggcagcgctggtcttcgggtcctcgcccttgcgtctggacctgaattgggtcagctaacctttctgggtttggtgggaattattgatcctccgagaacaggcgtgaaggaagctgttaccacactcattgcctctggcgtgtcaattaaaatgattactggcgactctcaggaaaccgcggtggccatcgcgagccggctggggctttacagcaagacttcccagtccgtgtcaggggaggagatcgatgctatggacgtgcaacagttgtctcaaatagtgcctaaggtcgccgtgttttaccgtgcctcccccagacataaaatgaaaatcatcaagtcccttcagaagaacgggtctgtggtagccatgaccggcgacggggtgaatgacgctgtggctttgaaagccgcagacattggagtggccatggggcagacagggacagacgtatgcaaggaagcggctgacatgatcctggtcgacgatgacttccagacaattatgtctgcaatagaagaaggtaaaggaatatataataatatcaagaactttgtgagatttcagctttcgacgtcgatcgcggctcttaccctgatctcactcgccacccttatgaactttcccaatcctcttaatgccatgcagatcctctggataaatatcattatggacggtccgcctgcacaatcactaggtgtggaaccagtggacaaggacgtgattaggaaaccaccgaggaactggaaagactccattctcacaaaaaaccttatcctgaaaatactggtgagctcaatcatcatcgtatgcgggaccctatttgttttttggagagaacttcgcgacaacgtcattactccacgggacaccacaatgacctttacctgtttcgtttttttcgacatgtttaatgccctaagcagccggtcccagacaaagtcagtcttcgaaatcgggctatgttcgaaccgcatgttctgctatgccgttctaggatcaatcatgggacagttgctggtaatttatttccctcccctacaaaaggtctttcaaacagagagtctgagcatactcgggttagccctgggggaagaatggacagcagccggatag

SEQ ID NO: 215189 - DNA, 2877 bp, synthetic construct
  misc_feature 1..2877: note = Description of Artificial Sequence: Synthetic coding sequence
  source 1..2877: mol_type = other DNA
aaagtggctagatttcaaaagatacccaacggtgaaaatgaaacgatgattcccgtgctgactagcaagaaggcttccgaactccctgtgtcagaagtggcttcaatactgcaggcagatttgcagaacgggctaaacaagtgtgaggtgagccatcgcagggcttttcatggatggaatgaattcgacatcagcgaggacgaaccattatggaaaaagtatatctctcaattcaaaaaccctctcatcatgcttttactggccagcgcagtaatttctgtattgatgcatcaattcgacgatgccgtcagcattaccgtagcgattctcatcgtggtgaccgtcgcttttgtacaggagtacaggagtgaaaagtccttggaggaactctctaagttggtcccccctgaatgccactgtgtgagagaaggcaagctcgaacatacactcgctagggatctggtgcctggagacactgtgtgcctgagcgttggcgatagggtgccagccgatctaagactgtttgaagccgtggatctgagcatcgatgaaagcagcctcacgggagagactactccttgttcaaaagtgaccgccccacagccagccgctaccaacggagacttggcctcacggtccaatatcgcattcatgggcaccttggtacgttgcggcaaagccaaaggtgtcgtgattggaaccggtgaaaattccgaatttggtgaagtgttcaagatgatgcaggctgaagaggctcccaagacccctcttcaaaagagtatggatctactgggtaaacagctatctttttatagcttcggaatcatcggcattatcatgctagtgggatggttactgggtaaggacatcctggagatgtttactataagtgtgtccctggcggttgcagccatccctgaaggcctgccaatagtcgttacagtgaccctggcacttggggtgatgcggatggtaaagaaaagagcaatcgtcaagaaattgccgatcgtggaaaccctcggttgctgcaatgtgatttgctctgataagacaggtaccctgactaagaatgagatgactgtgacccatatctttacatcggacggtctgcacgctgaggttaccggagtggggtataaccagttcggcgaagtcattgtggacggcgacgtggtgcatggcttctataatccagccgtaagccggatcgtggaggccggttgcgtctgcaacgatgcagtgatccggaacaacaccctgatgggaaaacctactgaaggcgctttaatagccctggcaatgaagatgggcttagacggcctccaacaggactacataaggaaagccgagtatcccttttctagcgaacaaaaatggatggcagtgaaatgcgtgcaccgcacccaacaagatcgccctgagatatgcttcatgaagggagcctacgagcaggttattaaatattgtaccacttatcagtccaaaggtcagactctgactttaacacaacagcagagggatgtgtatcagcaggagaaggctaggatgggttctgccggacttcgagttctggcactcgctagcggaccagagctgggccagctcactttcctgggtctggtggggatcattgacccacccagaacaggcgtgaaggaagcggtgacgaccctgattgcctccggggtgagcattaaaatgatcaccggcgatagtcaagagaccgctgtcgccatagcctctaggcttgggctgtactccaaaacatcgcagtctgtctccggggaggagatagacgccatggatgtccagcagcttagccagattgtgcccaaggtggctgtattttatcgcgcaagccctaggcacaagatgaaaatcattaaaagccttcagaagaatgggtcagtcgtcgcgatgacgggagatggggtaaatgacgctgtcgccctgaaggctgccgacataggggtcgctatgggacagacagggactgatgtgtgcaaggaagctgcagatatgatccttgtggacgatgactttcagaccatcatgtctgctatcgaagagggcaagggcatttataacaatatcaagaacttcgtccgctttcaattgtccacctccatagccgctctcactctcatttcactggctacgcttatgaactttcccaatccgttgaatgccatgcaaatcttatggattaatatcatcatggatggtccacctgcacagagtctaggcgtggagcccgttgacaaagacgtgatccgcaaaccccctcgtaattggaaagattcgattctgaccaagaacttgatcctgaagatcctggtatctagtattatcatcgtctgcggcactctgttcgtgttttggagggaactgagagacaacgtgatcaccccacgggataccactatgacattcacatgcttcgtgttttttgatatgtttaatgcactgagtagtaggtcccagacaaaaagcgtgtttgaaatcggtctgtgttctaaccgaatgttttgttatgctgtgctgggaagtattatgggacagttgctcgtcatctacttcccacccctccagaaagtgttccagaccgaaagcctcagtatccttgacctactttttctcctgggactcacctcctctgtttgtatcgtagcagagattatcaagaaggtcgaacgctccagagagaagatccagaagcatgtgtcttcaacatcctcatctttcctggaggtgtcgtcgtccagcggcaattttgtcgctgtatggctatgggaaagaagcgggcagcagctggtcgagattcacccccacctagaaacgggtcttccactgacggaggacgtgtcctgcgtgtag

SEQ ID NO: 215190 - DNA, 2850 bp, synthetic construct
  misc_feature 1..2850: note = Description of Artificial Sequence: Synthetic coding sequence
  source 1..2850: mol_type = other DNA
atgaaagttgctcggttccagaagatacctaatggcgagaatgaaaccatgatccctgtgctcacatctaaaaaagcgtcagagctaccagtctccgaagttgctagtattctgcaagccgatctccagaatggcctgaataaatgcgaagtatcccataggcgcgcttttcacggttggaatgagtttgacattagcgaggacgagccactgtggaagaagtacattagccagttcaaaaatcccctcataatgctgctgttggcgtcagccgtgataagtgtgctgatgcatcagttcgatgacgctgtctcaatcactgtagccatattgatagtggtcacagtagctttcgtgcaggagtatcgcagcgaaaaatcactggaggagttgtcaaagctagtgccccctgaatgtcactgtgtccgagagggaaagctagagcacaccttggctcgcgatctagtaccgggagatacagtttgtctcagtgtgggggatagggttccagcagatctgcggctcttcgaggcagtggacctcagtattgatgagagctccctgacaggggaaacaaccccttgctctaaagtaacagctcctcagccagcagcaaccaacggcgacctcgcatctcgttctaacatcgcctttatggggactctagtgcgctgtgggaaggcaaagggtgtcgtgatcgggaccggcgaaaattcagaattcggcgaggtgtttaagatgatgcaggctgaggaggctcctaaaaccccgctgcagaagtcaatggatctgctgggtaaacagctctcattttacagctttggtatcattggcatcatcatgttggtggggtggctcctcggcaaggacatcttggagatgtttaccatatctgtgtctctagccgtggcagccatccctgaggggcttcccattgtggtcactgttaccttagcgttaggggtgatgcgcatggtaaagaagcgggctatcgtgaagaaactgccaatagttgaaaccttgggatgctgtaatgtgatatgctccgataagacagggacgctcacaaagaacgaaatgactgtgacccacatcttcacctcagacggattacacgccgaagtcaccggggtcgggtacaatcaatttggtgaagtgattgtcgacggggatgtcgttcacgggttttataatccagctgtaagccgcatagtcgaggctgggtgcgtgtgcaatgacgcggtcatccggaacaacaccttgatgggaaaacctacggagggcgcactcatcgctctagccatgaaaatgggactcgacggtctgcagcaggattacatccgaaaggccgagtatcccttctctagtgagcaaaagtggatggccgtgaaatgcgttcaccggacacagcaggatcgtcctgagatttgtttcatgaagggagcatacgagcaagtgattaaatattgcacaacctatcagtcaaaagggcagactctgacactgacccagcagcaacgcgacgtataccagcaggagaaagccaggatgggctcagctggcttgcgtgtgctcgccctggcctcaggtcctgaattgggtcagctgactttccttgggttggtggggattatcgaccccccacggaccggcgttaaggaagccgtgacaacacttattgctagtggtgtctctattaaaatgattaccggtgatagccaggaaacagctgtagccatagcctcacgcttgggtctatacagcaaaacttcccagagtgtatcaggagaggaaatcgatgctatggacgtgcagcaactgagccaaatcgtccctaaggtggcagtattctaccgggcatcaccccgacacaaaatgaaaattattaagagtctgcagaaaaacggaagcgtcgtcgctatgaccggggacggggttaacgatgccgttgccctgaaggctgcagacattggtgtcgcaatgggacaaaccggaaccgatgtgtgtaaggaggccgctgacatgatcttagtggatgatgacttccaaacgattatgtctgctattgaagaaggcaaagggatttataacaacatcaagaatttcgtgcgtttccagctttctacgtcaatcgctgccttgaccctgattagcttagccacgctcatgaacttcccgaacccacttaacgcaatgcagatcctctggataaatataattatggatggacctcctgcccagtcattgggagtcgagccagtagataaggacgtgatccgcaagcctccaagaaattggaaagatagtatccttaccaaaaatctgatcctcaaaattctcgtttcctcaataattatcgtctgtgggacgttattcgtgttctggcgcgaacttcgggacaacgtcatcactcctcgcgacaccaccatgacattcacatgtttcgtgttcttcgatatgtttaatgccctctctagccgctctcagaccaaaagcgtgttcgaaatcggcctgtgctcaaataggatgttctgttacgccgtgctggggtcaattatgggacagttgctggtaatttatttccccccactccaaaaagtgttccagactgaaagtctcagcatcttggatttgctatttctccttggtttgacgtcctccgtgtgcattgttgcagagatcataaaaaaagttgaacgatctcgcgagaagatccagaagcacgtgtcctcgactagctcttcttttttggaagtgtggttgtgggaaaggtccggacagcagctcgtcgaaatccatccacatcttgaaacaggcctgccgttgacagaagacgtgtcctgcgtgtag

SEQ ID NO: 215191 - DNA, 2922 bp, synthetic construct
  misc_feature 1..2922: note = Description of Artificial Sequence: Synthetic coding sequence
  source 1..2922: mol_type = other DNA
atggactctctgctgcctccctcaagattctcttattttaaaaaatacccattacacgcgatacgccgatacttgtcgaccctacggaatcagcgcgctgaggaacaagtggccagattccagaaaattccaaatggtgaaaacgagacaatgatccccgttttgacctcaaaaaaggcctccgagctgcccgtctctgaggtagcgagcattctgcaggcagacctgcagaatggactaaataagtgcgaggtttctcatcgcagggctttccacggatggaatgaattcgacatcagcgaagacgagcccctttggaagaagtacattagtcaatttaaaaaccccctcattatgctgctgctcgctagcgctgtcatctcggtacttatgcatcaattcgatgatgcagtttccataaccgtcgccatcctaatcgtcgtaactgttgccttcgtgcaggagtatcgatctgagaaatcactggaggaactctcaaaactggtaccgcctgaatgccactgcgttcgggaaggtaagctggaacatacattggctcgcgatctggtcccaggcgatactgtgtgtttatccgtcggagatagagtgcccgcagacttgcgactgttcgaagccgtggacctctctatcgatgagtcttcactgactggagaaaccacgccttgcagcaaagttaccgcaccacaaccggctgctaccaacggggatctggctagcaggagcaatattgcgtttatgggaactttggttcggtgtgggaaggcaaagggcgtggtgatcggaaccggtgaaaattcggagttcggcgaagtgttcaaaatgatgcaggccgaggaagccccaaagacaccactgcaaaagtctatggatctgctcggcaagcagctgtcattttactcattcggaatcatcggaatcatcatgttagttgggtggctcctggggaaagacattttggaaatgtttactatatctgtgagcctcgcggtagcggcaattcccgaaggccttcccattgttgttacagtgacacttgctttgggagtgatgaggatggtcaaaaaaagagctattgtgaagaagctacccatcgtagaaactctgggctgctgcaatgtgatatgcagcgacaaaactgggaccctaaccaagaacgaaatgacggtgactcatatattcacatctgacggcctgcacgcggaggtgacaggggtcgggtataatcagttcggcgaagtgattgttgacggagatgtggtgcatggattttacaatccggcagtatcgcggattgtagaggccggatgtgtgtgcaacgacgctgtgattcggaataacactctcatggggaagccaactgagggtgcacttatcgccctggccatgaagatgggtctggatggactgcaacaggactatatcagaaaagcagagtatcccttctcctcagaacagaagtggatggcagtaaaatgcgtgcacaggacacaacaggatagaccagagatctgtttcatgaaaggcgcttacgagcaggttatcaaatactgtaccacttaccagtcaaagggtcagactctgactttaacccagcagcagagagacgtgtaccagcaggaaaaggctaggatggggtcagccggtctacgcgtactggccttagcgtctggacccgaacttggacagctgacattccttggcctcgtcggaatcatcgatccacctagaaccggtgttaaggaagccgtaaccactttgatcgcatccggcgtgagcatcaagatgatcacaggcgattcccaggaaaccgccgtggctatcgcttcccgcttgggcttgtattccaaaactagtcaaagtgtgtccggggaagaaatcgacgccatggatgtgcaacagctctcacagattgtgccaaaagtcgccgtcttctaccgggcatctccaagacacaagatgaagatcatcaaaagtttacaaaagaacggctctgtcgttgctatgactggggatggagtgaatgacgccgttgccctgaaggcagccgacatcggagtggcaatgggccagactggaaccgacgtatgcaaagaggccgctgatatgatcctggtcgatgacgattttcaaactattatgagcgctatcgaggagggcaaaggtatctacaacaacatcaaaaactttgtccggttccagttatccaccagtattgctgctctgaccctgatctcactggcaacactaatgaacttccctaatcccctaaatgctatgcagatcctgtggattaacatcataatggacggcccacctgcccaatctctgggcgtcgagcccgtagataaagacgtcatacgaaaacccccacgcaactggaaggactctatcctgacgaaaaatctgatcctaaaaattttggtgtcttcaatcataattgtgtgcggcacgctcttcgtcttttggcgggagcttcgtgacaatgtgattacacccagagatacaactatgacattcacctgctttgtcttctttgacatgttcaatgcgctgtctagccgaagccaaactaaatctgtatttgagatcgggctttgcagcaaccgcatgttctgctatgcagtcttgggatctattatgggacagctgttagtcatttatttcccaccgcttcaaaaagtgttccagactgaaagtttgagtatcctcgacctcctgttcctcttgggcctgactagttctgtttgcatcgtggccgaaattattaaaaaggtggagcggtccagagagaagatccagaaacacgtgtggctctgggagcggagcgggcaacagttagtggagatccatccccacctggaaaccggtctgccacttaccgaggacgtgtcgtgcgtgtag

SEQ ID NO: 215192 - DNA, 2820 bp, synthetic construct
  misc_feature 1..2820: note = Description of Artificial Sequence: Synthetic coding sequence
  source 1..2820: mol_type = other DNA
atgaaggtggcccgtttccagaaaatccccaacggggagaacgagacaatgatacccgtgctgacctccaagaaggcctctgagctccctgtctccgaagttgcatccattctgcaggcagatctgcagaatgggctaaacaagtgtgaggtgtcacacaggcgggcatttcatggatggaacgaattcgacatctccgaagatgaaccgttgtggaaaaagtatatctctcagttcaaaaatcccctcattatgttactcttggcttcggccgtgatcagcgtgctcatgcatcaatttgacgatgccgtgtctatcacggtggctatcttgattgtcgtgacagtggcattcgtgcaggagtaccggtcagaaaagagccttgaggaattaagcaagctcgtcccgccagagtgccactgcgtcagagagggaaagttggagcatactctggcacgcgacttggtccccggtgatactgtgtgcctgtctgtcggagatagggttccggcagatctgagactctttgaagcagttgatctgagcatcgacgagagttccctgacaggagagaccactccctgctccaaagttacagctccgcagcccgctgccacaaatggcgacctggctagtaggagtaatatcgcctttatgggtaccctagtgcgctgcggaaaagcgaaaggcgtcgtaattggcactggtgagaactccgagtttggagaggtttttaaaatgatgcaagctgaggaggcacccaaaacacccttgcagaagtccatggacctgcttggtaagcaactgagcttctacagcttcggcatcatcggaatcattatgctggtgggatggttattgggcaaggacatcctagagatgtttaccattagcgtctccctggcagtggccgctatccccgagggactcccaatcgttgtgactgttactctggccctcggcgttatgaggatggtgaaaaagagggcaattgtgaaaaaactcccgattgtcgagactctgggctgttgcaatgtgatctgttcggacaagaccggtacgctcacgaagaatgagatgactgtgacccatattttcaccagcgacggactccacgcagaggtgacgggggttggatacaaccagtttggcgaggtaattgtggacggggacgttgttcatggtttttataacccagcagttagccgcattgtggaagccggttgcgtttgcaatgacgcagttatccgaaacaacaccctgatgggcaaacccacggaaggggctcttattgcactggccatgaagatgggtctcgatgggttgcagcaagactacatccgtaaggctgagtaccctttcagctctgaacaaaagtggatggccgtgaagtgcgtgcaccgcacccagcaggatagacctgaaatctgctttatgaaaggggcatatgagcaggtgataaagtactgcacaacataccagtccaaaggccagactctgaccctaacccagcagcagcgagatgtgtatcagcaggaaaaagcacgaatgggctcagctggccttcgagtgttggccttggctagcggacctgaacttggccagttgaccttccttgggcttgtgggcattattgatcctccgcgtacaggagtaaaagaggctgttaccaccctgatcgccagcggcgtctcaatcaagatgattacaggggatagtcaagagacagccgtggctatcgctagccgcttaggcctttattctaaaacctcccagagcgtgtccggcgaggagatcgacgctatggatgtgcagcagttgtctcaaattgtgcccaaagttgcagtcttctatagggcatctcccagacataaaatgaaaatcataaaatctctccaaaagaacggtagtgttgtcgccatgacaggagatggcgtgaatgatgccgtcgcactgaaggctgctgatatcggtgtggccatggggcagaccgggacagacgtgtgcaaagaggcagctgatatgatccttgtggatgatgactttcagaccattatgagcgcaattgaagaaggcaagggcatttacaacaatattaaaaatttcgtgcgttttcagctgagcacctctattgctgcacttacgctcatctccctggcgaccctgatgaactttccaaatccattgaacgctatgcagatcctctggatcaacatcattatggacggtcctcctgcccagtccctgggcgtcgagcctgtggataaagacgttattagaaaacccccacgcaactggaaggactctatcctgacgaaaaatcttatactcaagatactggtaagtagtatcataatcgtgtgcggaacgctatttgttttctggagagagttgcgggataacgtgatcaccccccgagacaccaccatgacctttacatgcttcgtctttttcgacatgtttaacgcccttagctcccggagtcagactaagtctgtctttgaaattggtctgtgctctaacaggatgttttgttatgcggttctggggtctatcatggggcagttgctcgtgatctacttcccccctcttcagaaggttttccagactgagtccctgagtatcctagatctcctctttctgctggggctgacatcatcggtctgtatcgtggccgagattatcaaaaaagtggaacggtctagagagaagattcagaaacatgtctggctctgggagcgttccgggcagcaacttgttgaaattcaccctcatctggagacaggtttacccctgacggaggatgtgtcatgcgtgtag

SEQ ID NO: 215193 - DNA, 2760 bp, synthetic construct
  misc_feature 1..2760: note = Description of Artificial Sequence: Synthetic coding sequence
  source 1..2760: mol_type = other DNA
atgaaagtggccagatttcagaagatcccaaacggggagaacgaaacaatgatcccggtgctgacttccaagaaggccagcgagctccctgtgtctgaagtggcctctatcctgcaggcagatctgcagaacggcttgaataaatgtgaggtgagtcacagacgtgcatttcacggttggaatgaatttgatatctcggaagacgagcccctctggaaaaagtacatctcccagttcaagaatcctttgattatgctgttactcgcatcagccgtaattagcgtattgatgcaccagtttgacgatgccgtgtctattactgtggctatcctgattgtcgtgacagtggcattcgttcaggagtatcggagcgaaaagagcctcgaagaactgagcaaacttgtcccaccagagtgtcattgtgtcagggaaggaaagttggaacatacgctagcgagagatttggttcctggtgatacagtctgcctgagcgtgggggatagagtacccgcagatcttcgtctgtttgaggcagtggacctgtccattgacgaatcttctcttaccggagaaactacaccatgttctaaggttacagcaccacagccagccgcaacaaacggggaccttgcaagccgctctaatattgcttttatggggactctcgttagatgcgggaaggctaaaggcgtagtcattggaacaggcgaaaactctgagtttggtgaggtgtttaagatgatgcaagcagaagaggccccaaagacgccactccagaaaagtatggacctgctgggcaagcagctgagcttctatagttttgggatcatcggcattattatgctggtgggatggcttctcggaaaggacatactggaaatgttcactatctccgtctcactcgcagtggcagccatcccggagggcttgccaatcgtggtcaccgtgactctggcccttggtgtcatgcggatggttaagaaacgtgccatagtgaaaaagttgcccattgtcgaaaccttgggctgttgtaacgtgatttgctcagataaaacaggcacactgaccaaaaacgagatgactgtaacccacattttcacaagcgacgggctgcacgctgaggtgacaggagtgggctataaccagttcggcgaagttatcgtggatggggatgtggttcacggcttctataatccagccgttagccgcatcgttgaggctgggtgcgtgtgcaacgatgctgttatcaggaacaacacactcatgggaaagcccacagaaggcgcactcatcgccctggccatgaagatgggactggacggcctacagcaagattacatccgtaaggccgagtacccgttcagcagtgaacaaaaatggatggctgtgaaatgcgtgcaccggacccaacaagacaggccagaaatttgttttatgaaaggagcttatgaacaggtgataaagtactgcacaacttaccaaagtaaaggccagactctcactctgacacagcaacaacgtgacgtttatcagcaggaaaaggctcgaatgggctcagcgggattaagagtgctggctctcgcgtcgggccctgagctcggccagctgacattcctggggctggtggggataattgacccaccgaggacaggggttaaagaagccgtgacaacccttatcgcgtccggcgtgtctatcaagatgattaccggtgattcgcaggaaaccgcggtagcgattgcatcacgcttaggactgtacagtaaaaccagccagtcagtgagcggagaagagatcgatgcgatggatgtccagcagctgtctcagattgtgcccaaagtagctgtcttctacagggcatcacctagacataagatgaaaattatcaaatccttgcagaaaaacgggagcgtggtggccatgacgggcgacggggtaaatgacgcagtggccctgaaggcggctgacattggagtggccatgggtcagactggcaccgacgtatgcaaggaggcagccgatatgatcctggtggacgatgactttcagacaattatgtctgccattgaggagggaaaaggcatctacaacaatatcaagaacttcgttaggttccagctgtcaacttccattgccgctcttacattgattagcctggccacattaatgaattttcccaacccccttaacgcgatgcagatcctttggattaatatcataatggacgggcctccagctcagagtctaggggtggaacccgtggacaaagatgtcatccgcaagcctcccaggaattggaaggattccattctgacaaagaacttaatcctcaaaattcttgtttcatccattatcatagtttgcgggacactatttgtgttttggcgggagctccgcgacaacgtgattacacctagggatactactatgactttcacctgtttcgtcttttttgacatgttcaatgcacttagtagccgctcacagaccaagagtgtgttcgaaatcggactttgcagcaacagaatgttctgttacgccgtcctagggtcgatcatgggtcagctgctcgtcatttattttccccctctgcagaaggtattccagacagagtccctgtctattttggacctgctgttcctgctcgggctaaccagttccgtgtgtattgtcgccgagattataaagaaagtggagcgctctagggagaagatacagaaacatgtcagttctacgagctctagcttcctcgaggtttag

SEQ ID NO: 215194 - DNA, 2712 bp, synthetic construct
  misc_feature 1..2712: note = Description of Artificial Sequence: Synthetic coding sequence
  source 1..2712: mol_type = other DNA
atgatccccgtgctgacttctaagaaagccagcgagctaccagtcagcgaagtcgcctctatcctgcaagccgacctacaaaatggccttaacaagtgtgaagtatcacatagaagggcgtttcacggatggaatgaatttgatatctctgaagatgagccactgtggaagaagtacattagccagtttaagaatccactcattatgttactcctcgccagtgcagtcatcagtgttcttatgcatcaatttgatgacgcagtgtctatcacagtggcaatcctcatcgtcgtgacagtggcgttcgtgcaagagtatagaagcgagaaatcactggaagagctgtcgaaactcgtaccgcctgagtgccattgcgttcgagaaggcaagctcgagcacaccttggcacgagatctggtgcctggagataccgtgtgcttgtccgttggagaccgggttccagccgacctgaggctgtttgaggctgtagatttatctattgacgaaagttccctcacaggggagaccactccgtgcagcaaggttaccgctccccagcctgcggcaaccaatggcgacctggctagtcggtcgaatatcgctttcatgggcaccctggtgagatgtggaaaagctaaaggagttgtaattgggacaggagagaatagcgagtttggcgaggtgttcaaaatgatgcaggctgaggaggcacccaagactcccctgcagaagtcgatggatctgttaggaaagcagttatccttctatagttttggcatcattggtatcatcatgttggtcgggtggctgctgggcaaagatattctggagatgtttaccatctcagtcagccttgccgtggcggcaatcccggagggcttgcccatcgttgttaccgtaacgctggccctcggagtgatgcgtatggtgaagaagcgcgcaattgttaaaaaattacctatcgtcgagactctgggatgttgtaatgtgatctgttccgacaaaactggaacgctcactaagaacgagatgacagtgactcatattttcacttctgacggcttacatgcagaggtcacaggggttggatacaatcagttcggtgaagtcatcgtagacggagatgtcgtgcatggattctataatcccgctgttagtcgaatagtggaagcaggttgtgtgtgcaatgacgccgttattaggaacaatacattgatgggaaagccgactgaaggcgctctcatcgccctggcgatgaaaatgggattggatgggctccaacaggattatattaggaaagctgaataccccttctctagcgaacagaaatggatggccgtaaagtgcgtgcatcgcacacagcaggatcgccctgaaatctgttttatgaagggcgcatatgaacaggtcatcaagtattgtactacataccaatctaaagggcagacattgacgctgactcagcagcagcgtgacgtctaccaacaggaaaaagctagaatgggctcagcaggactacgcgtattagccctcgcatctggacctgaactcggtcaactcacattcctcggccttgttggcattattgaccctccaagaactggtgtcaaagaagcagttacaacacttattgccagcggcgtcagcattaaaatgatcactggcgatagtcaggaaaccgctgtggcaatagcgagccgtctgggcctgtactctaagacctcacaatccgtgtccggagaggaaatagatgctatggatgtccagcagctttcccagattgtacctaaggtggcagtcttctacagggccagccctcggcacaagatgaagatcataaagagtctgcaaaagaacggaagcgtggtggcaatgaccggcgatggggtgaatgacgccgtcgcacttaaggccgcagatataggtgtggccatgggacagaccggcactgatgtttgtaaagaagccgctgacatgatcctggtcgatgacgatttccagacaatcatgtccgctatcgaagaaggtaagggcatctataacaacattaaaaattttgtgcgatttcagctgagtacaagtatcgccgcactcaccctgatttctcttgccaccctgatgaacttcccaaacccactaaatgcaatgcaaatcctttggattaacattattatggatggtcccccagctcagagcctgggagtggagcccgtggacaaagatgtcattagaaaacctccacgaaactggaaggatagcattctgactaaaaaccttattctgaagattctcgtttcctccatcattattgtgtgtggaactctgttcgtcttttggagagaactcagggacaatgttatcacccccagggacacaaccatgacttttacttgttttgtgttctttgacatgttcaacgcgctgtcatctcgttctcagactaagtctgtcttcgaaatcggactgtgctctaatcgcatgttttgttacgccgtcctgggcagcatcatgggacaactcctggttatttactttccaccgttgcagaaggtgtttcaaactgagagtctgagtattctggacttgttatttctcctggggcttactagttctgtgtgcattgtcgccgagattatcaagaaggtggagaggtcccgggaaaaaattcagaaacacgtttcaagcacatcttcttctttccttgaagtgtag

SEQ ID NO: 215195 - DNA, 363 bp, synthetic construct
  misc_feature 1..363: note = Description of Artificial Sequence: Synthetic coding sequence
  source 1..363: mol_type = other DNA
atgaaagtggcgcgatttcagaagatccctaatggtgagaacgagacgatgatccctgttctaacatccaaaaaagcctccgagcttccggtgtccgaagtggcctctatccttcaagcagatctccagaacggcctgaacaagtgtgaagtgtcacaccggagggcttttcacggatggaacgaatttgacatctccgaggatgagcccctatggaagaagtacatcagccagttcaaaaatcccctcattatgctgctattagcctctgccgtgatctcagtactcatgcaccagttcgatgatgcagtgagtattaccgtggctattttgattgtagtgactgtggcttttgtacagtag

SEQ ID NO: 215196 - DNA, 2712 bp, synthetic construct
  misc_feature 1..2712: note = Description of Artificial Sequence: Synthetic coding sequence
  source 1..2712: mol_type = other DNA
atgatccctgtcctgacctccaaaaaggccagcgagcttcctgtgtctgaggttgccagcattttgcaggcagacctgcaaaacggattaaataagtgtgaggtaagtcatagacgagcttttcacggctggaatgagttcgacataagcgaggacgagcccctgtggaagaaatacatttctcaatttaaaaacccgctgattatgcttctactggcttccgccgtgatatctgtactgatgcatcaattcgatgatgccgtgagcattaccgtcgcgatcctgatcgttgtgacagtggcattcgtgcaggaatatcgtagcgagaaatctctagaggaactgtccaagttagttcctcccgaatgtcattgtgtgcgagagggaaagcttgaacatacgctggcaagagacctggtgcccggagacaccgtgtgtctgagcgtgggggatagggttcctgctgatctgaggctgtttgaggccgtggatctgagtatcgacgagagctccctcaccggcgagactaccccatgctctaaggtcaccgcccctcagccagccgcaaccaatggggacctcgcctcgcgatcaaacatcgcttttatgggtactctcgtgcgctgtggaaaggccaaaggcgtcgtcatcggaaccggggaaaatagcgaatttggggaggtttttaagatgatgcaggccgaggaggcgcctaaaacccctcttcagaagtctatggaccttctcggaaagcagctgtcattctattcttttggtatcataggaatcattatgttggtcggatggctgctgggcaaggatatactggaaatgttcaccatttcagtgtctctggcagtcgccgcaattcccgagggactccctattgtggtcaccgtgaccctggcgctgggagtgatgcggatggtgaagaagagggctatcgtaaaaaagctccctattgtggaaacacttggctgttgcaacgtgatttgctctgataagactgggaccctgaccaagaacgagatgactgtaacacacatcttcacctcagacgggctgcatgcagaggtcacaggcgtcggttacaaccagttcggggaagtcattgtggacggggatgtggtgcacggcttttacaacccagctgtaagccgcatcgtagaggcaggatgcgtctgtaatgatgcggtgatcaggaacaatactctgatgggaaaaccaactgagggcgcactgattgccctggctatgaagatgggccttgatggtctgcagcaggattacataaggaaggccgagtacccattctcatcagaacagaagtggatggcagttaagtgcgttcacagaacccagcaggatagaccagagatttgcttcatgaaaggggcatacgagcaggtaataaaatactgtactacctaccagagcaaagggcagacactgacactgacacagcaacagagggatgtgtaccaacaggagaaagccagaatggggagcgccggtttgagggttctcgccctggcctccgggcctgagctgggccagttaacttttctgggcctggtaggcatcatcgaccctcctagaaccggagtgaaagaagctgttacaactttaattgcctcgggggtgagtattaaaatgatcacaggagactctcaggaaaccgcagtcgcgatcgcttccaggctcggcctgtattcaaaaacctcccaatccgtgtccggcgaggaaatcgacgccatggatgtccagcaactgagtcagatcgttcccaaagtggccgttttctacagagcctcgccacgccataaaatgaagattatcaaatcactccagaagaacggtagcgtcgtggcaatgacgggcgatggcgtgaatgacgcagtggccttgaaggccgcagacatcggtgtggccatgggacagacagggacggatgtttgcaaggaggctgcggatatgatcctggtggatgacgactttcagactatcatgtcagcaatcgaagagggaaagggaatttacaataacatcaagaattttgtaaggtttcagctcagtacgtcaatcgcagccctgacactgattagtttggctaccctgatgaacttcccaaatcccctgaatgcgatgcagatcctgtggataaacatcatcatggatggtccgccagcccagagccttggagtcgagcccgtagacaaggatgttatccgaaaaccccctaggaattggaaagactcaatcctgactaagaatctgatcttgaagatcctggtgagttccattatcattgtatgtgggacattgttcgttttctggagagagttacgggataatgtgatcactccaagagacaccaccatgacctttacctgtttcgtgtttttcgatatgttcaacgctctgtcctctagatcacagaccaagtccgtctttgagattggcctgtgctccaataggatgttctgttatgctgttttggggagcataatgggccagcttctagtcatctacttcccccctctgcagaaggtcttccagactgaatccctgtccatcctggatctgctatttctactgggtctgaccagctcagtctgtattgtggcagagataatcaaaaaggttgaacgaagtagggagaagattcagaaacatgtatcttccacatcatcaagctttttggaagtgtag

SEQ ID NO: 215197 - DNA, 2772 bp, synthetic construct
  misc_feature 1..2772: note = Description of Artificial Sequence: Synthetic coding sequence
  source 1..2772: mol_type = other DNA
atgatccccgtgctgacctccaaaaaggcttcagagcttcccgtgtccgaggtagcctcaatcctccaggccgatctgcagaacggactcaacaaatgtgaggtctctcatcggcgtgccttccatggctggaatgagttcgacatttccgaggacgaaccactctggaagaagtacattagtcagtttaagaatccattgataatgctcctcctcgccagcgcggtgataagcgtcctgatgcaccaattcgacgatgctgtgagcatcacggtcgccattttgatcgttgttaccgtagccttcgtgcaagagtacagatctgagaagagcctcgaggaattgtccaagttagtgcctccagaatgtcattgtgtacgcgagggtaagctggagcacacactcgccagagacctggtgccaggtgataccgtgtgtcttagcgtaggggatagggtgcctgcagatctgaggcttttcgaagctgtcgacctgagcattgatgaaagttccctcacaggagaaactaccccttgttccaaagttacagctccccagcctgctgccacgaatggcgaccttgcttcccggtccaacatcgctttcatgggcacccttgtccggtgcggcaaagcaaagggcgtcgtcataggtacaggtgaaaacagcgaattcggcgaagttttcaaaatgatgcaggccgaggaggctcccaaaacgcctctgcaaaagtctatggatctactgggaaagcagctgagcttttattctttcggtatcatcgggataattatgctagtcggttggcttctgggtaaagacattctggagatgtttacgatcagtgttagcctcgctgtggcggctatccccgagggcctacccatagttgtaactgtcactctggctctcggggtgatgagaatggtcaagaaacgggcaattgtaaagaagctcccaatcgtcgagacgctgggctgttgcaatgtaatatgttctgataaaaccgggaccctcacaaaaaatgagatgacagtcacacatatctttacttctgatggactccatgccgaagtcacaggcgtagggtacaatcagtttggggaggtgatcgtggatggcgacgtagtgcacggtttttacaaccccgctgtgtctcggattgttgaagctggctgtgtgtgcaacgatgccgtgatccggaacaatacattgatgggtaaacccaccgaaggcgcactgattgctctcgcaatgaaaatggggttggacggtctgcagcaggactatatccgaaaggccgagtatccctttagctcagagcaaaagtggatggccgtgaagtgtgttcatagaactcagcaggatagacctgagatctgtttcatgaagggagcctacgagcaggtgattaagtactgcactacttatcagtcaaagggccagaccctgactctcacccagcagcaaagagacgtttatcagcaggaaaaggccaggatgggcagcgcgggacttcgagtcctggctctggcctcgggtcctgagttgggccagttgactttcctgggacttgtgggtataatcgatccccctagaaccggcgtgaaagaagccgtgaccaccctcatcgctagtggtgtcagcattaagatgatcacaggggactctcaggagaccgctgtcgccatcgcctcaagacttggcctctattcgaaaacttctcagtcagtgtcgggagaggaaattgatgctatggatgtacagcaactgagccagattgttcccaaggtagcagtgttttaccgcgcaagtccaaggcacaaaatgaagatcattaaatcactgcagaagaatggctctgttgtagctatgacgggggatggggttaacgatgcggtcgccctgaaagcagccgacatcggagtggccatgggccagaccggcactgatgtgtgtaaggaggccgctgatatgattttggtggatgatgatttccagactattatgtctgctatcgaagagggtaaaggaatctataataacatcaagaatttcgtaagattccagctgtcaacatcaattgcggctttaaccctgattagtctggccaccctgatgaattttcctaatccattgaacgccatgcagatactctggattaacattatcatggacggaccacccgctcagtcactaggcgtggagcctgtcgataaggatgtcatccgcaagccgcctagaaattggaaagactccatcttaaccaaaaacctgatcctcaagattctggtgtcgagcattattatcgtttgcgggacgctatttgttttctggagagaacttcgggataacgtgattacgcccagggatactacgatgacttttacctgtttcgtctttttcgatatgtttaacgctctttcctccagatcccagaccaaaagcgtgtttgagatcggcctgtgctccaaccgcatgttctgttacgccgtccttgggtccattatgggccagttactggttatatattttcccccactgcagaaagtctttcagaccgaaagcctgtcaatcctggatttgctgttcttgttggggttgacgtcatccgtgtgcattgtagcggagattattaagaaagtagagcgttctcgcgagaaaatccagaagcacgtgtggctgtgggaaagaagtggacaacagttggtggagatccatcctcacctcgaaaccggactcccactgactgaagatgttagttgcgtgtag

SEQ ID NO: 215198 - DNA, 249 bp, synthetic construct
  misc_feature 1..249: note = Description of Artificial Sequence: Synthetic coding sequence
  source 1..249: mol_type = other DNA
atgatcccagtgctaaccagtaagaaagcttcagaattgccagtttcagaagtcgccagcattctgcaggctgacttgcagaacggtctgaataagtgtgaggtatctcatagacgcgcattccatggctggaacgagtttgacatttcagaggatgagcccttgtggaagaaatatatcagccagtttaagaatccgcttataatgctactactggctagcgcagtaatatcagtgctgatgcactag

SEQ ID NO: 215199 - DNA, 2760 bp, synthetic construct
  misc_feature 1..2760: note = Description of Artificial Sequence: Synthetic coding sequence
  source 1..2760: mol_type = other DNA
atgaaggtagccaggttccagaaaattccaaatggcgagaacgaaacgatgattccggtattgacttcaaaaaaagcgtccgagttacccgtatcagaggttgctagtattctccaagccgatttacagaacgggctgaataaatgcgaagtgagtcatcggagagcatttcatggctggaacgagttcgacatttctgaggatgaaccattgtggaagaaatacatcagccaatttaagaatccactgatcatgctgttgctagcgtcagccgttatctcagtgctcatgcaccagtttgatgatgcggtgtctataacagtggctatactgattgttgtgaccgttgctttcgtccaagagtaccgctccgagaagagtcttgaagaactgagtaagctggtgcccccagagtgccattgtgtccgggaaggcaaactagagcacacccttgcacgtgatctggtcccaggggacacagtgtgtctgtccgtgggggaccgagtaccagcggatctgaggctctttgaggcggtcgacctgtctatagacgagagtagcctcaccggcgaaacaactccctgctccaaggttaccgcccctcagcctgctgccaccaatggcgacctggcgagcaggagtaatatcgcctttatgggcaccctcgtgagatgcggtaaggctaagggagtagtaatcggaacaggtgaaaactctgaattcggagaggtgtttaaaatgatgcaggcagaagaagctcctaagacccccctccagaagtccatggatctcctgggaaagcagttaagcttctactccttcgggatcattggaatcatcatgcttgttggttggctcctcggcaaagacatattggaaatgttcaccatatctgtctccctggctgtagctgctataccagagggcctcccaatcgtggtcacggtcaccttggccttgggtgtgatgcgaatggtgaagaaacgcgcaattgtcaaaaaactccctattgttgagactctcggctgctgcaacgtgatctgctcagacaaaaccggaacacttacaaaaaatgaaatgacagtgactcatatcttcacatctgacggcctgcacgcagaggtcactggagttgggtataatcaattcggagaagttatcgtggatggtgacgtcgttcatggtttttataatcccgctgtgtcgcggatagtggaagcgggatgtgtatgtaacgacgctgttattagaaataatacccttatgggcaaacctaccgagggggcactgattgccctagccatgaagatgggactcgatggcctacaacaggactacatccggaaggcggagtatccattctcctctgaacagaaatggatggcagtcaaatgtgttcaccgcactcagcaggaccgcccagagatttgcttcatgaaaggcgcttacgaacaggttattaagtattgtaccacctatcagagcaaaggacagacccttaccctgacgcagcagcagcgcgatgtctaccagcaggaaaaagctcgaatgggctcggctggactgagagtgctggcactggcatctgggcctgagctcggtcagctaaccttcttagggttggtcggaatcatcgacccaccaaggacgggcgtaaaggaggctgttaccaccctgatagccagcggagtgtctattaaaatgattactggcgacagtcaggagactgcagtcgccatcgcttctcgcttggggttgtatagcaaaactagtcagagcgtgtccggggaagaaatcgacgctatggacgtgcagcagctctctcagattgttcctaaggtcgctgtgttctaccgagcatcccccagacacaagatgaagataatcaaatccctacaaaagaacggctcggtagtggcaatgaccggggacggtgtgaacgatgctgtggcgctcaaagccgctgacatcggcgtcgctatgggccagacgggtacagatgtctgcaaggaggcagctgatatgatcctggtggacgatgattttcagaccataatgtccgccatcgaagagggtaaggggatctataacaacataaaaaattttgtccggtttcagttatctacatctatcgcagccctgaccttgatctccctcgccaccttaatgaactttccaaatcccttaaatgcaatgcagatcctgtggattaacatcatcatggatgggccaccagcacagtccctgggagttgagcctgtggataaagacgtgattcgtaaaccaccaagaaattggaaggactctatcctcacaaaaaacctcattctgaaaatcttggtatctagcataatcatcgtgtgtgggaccctgtttgtgttttggagagagctccgggataacgtaattacgcctagagacacaacaatgacttttacctgctttgtgttcttcgacatgtttaacgctctgtcaagcaggtctcaaacaaagtccgtctttgagattggcctctgttctaacagaatgttctgttacgcggtgttgggctccatcatgggacagctgctcgtgatatatttccccccactgcagaaggtgttccaaactgagtcactatcaatactggatctcctgtttctgctaggtttgacgtcaagcgtgtgtatcgtggcagagattataaagaaagtggagagatcccgggagaagattcagaaacacgtttcttcgacaagctcatcttttctcgaggtctag

SEQ ID NO: 215200 - DNA, 309 bp, synthetic construct
  misc_feature 1..309: note = Description of Artificial Sequence: Synthetic coding sequence
  source 1..309: mol_type = other DNA
atgaaagttgcaagattccagaaaataccaaacggcgagaatgagaccatgattccagtgttgacgtccaaaaaggcctctgagctgccggtttctgaagtcgcaagcattttgcaagccgacctccagaacggactgaacaagtgtgaggtctcacaccgtcgcgcttttcatggttggaacgagtttgacatcagcgaagatgaacccctatggaaaaagtacatcagccagtttaaaaatcccctaatcatgcttctgctggcttcggccgttatctcggtgctgatgcatcagttcgacgactag

SEQ ID NO: 215201 - DNA, 2760 bp, synthetic construct
  misc_feature 1..2760: note = Description of Artificial Sequence: Synthetic coding sequence
  source 1..2760: mol_type = other DNA
atgaaggttgctagatttcaaaagatacccaacggtgagaacgagacaatgatccccgtccttaccagcaaaaaagcctctgaactgcccgtgtccgaggtggcatctatcctccaggcggatctgcagaacgggcttaataaatgcgaggtgagccatagaagagccttccatggctggaacgagttcgacatttcagaggacgaacccctctggaagaagtacatcagccagttcaagaacccactgattatgctgttacttgcatcagcggtcatttccgtgctgatgcaccagtttgatgacgctgttagtatcacggtggcgatcctgatcgtcgtgacagtcgcctttgttcaggaataccgttcagaaaagagcctcgaagagctatcaaagctcgtgccacccgaatgtcactgcgtgcgcgaagggaaattggagcacaccctggcccgagatcttgtccccggagatactgtctgtctgagcgtgggggatagggtgcctgccgatctgagactttttgaggctgtggacctcagcattgatgagtccagtctgacgggagagacaaccccctgctcaaaagttaccgcgcctcagccggcagccacaaacggcgacctggcatccaggtcaaacatcgcttttatggggactctcgttcggtgcgggaaagccaagggcgtcgtgatcggcactggagagaatagtgaatttggcgaagtgtttaagatgatgcaggcagaggaagcccctaaaacacctctgcagaaaagcatggatcttctcggtaagcagctctcgttttatagctttggaataatcggcataattatgctcgtcgggtggctcttgggaaaagacattctggaaatgttcactatttcagtgagcctcgcagtcgcggctattcccgagggcctccctatcgtggtcaccgtgaccctggccttgggcgtgatgcgcatggtcaaaaagcgagccatcgtgaagaagctgcccattgttgagactctgggctgctgtaacgtcatctgttctgacaagacgggcacccttactaagaatgagatgactgtgacacacattttcacgagcgatgggcttcatgctgaggtaacaggggtaggatataatcagttcggggaggtgattgtggatggagacgtggttcatggattctataatccagccgtgtctagaatcgtcgaagccggatgtgtgtgcaacgatgcagtgattagaaataacactttgatgggcaaaccaacggagggggcacttatcgctctcgctatgaaaatgggattagatggacttcagcaggattacatcaggaaagccgagtacccattctctagtgagcagaaatggatggctgttaagtgcgtgcacaggacacaacaggaccgacccgagatctgcttcatgaagggagcttacgaacaggtcatcaaatactgtacaacgtatcagagcaagggtcagacactaacgctcacacaacaacagcgggatgtctatcagcaggaaaaggctcgcatggggtctgccggactccgagtgctggctttagcctctggacccgaactcggccagttgacctttctgggactggtgggaattatagacccccctaggacaggcgtgaaggaggccgttactactcttattgcctcaggcgtttcaataaaaatgatcaccggggacagccaggagaccgccgtcgctatcgcctctcggctcggtctctatagtaagacgagccagtccgtgagcggcgaagagatagacgctatggacgtgcagcagctgtctcagatcgtgcctaaagtggctgtcttctaccgcgctagccccagacacaagatgaagattattaaaagccttcagaagaatggctcagtggttgctatgacaggggacggcgtgaacgatgcagtagccctcaaggcagccgacattggggtggccatgggacaaactgggacagacgtgtgtaaagaggcagcagacatgatactggtggacgacgacttccagaccataatgagtgccattgaagaaggtaagggtatttacaacaatattaagaactttgtgaggttccaactttctacttccatagccgctctgaccctgattagcttggcgacccttatgaactttccaaatcctctcaacgccatgcagattctctggattaatataatcatggatgggccacctgcccagtctctgggagtggaaccagtggacaaagatgtcatacgcaagcctcctagaaattggaaagacagtatcctgacgaagaatctgatcctcaagatcctggtatcaagcattatcatcgtatgtggcacgcttttcgtgttctggcgcgaactgcgtgacaacgtaatcactcctagagatacgactatgacgtttacctgcttcgtatttttcgacatgttcaacgcgttgtcttcccgcagccagacgaagtcggttttcgagatcggcctctgttctaatcgcatgttctgctacgctgttctcgggtcaattatgggacagctgcttgtgatatactttccacctctgcaaaaggtttttcaaacagaaagcctgagcattcttgatctgctctttctgctgggcctcaccagcagcgtgtgtatagtcgccgagatcattaagaaggtggagagatccagagagaagatccagaagcacgtaagttctacttcttctagtttcctcgaagtctag

SEQ ID NO: 215202 - DNA, 2772 bp, synthetic construct
  misc_feature 1..2772: note = Description of Artificial Sequence: Synthetic coding sequence
  source 1..2772: mol_type = other DNA
atgataccagtgctcactagtaaaaaagcatcagaactgccagtgtctgaagtggcctctatcctacaggcagatctgcaaaatggcctcaataaatgcgaggtaagtcaccgcagagcttttcacgggtggaatgaattcgacattagcgaagatgaaccactctggaagaagtacattagccaatttaaaaatcccctgatcatgctcctgctggcttctgctgtcattagcgtgctgatgcaccaattcgatgacgctgtctccatcacagtggccatcctgatcgttgtgacggttgcattcgtgcaggagtaccgctccgaaaaaagccttgaagaactatccaaactcgtccctccggaatgccactgcgtcagggagggaaagttggagcacaccctcgctagagatttagttcctggcgatactgtttgtttatcagttggcgacagagtcccagctgacctgcgcctttttgaggcagtagatctgtctattgacgaaagttctctcacaggcgaaacaaccccttgtagtaaggtgacagctccacagcccgctgctaccaatggggatctggcctcgcgatcaaatatcgccttcatgggaaccctggtgcgatgtggcaaagccaaaggcgtcgttattgggacaggcgagaatagcgaatttggcgaggtcttcaagatgatgcaggccgaagaagcaccaaagactccgctacagaaaagtatggatctgttgggtaagcagctgtccttctactccttcggaattatcggcataattatgctggttgggtggctgctgggtaaggatattctggagatgtttactatcagcgtgagcctcgccgtcgcagcaatccccgaggggctgcccatcgtggtgacagtgacgctcgcactgggcgtcatgcgcatggtaaaaaaacgcgctattgttaaaaagctgccaatcgtggagaccctgggatgttgcaacgtgatatgctccgataagactggtactttaaccaaaaacgaaatgacagtcactcatatcttcacttctgacggcctgcacgctgaggtgacgggggtcgggtacaaccagttcggcgaagtgattgtggatggggatgtggtgcacggattctacaatcctgctgtgtcccgaatcgtggaggcaggttgcgtgtgtaatgatgctgtgattcgcaacaacactctgatggggaagccaactgaaggtgccctcattgcccttgctatgaagatgggattggacggcttgcaacaagattatattcggaaagctgagtatccctttagttcggagcagaagtggatggccgtgaagtgcgtgcataggacccagcaggaccgtccagaaatctgttttatgaaaggcgcttacgaacaagtgattaaatactgcactacgtatcagtccaaggggcagaccctcacactcacgcaacaacagcgagacgtgtatcagcaggagaaggccaggatgggctcagctgggctgagagtgcttgccctagcaagcgggcctgaattggggcaacttaccttcctcggattggtcggcattattgacccaccgagaacaggcgtgaaagaggcagtgacaactttgattgcatctggagtatcgattaagatgattaccggtgactcccaggagaccgccgtggcgattgcctctcgattaggattgtactctaagacgtctcagtcagtctcaggggaagaaatagatgctatggatgtgcaacagctcagtcagatcgtgccgaaggtggccgtgttttatcgggcttctcctaggcacaagatgaaaatcattaagtccctgcagaaaaacgggtctgtggtggccatgactggggatggagtcaacgatgctgtagccctgaaagctgccgacataggcgtggccatggggcaaacaggcactgacgtttgtaaagaggcagcagatatgatcctcgtcgacgatgacttccagaccattatgtcggctattgaggagggtaagggcatctataacaacattaagaattttgtgcgctttcagctctccacaagcattgccgcacttaccttaatcagtctggcgaccttgatgaatttccccaatccactgaacgcaatgcagattctgtggatcaacatcatcatggacggccctccagcacagtcactgggagtggagccagtcgacaaggatgtcatccgcaaaccgccacgcaactggaaggacagcatcctgaccaagaacttgatcctgaaaatacttgtgtcctccatcatcatcgtgtgcggtaccctgtttgtgttctggagagagttacgagacaatgtcattactcctcgagacactacaatgaccttcacatgcttcgttttcttcgatatgtttaacgctcttagctccaggtcgcaaacaaagagcgtgttcgagatcggtctctgcagcaacagaatgttctgctatgcggttctaggaagcattatgggtcaactgctcgtaatttactttccccctctgcagaaggtcttccaaacagaatccttatctatcttggatctccttttcctcttgggtctgacgagctcagtctgcatagtcgccgagattatcaagaaagtggagcggagcagagagaagatccagaaacatgtatggctgtgggagcgcagcgggcagcaactggtagaaattcatcctcatctcgaaacggggctgcccctcactgaggacgtgtcctgcgtatag

SEQ ID NO: 215203 - DNA, 2835 bp, synthetic construct
  misc_feature 1..2835: note = Description of Artificial Sequence: Synthetic coding sequence
  source 1..2835: mol_type = other DNA
atggatagtctgcttccacctagtaggttttcgtacttcaaaaagtaccctcttcatgcaataaggaggtacttaagcacactgagaaaccagagagcggaagagcaagttgccagatttcagaagattcccaatggcgaaaacgagacaatgatcccagtattgacttccaagaaggcttccgagttaccagtgtctgaagtcgcctcaatcctgcagtttaaaaatcccctgattatgcttctgctggccagtgccgtcatctctgttctcatgcatcaatttgacgatgcggtttcgatcacagtggcaattcttatcgttgttactgtggcattcgtgcaggaatataggagcgaaaagtccctggaggagctttccaagctcgttcctccagagtgtcattgcgtacgggaaggcaaactggagcacactctggccagggatttagtgcctggagacaccgtgtgtctctcagtgggcgacagggtgccagctgacctgcggttatttgaggcggtcgatcttagtatcgacgagagttcgctcaccggcgagaccacaccctgtagcaaggtaacagccccacagccagccgcaaccaacggcgacctggcctctagatctaacatcgctttcatggggaccttggttcggtgcggtaaagctaaaggagtcgttatcgggaccggcgaaaattcagaatttggcgaggtattcaaaatgatgcaggcggaagaagccccaaagacacctctgcagaaaagcatggatcttctagggaagcagctatcattctactctttcggcattataggcatcattatgctcgtcgggtggctgctgggcaaggatatcctggagatgtttacaatctccgtgtcactggccgtcgccgcaatccccgaaggcctccccatcgtcgttaccgtgacactagcattgggcgttatgcggatggtgaaaaaacgagcaattgtcaaaaaactgccaattgtggagactctgggatgctgcaacgtgatctgttctgataagaccggcaccctcactaaaaatgagatgactgtgactcacatcttcacctctgacggactgcacgctgaagttaccggcgtcggctacaatcagttcggagaagtcattgtggatggggatgtcgtgcatggattctacaacccagcagtatcacgcatcgtcgaggctggttgtgtgtgcaatgacgccgtgatcagaaacaatacactcatgggtaaaccaacagaaggtgctctgattgccctcgctatgaagatgggcctggatggtctgcaacaggactatattagaaaggccgaatacccttttagcagtgagcaaaaatggatggcagttaagtgtgtgcataggactcagcaggacaggcctgagatctgttttatgaagggggcatacgaacaggtaattaaatattgtactacataccaaagtaaaggacagactctcacactcacccagcaacagagagacgtgtatcagcaggagaaggcgaggatgggatcagcgggtcttcgggtcctggctttagcatcgggacctgagttaggccagcttacctttctgggcctggtgggtattatcgacccgccacggacgggggtgaaagaggctgtcacaacgcttatcgctagtggggtttccattaaaatgattaccggcgatagccaggagacagcagtcgctattgcatctcggctgggcctgtattccaagacctcacagtccgtctctggtgaagagatagatgccatggacgttcaacagctgtctcagattgtgccgaaggtggccgtcttttaccgcgcatccccaaggcacaagatgaaaataataaagtccttacagaagaacggatctgtcgtagctatgacaggcgatggcgtgaatgacgctgttgctttgaaagctgccgacatcggagtcgcaatggggcaaacaggcaccgatgtttgcaaagaggccgctgatatgatccttgtggacgacgatttccagaccatcatgtctgccattgaagaaggcaaagggatctacaacaatatcaaaaactttgtgcgctttcaactctctacttcaatcgcagccctcaccctcatttctctggccacactgatgaactttccaaacccccttaacgcaatgcagatcctgtggatcaacatcattatggacgggcctccagctcagagcctgggggtcgagcccgtcgataaagatgtgattcgcaagcctcctaggaattggaaggactctattttaacgaagaatctcatcctgaagattctagtttcttcaatcattatcgtctgcggcaccttatttgtattttggagagagctccgcgacaacgtcatcacccccagagacactactatgacttttacttgctttgtcttcttcgacatgttcaacgccctctccagtaggtcccagaccaaaagcgtgtttgagatcggactgtgttccaaccggatgttttgttacgccgtccttggtagtatcatgggacagctgctcgtcatctacttccctccactccagaaagtattccagaccgagtctttatccatactagacctgctgtttctgctcggtctcacttcatcggtgtgcatcgtggctgaaattatcaagaaagtcgagcgttctcgggagaaaattcagaagcacgttagcagtaccagttccagttttctggaagtgtggctctgggaacggagcgggcaacaactggtggagattcacccacatctggaaaccggcctccctttaacagaagacgttagttgtgtgtag

SEQ ID NO: 215204 - DNA, 2841 bp, synthetic construct
  misc_feature 1..2841: note = Description of Artificial Sequence: Synthetic coding sequence
  source 1..2841: mol_type = other DNA
atggtcgagggtcgggtgtccgaattcctcaagaaactgggcttctctggcggtggtcgccagtaccaggccctcgagaaggacgaagaggaagccttgatagacgagcagagcgagctaaaagctattgaaaaagagaaaaaagtgaccgccctccctcctaaggaagcctgtaagtgccagaaggaggacctggcaagagcgttttgtgtcgacctgcacaccggactgtctgaattctctgttacgcagcggaggttggcccacggatggaacgagtttgtcgcggataacagcgagcctgtttggaaaaagtatttagatcagtttaaaaatccgctgattttgctgctgttgggatcagcgctggtatctgttctgactaaagagtatgaagacgctgtgtctattgccactgctgtgctagttgtcgtaaccgtggcgttcatccaggaataccgtagcgaaaagagccttgaggaattaactaaaatggtcccccctgaatgcaactgcctgagggagggaaaattacagcatctcctggcgagggagctggttcccggagatgttgtgagccttagcattggcgaccgtatacccgctgacatcagactgaccgaggttacggatcttctggtggacgagagtagtttcactggagaggccgagccttgctcaaaaaccgactcgcccttaactggagggggtgatctaaccacactatccaacattgtctttatggggacattggtgcagtacggccgtggacagggagttgtaatcgggacaggagagtcatctcagttcggcgaagtgtttaagatgatgcaggctgaggaaactccaaagacaccactgcagaaatctatggatagactggggaaacagcttacgctattttcttttgggataatcggtctcataatgctcattggatggtctcagggaaagcagctgctgtctatgttcactattggggtgtctttggccgttgccgcaattcccgagggactccctattgtggttatggtgaccctcgtcctcggagttttgagaatggctaagaagagggtgatcgtcaagaaactgcccatagtcgagacgctggggtgctgcagcgtgctgtgtagtgataagactggcaccctgacggccaacgaaatgacggtgacccagctagtgacctccgatggccttagagccgaggtcagcggtgtgggctatgacgggcagggcacagtctgtctgctccctagtaaagaagtgattaaggagttctcaaatgtgtctgtcggcaagctagtggaagctggctgtgtggcaaacaacgcggttattcggaaaaacgctgtcatggggcaaccgaccgagggggctctcatggcgctggctatgaagatggatctcagtgatataaaaaatagttacattagaaaaaaggaaatcccctttagcagtgagcagaagtggatggctgttaagtgcagccttaaaacagaagaccaggaagatatctactttatgaagggggctctcgaggaagttatccgctactgcactatgtataataacggcggaatccctctgcctttgaccccccagcaaaggagtttttgtctacaggaagagaagcgcatggggagccttggcctcagagtgctggcactcgcctccgggccagagcttgggcgtctcacatttctgggattggttgggattatcgatccacccagagtaggtgtaaaggaagccgtgcaggtgctttcagaatcaggggtttccgtgaaaatgatcacgggcgacgcactcgagacagccttagcaatcggcagaaatataggtctatgtaacggcaaactgcaggctatgagtggagaggaggtcgacagcgtcgaaaaaggagagcttgccgacagggtcggtaaagtttccgtgttcttccgaactagcccaaaacacaagctgaaaatcattaaagctctccaagaaagtggcgcaattgtggccatgactggagatggagtcaatgacgctgtggcactgaaaagcgcggacatcggcatagctatggggcaaaccggaaccgacgtgtcaaaagaggctgccaacatgatcttggtagacgacgacttctcagcaataatgaatgctgttgaggagggaaaggggatcttttataatatcaaaaacttcgtgcgtttccaactgagcactagcatttctgcacttagtctgataacactctcaaccgtctttaacctcccatccccactcaacgccatgcagatcctgtggatcaacattatcatggacggaccacccgcacagagcctgggcgtggaaccagtggacaaggacgccttcagacagcccccacgctccgtgcgcgataccatcctgtctcgcgcactgattttaaaaatcctaatgagcgctgccattatcatcagcggaacattatttatcttctggaaggagatgccagaggacagagcctccaccccaaggactactaccatgacttttacctgtttcgtgttctttgacctgttcaacgcactgacatgcaggtctcaaaccaaacttatctttgaaatcgggtttctgcgcaaccacatgttcctatacagcgtgctgggctcaattttgggccaactggcagtgatttatatccccccactgcagagggtgttccagaccgagaatctgggagcacttgacctgctctttctgaccgggctggcatcgagcgtttttattctttcagaattattgaaactgtgcgagaaatactgctgttcccccaaaagagtacagatgcaccccgaagatgtgtag

SEQ ID NO: 215205 - DNA, 2928 bp, synthetic construct
  misc_feature 1..2928: note = Description of Artificial Sequence: Synthetic coding sequence
  source 1..2928: mol_type = other DNA
atggttgaaggaagggtatctgagttccttaagaagttagggtttagcggcggtggtagacagtaccaagctctggaaaaggacgaagaggaagctctaatcgatgagcagtccgaattaaaagctattgagaaagagaagaaggtcactgccctccctcctaaagaggcatgtaagtgccagaaggaggacctggccagagccttctgcgtggacctgcacactggcttgtctgagttcagtgttacacagcgtcgactggcccacggctggaatgagttcgtagccgacaattctgagccagtctggaaaaaatacctggaccagttcaagaacccgctgatactgctactcctgggaagtgccttggtttcggtcctcaccaaggaatatgaagatgccgtgagcattgcaacagcggtcctcgtcgttgtgacagtcgcatttatccaggaatacaggtccgagaagtcccttgaagagctgactaagatggtccctccagaatgcaattgtctgcgggagggcaagctgcagcatctgcttgcccgtgaactcgtgccgggagacgtggtgagtctgtcaatcggcgatcgcatcccggctgacatccggctgacagaggtaacagacctgcttgtggacgaaagctctttcacaggggaggccgagccctgcagcaagacagactccccgctcaccggaggaggcgacttgaccacactgagcaacatcgtatttatgggaaccctggtacagtacggcagggggcaaggggtggtcattggcacaggcgagagctcacaattcggggaagtctttaaaatgatgcaggctgaggaaactccaaaaacacccctgcagaagagcatggatagactggggaagcagttgacgctcttttccttcgggatcatcggtctgatcatgcttattggctggtcacaggggaaacaactcctcagtatgttcaccataggagtctcactggcagtagccgcaattccagaggggctccccatcgtggtcatggtcacactggtcctgggagtgttacgcatggccaagaaacgagtcattgtgaaaaagttaccgattgtggagactctgggatgctgttctgtgctttgttctgacaaaacaggcaccctcacggctaatgaaatgactgtgacacaattggtgacgagcgacggtttacgagcagaggttagtggggtgggctatgatggccaagggactgtgtgtctactgccaagcaaggaagtaataaaagaattttctaacgtgagcgtggggaaactggtggaggccggatgcgtggctaacaacgccgtgatacggaaaaacgctgtgatgggccagccaacagagggagccctgatggccctggctatgaagatggatctgagtgatattaagaatagctacatcaggaaaaaggagattccattctcttcagagcagaagtggatggccgtgaagtgttcgctgaagacagaagatcaagaggatatatacttcatgaaaggtgctcttgaggaagtgatcaggtactgcaccatgtacaacaatgggggaattccactgccacttaccccacaacagaggtctttctgtttacaggaagagaagcggatgggatcgctggggctacgggttctcgccctcgcatctgggccagagctcggccgattaactttcttgggactggttggcatcatcgatcctcccagggtcggtgtcaaagaggccgtgcaagtgttatcggagtctggcgtttctgttaaaatgattaccggagatgcactcgaaaccgctttagccataggtcgaaatattggattatgcaatggaaaacttcaggccatgtctggagaagaagtggactctgtggagaagggtgagttagccgacagggtggggaaagtgtcagttttcttccgtacgagtccaaaacacaagcttaaaatcataaaggcacttcaggaaagtggcgcaattgtggccatgacaggggatggagtgaacgacgctgtggcgctgaagtctgccgacattgggattgctatgggtcagaccggcacagatgtgtcgaaagaagcagctaacatgatcctggtggacgatgatttctccgcaattatgaatgctgtcgaggaaggaaaaggcattttctataatattaagaactttgtccgctttcaattgtccacaagcatctctgctctgtccctcatcactttatcaaccgtgttcaatctccctagcccgctgaacgccatgcagatcctttggattaacattatcatggatggcccaccagctcagaggtcgagccaaaaaacagaagtttgctgcaccgcggtgagactaggcgtcgaaggcaggggggaatccacctgggctggtcgggcagggctgggagtggaaccggtagataaggacgctttccgtcagccacccaggagcgtgagagatacaatcctgtctagagccttgattcttaaaattctgatgtccgcagctattataatcagcgggactctattcattttttggaaagaaatgccggaggacagagctagcactcctagaacaacgaccatgactttcacgtgctttgttttttttgacctgtttaacgcgcttacctgtagatctcagacaaagctaatctttgaaatcggcttcctgcgtaatcatatgtttctctatagcgttctgggcagtatcctggggcagctcgcggtgatttacattcctccactccagagggtgttccaaacagaaaacctcggcgctttggatttactctttctgaccggccttgccagcagtgtctttattctgtctgaactgctgaaattatgtgagaaatattgttgctcccctaagagggttcagatgcatccggaggacgtttag

SEQ ID NO: 215206 - DNA, 2388 bp, synthetic construct
  misc_feature 1..2388: note = Description of Artificial Sequence: Synthetic coding sequence
  source 1..2388: mol_type = other DNA
atgcgcaccccttcagcctctcccaggcagtgtttgtcatggtcactctcccccagtagcagtctccgcgaaggcaaattacagcacctattagccagggaactggttccaggagacgtcgtgagtctgtccatcggcgatcgcattcccgcagacattcgcctcactgaagtaacagatctgttagtcgatgaatctagctttaccggtgaagccgagccgtgctctaaaaccgattctcccctgaccggagggggagacctgacgacgctgagtaacatcgtattcatgggtaccttagttcaatatggccgagggcagggcgtggtaatagggaccggggaaagttcacagtttggggaagtgttcaagatgatgcaggctgaggagacccccaaaacccctctccagaagagcatggaccgcctgggtaaacaactcacgttgtttagctttggcattatcgggctaataatgctcatcgggtggtcacagggtaaacagctcctgtctatgtttaccatcggggtatccctggccgtcgccgctatcccagaaggactgcctatcgtggttatggtcaccctggtactgggggtgcttaggatggccaaaaaacgcgtgatcgtgaagaagttaccgattgtggaaacacttggatgttgcagcgtgctgtgctccgacaagacaggaactctgacagccaatgaaatgaccgtgacccagctggtcacatcagatggacttagagcagaagttagtggcgtcgggtacgatgggcaggggacggtttgtcttctgccctccaaggaggtgattaaagagttttctaacgttagtgtgggaaagctggtagaggcgggttgtgtggcaaacaatgccgtgattagaaagaatgctgtgatgggacagcctacggagggtgctcttatggccctggccatgaaaatggacctgagcgatatcaagaactcttatatccggaagaaagagatcccattcagcagcgagcaaaaatggatggcagtaaaatgcagtctgaagacggaagatcaagaggatatctatttcatgaagggagctctcgaagaagtgattagatactgcacaatgtacaataacggcggtatacctctacctctgacccctcaacagcgcagcttttgtctccaggaagagaaaagaatggggtccttgggattaagggtgctggcattggcctcagggcctgaactgggacgcttaacttttcttggactggtaggcatcatagatcctccaagggtgggcgtcaaagaagccgtgcaagtcctgtccgagtcaggagtttcggtcaaaatgattacaggcgacgccctggagaccgcgctggctataggccgaaatatcgggctctgcaatggtaaactgcaggcgatgtcaggcgaggaggttgactctgttgagaaaggagagctggccgaccgcgtgggcaaggtctccgtgttttttcgcacctcaccaaagcataagctaaaaattatcaaggcactccaggaatctggcgcaatcgtggctatgacaggagacggcgtaaacgacgctgtggcgctaaagagcgccgatattgggattgccatgggacagacaggaaccgatgtgtctaaggaggcagccaatatgattctcgtcgatgatgacttcagtgcaattatgaacgcagtggaggagggtaaaggcattttttacaatattaaaaatttcgttaggtttcagctatccactagtatctctgctctttccctcatcacgctgtccactgtttttaatctcccctccccactgaatgcgatgcagatcctgtggattaacataatcatggacggccctccggctcagtcgcttggggtggaaccggtcgataaggacgcctttagacaaccccctcggtcagttcgcgatactatcttgtcccgcgcactgattcttaaaatcttgatgtccgctgctatcatcatcagtggaaccttgtttatcttttggaaagagatgccagaggatcgagcttcaactccccgtacaaccactatgaccttcacatgcttcgtcttcttcgatctgtttaacgcactcacctgtcggagccagaccaagcttattttcgagatcggctttctgagaaaccacatgtttttgtattccgtcctaggcagcattcttgggcagctcgctgtcatttacatcccccctctgcaacgtgttttccagaccgagaatctgggcgcactggacctcctgtttctgacgggcctcgctagctctgtgttcattctcagcgaactgctgaaactgtgtgagaagtactgctgttcacccaagcgcgtccagatgcaccccgaggatgtgtag

SEQ ID NO: 215207 - DNA, 3090 bp, synthetic construct
  misc_feature 1..3090: note = Description of Artificial Sequence: Synthetic coding sequence
  source 1..3090: mol_type = other DNA
atggaagcagctcacctgttacccgcagcagacgtcctacggcacttctcagttactgccgagggaggcctcagcccggcacaggtgaccggcgcacgtgaacgctatggacccaacgagctaccatccgaggagggtaagtcattgtgggagctggtgctggagcaattcgaagacctgcttgtgaggatactgctgttggccgcactggtaagcttcgtcctggcatggtttgaagaaggtgaggaaacaaccacggcatttgtcgaacccctggttattatgctgattctagtggccaatgctatcgtgggggtttggcaggaaaggaacgcagagagcgccattgaggctctgaaagagtatgaacctgagatgggaaaagtaattagatctgatcgcaaaggggtccagcggattagagcacgagatatagtgccgggagatattgtggaggtggccgtcggagacaaagtccctgccgatctgagactgatcgagatcaaatcaacaacactgagagttgaccagagtattctcacgggggagtccgtgtccgttactaaacacaccgaagctatccctgaccctcgtgccgtcaaccaggataaaaaaaatatgcttttttccgggacgaatatcaccagtgggaaggcagtcggagtcgccgtcgcgaccggcttacatactgaactcggtaagattaggtcccagatggccgctgtggaacccgagcgcacacctctgcaacggaaactcgacgagttcgggaggcagcttagtcatgctatctcggtgatctgtgtggcagtctgggttataaacattggccattttgcagacccagcccatgggggtagctggctcaggggggctgtatactattttaagattgcggttgccctggccgtcgcagcgatccctgagggactgccagccgtaatcaccacttgcctagccctggggacccgtcggatggccaggaaaaatgctatcgtacgcagcttacctagtgtggagactctgggatgtactagtgttatctgctcagacaagactggcacccttaccaccaaccaaatgagcgtgtgtaggatgtttgtggttgcggaggccgacgctggatcttgcctgttacacgagttcacgattagtgggaccacatacacccctgagggcgaagtgagacaaggcgatcagcccgtgagatgcggacagtttgacgggctcgtcgagctggccacaatctgtgccctatgcaatgatagtgcactggactataatgaagctaaaggagtatacgagaaagttggagaagccacggagaccgccctgacgtgtctggtggagaagatgaatgtgtttgatactgacttacaagccctgagcagagtggagcgcgctggcgcttgtaacacagtgattaaacagctgatgaggaaggagtttaccttggagttctcccgtgaccgcaagagtatgtccgtgtattgtacacctacaagaccccaccctaccggacagggctcgaaaatgttcgtgaagggtgcaccagagagcgtgatcgagagatgctcgtcagtccgcgtaggatctcgcaccgcaccactcacccctacctctagggagcaaatcctggccaagattcgtgactggggcagcggctcagacaccctgagatgtctggccttggccaccagagacgcccctcctaggaaggaggacatggaactggacgattgtagcaaatttgtccagtacgagactgacctaacgttcgtgggttgtgttggaatgctagatccgccacggccagaggttgcagcatgcattacacgctgctatcaggcaggaattagggtggttatgatcaccggcgataataagggaaccgccgtggctatctgccgacgccttgggattttcggtgacaccgaagacgttgctggtaaggcctacacggggagggagtttgatgaccttagcccagagcagcagagacaggcgtgccgcacggcaaggtgctttgctagggtggaacctgcacacaagtctcgcatagtagaaaatcttcagtcttttaatgagatcaccgctatgaccggtgacggtgtgaacgacgcccctgccctgaagaaagcagagatcggcatagccatgggcagcgggactgccgtggccaagtctgcggcagagatggtgctgagcgatgacaacttcgcaagcattgtggctgctgtggaagagggacgcgcaatctactcaaacatgaagcagtttattcggtatctgatctcctccaacgtgggagaggtcgtctgcatttttctgactgccattttagggttgccagaggcactcatcccggtgcagctgctttgggtgaacctcgtcacagacggactgccagccaccgctctcggcttcaatccccctgatctggacatcatggagaaattaccccgttctccccgtgaagctctcatcagcggctggctgttcttccgctatctggcaatcggcgtatacgttggcctggctactgtggcggcagccacctggtggttcgtttatgatgctgagggcccacacattaacttctaccagctgcggaattttctcaaatgctccgaagataacccactgttcgccggaatcgattgtgaggtgttcgagtcacggtttcctactaccatggcactgagtgttctggtaactattgaaatgtgcaacgctctcaatagcgtctcagagaatcagtctttgctcaggatgcccccatggatgaacccttggttattagtcgctgtcgccatgagcatggcattgcattttctaatactactcgtaccacctcttcccctgatttttcaggtgacaccactgagcggaaggcagtgggttgtggtgcttcaaattagcctgccagtgattctgcttgacgaggcactgaaatatttatcccgcaaccatatgcacgcctgtctctaccctgggttgctcagaaccgtgtcgcaagcatggtcacgccagcctcttaccacctcctggacacctgatcacacaggtttagccagtctgaagaagtag

SEQ ID NO: 215208 - DNA, 3132 bp, synthetic construct
  misc_feature 1..3132: note = Description of Artificial Sequence: Synthetic coding sequence
  source 1..3132: mol_type = other DNA
atggaagctgctcaccttctgcctgcggctgatgtcttgcggcacttcagtgtgaccgcagaggggggtttgagtcctgctcaggtgactggcgcacgtgaaagatacggtcccaacgaactccctagtgaagagggcaaaagtctatgggagcttgtgctcgaacaattcgaagacctattggttcgcattctgttgttggccgcactcgtgtcatttgtgctcgcctggttcgaggagggggaggagacaacaactgcgttcgtggagcctctggtaatcatgctaattcttgtggccaacgctatagtgggagtgtggcaagaaagaaacgccgagagtgcgatagaggcactgaaggaatacgagcctgaaatgggcaaagtcatccggtccgaccgcaaaggggtgcaacggattcgggctagagacatcgtccctggcgacatcgtggaagtcgccgtaggggataaagtgccggcagacctccgcctgatagaaataaagagcactacactgagagttgatcaatcaatactcaccggagaaagtgtgagcgtgaccaaacacacagaggccattcccgaccctcgtgccgtcaatcaggataaaaaaaacatgctcttcagcggcactaatatcacgagtgggaaagccgtgggagtagccgtggcaacaggactgcacacagaactgggtaaaatacgcagccagatggctgccgtggaaccggaacggacccccctgcagaggaagctggatgagtttgggcgtcaactgagtcatgcaatcagcgttatttgtgttgcagtgtgggttattaacattgggcatttcgccgatcccgctcatggaggttcatggttgaggggcgctgtatactatttcaaaattgccgtcgctcttgcggtcgccgcaattccagaaggactccccgctgtgattactacatgcctggcgcttggcacccggaggatggcgaggaaaaacgctatcgttcggtcattgcctagtgtcgagacacttggctgtacatcagtgatttgttcagacaagacaggcacgctaaccaccaatcagatgagtgtctgtaggatgtttgtggtcgcggaggccgacgctggtagctgcctgctgcacgagttcaccatcagtgggacgacctataccccagaaggagaagtgaggcagggagatcagccagtgagatgcgggcagttcgacggcctggtggagctcgccactatatgcgcactctgcaacgactcagcattggattataatgaggccaaaggggtgtatgagaaggtcggcgaggcaaccgagacagcactgacgtgccttgtcgaaaaaatgaatgtatttgacaccgacctgcaggccctaagccgagtggaaagagccggagcctgcaacaccgtgattaagcagcttatgcgcaaggaatttaccctggagttcagcagagaccgcaagagcatgtccgtgtactgtacaccaacaaggcctcatcccacgggacaaggctccaaaatgtttgtaaagggtgcaccggaaagcgtcattgaaaggtgctcaagcgttcgcgtcggtagtcgtacagccccattgaccccaacaagccgagaacagattctagccaaaattcgcgactggggctccggcagcgacacattaagatgtcttgccttagctacaagagatgcaccgccaagaaaagaagatatggaattggacgactgttccaaatttgtgcaatacgaaaccgatttaacatttgtcggatgcgtgggaatgctggatccacctcgtcctgaggtcgccgcttgtatcacacggtgctaccaggctggcatccgtgtggtaatgattacaggcgacaacaaaggtacagcagtcgcaatttgcaggcgcttaggaatttttggagataccgaggacgtggcgggaaaagcctatacgggtcgagagtttgacgatctgagccctgagcaacagcgacaggcctgtagaacagccagatgttttgctcgtgtggagccggctcataaaagccgtatagtggagaaccttcagagctttaatgaaataacggcgatgaccggagacggagttaatgatgccccagccttgaagaaagctgagatagggatcgctatgggctctggcacagccgtcgccaaatccgccgctgaaatggtgctctcagacgacaactttgcatccattgtggctgctgtcgaggaagggagggcaatctactccaacatgaaacagttcattcgctaccttatttcatccaatgtcggagaagtggtgtgtattttcctgacagcaatactgggacttccagaggcattgatccctgtacagctcctgtgggtcaatttggtgaccgacggtctacccgctactgccctggggttcaacccccctgacctggacattatggaaaaattgcccagaagtcccagggaggcgcttataagtggatggctgtttttccgataccttgcaataggagtgtatgtcgggcttgccacagtcgccgctgcaacctggtggtttgtgtacgatgccgagggcccacacatcaatttttaccagctgagaaatttcctcaagtgcagcgaggataaccctctattcgccggaatagactgcgaggtgttcgaaagcaggttccccacaactatggctctgtctgtgttggtaacaattgagatgtgtaatgccttaaactcagtatccgagaaccagtcattgcttagaatgcccccttggatgaatccttggctgctggtggctgttgcgatgtcaatggccctccacttcttgatcctgcttgtcccccctctcccgctgatctttcaggtgactcctctatccgggaggcagtgggtcgttgtactgcaaattagcctgccagtcatattgctggatgaggcactcaagtacctgtcccgcaatcacatgcatgcctgcctgtatcccggtttgctgcgcaccgtttcacaagcctggagtcgccaacctctgaccaccagctggacacctgaccatacaggacgaaacgaacctgaggtgtctgctggaaatcgggttgagtccccggtttgcacctcagactag

SEQ ID NO: 215209 - DNA, 3159 bp, synthetic construct
  misc_feature 1..3159: note = Description of Artificial Sequence: Synthetic coding sequence
  source 1..3159: mol_type = other DNA
atggaggctgcgcacttgcttcccgctgccgatgtgctgaggcacttttctgtgacagccgagggcggtctttcacctgcacaggtgacaggggcacgggaaagatacggccctaatgagcttccgtccgaggaagggaaatctttatgggagctggttttagagcagttcgaggatctgctggttaggattctgttgttagcggctttagtctctttcgtgcttgcatggttcgaggaaggtgaagagaccactacagccttcgtggaacctctggtgataatgctaattttagtcgctaatgctatcgtgggcgtatggcaagaacgaaacgccgagagtgccatcgaggccctaaaggaatacgagcctgagatggggaaggtcatcaggtctgacagaaaaggcgttcagagaattcgagcccgagatatcgtcccgggagacatcgtcgaggtagcggttggcgataaggtaccggcagacttgaggctcattgaaattaaaagcactacacttcgcgtcgaccaatctatcctgacaggagagtctgtttctgttaccaaacatactgaggcgattcctgatcccagggccgtaaaccaggacaagaagaacatgttgttcagcgggactaacatcaccagtgggaaggccgtaggcgttgccgtggccactggcctgcacaccgaactgggtaaaattaggtcccagatggccgcagttgaaccagaaagaacaccgctgcagaggaagctggacgagtttgggcgacagctctcccacgctatctcagtcatatgtgtggctgtttgggttataaacatcggccacttcgccgatcccgctcatgggggtagttggttgagaggggctgtgtattacttcaagatcgccgtggcactcgctgtggccgcaataccggaagggctgcccgcagttatcaccacttgcttagccctggggactagaagaatggcacggaagaacgcaattgttcggtcactgccaagtgtggagacgctgggatgcacaagtgtaatctgctcggacaagaccggcacgctgacaaccaaccagatgagtgtgtgtagaatgttcgttgtggcggaggccgacgccggatcctgcctgttacatgaatttaccatctccgggacaacatatacacctgaaggagaggtacgccaaggtgatcagccagttcggtgcggccaatttgacggtctcgtggaattggctacaatttgtgctctgtgtaacgattcagccctggactataatgaagcaaaaggtgtgtacgagaaggtcggggaggcaacagagaccgctttaacatgtctcgtggaaaagatgaacgtgttcgatacagatttacaggcgcttagtcgagtggaacgagctggcgcatgcaataccgtcataaagcaactgatgcgaaaggagttcaccctcgaattcagcagggatagaaagagcatgtctgtgtactgcactcctacccggcctcatcctacaggacagggatctaagatgtttgtcaaaggagcccctgagtcagtgatcgaacgatgcagtagtgtcagggttgggtccagaacggcacccttgacccctacctctcgagaacaaatactcgctaaaatcagagactggggttccggcagcgacaccctccgctgtcttgccctggccaccagggatgcccctcctagaaaggaagatatggagctggatgactgctccaagttcgtccagtacgaaacagacctcactttcgtggggtgtgtaggtatgctggacccaccacgcccagaagttgccgcatgtatcacaagatgctaccaagctgggattcgcgtagtgatgattaccggcgacaataaaggcacggctgtagcaatttgcaggagactaggcattttcggcgacaccgaagatgtggctggaaaggcctacaccgggagggagtttgatgacctatctcccgagcaacaaaggcaggcttgccgaaccgccaggtgcttcgctagggtagagcctgcccacaagtcacggatcgtggaaaacctccaatcctttaatgaaatcacggccatgactggggatggagtgaatgacgctcccgcactcaagaaagcggagataggcatcgcaatgggatccggcactgccgtggcgaagtctgccgctgagatggtcctgagtgacgataattttgcaagcattgtggccgcagtggaggagggaagggcgatctactcgaatatgaaacagtttattcgttacttaatctcctcaaatgtgggcgaggtggtctgcatttttctgacagccatcctagggttaccagaagcattgatcccagttcaactgctgtgggttaacctagtgacagacggcctgccagctaccgccctcggctttaatccgcctgacctggatatcatggagaaactgccgcgttccccccgagaggctctgatttctgggtggctgttcttcagatacctggccattggtgtttacgtcggtttagccaccgtcgcagccgctacatggtggtttgtctatgacgccgagggcccacatataaacttttatcagctacgaaactttctcaagtgctcagaagacaaccccctctttgctgggatcgattgtgaagtgtttgagtcgagattcccaaccacaatggctctgtccgttttagttacaattgaaatgtgtaacgcactcaactccgtgtcggagaaccagtccctgttgcgcatgccaccatggatgaatccgtggctgttggtcgccgtggctatgagtatggcgctccacttccttatcctgctagtgccaccactgccactcattttccaggtcacgcccttgtccggtcggcagtgggtggttgtgctgcagatttctctgcccgtcatcctcctggatgaggcacttaagtacctgagtcgtaatcacatgcacgcttgtctgtaccctggcctactccggactgtatcacaggcttggtcccggcaaccacttacaacctcctggactcctgatcacacaggtctggcaagcctgggtcaaggccatagcatcgtttccctttcagagctacttagagaagggggaagccgagaggaaatgtcccagaagtag

SEQ ID NO: 215210 - DNA, 3090 bp, synthetic construct
  misc_feature 1..3090: note = Description of Artificial Sequence: Synthetic coding sequence
  source 1..3090: mol_type = other DNA
atggaggcagcgcacttactacctgcagccgatgtgctgagacactttagcgtcacagccgagggtggcctatctcctgcccaggttaccggggctcgtgaacgatatggacctaacgaactgccgagcgaggagggaaaatccctgtgggagctggtactagagcagttcgaagatctactggtgcgaatactgttgctggctgccctggtgagctttgtgctggcctggtttgaggaaggcgaggagactacgacagcttttgtggaaccactggtgattatgcttatccttgtcgcaaatgcgattgtgggagtgtggcaggaaagaaacgctgagtcagccatagaggccctcaaagaatacgagccagaaatggggaaggtgataagatcagaccggaaaggggtccagcgcattcgggcacgcgatatcgttcctggcgacattgtggaagttgcagtgggagacaaggtaccggctgacctgagactgattgagatcaagtccacaaccctgagagtggatcagagtatcctgactggcgagtctgtgtccgtgaccaagcacaccgaggcaattccagaccctagggcagtgaatcaagataagaaaaatatgctattttccggtacgaatatcacatccggaaaggccgtcggggtcgcggtggctaccgggttacacactgaactcggtaaaatccgcagtcagatggctgctgtggagcccgagcgtacgcctctgcaaagaaagcttgacgaatttggtaggcagctgtctcatgctatctccgtgatatgtgtggcggtatgggtaatcaacatcggccatttcgccgatcccgctcatggcggaagctggcttagaggcgcagtgtactatttcaagatcgctgtagctctggctgtagcagcaattccggaaggcctaccagccgttattactacttgcctcgcgctgggcacccggagaatggcccgaaaaaatgcaattgttaggagtttgccgtccgtagaaacattagggtgtacgtctgttatatgtagtgacaagactggtactctcaccacaaatcagatgtctgtttgcagaatgttcgtagtggccgaggccgatgccggaagttgcctcttgcacgagttcacaatatctggaacaacctacacacccgaaggggaggtccgacagggtgaccagccggtgcgatgcggacagttcgatggcttagtggaactggcaaccatttgcgccctctgtaatgacagtgccttggactacaacgaggctaaaggcgtgtacgagaaagtgggagaggccacagaaaccgcgttgacttgtctggtggagaaaatgaacgtttttgatacagatctgcaggcgctgtcccgagtggaacgcgcaggtgcttgtaataccgtgattaagcaactcatgagaaaggaatttacactagagttcagccgcgatcggaagtccatgagcgtgtattgtacccctactagaccacatcctactgggcaggggagcaagatgtttgtcaagggtgcacctgaatccgtcattgaaagatgtagcagcgtccgcgtgggctcgcggaccgcccctcttacccctaccagtcgggaacagatcttagcaaagattcgggactggggctcaggatctgacaccctcagatgtctggcactggcgacaagagacgcacctcccaggaaagaagacatggagctggacgattgcagtaaatttgtgcaatacgagaccgacctgacattcgtgggctgtgtaggaatgctcgacccacctaggccagaggtggcagcatgtataaccagatgttatcaggcaggaatcagagtggtgatgataaccggagacaacaaaggcactgctgtggctatttgccggagactggggatattcggcgacacggaggacgtggccggaaaggcctacaccggaagagagttcgacgatctgtcccccgaacagcagcggcaagcctgtcggacagctcgctgcttcgctcgagtggagccagcgcataaaagcaggatcgtcgaaaatctgcagtcgttcaacgagatcaccgcaatgacaggagatggggtcaacgatgcgcctgcgctgaaaaaagccgaaattgggatcgccatgggaagcggaaccgctgtggctaagagcgccgcagaaatggtcctaagcgatgataatttcgcatccatcgtcgctgctgtcgaagaaggccgtgcgatctactccaatatgaagcagttcataagatatttaatatcatctaacgtcggcgaggtggtatgtatctttctcaccgcaatcctaggattgccagaggcgctgattcccgttcagttgctgtgggtcaacctggtgaccgatgggctgccagcaactgcactggggtttaatccccctgacctggatattatggagaagctcccgaggagtccaagagaagcgttgatcagcggttggctgtttttccgctacctcgccattggggtgtatgtgggacttgctactgttgccgctgctacatggtggtttgtttacgacgccgaaggcccacatattaacttttatcagctgcggaacttcctgaagtgctctgaagacaatccactgtttgcagggatcgattgtgaagtgtttgagtccaggtttccaaccacaatggctctgtccgtgcttgttacaatcgaaatgtgtaatgccctgaacagcgtgagcgaaaatcagagtctgcttcggatgcccccatggatgaacccatggctcttggtggcagtggccatgagtatggccttacacttcctcattctgctggtgccccctctgccattaatctttcaggttactccgctctcagggcgtcagtgggtggttgtgctacaaatctcactgcccgtcattctgcttgatgaggctctgaaatacctatctcggaaccacatgcatgcctgcctgtatcccggtttactgaggaccgtgagtcaggcctggtcgcggcagcccctgactacttcctggacccccgatcataccggcctggcctcccttaagaagtag

SEQ ID NO: 215211 - DNA, 651 bp, synthetic construct
  misc_feature 1..651: note = Description of Artificial Sequence: Synthetic coding sequence
  source 1..651: mol_type = other DNA
atggagaaattgccgagatcgcctcgtgaggccctgattagtgggtggctattttttaggtatctggcaatcggagtgtacgtcggtctagccacagtggcagctgcaacgtggtggttcgtgtatgatgctgaggggccacacatcaatttctatcagctgcgtaactttctgaagtgcagtgaggataatcccctatttgctggtatcgactgcgaagtgttcgaatcccggttccctacaacaatggctctgtctgtcttggtgaccatcgagatgtgtaatgcacttaacagcgtaagcgagaatcaatcgctgcttagaatgcctccctggatgaacccttggctgctggtcgcagtagccatgtctatggcactgcatttcctcattctccttgtgccgcctctgccccttattttccaggttacacccttgtcgggacgtcagtgggttgtcgttctgcagatcagtttacccgtgatcctgctggacgaggcattaaaatatctgagtcggaatcatatgcatgggcctggaactcagcatcgattagccgtccgcgctgcccagaggggcaggaagcaaggcaggaacgagcccgaggtcagcgccggtaatcgggtggaatcacccggtcctggcggttag

SEQ ID NO: 215212 - DNA, 3000 bp, synthetic construct
  misc_feature 1..3000: note = Description of Artificial Sequence: Synthetic coding sequence
  source 1..3000: mol_type = other DNA
atggaagctgctcacctcctgcccgcagccgacgtgctccgccattttagcgtgacggctgaagggggactgtccccagcccaggtaaccggagctagagagcggtatggcccaaatgagctgccttctgaagagggaaagtcgttgtgggaactcgtcctggaacagtttgaggacttgctcgtcagaattctgctccttgccgcattggtgtcgtttgtgctggcctggttcgaggaaggggaagagacaaccaccgcattcgtggaacccctggtcattatgcttatcctggtggccaacgcaatcgttggagtctggcaggaaagaaacgcagagagcgccattgaagccctcaaagagtacgagccggaaatgggtaaagttatacgctcagataggaaaggcgtccaaaggattcgcgcaagagacatcgtgcccggagatattgtggaggtggccgtcggtgataaggtacccgcagatctccgccttatagaaatcaagagcaccacactgagagtggaccaaagcattctgacgggggaaagtgtaagtgtaaccaagcacactgaggctattcctgaccctagggccgtgaatcaggacaaaaaaaatatgctcttttctggaaccaacatcacctctggaaaagcggttggagtcgcggtggccacgggcctgcacaccgagttagggaaaataaggtcacaaatggcagcagttgagcccgagagaactcccttgcaacggaagctcgatgaatttgggagacagctgtctcatgctattagcgtgatctgcgtcgctgtctgggtaatcaatatcggccactttgccgatccggcacatggcggatcttggctccgcggtgcagtctactattttaaaatagccgtcgctctggccgtggccgctatccctgagggcctacctgccgttattacgacctgccttgctctgggcactcggaggatggctagaaaaaatgcaattgtgaggtcactaccttcggttgagaccctgggctgtactagcgtgatctgtagcgataagactgggacactgaccacaaatcagatgtccgtttgcaggatgtttgtcgtggctgaggctgatgctggatcctgcctgctgcacgagttcaccatatctggaactacctacacaccggagggcgaggtacggcagggagaccaacctgtcagatgtggacaatttgatggtctcgtggagctggccaccatctgcgcgctgtgcaacgacagcgcgcttgactataatgaggccaaaggagtttacgaaaaagttggcgaggctacggaaacagcactcacatgccttgtggagaaaatgaatgtttttgacacagacctccaagcattgagtagagttgaacgtgcgggtgcctgcaacacagtgattaaacagcttatgagaaaagagtttaccctggaattctctagggatcggaaatccatgtcggtttactgcaccccaaccagacctcatccaactggacagggaagtaagatgtttgttaagggcgctccagaaagcgtaattgagcgttgctcctctgttagagtaggctcacgcaccgcacccctgactcctaccagccgagagcaaattctcgccaaaatccgcgattgggggtcagggagcgacacacttcgatgcctcgccctcgcgacccgggacgctcccccaagaaaagaggacatggagttagacgactgcagtaagttcgtgcagtacgagacggacctgacatttgtcggatgcgtagggatgttggatccacctaggcccgaggttgccgcatgtatcactagatgttaccaggctggcattcgcgtggtcatgatcaccggcgacaataagggaaccgccgttgccatttgccggcgactcggaatctttggcgatactgaggacgtcgccggtaaagcctatacaggtcgcgaattcgacgatctgtcgcctgagcagcaacgccaagcctgccggaccgctagatgttttgcgagggtagagcccgctcacaagtctagaatcgtggaaaatttgcagagcttcaacgaaatcacggccatgacaggtgatggcgttaatgatgcccctgcactgaagaaggccgaaatagggatcgcaatgggttcggggacagccgtggccaaatctgccgcagagatggtgttgtcagacgataatttcgccagtatcgtggcagccgtcgaagaaggtcgagctatttacagcaacatgaagcagtttatcaggtatctgatcagctccaatgtcggagaggtggtctgcatttttttaaccgctatcctgggccttcccgaggccctaattcctgtccagctgctgtgggtcaatctcgtcactgacggcctgccggcaaccgccctcggttttaacccccctgaccttgacatcatggaaaagctgccgcgaagcccacgtgaggctctaatatccgggtggctgttttttcgctatctagctattggtgtttacgtgggactagccacggtcgccgctgctacttggtggttcgtgtatgacgctgagggacctcatatcaatttttatcaattgcgcaatttccttaaatgctcggaagacaaccccctgtttgccggaatcgattgtgaggtgtttgaatccagattccccacaacgatggcccttagcgtgctggtcaccattgagatgtgtaacgctctgaatagcgtgtcagaaaaccagtcattattaaggatgccgccttggatgaacccctggctgctggttgctgtggccatgagtatggctctgcattttctcatattactggtgcccccactccctttaatctttcaggtaactccattatccggcaggcaatgggtagtcgtcctgcagatcagccttcctgttatcctactggacgaggcactgaagtacctaagcaggaaccacatgcacgaagaaatgtcacagaagtag

SEQ ID NO: 215213 - DNA, 2997 bp, synthetic construct
  misc_feature 1..2997: note = Description of Artificial Sequence: Synthetic coding sequence
  source 1..2997: mol_type = other DNA
atggaggcagctcatctgctgcctgcagcagacgttctccgacacttctctgtaaccgcagaggggggattatctccagcacaagtgacaggagcacgcgagagatatgggccaaatgaattgccttccgaagaaggaaaatccctttgggaactggtgctcgagcaatttgaagatctgctggtgcgcatcttgctcctcgcagcacttgtctcatttgtcctggcatggtttgaagagggggaagagacaacaacagccttcgtggagcctctggtgattatgttaattctcgtggcaaatgccattgtgggagtgtggcaggagcgcaatgccgaaagcgccatcgaggccctgaaagaatatgagccagagatgggtaaggtcatccgctcagaccgcaaaggagtgcaacgtatacgagcgagggacatcgtcccaggagacatcgtagaggtcgctgtgggtgacaaagtgcccgctgacttgcggctgattgagatcaagtctaccacactgcgagtcgaccagtccatcttgacgggggaatccgtatctgttaccaagcatactgaggccattcccgacccccgagcagtgaaccaggataagaaaaacatgctgttctcggggaccaatatcacgtctggaaaagccgttggcgttgctgtcgcgactggcctgcacacggaactcggaaagatcagatctcagatggccgctgtggaacccgaacggacgcccctgcagaggaagctggacgagttcggtcgacaactgagccatgccatctccgtgatttgtgtggccgtctgggtgattaatattggacattttgccgatccagcacacggcggatcttggttgcggggagctgtgtattacttcaagatcgcagtcgcacttgcggtcgcagcgatccctgagggcttgcccgcagtgatcacaacctgcttagccctggggaccagacgcatggcacgcaagaatgctatcgtgcgaagccttccatcagtggagactctgggctgtacatccgtgatttgttccgataagacagggactctgacgacaaatcagatgtcggtgtgtaggatgttcgtagtggcagaagccgatgccggatcctgcttgttgcacgagtttacgatatctggcaccacctacacccccgaaggggaggttagacagggtgatcagccggtccgctgtggacagttcgacgggctggtggagcttgccacaatttgtgccctgtgtaatgactcagctctggattacaacgaggccaagggggtctatgagaaggtcggcgaggccaccgaaaccgctcttacttgcctcgtcgaaaaaatgaacgtcttcgacactgatctgcaagccctgagtcgcgtagaacgagccggtgcctgcaatactgtgattaagcagcttatgagaaaggaattcactctggaattcagcagagaccgcaagtccatgtccgtgtactgcaccccaaccaggcctcatcctactgggcaggggagcaaaatgtttgtgaaaggagcaccagagtcagtgatcgaacggtgctcttccgtaagagtcggatctcgtacagcaccccttacccccacctcacgcgaacagatccttgccaagattagagactggggtagcggcagtgacacactgagatgcttggctctcgccaccagagatgcaccccctcgaaaggaagatatggagctcgatgattgctcgaaatttgtccaatatgaaactgacctcacattcgtgggctgtgtgggaatgctggaccctccacggcctgaggtggcggcttgtatcacccggtgctaccaggccggaattcgcgtggtgatgatcacaggtgacaataagggaactgcagtggcgatctgccgaaggctggggatcttcggcgatactgaggatgtcgctggaaaggcgtacaccggcagggagtttgacgacctttctcccgagcagcaacgccaggcctgcagaacagccagatgtttcgctagagtcgagccagctcacaaaagcagaatcgtcgagaatctccagagttttaacgagatcactgccatgactggcgatggggtgaatgacgctcccgctttgaaaaaggctgagattgggattgccatgggatccggcacagccgttgcaaaatccgcggctgagatggtgttatcagacgacaacttcgcgtccatcgtggcagctgttgaggagggacgtgctatctactccaatatgaagcagtttattaggtacctgatttcaagcaacgtcggcgaagtggtctgtatcttcctgactgctatacttggcctgccagaggctttgattcctgtgcagctcttgtgggttaacctagtgacagacggtcttcctgccaccgccctcgggttcaacccgccagacctcgatattatggagaagcttcccagaagtccacgagaagcactgatatctggatggctgttctttcgatatttagccattggagtgtatgtgggtcttgctacagtagcggcagcaacctggtggttcgtgtatgacgctgaaggcccacatatcaacttttaccagcttcggaactttcttaagtgtagtgaggacaatcccctcttcgcaggtattgattgtgaagttttcgaaagccggttccctactaccatggccctttctgtgttggtcaccatcgaaatgtgcaacgccttgaacagcgtgtccgagaaccaaagcctgctccggatgcccccttggatgaacccctggcttcttgtcgcggtggctatgtccatggcgcttcactttctgattctgctagtgcctccactgccgctgattttccaggtgactcctctgagcggcaggcagtgggtggtggtcttacagatctcactgcccgtgatcttgttagacgaggctttgaaatacttgtctcggaatcatatgcatgggcatacccagtcctag

SEQ ID NO: 215214 - DNA, 2997 bp, synthetic construct
  misc_feature 1..2997: note = Description of Artificial Sequence: Synthetic coding sequence
  source 1..2997: mol_type = other DNA
atggaggcggcacaccttttgcccgctgcggatgtcctcagacatttctctgttacagccgagggtgggctgagtccagcgcaggtgaccggagccagagagagatatggacccaatgagttgccatcggaggaaggcaaatcactgtgggagctggttctggagcagttcgaggacctgctggtaaggatactgcttctcgccgcactcgtctccttcgtcctagcgtggttcgaggagggcgaagagaccactaccgcgttcgttgaacccctcgtgatcatgctcattctggtggctaacgccatagtgggagtctggcaagaacgaaacgccgagagcgccattgaggcgctaaaggagtacgaacctgagatgggaaaggtcatcaggtctgacagaaaaggggttcagcgcattcgtgcacgcgatatagtgccaggagatatcgtggaggtggctgtgggagataaggtccctgcagacttacgcctgatcgaaatcaagtccaccacactgcgggtcgaccagtctatcttaacaggagaatcagtttcagtcaccaagcatactgaggctattcctgacccacgcgcagtgaaccaagacaaaaagaatatgctcttctccgggaccaacattacgtctggtaaggcagtgggcgtagccgtggccacagggctccatacagaactgggtaaaatcagatcgcagatggccgctgtggaacccgagcgcacgcccctgcagagaaagctggacgagttcggtaggcagttatcacacgcaatctctgtcatctgtgtggccgtatgggtcattaatatcgggcatttcgccgaccctgcccatggaggatcctggttgaggggggcagtatactactttaagatcgccgttgccctggctgttgccgcaatccccgaaggtcttccggcagtgatcaccacctgtctggccctcggaacaagacggatggcacgaaaaaatgccattgtaaggtcattacctagcgtggagacactaggatgtactagcgtaatttgctcggataagactggcaccctgacgactaaccagatgtctgtgtgtaggatgttcgtcgtggcggaggcagacgccggttcttgccttctgcacgaatttactatcagcggaaccacgtatactcccgagggtgaagtgcgtcaaggagatcagcccgttcgatgtgggcagtttgacggtttggtcgaactcgccaccatttgcgcactgtgtaatgattctgcgcttgactataacgaagcgaaaggggtttatgaaaaggtgggagaagccactgagacagccctcacttgcctggtagagaagatgaacgtgttcgatactgatctacaggcgctgtcacgcgtggaacgggcaggggcttgtaatacagttattaaacaactgatgcgaaaggaattcaccctggagttctcacgggatagaaagagcatgtcggtgtactgcacccccacacggccacaccctactggtcagggatccaaaatgttcgtcaagggagctcctgaatctgtgatcgagcgttgcagctccgttagagttggctccaggactgctccactcacccctacctcacgagaacagatcctcgccaagattcgggattggggctccggctctgatacactacggtgcctggcactggcaacccgagacgcaccccctcgcaaggaggatatggagctggacgattgctccaaatttgttcagtatgagacagatctaaccttcgtgggttgtgtaggcatgctggatcccccacgacccgaggtggccgcatgcatcacccgctgttaccaggctgggattagggtcgtaatgattaccggagataacaaggggaccgcagtggctatctgcagacgcctcgggatcttcggcgacacagaagacgttgcgggtaaggcttacaccggaagggaattcgacgatctttccccagagcagcagaggcaagcatgccgaacagccaggtgttttgctcgcgtggagcccgctcacaagtcacggattgttgagaatttgcagtcctttaatgagattaccgcaatgacgggcgacggcgtgaacgatgctccagccttgaagaaagccgagataggaatcgccatgggaagtgggaccgccgtggctaaatctgcagcggaaatggtcctctcagatgataacttcgcctctatcgtggccgctgttgaagagggtcgcgctatctattcaaatatgaaacagttcatcagatatctaatctcatctaatgtgggcgaggtggtgtgcatcttcctgaccgccatcctaggattgcccgaggcactgatcccagttcagctgctgtgggtcaaccttgtgactgacggcctccccgcaactgctttgggatttaacccacctgacctggacataatggagaaactaccacgctcacctcgcgaagccctgatctcggggtggcttttttttagatacctggctataggcgtttacgttggacttgccacagtggccgcagctacctggtggtttgtgtacgatgccgaaggtccccatatcaacttttaccaactgcggaactttttaaaatgctccgaagacaatccgctgttcgcaggaattgattgcgaagttttcgaaagtaggttccctaccaccatggcgctatcagtgctggtgacgatcgagatgtgcaatgccctcaactctgtctctgagaatcagtcactcctcaggatgcccccatggatgaatccatggcttcttgtagctgtggcaatgtcaatggctctccactttctgattctgctggtgcctcccctacccctcatctttcaagtcacaccgctatctggtagacagtgggtagttgtgctgcagatcagcctacccgtcattctgctagatgaggcccttaagtatctttcaagaaatcatatgcatgaaatgtcccagaaatag

SEQ ID NO: 215215 - DNA, 1386 bp, synthetic construct
  misc_feature 1..1386: note = Description of Artificial Sequence: Synthetic coding sequence
  source 1..1386: mol_type = other DNA
atgacagtgcccaaggagatgcctgaaaagtgggccagagcgcaggcccctccgtcttggagccgaaaaaagccctcctgggggacagaggaagagcggagggcacgggctaacgacagagaatacaatgagaaatttcagtacgctagcaactgtatcaaaactagcaagtacaatattctaacattcctgcctgttaacttattcgaacagttccaggaagtcgccaacacctatttcctctttttgctcatcctccagctcattcctcagataagttcactctcatggtttaccacaatagtgccgttagtgctcgtgctcactatcaccgctgtgaaggacgccacagacgattatttccggcataaaagcgacaatcaggtgaacaaccgacaatcccaggtgcttatcaacgggatcctgcagcaagaacagtggatgaacgtctgcgttggcgatatcataaagctggagaataatcagttcgtggcagcagacctgctactcctgtcctctagcgaaccacacgggctatgctatatcgagacagccgaactcgatggggagaccaatatgaaagtgcggcaggcaattccggtgacctcggagcttggcgacatttctaaactcgcaaaattcgacggggaggtaatatgcgaaccccctaataacaaacttgacaaattttcaggaactctatattggaaagagaacaagtttccactgtctaatcaaaacatgctcctcagagggtgcgtgctgaggaacactgagtggtgtttcggtttggtcatatttgccggtccagacaccaaacttatgcagaacagcggccgtacaaaatttaaaagaacaagcatcgacagactgatgaacacactcgtcctgtggatcttcggttttctggtctgcatgggggtaattcttgccattggcaacgccatctgggagcatgaggtggggatgcggttccaggtgtatctgccctgggatgaggcagtggatagcgctttcttcagcgggttcttgagcttttggtcatacatcatcattcttaacactgtggtgccgatatcactctacgtgtctgttgaggtgatacggttggggcactcttacttcattaattgggacaaaaaaatgttttgcatgaaaaagcgcacccctgcagaggcaagaactactactctcaacgaggagttggggcaggtggagtacattttttctgataagaccgggacattgacacagaacatcatggttttcaacaagtgctctataaacggtcattcctacgttggatcggagggccctcggaggaagggaccatcgtggccaggcactgtggcacatgcgtactctcactccacccttggtgggtag

SEQ ID NO: 215216 - DNA, 1164 bp, synthetic construct
  misc_feature 1..1164: note = Description of Artificial Sequence: Synthetic coding sequence
  source 1..1164: mol_type = other DNA
atggctgtctgtgctaaaaaaaggccaccagaggaagagaggagagcaagggccaatgaccgtgagtacaacgaaaaatttcagtacgccagcaactgcataaagacctcaaaatacaacatcctaacatttctgccagtcaatctgtttgagcagtttcaggaggtggccaatacctacttcttgttcctcctaattctccagttaataccccagatcagtagtttaagctggtttaccaccatagttccactggtcctggtattaacaattacagccgtgaaagacgccactgatgactactttcgacacaagtctgataatcaagtaaacaatcggcagagccaggtcctgatcaacggcatactacagcaggaacagtggatgaatgtgtgcgtgggcgatatcatcaaactggaaaacaaccagtttgtggccgctgaccttctcctacttagtagctccgagccgcatggactttgttatatcgagactgccgaattagatggggaaacaaacatgaaggtgcgtcaggccattccagtcacctcagaactcggtgatattagcaagctggccaagtttgacggcgaggtgatatgcgaacccccaaataataaactcgataagttctctggcactctatactggaaggaaaataaatttcccctgagtaaccagaatatgctgctcagagggtgtgtgttgcggaacacggaatggtgttttgggttagtgatttttgctgggcctgacaccaagctgatgcagaatagcggcaggacaaaatttaagcgcactagcatcgacaggttaatgaacactttagtactgtggatatttggcttcctggtgtgtatgggcgtcatcctcgcgatcggcaacgctatttgggaacacgaggtaggcatgcgctttcaggtctacttgccatgggatgaagccgtagactcagctttcttttccggcttccttagtttttggagctacattatcatactgaataccgtggtgcccatcagcctttatgtgagatatgtgccatccttgacgtggggcctgtctagagagagcggcggacctatcgaactttttttttccatgaagatgaagagcttgcgaagtaacgaaaagagttcttctagctgcacggtgaacatctag

SEQ ID NO: 215217 - DNA, 3672 bp, synthetic construct
  misc_feature 1..3672: note = Description of Artificial Sequence: Synthetic coding sequence
  source 1..3672: mol_type = other DNA
atggatacactacgtgccgtaccgctattttccatctctggcttgttcagcttcccctatcgagtcagtcatgggatcgccggtattctgttgggagagatggcagtatgtgctaagaagcggccacctgaggaggagcggagggcccgtgccaacgacagggagtacaatgagaaattccagtatgctagtaattgcatcaaaactagcaagtacaacattctgacttttcttccagtgaatctttttgagcagtttcaggaggtggcaaatacctactttctcttcctgctgatcctgcaactcatcccccaaatcagttccttaagttggttcaccactatcgtccccttggttctggtgctgacaattacagcagtgaaggatgccaccgatgattactttcgccataagagcgataaccaggtgaacaatcgacagtcacaagttcttatcaacggaatcctgcaacaggagcagtggatgaacgtctgcgtgggagacattatcaaattggagaataaccagttcgtcgctgccgacctgctgctcctgtcaagcagcgaacctcacggattgtgttatattgaaacagccgagctggatggagaaactaacatgaaggtgaggcaggctatccctgttactagtgagctcggcgatattagcaagctggctaaatttgacggagaagtaatttgtgagcctccaaacaataagcttgataaattcagcgggactctttactggaaggagaataagttcccactgtcaaaccagaatatgctgctgcgaggctgcgtcctcagaaacacggaatggtgctttgggttggtcatttttgccggacccgataccaagctaatgcagaacagcggccgaacaaaatttaagcggacgtctatcgatcgtctcatgaacactctggtgctgtggatttttgggttcctggtgtgtatgggtgtgattttggccattggaaatgctatctgggaacatgaagtgggtatgcggttccaagtctatctgccgtgggacgaggcagtggacagtgcattttttagcgggttcctatcattctggagctacattatcatccttaacaccgtcgtcccaatctcactctatgtgagcgtggaggtcataaggttaggtcatagctacttcataaactgggacaaaaagatgttttgtatgaagaagcgtaccccagcagaagccagaacaactactctgaacgaggaactgggacaagtagagtatatattttcagacaaaacggggactctgactcagaacatcatggtatttaataaatgctctatcaatggccacagttacggggacgtgttcgacgtgttgggtcacaaggcggagctgggggaacgccctgaacctgtggatttctcctttaacccattggctgacaaaaagtttctgttttgggacccatccttactagaggcagtaaagattggggacccccacacccatgagttctttcgcctcctgtcactgtgccacacagttatgagtgaagaaaaaaacgagggggaactctattacaaagctcaaagtcctgatgagggggctttagtgaccgcagcgagaaatttcgggtttgttttcagaagccgcactccaaagacgatcaccgtacacgaaatggggaccgcaatcacctatcaactactggccatcttagacttcaacaatatacgtaaacggatgagcgtgatcgtcagaaatcccgaaggcaaaatcaggctgtattgcaaaggagcagacactatactcctcgaccgcctgcaccactccacacaggaactcctaaacacgaccatggatcatctaaacgagtacgcgggagagggactgcgaacactcgttctggcctacaaagatctggacgaggagtactatgaggaatgggccgagcgtaggctgcaggcctccttagctcaggattcacgggaggaccggctggcttctatatacgaagaagtggaaaacaatatgatgttgctgggagcaaccgcaattgaggacaagctgcagcagggcgtgcctgagaccatagcgcttcttacgctcgcaaacataaagatttgggtgctgaccggggataagcaggagacagcagtgaatatagggtactcctgtaaaatgctgacagacgacatgactgaagtgtttatagtgaccggccatacagtgttggaagtgagagaagaattgaggaaagcaagggagaagatgatggatagctctagaagtgtcggcaacggtttcacttaccaggacaaactttcatccagcaagctgacttccgtgctcgaggcagtcgctggagagtatgctcttgtgataaacggtcacagcctggctcacgcacttgaggccgacatggaacttgaatttctggagacagcttgcgcttgcaaggccgtgatctgctgccgtgtcactcctctgcagaaagctcaggtcgttgagctggttaaaaaatataaaaaggccgtgactttagctattggcgacggcgcaaacgatgtgtctatgatcaagacggcgcatatcggcgtcggtatcagtgggcaggaaggaattcaagccgtcctggcttccgattattccttctcacagtttaaatttcttcagagattactattggtccacggccgttggagttatttaaggatgtgtaagtttttgtgctacttcttctacaagaatttcgcattcacaatggttcacttctggttcggcttcttttgcggattttctgcccagaccgtatacgaccagtattttattactctctataacattgtgtacacctccctgcccgtccttgcaatgggtgtttttgaccaggatgttcccgagcagaggagcatggagtacccaaagctgtacgagccaggacagcttaacctgctgttcaacaaacgggagttctttatctgcatcgctcaagggatttacacctctgtcctaatgttcttcataccatatggcgtttttgccgacgccacacgagatgacgggacccagttggcggactatcagtctttcgctgtcactgtggccacatctctcgtgatcgtagttagtgtccagatcgggctagacaccggctactggaccgccatcaatcattttttcatctggggatcgctagcggtctacttcgctattctgttcgctatgcattccaatggactgttcgacatgtttccaaaccaattccgctttgttggtaacgcccagaacacccttgcccaacctacggtctggctgaccatcgtgctcacaaccgtggtctgtattatgccagtagtggcctttaggttcctgcgtctgaacttaaagcccgatctttcggacacagtgcgatatactcagctggttcggaagaagcagaaggcccagcaccgctgcatgcggagggtgggtcgaacaggatctcgcagatctggctacgcgttttcacaccaggagggctttggcgagctgatcatgagcggaaaaaacatgcgattaagctctcttgccctgtcctcctttactacccgctcaagcagtagctggattgaatccctgaggaggaaaaagtctgattccgcttccagtccaagcggcggagctgataagcccctcaagggatag

SEQ ID NO: 215218 - DNA, 3444 bp, synthetic construct
  misc_feature 1..3444: note = Description of Artificial Sequence: Synthetic coding sequence
  source 1..3444: mol_type = other DNA
atggccgaccagatcccgctctaccctgtgagatcagctgccgcagccgctgccaacaggaagcgcgctgcctactactcagccgcagggcctaggccaggagctgataggcacagccgctaccagctagaggacgagagtgcacacctcgatgagatgccactgatgatgtctgaagaaggcttcgagaatgaagagagcgactatcatactctgcccagagcgagaattatgcagaggaaacggggtttggaatggttcgtctgtgacgggtggaagttcctatgcacgtcttgctgtggatggttaattaatatctgtcgcaggaagaaagagttgaaagcccgtactgtttggctgggatgtccagagaagtgcgaggaaaagcaccctaggaacagtatcaaaaaccagaagtacaatgtcttcactttcatccccggtgtgctgtatgaacagtttaagttttttttgaatctgtactttcttgttatctcctgttcacagtttgttcccgctctcaaaattggctacctgtatacctattgggctcctctcggctttgtgctcgctgtaaccatgacgcgcgaagctatcgacgaattccggaggttccagcgcgataaggaggtcaacagccaactgtactccaagttaaccgtccgtggaaaggttcaggtcaagtctagtgacatccaggtcggcgaccttattatcgttgaaaagaaccaaaggatcccctcagacatggtattcctgcgaacttctgaaaaggccggatcttgtttcatacgcactgatcagctggacggcgagaccgactggaagctgaaggtggccgtgagctgtacgcaacagttaccagcactgggagatttgttttctatcagtgcctacgtgtacgcccagaagccacagatggatattcactcctttgaagggaccttcaccagagaagacagtgacccgccaattcacgagagtttaagcattgaaaatacactgtgggcgtcaacaatcgtggctagtggaacagtcattggggtcgtgatctataccggcaaggagacgcgttctgtgatgaatacgtcaaatcccaaaaacaaagtgggcctgctcgacctggaactgaatcggctgactaaggcactgttcctcgccttagttgctctgtctattgtgatggtgaccctgcagggctttgttggcccttggtaccgtaacttgttccgctttttgcttctgttttcctacatcattcctattagtttaagggtaaatttggacatgggtaaagcagtgtacggctggatgatgatgaaagacgagaatatcccaggcaccgtggttcggacgtccacaattcctgaggagctgggacgactggtctacttgctgactgataagaccggtacccttactcagaatgagatgatctttaaacgcctgcatctgggaacggtctcttatggggcagatactatggacgaaatacaatcacatgtgagagactcctattcgcagatgcagagccaggccggagggaataacacagggtcaacccccttaaggaaagcccaaagcagcgcccctaaagtacggaagagcgtatcgagccggattcatgaggctgtgaaggccatagtcctttgtcataatgtcacaccagtgtacgagtcacgcgctggcgtaacagaggagaccgaatttgcggaggcagaccaagacttctcggacgagaatcggacctaccaagcttcgtcccccgacgaggttgcactagtgcagtggactgaaagtgttgggctcacactcgtgtcaagagatttaacatccatgcagctcaagacccctagtggccaggtactgtcgttctgcattctccagttattccctttcacaagcgaatctaaacggatgggcgtgattgttcgagacgagagtactgctgagataacattctatatgaagggcgctgacgtcgcaatgtccccaattgtccagtacaatgattggctcgaggaggaatgtgggaacatggctcgcgagggcctgcggacactggtcgtcgctaagaaggcactgactgaggaacagtaccaggatttcgagtctagatacacccaagctaaattgtctatgcatgaccgctccctgaaggtagcagctgtggtcgagagtctagaacgggaaatggagctcctgtgcttgaccggagtcgaagaccagttgcaggccgatgtcaggcccacgctcgaaatgctaagaaacgcgggtataaaaatttggatgctgaccggagacaaactggagactgccacatgcatagccaaaagtagccacctcgtttcacgtactcaagacattcatatcttccggcaggtcacgagtaggggtgaggcgcacctcgaattgaacgcatttcgtcggaagcatgattgcgctctggtgatttccggagacagcctcgaagtctgcttgaaatattatgaacacgagttcgttgaactcgcgtgtcagtgccccgcagtggtgtgctgcagatgttcccctacacagaaagccagaatagtaactctgctgcaacagcataccggtaggaggacctgcgctattggagacggtggcaacgacgttagtatgattcaggcagccgactgcggaattggcatcgaagggaaggaagggaaacaggcctcgcttgctgctgatttttctattactcaattccggcacattggcaggttactgatggtacatggtcgtaacagctacaagcgatcagctgccctgggccagtttgtcatgcatcgcggactcattatcagcaccatgcaggccgtcttcagctccgtcttttacttcgcttctgtgcccctgtatcagggattcttgatggtgggctatgccactatctatacgatgtttccggtgtttagtctcgttctcgatcaggatgtgaaaccggagatggccatgctctatccggagttatataaggatctgacaaagggaagatcactgagttttaaaacattcttgatctgggtcttaattagcatttaccagggaggcattctgatgtatggggctttagtgttatttgagtctgagttcgtgcacgtggttgcaatcagtttcacagccttgattctcactgaattactcatggttgccctgactgtacgcacatggcactggctgatggtggtcgccgaattcttgagtctcggctgctacgtgagcagcctcgccttcctgaatgagtattttggaataggaagagtctcgttcggcgcttttctggatgtggcgtttatcaccacagtcacctttctgtggaaggtgtcagccatcaccgttgtctcatgccttccgctgtatgttctcaagtacttgcgcaggaagctgagccctccaagctactgcaagcttgccagctag

SEQ ID NO: 215219 - DNA, 408 bp, synthetic construct
  misc_feature 1..408: note = Description of Artificial Sequence: Synthetic coding sequence
  source 1..408: mol_type = other DNA
atgcaggctgttttttccagtgttttttatttcgcttcagtgcccctatatcaagggtttctgatggtcgggtacgccaccatttacaccatgttcccggtgttctcactggtgctagatcaggacgtgaaacctgaaatggcaatgctctatcctgagctgtacaaagatctgaccaaaagccaacaggatgggcgttcaaaccgacgtcagcacgagcggctgacgtctgggacttcagggcacgtatgggatcccggaagctttttccggatccgagtcagcgggaagggcgcacgaaacgcaggtaagattctcgtcctccagaacctgccgcacctgggttttaacaaataccttccaaggcgccacccccatgtctggggcccaggggctctgagagtgtag

SEQ ID NO: 215220 - DNA, 3411 bp, synthetic construct
  misc_feature 1..3411: note = Description of Artificial Sequence: Synthetic coding sequence
  source 1..3411: mol_type = other DNA
atggcggatcagatccccctctatcctgtgcggagcgcagctgctgctgccgcaaatcggaagcgagccgcttactacagcgccgcaggcccacgcccaggggctgacagacattcccgataccagctagaggacgagagcgctcatctcgatgaaatgcctctgatgatgtccgaggagggatttgaaaatgaggaaagtgattaccacacccttccacgggcacgcataatgcaaaggaagagaggtctagaatggtttgtatgtgatgggtggaagttcctgtgcacctcctgttgcggctggttgatcaatatctgccgtcggaaaaaagaactaaaggcccgaactgtttggctcggatgccccgagaagtgtgaggagaaacaccctcgcaattcaatcaagaaccagaaatataacgtctttacgttcatcccaggtgttctctatgaacagttcaagttttttctgaacctctacttcctagttatttcatgcagccaattcgtcccagccctaaagatcggctacctttatacatattgggccccattgggctttgtgctggcagttaccatgaccagggaggcaattgatgaatttaggagatttcagcgggataaggaggtgaactctcagctgtactcaaaactaactgtgcgcggaaaggtccaagtgaaaagctcagatatccaggtgggggatttaattattgttgagaagaatcaacgtatcccttcggacatggtctttttgcgtaccagtgagaaagccggtagttgtttcattagaaccgatcagcttgacggggaaacagattggaagttaaaagtggctgtatcttgtactcagcagctcccagcactgggagatcttttttcgatctcagcctacgtttacgctcaaaaaccacagatggacattcatagtttcgaggggaccttcaccagagaagatagtgacccccctatccatgaatctctgtcgatcgagaatactttatgggcctctaccatcgtcgcctccggcacagttataggggttgtcatttacaccggtaaagagacccggtctgtaatgaatacctcgaatcctaagaacaaggtgggactgttagacctcgagttgaataggttgaccaaagccttgttcctcgccctggttgctctcagcatcgtgatggtgactttgcagggtttcgtggggccatggtatcgaaatctgttcagatttctgctgttattttcgtatatcatccccatttcactgcgagtcaacctagatatgggcaaggctgtgtacgggtggatgatgatgaaagacgaaaacattcctggcaccgtagttagaacctccaccatccccgaagaattggggcgactagtttatctgctgaccgataagacgggaactctcacccaaaatgagatgatcttcaagcgacttcatctgggaaccgtgtcatacggtgcagacaccatggatgagatccaaagtcatgttagggactcatactcacaaatgcagtcccaagccggaggaaacaacaccgggagcacccccctgcggaaggctcagtctagcgctcctaaagtgcgcaaatccgtctcatcccggatccatgaggctgtgaaagctatcgtgctgtgtcacaacgtcaccccagtgtacgagtcacgggctggtgtaaccgaggaaacagagttcgcggaagcagatcaagatttttcggatgaaaatcgcacgtatcaggccagttcgcctgatgaggtcgccttggtgcagtggacggagtccgtcggcctgaccttagtgtctcgcgacctcacctctatgcagctgaaaaccccatctggtcaggttttgagcttttgcatactgcagctgtttcccttcacctctgagagcaaacgaatgggggttatcgtacgggatgagtcgacggcagagatcactttttacatgaaaggggcagacgtcgcaatgtcccctatcgtgcagtataacgattggcttgaggaggagtgcggcaacatggctcgtgagggcttgcgaacactcgtggtagcaaaaaaggctttaacagaagagcaatatcaggattttgagtccagatacacccaggcaaagctgtccatgcacgataggtctctgaaggttgctgctgttgttgagagtctggagcgcgagatggagttactgtgtctcactggagtggaggatcagctccaggccgacgtgaggccaacactcgaaatgctgaggaacgccggaatcaagatttggatgctgacgggcgacaaattggaaactgcaacatgcattgcgaagtcctcacacctggtgtcccgaacacaggatattcacattttccgccaggtgacatcacgcggagaggcacacctagaattgaacgctttcaggagaaagcacgattgtgcactggtaattagtggcgatagtttagaggtgtgtcttaaatattacgaacatgagttcgtcgagctcgcctgccagtgtcccgctgtcgtgtgttgccgttgtagtccaacacaaaaggctcgtatcgtaacactgctccagcagcacacaggccgtaggacatgtgctattggggatggcggtaacgacgtgtccatgatccaggccgcagattgtggaattgggatcgaaggcaaggaaggcaagcaggcctcacttgccgcagattttagtattactcagtttcgacacataggccgactgctgatggttcacgggaggaacagttataagaggagtgccgctctgggtcagtttgtgatgcacagaggcctgatcatttcaacaatgcaggcagtgttttccagtgtattttatttcgcgagtgtgcctctctaccagggttttctgatggtgggttatgcaaccatttacacaatgttccctgtgttcagtcttgtgctggaccaggacgtgaaacccgagatggccatgctctacccagagctgtacaaggacttaactaaaggaagaagtcttagctttaagactttcctaatatgggtgctaatcagcatatatcaaggcggaatattgatgtatggagccctcgtgctcttcgagagcgaatttgtgcacgtggtcgccatttctttcactgccctcatcctaaccgagctccttatggttgccctcaccgtaagaacttggcattggttgatggtggtagccgagtttctatcgctcgggtgttacgtgagtagtctggcttttctcaacgagtatttcgatgtggctttcatcactacagtaacgtttctgtggaaggtgtccgcaatcaccgtggtcagctgtctgccactctatgtgctgaaatatctccgtcgcaaacttagcccccctagttattgtaagctcgctagttag

SEQ ID NO: 215221 - DNA, 411 bp, synthetic construct
  misc_feature 1..411: note = Description of Artificial Sequence: Synthetic coding sequence
  source 1..411: mol_type = other DNA
atgcctttaatgatgtctgaagaagggtttgagaacgaagagtcggattaccatacattaccgagggctaggatcatgcaacgaaagagggggctcgagtggtttgtgtgcgacggatggaagtttttgtgcacttcctgctgcgggtggttgattaacatttgcaggcgaaaaaaggagctcaaggccagaaccgtgtggctaggctgtccagaaaagtgtgaggaaaagcatccacgtaattctattaagaatcagaaatataacgtgtttaccttcattcccggtgtcctctacgagcagttcaagttcttcctgaatctttactttcttgtgatctcttgcagtcaattcgttcctgccctgaagataggctatctgtacacttattgggccccactgatgacatag

SEQ ID NO: 215222 - DNA, 609 bp, synthetic construct
  misc_feature 1..609: note = Description of Artificial Sequence: Synthetic coding sequence
  source 1..609: mol_type = other DNA
atgcagagaaaacgtggtctggaatggttcgtttgcgacggatggaagtttctttgtacgtcttgttgcggctggcttatcaacatatgcagaaggaagaaggagcttaaagcccgaacggtttggttagggtgcccggagaaatgtgaagagaagcacccgaggaatagtatcaaaaaccaaaaatataatgtgttcaccttcatccccggtgtgctgtacgaacagttcaaatttttcttaaacctgtattttctcgttatttcatgttctcaattcgtgcctgcactgaaaattggatacctctatacctactgggcgcctctgggattcgtccttgccgtgacaatgactcgggaggctatcgatgagttcagaagatttcagcgggacaaggaggttaattcacagctgtactcaaagctgaccgtaagaggcaaggtgcaggtaaagagcagtgacatccaggtcggcgatctgattatcgtggagaagaaccagagaattccatcagatatggtgtttctccggacgtctgagaaggccgttagtaataatcttgattattgctctcacctcgtactctttattttctgtttcctgaattag

SEQ ID NO: 215223 - DNA, 1374 bp, synthetic construct
  misc_feature 1..1374: note = Description of Artificial Sequence: Synthetic coding sequence
  source 1..1374: mol_type = other DNA
atggccagagagggcctgagaaccctcgttgtcgccaaaaaggcactgaccgaggagcagtaccaagattttgaaagcaggtacactcaggctaagctgagtatgcacgataggtctctgaaggtggctgccgtggtggaaagcctggagcgggagatggaactactatgcttgactggcgttgaagatcagttgcaggctgatgtacggccaacactcgaaatgctgcgaaatgccggaatcaagatatggatgcttaccggtgataaactggaaacagctacttgcattgccaaatcaagtcacctcgtgtccagaacccaggatatccacatttttagacaggtgacgtctcggggagaagcacacttagaactcaacgccttcaggcgtaagcacgattgtgccctggtgatcagcggggactcgctcgaagtgtgtttgaagtattacgagcatgagttcgtcgaactcgcttgccagtgtcctgccgtggtttgctgtcgctgttcacccacccagaaagcccgtatcgtgactctgctccagcagcacacaggaaggcgtacttgcgctattggggatggcggaaatgatgttagcatgattcaagcggcagattgtggtattggcatcgaaggcaaggaaggcaagcaggctagcctggcggcagactttagtatcacacagtttcgtcacatcgggaggttacttatggtgcacggacggaatagttacaaaaggagcgctgccctgggccagttcgtcatgcaccgaggcctgatcatcagtaccatgcaggccgtattttcctcggtattttactttgcctctgtgcctctctaccagggcttcctcatggtcggctacgcaacaatatatactatgtttcccgtattctctctcgtgttggatcaggatgtgaaacctgagatggccatgttgtatcctgaactgtacaaagacctcaccaagggcagaagcctctcctttaaaacatttttgatatgggtcttgatctccatttaccaggggggtattctgatgtatggggctctcgtattgtttgagagcgagtttgtccacgtcgtggcgatttcattcactgccttgatcctgactgaactcctcatggtggctctgaccgtacgaacatggcattggctcatggtggtagctgagttcctatctctgggttgctacgtgtcttccctcgctttcctaaatgaatatttcgacgtggcattcatcactactgttacattcctgtggaaggtaagcgccattacggtggtgagctgcttgcccttgtatgtcttgaagtacttgcgcagaaaactatcacccccttcgtactgcaaattggccagttag

SEQ ID NO: 215224 - DNA, 4500 bp, synthetic construct
  misc_feature 1..4500: note = Description of Artificial Sequence: Synthetic coding sequence
  source 1..4500: mol_type = other DNA
atggagcgcgagcctgcaggcaccgaagagcctggccctcctgggaggaggcggaggcgagaaggcaggactcggaccgtcagatccaatctgctgccaccccctggagcagaagatcccgcagccggagccgctaaaggtgagaggcgtcgtcggagaggatgtgcacagcatttggccgataaccgcctcaaaaccaccaaatacaccttactgtcctttctccctaaaaacttgttcgagcagttccatcgtcccgctaatgtgtatttcgttttcatagccctgctcaatttcgtaccggctgtgaacgcattccagcccggacttgctcttgcccctgttcttttcattctcgcaatcaccgcattccgcgacctctgggaggactactcccgccatcggagtgaccacaagattaaccacctgggctgcctcgtattcagcagggaggaaaaaaaatacgtgaacaggttctggaaggaaatccatgtgggggatttcgtgcgcctgcgttgcaacgagatcttcccagccgatattctgctgctgagcagtagcgatccggacgggttgtgccacattgagacagccaacttggatggagagactaatttaaaaaggcgccaggtggttcgcggattttccgaactggtgtccgagtttaaccctttaacgtttactagcgtgatagaatgtgaaaaaccaaataatgatctgtcccggttccgcggttgcattatccacgacaacgggaaaaaggccggtctctacaaggaaaaccttctcctacggggatgcactttaaggaatacggacgccgtagtgggaattgtcatctatgcgggacacgaaacaaaggccctgttgaacaattccgggcctcggtacaagagatctaagctggaacggcaaatgaattgcgatgttctgtggtgcgtcttacttctggtgtgtatgtccttgttttcagccgtggggcatggcctatggatctggcgttatcaagagaaaaaatcactcttctacgtcccgaagtctgatggctcctccctttcccctgtgaccgctgccgtctactcgttccttacgatgatcattgtcctgcaggtcttgattccaatcagcctctacgtgtcaatagaaattgtaaaggcctgccaggtttactttatcaaccaggacatgcagctgtatgacgaggaaaccgattcccaattgcaatgtcgagcgctcaatatcactgaggacctcggccagatccagtacatttttagtgataagacaggtacgctcacggagaataagatggtattcaggcgttgcacggtcagtggagtcgagtactcacacgatgcaaacgctcagagattagctagatatcaggaggccgactccgaagaagaagaagtggtgccacgcggaggatcagtgtcccagcggggtagtatcggatcccaccagagcgttagggtggtgcacaggacacagtctaccaagagccatagaaggaccggatctcgggctgaagcgaagcgagcatctatgctgtcaaagcacacagcattttccagtccgatggaaaaggacataacccccgatcctaagcttttggagaaagtctcagaatgtgataaaagtctcgccgtggcacggcaccaggagcatctgctggctcacctctccccagagctttctgacgtgtttgacttttttatagctctcacaatctgcaatactgtggttgtgacatcgccagatcagccaaggaccaaggtgagggtgaggttcgaattaaaatctccggttaagacgattgaggacttcctccgaaggtttaccccttcctgcctgactagtggctgttcttccatagggagtttagccgcaaacaagagctctcacaagttaggatcctcatttccctccacccccagctcagacggtatgcttctcagattggaagagagactgggccagccaacgagcgccatcgcatccaatgggtatagctctcaggctgacaactgggcatcggaactcgcacaggagcaggagtcagagagggagctgcgctatgaggcggagtctcctgacgaggcagctcttgtgtatgccgcacgggcttataattgtgttctggtggaacgactgcatgaccaggtgtctgtagagctcccccacttgggtaggctgaccttcgaactgctgcacacgttgggattcgactctgtgagaaagcgcatgagcgtggtcattcgccatcccctgacagatgaaattaacgtctacacaaagggcgctgactcagtggtaatggacctgctgcaaccatgtagcagcgtcgacgctcgtgggagacatcaaaaaaagattaggtccaagacccagaactatctaaatgtctacgctgcggagggattgcgaacactgtgcatcgccaagcgagtgctgtccaaagaggagtacgcgtgctggcttcagtcccaccttgaggcggagtcatccttggagaatagcgaggagttgttgttccagtccgcgatccgtctcgagaccaacttgcatcttctcggtgctacggggattgaagaccggttgcaggacggggtgccggagaccatttctaaattgcgccaagctgggctccagatttgggtccttacgggtgataaacaggagacagcagtcaacatcgcttatgcctgcaagttactggaccacgacgaggaggtcatcaccttaaatgcaacttcacaggaagcctgcgccgctctactcgatcagtgtctgtgctatgttcagtcaaggggcctgcagcgggctccggagaaaaccaagggcaaggtgtctatgcggttctcttcactgtgtccgcctagtacctctaccgccagtggtcgccgtccatcactggtcatcgatgggagatcccttgcttacgccctcgagaaaaacctggaggataagttcctgtttctcgcgaagcaatgtcgatcagtcctgtgttgcagaagcaccccactgcaaaagagcatggtggttaagcttgttagaagcaagctcaaggcgatgaccttggcgatcggcgatggcgctaacgacgtatctatgatccaagtggccgatgttggggtggggatctctggacaggagggcatgcaggcagtcatggccagtgatttcgctgttcccaagtttagatacttggagagactgctcatccttcacggccactggtgctacagtcggctggccaacatggtcctgtacttcttctataaaaacacaatgtttgttgggctcctgttttggttccagtttttctgtggattttctgccagcactatgatcgatcagtggtacctaattttttttaacctgctcttcagtagcctgccacctctcgtgaccggagtgctcgaccgggatgttccagcaaacgtgttgctcactaaccctcagctctacaagtcgggccaaaacatggaagagtatcggccaaggacattctggtttaacatggccgacgccgcttttcagtcactcgtctgtttctccattccctacctcgcatattatgatagcaatgtcgatcttttcacatggggaacgcccatcgtgacgatcgctctgctcacattccttctgcacctagggattgaaacaaagacgtggacgtggttaaactggattacctgcggattctccgtgctcttgttcttcaccgtggcccttatatacaatgccagttgcgccacctgttaccccccttctaacccgtattggactatgcaagcactcctcggggaccctgtcttctaccttacctgcttaatgacccccgtggccgctctcctgccccgtttgttctttaggtctctccaggggagagtgttcccaacacaactgcagttggcacgccagctgacccggaaatcgccacgacggtgttccgcacctaaggagacattcgcacagggtcgtttgccaaaggatagtggcacagagcacagcagcgggcgaaccgtgaagacaagcgtcccattatctcaaccaagctggcacacccagcagcctgtatgctcactggaggcctccggagagccctcgacagtggatatgagtatgcctgttcgcgagcacacgctgttggaaggcctctccgctcccgcaccgatgagttcggcgcctggcgaagccgtccttcgatcccccggagggtgcccagaggagagtaaggtaagagcagcctcaacagggagggtgacaccgttgtcctctctatttagcctgcctacattctctctgctaaactggatctcgtcctggagtttagtgtcccgcctaggctcggtgctccagttttccaggacagagcaattagcggatgggcaggctgggagaggcttacccgtccagccacactccggaaggtctggacttcagggtccggaccacagattactaatcggcgcatcctcgcggaggtctcagtag

SEQ ID NO: 215225 - DNA, 3405 bp, synthetic construct
  misc_feature 1..3405: note = Description of Artificial Sequence: Synthetic coding sequence
  source 1..3405: mol_type = other DNA
atggattgcagcctggtgaggactttagtgcacagatattgcgcaggcgaggaaaactgggtcgactcacggacgatttacgtcggccaccgggagccgccacccggtgctgaggcttacatcccgcagaggtaccctgacaacaggatagtaagcagcaagtatactttttggaactttatcccaaaaaatctcttcgagcagtttaggagggtcgccaatttttattttttgatcatctttctcgtccaactgattattgacacccccaccagccccgtgacgtctggactcccactgttttttgtaataacagtgaccgctatcaaacaggggtacgaggactggctcaggcataaggccgacaacgccatgaaccagtgcccagttcattttatacagcatgggaagcttgtaaggaagcagtcccgcaagctgcgggtcggcgacatcgtgatggtgaaggaagacgagacattcccctgtgacctcattttcctgtcatccaacaggggagatggcacatgccatgtgacgactgccagcctcgatggtgaatccagccacaaaacacactacgcggtgcaggacaccaaggggttccataccgaagaagacatcgggggactgcatgctactattgagtgtgaacagccccagccagacctctacaagtttgtgggtagaattaacgtttacagcgatctcaacgatcctgtggtaaggcctctcggctctgagaacctcctgctgcgaggggctacactaaagaatacagagaagattttcggcgtcgcgatttatacaggcatggagacaaaaatggctttaaattaccaatccaagtcccaaaaacgctccgccgtggagaaatccatgaacgctttccttattgtgtacctgtgtattctcatatctaaggccctaatcaacacagttctcaagtatatgtggcagtcagaaccattcagagacgagccctggtacaaccagaagactgaatctgaacgccagcgaaacctcttcctaaaagccttcacagacttcttggcttttatggtgctctttaactatattatacccgtctcgatgtacgtcacagtggaaatgcagaaattcttggggtcttacttcattacttgggacgaggacatgttcgacgaagagactggggaggggccactggtaaacacaagtgatcttaatgaggagctgggccaggtagaatatatcttcacagacaagactggcacactgaccgagaataacatggaatttaaagaatgctgtatcgagggacatgtgtatgtcccccatgtgatttgtaacgggcaagtgctgcccgagtcctccggcatcgatatgatcgacagcagtccctctgtgaacgggcgagagagggaggagctctttttcagagccctctgtctgtgtcacaccgtgcaggtcaaggacgatgatagcgtggacggacccagaaagtcacccgacggaggaaaatcctgtgtctatatttcatcctcgccagatgaagtcgctctggtagagggggtgcagagattgggttttacatacctgcgccttaaggataactacatggaaattcttaacagggaaaaccatatcgaacgctttgaactcctcgaaatcttgagcttcgactctgtgagacgcaggatgtcagttattgtgaagtcagctactggggagatctatttattctgcaagggtgcagacagctccattttccccagggtcatcgaaggcaaggtcgaccagattcgggcaagagtggagaggaatgcagtggaggggttacgtacattgtgcgtggcatacaaaaggctgatccaggaagaatacgaaggcatctgcaaacttttgcaagcagctaaggtcgccctacaggaccgcgaaaaaaaattggctgaagcgtatgagcaaattgagaaagacctgaccctgttgggggctacagccgtcgaggatagattacaggagaaggctgctgatactatagaagcacttcagaaggccggtattaaagtgtgggtgctcactggcgataaaatggagactgccgctgcaacctgttacgcctgcaagctgtttagacgcaatactcaacttttggagctgacaacaaaaagaattgaggaacagagcttacacgacgtgcttttcgagctaagtaaaaccgtcttgcgacattccggatcccttactagagacaatctctcgggattatcagcagacatgcaggattacggcctgattatcgacggcgctgccctctccctcattatgaaacccagggaggacggatcttcaggcaattacagggaacttttcttggaaatctgccgatcctgttcggcagtactgtgctgcaggatggcccctctccagaaagctcaaatcgttaagctcattaagttctctaaagagcacccgatcaccctagcaattggcgatggagctaatgacgtatcaatgattctggaagcccatgtcggcatcggagtcatcggtaaggaaggaaggcaggccgctaggaatagtgactatgccattcctaagtttaagcacctgaagaagatgcttctggttcatgggcatttctactacattcgaatttccgagctggtgcagtacttcttctataagaatgtctgctttatctttccccaatttctctatcaattcttctgcggatttagccagcagacactgtacgatactgcctatctcaccctgtacaacatttccttcacgagtctccccatcctcctgtatagcctgatggagcagcatgttggcattgacgtgctaaaacgcgaccctactctttacagagacgtggctaagaatgcactactgcgctggcgagtgttcatttattggacactcctggggctgttcgacgcgcttgtatttttctttggagcgtactttgtttttgagaacacaaccgtcaccagcaacgggcagattttcggcaattggacattcgggactcttgtgttcaccgtcatggtttttactgtcaccctcaaactcgcacttgatacccattactggacctggatcaatcactttgtgatctggggatccctgttattttatgtggtttttagtttgctgtggggaggcgtcatatggccctttctgaattaccagcggatgtactacgtcttcatccagatgctgagctcaggaccggcatggctagctattgtcctgctcgtgacaatcagtctcctgcctgatgtgttaaagaaggtgttgtgccgacagttatggcctacggccacagagcgggtgcaaactaagtcccaatgtctctctgtggaacagtccaccattttcatgctttcacagacctcaagctcactaagcttctag

SEQ ID NO: 215226 - DNA, 3576 bp, synthetic construct
  misc_feature 1..3576: note = Description of Artificial Sequence: Synthetic coding sequence
  source 1..3576: mol_type = other DNA
atggactgctccctggtccggacactggtccaccgctattgcgccggtgaggaaaattgggtcgactcaaggacaatctacgtgggccatcgcgagccccctcccggtgcagaggcttacatcccacagcgataccctgataacaggatcgtaagcagcaaatacaccttctggaattttatcccgaagaacctgttcgagcagttccggagagtcgctaacttctatttcctgatcatattcttagtacagcttattatcgacactcccacttcaccagtgacttcaggcctgccactgttttttgtcattactgtcactgccatcaaacaggggtatgaggactggctgcgccacaaggctgacaatgccatgaaccagtgtccggttcattttattcagcatggcaagttagttagaaaacagtctcgcaaactcagggttggagacatcgttatggtgaaggaggacgagacctttccatgtgatctgatcttcctgagttcaaacaggggcgatgggacctgccacgtaacgactgccagcttggacggtgaatcttcccataaaacacattatgcagtgcaggatacaaaaggctttcataccgaggaagatatcggaggcctccatgcgaccatcgaatgcgaacagccacagcctgacctgtataagtttgtcggtcggataaacgtgtactcggaccttaacgacccggtggttagaccactgggatccgagaacctactgctccgcggtgctacgctgaaaaatactgaaaagatcttcggtgtggccatttatacggggatggagacaaagatggcactaaattatcagtccaagtctcagaagcgatctgccgtggagaaatcgatgaatgcttttctcattgtgtacctctgcatattaatttctaaggctctaatcaacactgtactgaagtacatgtggcagagcgagccttttcgggatgagccatggtacaatcagaagacagagtccgagcggcaaagaaacctgttcctgaaggcctttacagattttctggcattcatggtcctctttaactatataatccccgtctctatgtacgtgaccgtggagatgcaaaaattcctaggatcgtactttatcacctgggacgaggacatgttcgacgaggaaactggcgagggtcccctcgtgaacacctccgacttaaatgaggagttgggccaagtggagtacatctttaccgacaagacaggtaccctgacggagaataatatggagttcaaggagtgctgtattgaggggcacgtttacgttccgcacgtcatctgcaacggtcaggtcctccctgaatcttccggtatagacatgattgacagttctcccagtgtgaatgggagggaaagagaagagctgttttttcgggctctctgtttgtgccatactgttcaggttaaggacgacgacagcgtggacggaccgcgaaagagccccgatggtggaaaatcgtgtgtctacattagttcatcccccgacgaagttgccctcgtcgaaggcgttcagcggctgggattcacctaccttagactgaaagacaactacatggaaatcctgaaccgggaaaatcatatcgaaaggttcgaactcttggagatcttatcctttgactctgtgagacgacgcatgagcgtcatcgtgaagagcgccactggagagatctaccttttctgtaagggcgctgattcttcaattttcccgcgtgttatagagggcaaagtagatcagattcgggctagagtcgagcgcaacgctgtagaaggtctgcggaccctgtgtgttgcttacaaacgactgatccaggaagaatacgaagggatttgcaagttactgcaggcagctaaggtggcgttgcaggacagagagaagaagttggctgaagcatatgagcagatagagaaggatctcacactcctgggagccactgcagtagaggataggctgcaggagaaagcagcagacaccatagaggccctccaaaaggctggaataaaggtatgggtgcttactggcgataaaatggagaccgccgctgccacttgttacgcctgcaagctgtttcgcagaaatacccagctcttagagctgactactaaacggatcgaggaacagagcctgcatgacgtcctctttgagctgagtaagaccgtgctgagacatagtgggagcctgacacgagataacctcagcggtcttagcgccgatatgcaagattatggcctgattatcgatggtgcagctttatccctgatcatgaaacctcgggaagatggtagcagcggcaattatagagagctgtttcttgagatctgtcgctcttgttccgcggtcctgtgctgccgcatggccccactacagaaagcgcagatcgtaaaacttataaagttttccaaagaacatcctatcacccttgccatcggggacggggcaaacgatgtgagcatgatcctggaagctcatgtgggcattggagtgatcggcaaagaagggcgacaggcggcaaggaacagcgattacgccatcccaaagttcaaacacctcaagaagatgctgctcgtccacggccatttctactacattaggattagcgaacttgtgcagtattttttctataagaacgtgtgtttcattttcccccagttcctctaccagttcttctgcggttttagtcaacagactctgtacgatacagcgtacctcacactttacaacatttcgttcacaagcctcccaatactactgtattcgctcatggaacagcatgtgggtattgatgtacttaagagagatcctacactttatcgggacgtagcaaagaacgctctcttacgatggcgagtcttcatctactggaccctgctgggattatttgacgccctcgtgttcttcttcggagcatattttgtcttcgaaaacaccacagtcacaagtaatgggcaaatctttggaaattggactttcggcaccctcgtgtttactgtgatggttttcacggtcacactgaagctggcactcgatacacactattggacatggattaaccatttcgtgatctggggctcactgttgttctacgtagtgttcagccttctgtggggcggtgtgatttggcccttcctcaattaccagaggatgtactacgtgttcatccagatgctctcttccggacccgcatggctggctattgtgcttctcgtgacaatttcattattgccagatgtattgaagaaagtgctgtgtaggcagctttggcctactgccaccgagcgggtgcagaacggctgcgcccagccccgagaccgcgactcagaattcacccctctcgcttctctgcaaagtccaggttaccagtccacttgcccttcagcagcatggtactcaagccactctcagcaagtgactctcgccgcatggaaagagaaggtgagcaccgaaccacctcccatactgggaggatcacatcatcattgttcttccataccctctcatagttgtcctcgttcgagggtagggatgctggtttag

SEQ ID NO: 215227 - DNA, 3405 bp, synthetic construct
  misc_feature 1..3405: note = Description of Artificial Sequence: Synthetic coding sequence
  source 1..3405: mol_type = other DNA
atggattgctccttagttagaactttagtgcatagatattgcgccggagaagagaattgggttgattcccggactatttacgtgggccaccgggagccacctcctggagcggaggcatatattccccagcgttatcccgataatcgaatcgtgagcagcaagtacaccttctggaattttatcccaaaaaatctgtttgagcaatttaggagagtggccaacttttactttttaattatattcctagttcaactgatcatcgataccccaacctctcccgtgacatcaggcctgccactcttttttgtgatcactgtgaccgccataaagcagggatatgaagattggctgcggcataaggctgataatgccatgaaccagtgccctgttcacttcatccaacacggcaagctcgtcaggaagcagagcaggaaattaagagtgggtgatatcgttatggttaaagaggatgagaccttcccctgtgaccttatctttctatcctccaatcgaggggacggcacttgtcacgtgacaacggcctccctggatggcgagagttctcacaaaacacattacgctgttcaggacactaagggatttcatacagaagaagatatcggaggcctgcatgcgacgatagagtgcgagcaaccgcagccagatttatacaagtttgtgggaagaatcaatgtgtatagtgaccttaatgatcctgtggtgcgcccactaggtagcgaaaacctcctcctgcgcggtgcgacactcaagaacaccgaaaagatcttcggggtcgcgatatatacgggaatggagaccaagatggccctgaactatcagtcaaaatcacagaaacgcagcgctgtcgagaagagcatgaatgcgttcctcatagtttacctgtgtatactcatttcaaaggccctgattaatactgttctcaagtacatgtggcaatccgaacctttccgtgatgagccttggtacaaccagaaaaccgagtcagagcgtcagcggaacctttttctcaaggcttttacagacttcctggcgttcatggtcctgttcaattacatcatcccagtgtccatgtatgtgactgtggaaatgcagaagttcctcggctcgtacttcatcacttgggatgaggatatgtttgatgaggagaccggcgaagggcctttggtgaatacatccgacctgaacgaagaactgggccaggtcgaatacattttcaccgacaagacaggcacattgactgagaataatatggaattcaaggagtgctgtattgagggccatgtgtatgtacctcatgtgatctgcaatggtcaggtcctcccggaaagcagcgggattgatatgattgattcctctccgagcgttaacgggagggagcgggaggagctgttctttagggcgctgtgcctttgtcacaccgtgcaggtgaaagacgacgatagcgttgacggacctaggaaatctcccgatggcggtaagtcttgtgtctatatctcttcctctcccgacgaggtggcgcttgttgaaggtgtccagcgccttggctttacatatctaaggctgaaggacaattatatggaaatattaaacagagagaatcatattgaaaggtttgagttactagaaatcctttcttttgacagcgttaggcgcaggatgtctgtgatcgtgaagtcggccacaggcgaaatctacctgttctgcaagggtgcggattccagcatatttccgcgagttatagagggaaaagtggatcagattcgagctagggtcgagaggaacgccgttgagggtctacgcaccctgtgcgtggcctataaacggctcattcaggaggagtatgaggggatttgtaaattactccaggccgctaaagtcgcactccaagatcgtgaaaaaaagctggctgaggcttatgaacaaatagagaaagacctaactctgttaggcgctacagctgtggaagaccggcttcaggaaaaggccgctgacactatcgaagcactgcagaaagcaggaattaaagtctgggtcctgacaggggacaagatggagacggctgctgccacatgctacgcatgcaagctgtttaggagaaatacccaactgctggagttgaccactaagcgcatcgaggaacagtccttacacgatgtgttgttcgagttgtccaagaccgtgcttcgtcattccggctctctcaccagggacaatctcagcggtctgagcgccgatatgcaagattacgggctcatcatcgacggggcagccctttccctgattatgaagcccagggaagatggttcttcaggcaattaccgagaactgttcctggagatctgccgctcctgcagcgctgtgctctgttgccggatggcgcctctccaaaaggcccagattgtgaagttaataaaattcagcaaagagcatcccattactctggcgattggggatggtgcaaatgacgtgagcatgatcctggaggctcatgtgggtatcggcgtcatcggtaaagagggcagacaggccgctaggaacagcgactacgccatccccaaatttaagcatctaaaaaaaatgctgctcgtgcatggtcacttctattatatccgcatctccgagctcgttcagtattttttctataagaatgtttgttttatcttcccacagttcctgtaccaatttttttgtgggtttagtcagcagacattatacgataccgcttacctgactctgtacaacataagttttacaagtctgcctattcttctgtattctctgatggaacagcacgttgggattgatgtgctgaagagagatccaaccctgtatcgggatgtcgcaaaaaatgctttgcttagatggagggttttcatatactggactctcctggggctgtttgatgctctggtttttttctttggcgcatacttcgtgttcgaaaatacaaccgtgacttccaacggacaaatctttggtaactggacttttggtaccctggtgttcaccgtgatggtctttacggtgactttaaagctggccctggacacacattattggacttggattaaccactttgtcatctggggttcactgctgttctacgtcgtgttctccctgctctgggggggagtgatatggcccttcctcaactatcagcggatgtactacgtgttcattcaaatgctgtctagcggccctgcatggttagcaatcgtgttactagtgaccattagcctcttgcccgacgtactaaaaaaggttttgtgcaggcagctctggccaaccgccacggaaagggttcagaccaaatcccaatgcctgagtgtggaacaatccaccatatttatgctctcacagacatcttcctccctgtctttttag

SEQ ID NO: 215228 - DNA, 2808 bp, synthetic construct
  misc_feature 1..2808: note = Description of Artificial Sequence: Synthetic coding sequence
  source 1..2808: mol_type = other DNA
tagtacgtggggcatagagaaccgccaccaggggcagaggcgtacatccctcagcggtaccccgacaatcgcattgtcagctctaagtacactttttggaacttcattcctaaaaatctgtttgagcagttccgtcgcgttgctaacttttacttcctcataatcttcttggtacaacttataatcgatacccctacatccccagttacctccggcctgcctctatttttcgtgatcacggttacagccattaagcaagggtatgaggattggctgcgacataaggcagacaacgccatgaaccaatgtcctgtgcactttatccagcacggaaagctcgtgcgtaagcaatcccgcaaactgcgcgtgggcgacatcgtgatggtcaaagaagacgaaacctttccgtgcgacttgatttttctgtcttctaaccggggtgacgggacttgccacgtgaccacagccagtctcgatggtgaatctagtcacaagacgcactacgccgtccaggacactaagggctttcacacagaagaggacattggagggcttcatgccactatcgaatgcgagcagccacaacccgatctgtataagttcgtcgggaggatcaatgtttactcagacttaaatgatcctgtcgttcggccacttggatccgagaacctgttattgcggggagcaacactgaaaaacacggaaaagatcttcggagtggccatctacaccggcatggagacaaaaatggcccttaactaccagtccaagtcccagaagagaagcgctgtggagaagtcaatgaatgccttccttatcgtctacctatgtattcttatatcaaaagcattgatcaatacggtcctgaagtatatgtggcagtctgaaccatttagagacgaaccttggtataatcagaagacagagtcggagaggcagcgaaatctcttcctgaaggcctttactgacttcttagctttcatggtgttgttcaactacattatacctgtgtcaatgtacgtgacagtggaaatgcagaagtttctcggcagctatttcattacgtgggatgaggatatgttcgacgaagagacaggggagggacccctagtaaatacctccgacctaaatgaagaactgggtcaggtagagtacatctttacggacaaaacggggactctgacagagaataacatggagttcaaagagtgctgtatcgaaggacatgtctatgtccctcatgtgatctgcaatggccaggtgttgcctgagtcctcaggtattgatatgatcgattcgagtccatcggtcaatggtagagagcgggaggagcttttcttccgtgcattgtgcctatgccacacggttcaagtgaaagatgatgactcagtcgatgggccacgcaagtctcctgacggcggaaagagttgtgtctacatatcctcgtcacctgacgaagttgctctggtcgagggcgtgcaaagactgggttttacgtacctccgcctgaaggataactatatggagattctgaacagagagaatcacatcgagcgatttgagttattggaaatcttaagcttcgattccgtgaggagaaggatgtccgttatcgtaaaatctgccaccggtgaaatctacctgttttgcaagggcgctgacagcagtatcttccctcgcgtcatcgagggcaaggtggaccaaattcgggcaagggtcgagaggaacgctgtagagggcctacgaacgctgtgtgtagcgtacaagagattgatccaagaagagtacgagggcatctgtaaattacttcaggcggctaaagtggccctgcaggaccgggagaagaagctggccgaagcatacgaacagatcgagaaggatctgaccctccttggggcaactgcagtggaggacagactccaggagaaagcagctgataccatcgaggcactccaaaaggcaggcataaaggtctgggtgctgaccggcgataagatggaaacggccgcagcaacctgttacgcttgcaagctattcagaaggaacacccagcttttagaactgaccactaagcgtatcgaagaacagtcactgcacgacgtcttatttgagttgagcaagacggtgttgcgtcatagcggctccctgacgcgcgacaatttgagcggcctctccgccgatatgcaggattacggactgataattgatggtgccgctctgtctcttatcatgaaacctagagaggatggcagtagcggcaattacagggagctatttctcgaaatttgtcgaagttgcagcgccgttctgtgctgtcgtatggctcccctgcagaaagcccaaatcgttaagctgataaaattttcaaaagagcatccaatcaccctggcaattggagacggtgccaacgatgtctccatgatcctggaagctcatgtcggcataggagtgatcggcaaagaaggaaggcaagctgcccgaaactccgattatgccataccaaagtttaagcacttgaagaaaatgctcttagtgcacggacatttttattacatcagaatttcagaacttgtgcaatacttcttctacaagaatgtctgtttcatcttcccccagtttctttaccagttcttttgtggttttagccaacagacactatacgacaccgcctatctgacgctctataatatcagtttcactagcctgcctattttactgtacagccttatggagcaacatgtcggtatagacgtactgaagcgagacccaaccctctacaggtaccatccacccaacagcctcagctag

SEQ ID NO: 215229 - DNA, 1119 bp, synthetic construct
  misc_feature 1..1119: note = Description of Artificial Sequence: Synthetic coding sequence
  source 1..1119: mol_type = other DNA
atgtcagtgattgtgaaatccgcgaccggcgagatttacctattctgtaagggcgctgactccagcatttttccccgagtgatagaggggaaagtggatcagataagagccagggttgaacgcaatgccgtagagggcctaagaacactctgcgtggcttacaagagactcatccaggaagagtatgaagggatctgcaaactcctacaggccgctaaggtggccctgcaggatcgagaaaagaagctcgctgaagcgtacgagcagatagagaaggatctgaccctgcttggggcaacggctgtggaagatagactgcaggagaaggctgctgacaccatagaagccctccaaaaggccggtatcaaggtctgggttctgacaggcgacaaaatggaaacagctgcagctacctgctacgcttgtaagctattcagacggaatactcagttactggagctaacaaccaagcgaatcgaggagcagtcccttcatgacgtgctctttgaactgtccaaaacagtgctgcgccactccggcagcctgacccgggacaatttgagcggactaagcgcagacatgcaggattatggtttaattatcgacggcgctgcactgtccctgattatgaagccacgcgaagatggaagctccggcaattatcgagaactgtttctcgaaatctgcaggagttgctcagcagtgttatgttgtcggatggcacccttacagaaggcccagattgtgaaactgattaaatttagcaaggagcatcctataacgttagccatcggcgacggagctaacgacgtttcaatgattcttgaggcgcatgtggggatcggcgtcatcggaaaagagggcagacaagccgcacgcaatagcgactatgccattcctaagtttaagcacctcaagaagatgctgctggttcatggtcacttctattacatccggatcagtgagctcgtgcaatacttcttctacaagaacgtgtgcttcatctttcctcagttcctgtaccagtttttctgtggatttagccaacaggggaggaggcaagagtgccccgctgcactggctcgcgtgcatttactggatgcgcctgggactgtgtag

SEQ ID NO: 215230 - DNA, 1059 bp, synthetic construct
  misc_feature 1..1059: note = Description of Artificial Sequence: Synthetic coding sequence
  source 1..1059: mol_type = other DNA
tgaagcatcttcccgcgagtcatcgagggcaaagtcgatcaaatcagggctcgcgtcgagcggaatgctgtggaagggttgagaactttgtgtgtcgcgtacaagagactcatccaggaggaatacgaaggtatttgtaaacttctgcaggccgcaaaagtcgctctgcaggaccgagagaagaagctggcagaggcgtatgaacagattgagaaggacctgactctcctaggagccaccgcagtagaggatcggctccaggagaaggcagcggatactatagaagcgctacagaaagcaggcatcaaggtctgggtgctcaccggcgataagatggagaccgccgcagctacctgctacgcatgtaaactgttccgtcgcaatactcaattacttgaactgactaccaaaaggatcgaagagcagtctctgcatgacgtcctttttgagctgagcaaaactgtgcttaggcacagcggctccctcacccgggacaacctgtcaggtctaagtgcggacatgcaggattacggcctgattattgatggcgctgcactctctctgatcatgaagcctagagaagacggctcaagtggcaactacagggaactgtttcttgaaatttgtagaagctgtagcgccgttctttgttgtcgcatggcccctctccagaaggcacagattgtgaagctgataaagttctcaaaggagcaccctattaccctggcaatcggggacggggcaaatgacgtgagcatgattctagaggcccacgtaggtattggagttatcggcaaggagggtaggcaggccgctagaaactccgattatgctataccaaagtttaaacacctgaagaagatgttgttagtgcacgggcatttctactacatacggatttcagagttggtgcagtactttttttataagaatgtctgcttcatcttcccacaattcctgtatcagttcttttgtggcttctcacagcaaggacggcgtcaggagtgccccgctgcactggctcgagttcatctactggacgctcccggtaccgtctag

SEQ ID NO: 215231 - DNA, 3405 bp, synthetic construct
  misc_feature 1..3405: note = Description of Artificial Sequence: Synthetic coding sequence
  source 1..3405: mol_type = other DNA
atggattgcagcctggtcaggacactcgttcatagatactgcgccggtgaagagaactgggtcgactctaggactatctacgtagggcacagggaacctccacccggtgctgaagcctatattccacagaggtaccccgataataggatcgtctcttccaaatatactttttggaattttatccctaagaacttattcgagcagttccggagggtggctaacttttactttctgatcatctttcttgtccagctgattattgacaccccaaccagcccggtcacatcaggcctcccattgtttttcgttatcacagttactgccattaagcaggggtatgaggactggctgaggcacaaagccgataatgctatgaaccagtgtccagtgcactttatccaacatgggaagctggttcgcaagcagtcaaggaagcttcgcgtgggggacatcgtgatggtaaaagaagatgagacttttccttgtgacctaatcttcctctcatcaaatagaggtgatggcacttgtcacgtgacaactgctagcctggatggagagtcatcacacaagacccactacgccgtccaggacaccaaaggctttcatacagaagaagacatcggtggcctgcatgccactattgaatgtgagcagccccagcctgacctatacaagtttgtggggcgtattaacgtgtacagcgacctgaacgatcccgtcgtgcgcccactggggtctgaaaacctgcttttgagaggcgctacactgaagaacaccgaaaagatattcggggttgcgatctacacgggcatggagacgaagatggccctgaactaccagtctaagtcccagaagcgcagcgccgtggagaagagcatgaacgccttccttattgtctatctgtgcatcctgatcagcaaggcactgataaacacggtccttaagtatatgtggcagagtgagccatttcgggacgaaccctggtataaccagaagacagagtctgagcgacagcgcaatctcttccttaaggcttttaccgacttccttgctttcatggtgctgtttaattatataattccggtctcaatgtacgtcacggtcgaaatgcagaagtttttaggaagctattttataacgtgggacgaagatatgttcgatgaagaaacaggtgaagggcctctggtgaacacctctgacctgaacgaagaattggggcaagtcgaatatatcttcaccgataagacgggcacactgacagagaataatatggagtttaaagaatgctgcatcgagggccatgtgtacgtgccgcatgttatctgcaacggccaggtactccctgagagctcgggaatcgacatgattgacagctctcccagtgttaacggtagagaaagagaggagctgttcttcagagccctttgtctgtgccatactgtccaggtgaaggatgatgacagcgtagacggccctagaaagagtcccgacggcggaaagagctgcgtctacatttcgtccagccctgacgaagtggcccttgtggaaggcgtacagagactggggttcacatatcttcggttgaaggataactatatggagatcttgaatagagaaaaccatattgaaagatttgagctgttggaaatcctatcttttgacagtgtgcgccgtaggatgtcagtgattgtaaaaagcgccactggggagatttacctcttctgcaagggcgctgattcttcaatcttccccagagtgatagaggggaaggttgaccagatccgcgctagagtcgagagaaacgcagtagaggggttgagaaccttatgcgtggcttacaaacgcctgatccaggaagaatacgagggaatctgtaaactcctccaggcagccaaggtggccttacaggacagagaaaaaaaactcgcggaggcttatgaacagatcgagaaagacttaactctgctcggagccactgccgttgaggatcgactgcaggagaaggctgccgacaccatcgaagccctgcagaaggcgggaatcaaggtgtgggtgctcacaggagacaaaatggagaccgccgcagccacgtgctacgcctgtaagctgttccgacggaacactcagcttttagaactgacaaccaagcgcattgaggaacagagcctccatgacgtcctatttgaactgagcaaaacagtcctaagacatagcgggagtctgacaagggacaacctgagcggactttctgcggatatgcaagattacggactcataattgatggggctgcgttaagcctgatcatgaaaccaagagaagacgggtcttccggcaactacagggagctgttcctggagatctgccggagttgcagtgcggtgctctgttgtcggatggcaccactgcagaaggctcaaatcgtgaagctgattaaatttagtaaggagcacccaatcactctagcaataggagacggggcaaatgatgtctccatgatcctggaagcccatgttggcattggggtgattggtaaagaaggtcgacaggcggctcgcaacagcgattacgccattcctaaatttaagcacttgaaaaaaatgctactggtccacggacatttttattacatccggatatctgaactagtgcagtactttttctataaaaatgtgtgttttatctttccgcaattcctctatcaattcttctgcggtttttctcagcagacgctgtacgacacagcctacttaactctctacaacatcagctttacctcgctccctattctgctctattctctaatggaacagcatgtaggcattgatgtgcttaagagggaccccacactttaccgagacgtagccaaaaatgctctgctgagatggagggtgtttatctactggacattgctggggcttttcgatgcacttgtcttcttttttggtgcgtattttgtctttgagaacacaactgtgacttccaatgggcaaatcttcgggaactggacctttggaacacttgtttttacagttatggtgttcacagtcactctgaagctggccctcgatacccattactggacctggatcaatcactttgtgatctggggttcccttttattttatgtggtcttctcactcctctgggggggagtgatctggccttttctgaattaccagcggatgtattacgtgtttattcagatgctaagcagcggacccgcttggctggctatcgtgttactagttacaatctctttattaccggatgttttgaagaaggtgctttgccgacagctctggccgaccgcaaccgaaagggtccagaccaagtctcagtgcttgtcagtcgagcaaagcacaatctttatgctgtcccagacctcctcttccttgtcgttctag

SEQ ID NO: 215232 - DNA, 3534 bp, synthetic construct
  misc_feature 1..3534: note = Description of Artificial Sequence: Synthetic coding sequence
  source 1..3534: mol_type = other DNA
atgtggaggtggatcaggcaacagttggggttcgatccccctcaccaatcggacacccgcacaatatacgtggcaaataggttcccccaaaacggactttacactccacagaagtttatagacaatagaatcattagttccaaatacacagtttggaacttcgtgccaaagaatctttttgaacagttccggagagtcgcaaatttctattttctgatcattttccttgttcaactgatgatcgacacgccaaccagtccagtgacctccggactgccactgttcttcgtaattactgtgaccgccataaagcaggggtacgaagactggctgcggcataactctgataacgaagtgaacggagccccagtgtatgtggtgagaagtggtggactcgtcaagactcggtcaaagaatattcgggtcggggatatagttcggattgctaaggatgagatctttccggctgatctagtcctgttgtcttccgaccgcctggacggaagttgccacgtgaccactgcaagtctggatggcgaaaccaacctgaagactcatgtggcggtccccgagaccgcgctgcttcagaccgtcgccaatctggacacattagtggcggtcattgagtgccaacagcctgaggccgatctgtatcgcttcatgggacgaatgatcattacccaacaaatggaagagattgttcggcctctcggacccgagagcttgctgcttagaggcgcacggctcaaaaacacaaaagagatcttcggcgttgctgtgtacacaggcatggaaactaagatggccctcaactataagagtaagagccaaaaaaggtcggcagtcgaaaagtcgatgaataccttcttgattatatacctcgtgatcctcatttctgaggctgtgatttccactattcttaaatacacatggcaggcagaggaaaagtgggatgagccctggtacaaccagaaaacagagcaccagagaaattcatcaaagatcctacggtttatctccgactttctagcatttctcgtcctgtacaattttattatccctatttccctttatgtcaccgtggagatgcagaaattcctgggaagtttcttcattgggtgggatcttgatctgtatcacgaagaatctgaccagaaggcccaggtgaatacctccgatttgaacgaggaattagggcaggtagaatatgtgtttaccgacaagacgggaacactcactgagaacgaaatgcagtttcgagagtgtagtattaatggcatgaaatatcaggagattaatggacggttagtgcccgaaggacccactccagatagctcagaaggcaacctttcttacttatcttctctgagccacttaaataatctgagtcacctcacgactagttcctcattcagaacaagtccggagaacgaaaccgagctcattaaggaacatgacctgtttttcaaagccgtcagcctgtgtcataccgtccagatctcgaacgtgcagacagactgtaccggagacggcccatggcaatctaacctagctccatctcagttagagtactacgcgagcagtcccgacgaaaaagccctggtggaggcagctgctagaattgggatcgtcttcatcggtaactccgaggaaactatggaagtcaagactctaggcaagctcgagaggtataaattacttcacattctcgaattcgattctgacagacggaggatgtccgtgattgtgcaggccccatccggggagaaattgctgttcgctaagggcgcagagtcaagcattctccccaagtgcatagggggtgaaatagagaaaaccagaattcatgtggatgagttcgcactgaagggcctgaggacgctgtgtatcgcataccgcaagttcacgagcaaggaatatgaggagatcgataagcggatattcgaagcacgtacagctcttcaacaaagggaggaaaagctggccgctgtattccagttcattgagaaggatttgatcctcttgggcgcaacggctgtggaggatcgcctccaggataaagtaagagaaaccatcgaagccctaagaatggccggtatcaaagtctgggttttgactggcgacaaacacgagactgcggtgtcggtgagcttatcttgcgggcatttccatcgtactatgaacatcctagagctcataaaccaaaagagtgactctgaatgcgctgaacagttgcgtcagctggccagacggatcacagaggatcatgtgatccagcacggattagttgttgacggcacatccctatcacttgccctcagggaacatgagaagctatttatggaagtctgtcgcaactgtagcgccgtgctttgttgcagaatggcacccctgcagaaagcaaaggttatccgccttatcaaaatcagccctgaaaaaccaataactctggcggtcggagacggagccaacgacgtctcaatgatccaggaggctcatgttggcatcggcattatgggcaaagagggacggcaggctgccaggaattcggactatgcaattgctcgatttaagtttctttccaaacttctattcgtccacggccatttttattatattagaattgctacgctcgtgcagtactttttctacaaaaatgtctgctttattacaccccagttcctgtaccaattttattgcctcttttcgcagcaaaccctctacgattcagtttacctcacgctctacaatatttgttttacaagtcttccaatactgatatacagtctcctcgaacagcatgtggatccacacgtgttacagaacaagccaactctttaccgagatataagtaagaacaggctactgagcatcaaaacctttctatattggaccattctgggattcagccacgctttcatattcttcttcgggagttacctcttaatcggtaaggatacgagcctccttggaaatggccaaatgttcggtaattggactttcggcaccctcgtctttactgtaatggtgatcacggtcacagtgaaaatggctctggaaacccatttctggacatggatcaatcatctcgtaacctggggatctattatcttttattttgtattttcactgttctatggaggcattctctggcctttcctgggctcacagaatatgtacttcgtatttatccagttactcagctccgggagtgcctggtttgctataatactgatggttgtgacctgtctgtttttggatatcatcaagaaggttttcgaccgccatctacacccgacatcaacagagaaagcccagttgactgaaaccaacgccggaattaaatgcctggactcaatgtgctgtttccctgaaggggaggcggcatgcgcctcagtcggccgtatgctggagcgagttatcggacgttgtagccccacccatataagccggtcatggtccgcatccgatcccttctacactaacgatagaagcatactgacgctgagtacaatggactcttctacctgctag

SEQ ID NO: 215233 - DNA, 315 bp, synthetic construct
  misc_feature 1..315: note = Description of Artificial Sequence: Synthetic coding sequence
  source 1..315: mol_type = other DNA
atgtattttgtttttatccagctgctgagctcaggatctgcttggtttgctattattctcatggtcgtgacctgtcttttccttgacattatcaaaaaggtgtttgaccgtcatctgcaccctacgtcaaccgagaaggcgcagatgtactctaatactgtggccctgtcagacgaattcatagcactgcagcctctgagtagggcaaggaaccaattgagcaaactcaggtggaaaaagataagggtgcaaagcgcgcagcacatgaacctcttaaaggcctctaccgaaggacgcacagtggggacttgctag

SEQ ID NO: 215234 - DNA, 4503 bp, synthetic construct
  misc_feature 1..4503: note = Description of Artificial Sequence: Synthetic coding sequence
  source 1..4503: mol_type = other DNA
atggatccttccatgggggtgaacagcgttaccatctcagtggagggcatgacatgtaacagttgcgtgtggactatagaacagcagataggaaaggtgaacggcgtccaccatattaaggtgtctctggaggagaagaacgccactatcatatatgaccctaagctgcaaactcctaagacccttcaagaagccattgatgacatgggcttcgacgctgtgatacacaatcctgaccctcttccggtattaacggacaccctctttcttactgttaccgcttctttgacactaccttgggaccacatccagtccacattgttgaagactaaaggcgtcacggacatcaagatctatccacaaaagaggactgttgcagttaccatcattcctagcattgtgaatgctaaccagattaaagaacttgtgcccgagttgtcccttgacactgggaccctggagaaaaaatcaggggcttgcgaggaccattccatggcccaagccggtgaggttgtgctaaaaatgaaagtggagggtatgacttgtcactcttgtacgtctactattgaggggaagatcggtaaactgcagggtgtacagagaatcaaggtaagcctagataatcaggaggctacgatcgtgtatcagcctcacctgatctccgtggaagagatgaagaaacagatcgaggctatgggcttccccgcattcgtaaaaaaacagccaaagtatctgaagcttggggctatagacgtcgaacgtctgaagaataccccagtcaaaagttcagaggggagccagcagcgaagccccagctatacaaacgattctacagcaacatttatcatcgatggcatgcattgtaaaagctgcgtcagcaacatcgagagcacccttagcgcattgcagtatgttagtagcattgtggtgtcgctcgagaacagatccgccatcgtgaaatacaatgcttcaagtgtgacacctgagtccctgcggaaggccattgaggccgtatcacccggactgtacagagtatccatcacaagcgaagtagaatccacttcaaattccccaagcagcagcagcctgcagaaaatccctcttaacgtcgtatcccagcccctgacacaggaaactgtgattaatatcgatggaatgacgtgtaattcttgtgtgcaatctattgagggagttatttccaaaaaacctggagtcaaatccatccgagtgagtctcgccaattcaaatgggacagtggagtatgatccccttctcacctcaccagaaactcttcgcggagccatcgaagatatgggattcgacgcaactctgagtgatacgaacgagccactggttgtgattgcacaacccagcagtgagatgcctctgcttactagtactaatgagttttacacaaaaggaatgacccccgtgcaggataaggaggaaggcaagaacagttctaaatgctatatccaggttaccggcatgacctgcgcctcctgcgtggcgaatatcgagagaaacttaagacgagaagaggggatttacagcattctcgtggcgctcatggcaggcaaagccgaagtgaggtacaacccggcagtgattcaaccacctatgatcgctgaattcattcgcgagctcggatttggcgcaacagttatcgaaaatgccgacgagggagacggtgtgctcgagctcgtcgtaagaggcatgacctgcgccagctgcgtgcataaaatcgagagttccctgacgaagcatagaggcatcctgtactgttctgtagcattggcgactaacaaggcacacattaagtatgacccggagattatcgggcctcgtgacatcattcatacaattgagagcctaggatttgaggcttcgctggtaaagaaggatcgttcagcatcacacctggaccacaagcgagaaattcggcaatggcgcagaagcttcttggtatctctctttttttgtatccccgtcatgggcctgatgatttacatgatggtgatggatcatcatttcgccaccctccatcataaccaaaacatgtccaaagaggaaatgatcaatttacattcatccatgtttctcgagagacagatcttgcccggtctgtccgtgatgaatctgctctcttttcttctttgtgtgccggtgcaattctttgggggatggtatttctacatccaggcatataaggccctgaaacacaaaaccgccaacatggatgtgttgatcgtgctggccactacaatcgccttcgcttactcgctcatcattctgctggtagcaatgtacgaacgagctaaagtaaacccaataactttttttgataccccacccatgctgttcgtctttatcgcacttggcagatggctggagcacattgcgaaggggaaaacctcagaagccttggctaaactgatatccctgcaggcaaccgaagcaacgatcgtgaccctggactccgacaatattctcctgtccgaggagcaagtcgatgtggaactcgtacagcggggtgacatcattaaggttgtgccgggaggcaagttccccgtggacggtagggtgattgaggggcattcaatggtcgatgagagcctcatcactggagaagccatgcctgttgctaagaagcctggaagtaccgttatcgcaggttccatcaatcagaatggctcactgctcatctgtgcaacccatgtgggagctgatacgactctaagccaaatcgttaaactcgtcgaggaagcccagacatcaaaagctcccattcagcagttcgctgacaaactttccggctatttcgttccatttattgtgttcgtgtccatcgccacattactcgtttggatagtaataggctttctgaatttcgagattgtggaaacctacttccccggatacaatcgatccattagccgtactgagactatcatccggtttgctttccaggcctctatcaccgtgttgtgcattgcttgcccatgcagtttgggcttggccacaccaaccgctgtgatggtcgggactggagtcggtgcccagaatggcatacttatcaagggcggagagccactagagatggcccacaaggtgaaggtggttgtgttcgacaaaaccggcactatcacgcacgggaccccagtagtgaaccaggtgaaagtcttgacggagtctaataggatatcccatcacaaaatcctggctatcgtgggaaccgccgagagcaattcggagcacccccttggcaccgccattaccaaatattgcaaacaggaactggatactgaaactctgggaacgtgcatcgactttcaagtggtgccaggatgtgggataagttgcaaagtaaccaacatagagggtctgctgcacaagaataattggaatattgaagataataacataaagaacgcttcattagtgcaaatcgatgcctccaatgagcagagctcaaccagtagttccatgattatagatgcccagataagcaacgcactgaacgcccaacagtataaggtactgatcggtaacagggagtggatgatccgtaatggactggtgattaacaacgacgttaatgattttatgacagaacacgagcgaaagggaagaaccgccgtgctggtcgcagtggacgacgagctctgcggtctcattgctatcgccgacacagtgaaacctgaggccgaactagccattcacatattaaagtctatggggctcgaagtcgtgctgatgactggagataattctaagaccgcgcgatcaattgctagccaggtcggcatcaccaaagtgttcgcagaggtcttgccttctcacaaagttgcgaaggtgaaacagcttcaagaagagggtaaacgagtggccatggtaggcgacggtatcaatgactcgcccgctctggcaatggcgaacgtcggtatagctatcgggaccgggacggacgtggcaatagaggctgctgatgttgtgcttatacgcaacgatctgttggacgtagttgccagcattgatctgagtagggagaccgtaaaaagaatccgcattaatttcgtgtttgccctgatttacaatctggtgggtattccaatagctgctggagtatttatgccaataggcctggttctgcagccttggatgggttcagctgccatggccgcaagttctgtttccgttgtgctgagttcattgtttctcaagctgtacaggaaacctacttacgaatcttacgaactgccggctaggtctcagattggccagaagtccccaagtgaaattagcgttcatgttggaattgatgacacatcccgcaactcccctaagcttgggctactggaccggatcgtaaattattcaagggcctcaatcaattctctgctcagcgacaagagaagcctgaactccgtggtgacatctgagcccgacaagcactctctcttggtgggggatttccgggaggatgacgacacggccttatag

SEQ ID NO: 215235 - DNA, 4269 bp, synthetic construct
  misc_feature 1..4269: note = Description of Artificial Sequence: Synthetic coding sequence
  source 1..4269: mol_type = other DNA
atggatcctagcatgggagtgaactccgtaacaatttcagttgagggcatgacatgtaattcctgtgtgtggaccatcgagcagcaaatcggaaaggttaatggcgttcaccacattaaggttagtcttgaagagaaaaacgccactattatctacgatcccaaactacagactcctaagaccctccaagaggccatagatgacatgggattcgacgccgttattcacaatcccgacccccttcctgtccttaccgatacgttgttccttaccgtgactgcctccttaactctgccttgggatcatattcagtctacactgttaaagacaaaaggagtcaccgacattaagatctaccctcagaagcggactgtggctgtgacgataatcccatccattgtcaacgccaaccagattaaagagctcgtgcctgagctgtctctcgacacgggaaccttggagaagaagagtggagcatgcgaagaccactctatggcccaagcaggagaagtggtgctcaaaatgaaggtggagggaatgacctgccactcatgcacctccacaattgaaggcaagatcggcaagctccagggagtgcagcgcattaaggtgtctctggacaatcaggaagccacaatcgtttaccagccccatctcatctcagtggaagagatgaaaaagcaaatcgaagccatggggtttcccgctttcgtgaagaaacagcctaagtatctgaaattaggcgctattgatgttgagagacttaaaaacacgcccgtaaagtcttcagagggatcacaacaaaggagccctagttacacaaacgattctaccgccacatttatcatcgacggaatgcattgtaaatcgtgcgtttccaacatagaatcaaccttgtcggccttgcagtatgtgtcttcaatagtggtgtcactagaaaatcgcagcgccattgttaaatataacgccagttctgtcacaccagaatccctcaggaaggccattgaggcagtgagtcctgggctgtacagagtgtctatcacatctgaagtggagagcaccagtaactccccttcgtcatcatcactgcagaaaatccctctaaacgtcgtatcgcaacctttgacccaggagaccgtgatcaacattgatggcatgacatgtaactcttgtgtccagtctatcgagggggtgattagcaaaaagcccggtgtaaaatcaatcagggttagcttggccaatagcaacggaacagtcgaatacgatccgttattaacgagccccgaaacactccgtggagctatagaggacatgggcttcgacgctactctcagtgacacaaatgagcctttggttgttatcgcacagccaagtagcgaaatgcctctgcttacatccaccaacgaattctacacaaagggaatgacccctgtccaggataaggaggagggtaagaacagttctaaatgttatatacaggtgaccggaatgacctgcgcatcctgcgtggcgaacatcgagagaaatctgagacgagaagagggcatatattccatcctggtagctttgatggctggcaaggccgaagtcagatacaatccagcagtaatccagccacccatgatagccgaattcattcgcgaactggggtttggggcaacggtcatcgaaaatgccgacgagggagatggcgtccttgagctggtcgtcaggggcatgacctgcgcttcgtgcgtgcacaagattgaatccagcctgactaaacatcgcggtattttatattgttccgtggccctcgccaccaataaggcgcatattaagtacgaccctgagattatagggcctagggatatcatccacactatcgagtctctggggtttgaggcttctctggtgaaaaaagaccgctcggcctcccatctggaccacaaacgtgagataagacaatggcggaggtctttcttagtcagcttgttcttctgtattccggttatggggctcatgatttacatgatggtcatggaccaccattttgcaaccctgcatcataatcaaaatatgtctaaagaggagatgatcaacctccactcatcaatgtttttagagaggcaaattttgcccggtctctccgtcatgaacttgctatccttccttctgtgcgtgcccgtgcaagggaagaccagtgaagccctggcaaaacttatctcgctccaagccacagaggccaccattgtgaccctggatagtgataatattctcctgtctgaggaacaggttgatgtggagctcgtgcaaaggggtgatataatcaaggtcgtgccaggaggaaagttcccggtggacggcagggtcattgagggacacagcatggtagacgagtctctgatcacaggggaagcgatgccagtagcgaagaagccgggttccacagtcatcgccggtagtatcaatcagaacgggagcctgttgatttgtgctacgcacgtgggcgctgatacgacgctgagtcagattgtcaagcttgtagaagaagcacagacaagtaaggcacccatacagcaattcgcagacaagctgagcggctatttcgtcccgttcatcgtgttcgtctcaattgccacacttctagtgtggattgtgattggctttttaaattttgaaatcgtggagacatatttcccaggctataatcgcagtatttcaaggaccgagaccattattcggttcgcctttcaggcgagcatcacagtgttatgtatcgcttgtccatgctcactcggcctcgcaacccccacagccgttatggtgggtactggagtgggcgcacagaacggaatcctgatcaagggaggagagcccctggagatggcacataaggtcaaagttgtggtctttgataaaacgggcaccatcactcatggtactcccgtcgtgaaccaggtgaaggttctgaccgagtccaacaggatctctcatcacaagattctagccattgttggtactgcagagtcaaattcagaacatccactgggcactgcaataaccaaatattgcaagcaggagcttgacaccgaaactctgggcacatgcattgattttcaggttgtcccaggatgtggcattagctgtaaagtgaccaatatcgagggtctgttgcacaaaaataattggaacatcgaggacaataacatcaagaatgccagtttggttcagattgacgcttcaaacgagcagagtagcactagtagttccatgatcattgacgcacaaatttctaatgcattaaacgcccagcaatataaggtgctcatcggcaatcgggagtggatgatccgaaacggccttgttattaataacgacgtaaacgattttatgactgagcatgagagaaaggggcgaacagcggttctagtggcggtggatgatgagctctgtggtctgatagctatcgccgatacagtaaagcccgaggcagagcttgccatccacatcctgaagtccatgggtctggaagttgtgttgatgaccggggataattctaaaacagctcgctcgatcgcctcccaggtgggcataactaaagtttttgccgaagtgttaccatcacacaaggttgcgaaagtgaagcagctgcaagaagagggcaagcgtgtcgctatggtcggcgacgggatcaatgattcgcccgcattagcaatggcaaacgtgggcattgccattgggacgggaacggatgttgcgatcgaggcggcagacgtggtgttaattcggaacgacctgctcgatgtggtggccagcattgatctttctcgagagactgtgaaaaggattagaattaatttcgttttcgctttaatctacaacctggtcggcatccctatagctgccggtgtgttcatgcccatcggactggttctgcagccatggatgggaagtgctgccatggccgcatctagcgtgagcgtggtgctttctagcctgtttttaaaactataccgtaagcccacctacgaaagctatgagttaccagccaggtctcagattggtcagaaatcgcctagcgaaatatccgtgcatgtcgggatcgatgatacatccaggaattcgcccaagctagggctgctggaccgcattgtgaactattctcgagctagcattaactctttgttgagcgataaacggagtttgaattcagttgtgacctcagagccggataagcactccttgctcgtgggcgattttcgcgaggacgatgacacagctctctag

SEQ ID NO: 215236 - DNA, 264 bp, synthetic construct
  misc_feature 1..264: note = Description of Artificial Sequence: Synthetic coding sequence
  source 1..264: mol_type = other DNA
gagtgcaatgaggagatcaagatggatccttcaatgggcgtcaatagtgtgacgattagcgtggagggcatgacatgcaacagttgcgtttggactatcgagcagcagataggaaaagtcaatggcgtccaccatatcaaggtctccctcgaagagaagaacgccacaatcatattctatgcccattggttcggctttgccgcattggacggcatatgctctaacggctgcttcatctgcttctgctctactttctttagttag

SEQ ID NO: 215237 - DNA, 1512 bp, synthetic construct
  misc_feature 1..1512: note = Description of Artificial Sequence: Synthetic coding sequence
  source 1..1512: mol_type = other DNA
atggatccgtcaatgggcgtgaactcagtgactatcagtgtggaaggtatgacatgtaactcctgcgtgtggaccatcgaacaacaaatcgggaaggttaatggagtgcaccacatcaaagtcaaagttgtggttttcgataagactggcaccataacccacggaacaccggtggttaatcaggttaaggtcctgacagagtctaacaggatctcccaccataagatcctggccatcgtgggcactgcagagtccaactcagagcatcctctcggaacagcaatcaccaaatattgcaagcaagaacttgacactgaaacgctgggcacctgcatcgatttccaggtggtgcctgggtgtggcatcagttgcaaggttaccaatatcgaaggcctgttacataagaacaactggaatatcgaggacaacaatattaagaacgcatctctggttcagatcgacgcttccaatgagcagagttctacctctagttcaatgatcatcgatgcgcagatttccaacgcgctcaatgcccagcagtacaaggtattgataggcaatcgggaatggatgataaggaacgggctggtcataaataatgacgtgaatgattttatgaccgagcatgagcggaaaggacgcactgccgtgctggtggccgtggatgacgagctgtgtggcctgatagctatagccgacactgttaaacccgaggctgaactagcgatccatattctcaagtcgatgggacttgaagtggtgttgatgacaggcgacaatagcaagacggcacgcagtattgcatctcaggtgggtatcacaaaagtcttcgcagaagtgctgccaagccacaaagtcgctaaggtgaaacagcttcaggaggaggggaaacgcgtcgcaatggtcggtgatggaattaatgatagtcccgctttggccatggcaaatgtagggatagctatcggtaccgggactgatgtcgcaatcgaggcagcagacgtcgtgttaatacgcaacgacttgttggatgtggtggcctcaatcgacctgagcagggagactgtaaaacgcattaggatcaacttcgtcttcgcgctaatatacaacctggtcggaataccaatagctgccggtgtgtttatgcccattggcctcgtgctgcagccatggatggggtcagcagccatggccgcatcatcagtatctgtggtgctgtcgtccctgtttctcaaactctacaggaaaccaacctatgaatcatatgaactccctgctcgaagtcaaataggccagaaatcaccctctgagatatcggtacatgtggggatcgacgatacttctagaaatagtcccaagctcggactgttagacaggatcgtcaactacagcagagcaagtatcaactccctactgtccgataagagatcgctgaactcggtcgtgacatctgagcctgataaacactctctcctagttggcgattttagagaggacgacgatacggcattgtag

SEQ ID NO: 215238 - DNA, 2049 bp, synthetic construct
  misc_feature 1..2049: note = Description of Artificial Sequence: Synthetic coding sequence
  source 1..2049: mol_type = other DNA
agaaatcaggagtgtaatgaggaaataaaaatggatcccagcatgggtgtgaactctgtgaccatcagcgtggagggtatgacgtgcaattcctgcgtttggaccatcgagcagcagatagggaaggtaaatggagttcaccatattaaggtatcactggaagaaaagaacgcgactatcatctacgatccaaagcttcaaaccccgaaaacattacaggaagcaatcgatgacatgggatttgacgctgtgatacacaaccccgatcctctcccagtgctgacggataccctcttcctgactgtcactgcctccctgacccttccttgggatcacatacaaagtacccttctgaaaacaaaaggcgtgactgacatcaagatatacccccagaagcggaccgttgctgtgaccattattccctccatcgtgaatgcaaatcagatcaaagaattggtgcctgaactttcactcgatacagggactctcgagaagaagtccggcgcatgtgaagatcacagcatggcccaggccggagaagtcgtgctgaaaatgaaggttgaaggcatgacttgtcatagctgcaccagcaccatcgaagggaaaattgggaagctgcagggtgtacagaggattaaggtgtcgttagacaatcaggaggccactattgtctatcaacctcaccttatttcagtggaagagatgaaaaagcagattgaggctatggggtttccagcctttgtcaagaagcagcctaagtatctcaagctgggagccatagacgtggagcgtttgaaaaatacaccagtgaagagctctgaaggcagtcagcagcgaagtcccagctatacaaacgacagtacagctacctttatcatcgacggcatgcattgcaaaagctgcgtgtcaaacatcgaaagcaccctcagcgctctacagtatgtgtctagtatagtggtgtccctggagaatagaagcgcaatcgtgaagtataatgcatcatctgtcactcccgaaagcctgagaaaagcaatcgaggctgtcagccctggactatacagggtctccattacatcagaggtggaatcaaccagtaacagccccagttcaagcagcctgcagaagattccgcttaacgtagttagtcagccactcactcaggagactgtaatcaatattgacggtatgacttgcaactcatgcgtgcagagtatcgaaggggttatctctaaaaaacccggtgtgaagagtatcagggttagcctggcgaacagcaatggaactgtggagtacgatccactactgactagccctgaaacactgcgtggtgccattgaggatatgggctttgatgctacgctgagcgacacgaatgagccgctcgtggttattgcccagccttcatctgagatgcctctgttgacatccactaacgagttctacacaaaaggaatgacaccggtgcaagataaggaagaagggaagaattcctctaagtgctacatccaggtgactggcatgacctgtgcttcctgcgttgccaacattgagaggaacttgcgtcgcgaggaaggtatctacagcatcctggtcgccctcatggcgggtaaggccgaggtgcggtacaatccagcggttatccagccccctatgatcgccgagtttatccgtgagctcggatttggtgccactgtaattgaaaatgctgacgaaggcgatggggttctggagctggtggtccgcggaatgacatgtgccagctgcgtgcataagatagagagtagtctcaccaaacatcgaggtatactctactgctcagtcgctcttgccaccaataaagctcacattaagtacgacccagagatcataggcccaagggatatcatccatactattgaggtctcagcaaaaaacctctgtttttgtgtcttaacctatcttatttctactcctgtaaatcacttttggttcgccagcgaccgaggcaacgaaaagaagagcaattccttcgagcattttaagcaagatctctcccagaatctcatgtag

SEQ ID NO: 215239 - DNA, 825 bp, synthetic construct
  misc_feature 1..825: note = Description of Artificial Sequence: Synthetic coding sequence
  source 1..825: mol_type = other DNA
atggacccatctatgggcgtgaattccgtgacaatttccgtggaggggatgacctgcaattcatgtgtgtggacaattgaacagcagatcggcaaagtgaatggggtacaccacattaaggtcagcctggaggagaaaaacgcaacaattatatacgatcccaaacttcagacccccaagacattacaggaagctatcgacgacatgggcttcgacgccgtgatacataatcctgatcccctcccggtgcttactgacacactgttcctcactgtgactgccagcctcacgttgccttgggatcatattcagtcaacactgcttaagaccaaaggagtaaccgacattaagatctaccctcaaaaacggacggtagccgtgaccattattccatcaatcgttaacgcaaaccagatcaaagagttggtacccgagctgtccctggacacggggacgctggaaaaaaaaagcggtgcttgtgaagatcattccatggctcaggccggagaagtggtcctgaaaatgaaggtcgagggcatgacctgccattcttgcacaagcacgatcgagggcaagatcgggaagcttcagggagtacaacgcattaaagtttctttggataatcaggaagctacaattgtgtaccagccgcacctcatcagtgtggaagaaatgaaaaaacagatcgaagccatgggattccccgcttttgtgaaaaagcaacccaaatatctgaaactcggagcaatagatgtggaaaggcttaagaacacccctgttaagtcctcagaaggaagccagcaaaggtctccgagctatcagtag

SEQ ID NO: 215240 - DNA, 546 bp, synthetic construct
  misc_feature 1..546: note = Description of Artificial Sequence: Synthetic coding sequence
  source 1..546: mol_type = other DNA
atgagaccatccggtacatgcgcttcgtgtggtagcgatccaccgccacctacccaagtgccctctagtcgcaatgactgtggcagcacagtcccggacaacccctttgtgagaacgcttcctcacacaaccatgagtggccaccagctccccccagcgggtacccagcgtcctggacctgccgcatgtcttgtccctggctccctcccctcactgccctcccagcccggtccatggggggctttggggaccgccgcagccgagggtatgagttgcagtaatacgaggacagcactggaatttgccctgtttcccaaagaaatgctactgggaagctggtatggctggggtttgtctttatacaggcgtggacgatgccaagactccgcacacccggaagaggatacctgcccccatggcgaaggcgctcctgctcaggctggagagtcggtgcctagccaacagctatgtcatcaccccgctggaaactggggtggtctctactgggtgatcggtaaagctttttcccttgcatggaattgctag

SEQ ID NO: 215241 - DNA, 642 bp, synthetic construct
  misc_feature 1..642: note = Description of Artificial Sequence: Synthetic coding sequence
  source 1..642: mol_type = other DNA
atgcgggtgaggggtccagctcgtcttatcgcctccggtgctaggttactgctaagaatgttatctgcacttcctgggtggggcccagctcatcttcagcgcccactactcggacccgcttcatgccttgggattctcagaccagcgatgactgcccactctttcgccctgccagtgatcatcttcaccacgttctggggcctggtgggtatcgccggaccttggtttgtgccaaaaggtcctaacagaggtgtgatcatcacgatgctcgtagctaccgcagtctgttgctatctcctgtgtcctgcattgggcatgacagtggcacccctgtccttaactaccccctcaagcggcccatcaccgactcaactgtgtctagtaacttcaagcctgctgctggctcccagggatcccgatccccaaggcttgcccggatcctggaaatccagccagtcctcccagcccgctcgagccctagggagtcccggtcatagcagcggaagaggggatgtcctgctccaatacccacactgtagcggagtgtgcccactctctcagggcgacgcagccggtgaattggtgtgggtcggtagctttcctctccagacaggtcagatgcccggtttgtcccccagttag

SEQ ID NO: 215242 - DNA, 495 bp, synthetic construct
  misc_feature 1..495: note = Description of Artificial Sequence: Synthetic coding sequence
  source 1..495: mol_type = other DNA
atgactgcacattcgtttgcacttccagtgattatcttcacaaccttctggggcctggtaggcatagctggtccctggttcgtcccaaaaggacctaatagaggggtaatcattactatgctggtggccacggcggtctgttgttacctgctttgcccagcactcggaatgacggtagcccctttgagcctgactaccccgagctccggcccaagcccaacacagctgtgtcttgtcacatcttcccttctactcgctccgagagatcctgatccacaaggcctgcctggttcttggaaatcaagtcagtcgtcccagccagccagggcgctgggttcacccggtcatagctcaggacggggagacgtgcttttgcaatatcctcactgcagcggcgtatgccccctctctcagggagatgctgctggcgagctagtgtgggtggggtcatttccattgcagacaggacaaatgcctggcctgtccccttcttag

SEQ ID NO: 215243 - DNA, 393 bp, synthetic construct
  misc_feature 1..393: note = Description of Artificial Sequence: Synthetic coding sequence
  source 1..393: mol_type = other DNA
atgagggttagagggcctgcgaggctcatcgcttctggagcgagactgctactgcggatgttatccgccctgccgggttggggacctgcgcatctgcagcggcctcttctgggaccagcttcctgcctggggattctgagacccgctatgacagcccactctttcgctctcccggtgataatctttacaacattctggggactggtcgggattgctggcccatggtttgtccccaagggccctaatcgtggagtcattatcacaatgctggtggcgacggccgtttgttgttatctcttctggctcatcgccattctggctcaactgaaccctctattcggtccacaattaaaaaacgagacgatctggtacgtacgctttctttgggaatag

SEQ ID NO: 215244 - DNA, 246 bp, synthetic construct
  misc_feature 1..246: note = Description of Artificial Sequence: Synthetic coding sequence
  source 1..246: mol_type = other DNA
atgacagcccattccttcgccctccctgtcatcattttcactacattctgggggcttgtaggtattgctggaccatggtttgtgccaaagggccctaaccggggagtcatcatcaccatgctggtggctaccgctgtgtgctgctatttgttttggctgattgccattctggcccagcttaatccactctttggaccccagctcaagaacgaaacaatctggtatgtgaggttcctctgggagtag

SEQ ID NO: 215245 - DNA, 564 bp, synthetic construct
  misc_feature 1..564: note = Description of Artificial Sequence: Synthetic coding sequence
  source 1..564: mol_type = other DNA
atgacagcacacagtttcgccctccccgtcatcatctttacgaccttttggggtttggtagggatcgccggtccttggtttgtgcctaaggggccaaacaggggagtaatcatcaccatgctggtcgccacagcggtctgctgttacctcttctggctgatcgcaatcttagctcagttaaacccacttttcggaccacaactgaagaacgagacaatttggtgccccgcactcggaatgactgtggcacccctatccctcacaactccatcttcaggacccagtcctactcagttgtgccttgtcacaagcagtctgctgctagcacccagggatcccgacccccagggactcccgggatcttggaagtcttctcaatcatcccaacccgcacgggcactggggtctccgggacactccagtgggcgaggggacgtgctattacaatacccacattgctcgggagtttgcccattgtcccagggcgacgccgctggagaattagtctgggtggggtcgtttcctctccaaacggggcagatgcccggtctgtcaccttcctag

SEQ ID NO: 215246 - DNA, 357 bp, synthetic construct
  misc_feature 1..357: note = Description of Artificial Sequence: Synthetic coding sequence
  source 1..357: mol_type = other DNA
atggcctcccagtcccagggaatacagcagctactgcaagcagagaagcgcgcagctgaaaaagtgagtgaggctcggaaacgtaagaacagacgcctgaaacaggcaaaagaagaggcccaggccgagatcgagcaatataggctacagagagagaaggagttcaaggctaaagaggcagcagccctgggatctagagggtcttgctccaccgaagtcgagaaggagactcaggaaaaaatgaccatcttacagacatattttcggcaaaacagagatgaggtccttgacaatcttctcgcttttgtgtgtgatataaggccggagatccacgagaactaccgcattaacggatag

SEQ ID NO: 215247 - DNA, 357 bp, synthetic construct
  misc_feature 1..357: note = Description of Artificial Sequence: Synthetic coding sequence
  source 1..357: mol_type = other DNA
atggcctctcagtcccaggggatccaacagctgcttcaggccgagaagagggccgcagaaaaggtggcagacgcaaggaagcgcaaggccaggcgactcaaacaggccaaagaagaagcccaaatggaagttgaacagtatcggagggagcgcgaacacgagtttcaaagtaaacagcaggcggcaatgggctcccaaggaaatttgagtgccgaagtcgaacaggccactcgcagacaagtgcagggcatgcaatcgtcacaacagaggaatcgagaacgagtgctcgcgcaactcctcggaatggtgtgtgatgtgagaccacaggtccatccaaactaccgcatctcagcctag

SEQ ID NO: 215248 - DNA, 237 bp, synthetic construct
  misc_feature 1..237: note = Description of Artificial Sequence: Synthetic coding sequence
  source 1..237: mol_type = other DNA
atggcatcccagagccaggggatacagcagcttcttcaagccgaaaagagggccgcagagaaggtggccgacgcccgaaaacggaaggccagaaggttgaaacaggctaccagacgccaagtgcaggggatgcagtcaagtcaacagcggaatcgcgagcgggtgcttgcccagctgttgggtatggtttgcgatgtccggccacaagttcatccaaattatcggatttccgcctag

SEQ ID NO: 215249 - DNA, 357 bp, synthetic construct
  misc_feature 1..357: note = Description of Artificial Sequence: Synthetic coding sequence
  source 1..357: mol_type = other DNA
atggcatcccagtcacaggggatccaacagttactgcaggcagaaaaacgcgcagccgaaaaggtggccgatgccaggaaacgtaaagccagaaggttaaagcaggccaaggaagaggctcagatggaggtcgagcagtacagaagggagcgcgaacacgagttccaatcgaaacagcaggctgccatgggaagccaaggtaatctgtcagcagaggtggagcaggcaacgcgacggcaagtccagggaatgcaatctagtcagcagcgtaatagagagagggtcctggcccaactactcggtatggtgtgcgacgtgcgtccacaggtccacccgaattatagaatctcagcctag

SEQ ID NO: 215250 - DNA, 477 bp, synthetic construct
  misc_feature 1..477: note = Description of Artificial Sequence: Synthetic coding sequence
  source 1..477: mol_type = other DNA
ggaggccaacagcacgcggtgccatgtccgcatggcggaccaggtggtcaggggcagcctagggcagaggccgctggcacaggacagggccatcggggaggacatcggcctggagctgtggtaggggctgcccaacatctccaccgaggtctaggagtagccggaggcggacccggaccgggaccggcagtgctgcagactaggaaggcccgtaggctcaagcaggcaaaggaggaggcacaaatggaggtggaacagtaccgtagggaacgggaacatgagttccagtctaagcagcaggcagcaatgggcagccaaggtaatctgtccgctgaagtagaacaagccactaggagacaggttcaagggatgcagtccagccagcagcgaaatcgagagcgagtgctggcacagcttctcggcatggtgtgtgatgttagaccacaggttcaccccaactaccgcatctcagcctag

SEQ ID NO: 215251 - DNA, 237 bp, synthetic construct
  misc_feature 1..237: note = Description of Artificial Sequence: Synthetic coding sequence
  source 1..237: mol_type = other DNA
atggcgagtcagtcccagggtatccagcaattgctgcaggctgagaaacgagcggctgagaaagtcgccgacgctcggaagaggaaagctcgccgactgaagcaggcgactcggagacaagttcaaggcatgcagagcagccagcaacgcaatagagaacgggttctggcacagctgctggggatggtgtgcgatgtacggcctcaggtgcatcctaattaccgaattagtgcgtag

SEQ ID NO: 215252 - DNA, 237 bp, synthetic construct
  misc_feature 1..237: note = Description of Artificial Sequence: Synthetic coding sequence
  source 1..237: mol_type = other DNA
atggcaagccagagccaggggatccagcagctcctgcaagccgagaaaagagcggctgagaaagtagccgacgcgcgaaagcggaaagcgagaagattaaagcaggccactagaagacaggtgcaaggcatgcaaagtagtcagcaacgcaacagggaacgtgtgctggcccagcttttaggaatggtgtgtgacgtccgtcctcaggtccaccctaattatcggatctctgcctag

SEQ ID NO: 215253 - DNA, 357 bp, synthetic construct
  misc_feature 1..357: note = Description of Artificial Sequence: Synthetic coding sequence
  source 1..357: mol_type = other DNA
atggcctcccagtctcaaggaatccagcagctccttcaggccgagaaaagagccgctgagaaggtggccgatgcgaggaagcgcaaagccagacgcctcaagcaggcaaaggaggaggcccagatggaggtcgagcagtatcgacgggagagggagcacgaatttcagagcaaacaacaagcagcgatggggtctcaggggaatctatctgccgaagtggagcaagcgacacgcagacaggtacagggcatgcaatcctctcagcagaggaaccgcgagagggtgttagcacagctgctgggtatggtgtgtgacgtgcggcctcaagtacatcccaactatcggatctctgcctag

SEQ ID NO: 215254 - DNA, 237 bp, synthetic construct
  misc_feature 1..237: note = Description of Artificial Sequence: Synthetic coding sequence
  source 1..237: mol_type = other DNA
atggcgtcacagtcgcagggcattcagcagctcctgcaggctgagaaaagagctgccgaaaaagttgctgacgcgagaaagcgcaaggcaaggcgtctcaagcaggctactcgacggcaggtccaagggatgcaatcctcacagcagcgtaacagagagagggtactggcacagctgctgggcatggtgtgcgacgtgagaccccaagtgcaccctaactaccgaatctccgcttag

SEQ ID NO: 215255 - DNA, 357 bp, synthetic construct
  misc_feature 1..357: note = Description of Artificial Sequence: Synthetic coding sequence
  source 1..357: mol_type = other DNA
atggctagccagtctcaggggatacagcaactgttacaggcagaaaagagagccgcagagaaagttgctgacgcccgaaaacggaaagcacggcgactcaaacaggccaaagaagaggcccagatggaggtcgaacagtatagaagggagcgtgaacacgaattccaaagtaagcagcaagccgctatggggagccagggcaacctgtcagccgaagtggaacaagcaaccaggcgccaggtgcaggggatgcaaagctcacagcagcgaaatcgggaaagagtgttggctcagctcttgggcatggtgtgcgacgtccgaccacaggtgcaccctaactacagaatcagcgcgtag

SEQ ID NO: 215256 - DNA, 237 bp, synthetic construct
  misc_feature 1..237: note = Description of Artificial Sequence: Synthetic coding sequence
  source 1..237: mol_type = other DNA
atggccagccaaagtcaaggaatccaacagttgcttcaggctgagaagcgcgctgcggaaaaggtggctgacgcacgcaaacgcaaagccaggcgcctcaaacaagccacccgacggcaagtgcagggaatgcagagcagtcagcagcgtaatagggaacgtgtcttagctcagttgctgggaatggtttgcgacgtccggcctcaggtccaccctaactatcggatttcagcctag

SEQ ID NO: 215257 - DNA, 237 bp, synthetic construct
  misc_feature 1..237: note = Description of Artificial Sequence: Synthetic coding sequence
  source 1..237: mol_type = other DNA
atggcctctcagtcccaaggcatccagcagctgctgcaggccgagaaacgagccgctgagaaggtggccgatgccaggaagagaaaagcacggagactcaagcaggctaccaggagacaagtgcagggcatgcagagtagtcagcagcgaaatagggaaagggttctggctcagctactgggcatggtgtgtgatgtgcggcctcaagtgcaccctaattatcgcatctccgcgtag

SEQ ID NO: 215258 - DNA, 357 bp, synthetic construct
  misc_feature 1..357: note = Description of Artificial Sequence: Synthetic coding sequence
  source 1..357: mol_type = other DNA
atggcgtctcagtcacagggaatccaacagctgctccaagccgaaaaacgcgctgccgagaaggtcgccgatgcgaggaagcgaaaagctagacggctgaagcaggccaaggaggaagcacagatggaggtggaacagtatagacgcgaacgggagcatgagttccagagtaagcagcaagcagccatgggctcccaaggaaacctttctgccgaagttgaacaggcaactagacgtcaggttcagggaatgcaaagctcacaacagagaaatcgggaacgcgtcctcgcccaactgctgggaatggtgtgcgatgtgaggcctcaggtccaccccaattaccgcattagcgcttag

SEQ ID NO: 215259 - DNA, 237 bp, synthetic construct
  misc_feature 1..237: note = Description of Artificial Sequence: Synthetic coding sequence
  source 1..237: mol_type = other DNA
atggcatcccagagtcaaggaattcagcagctcctgcaggcagagaagagggccgctgagaaggtggccgacgctcgcaagagaaaggcaaggcggctgaagcaggcgaccagacgccaggttcaaggaatgcagagctcacagcagcgcaatagagaaagagtgctggctcaactgcttggtatggtatgcgacgttcggccacaggtacaccccaattatagaattagtgcgtag

SEQ ID NO: 215260 - DNA, 357 bp, synthetic construct
  misc_feature 1..357: note = Description of Artificial Sequence: Synthetic coding sequence
  source 1..357: mol_type = other DNA
atggcctcccagtcccagggaattcaacagttattgcaagcagaaaaaagagctgctgagaaagtggccgatgctagaaaaaggaaggctagacgcctcaaacaagccaaggaagaagcacagatggaggttgagcagtacagaagggagagagagcacgaattccagtcaaaacagcaggcagccatgggaagccaaggcaacctcagcgccgaagttgaacaggcaacaagacgacaggttcaggggatgcaaagtagccagcaaagaaatagggaaagagtccttgcacagctgcttgggatggtgtgcgacgtcaggccgcaggtgcatccgaactacagaatctctgcatag

SEQ ID NO: 215261 - DNA, 357 bp, synthetic construct
  misc_feature 1..357: note = Description of Artificial Sequence: Synthetic coding sequence
  source 1..357: mol_type = other DNA
atggctagccagtcccagggaatccagcagctgctgcaggccgagaaacgtgcagcagagaaggtagcagatgccagaaagcgcaaagcacgaagactcaaacaggctaaggaagaggctcagatggaggttgagcagtaccggagggagcgagagcatgagtttcagtccaagcagcaagctgctatgggttcccaggggaatctctcagccgaggtggagcaggctactaggcgccaggtgcagggtatgcagtcatcacagcagcgcaatcgggaacgtgtgcttgctcagcttctcgggatggtgtgtgacgtccggccacaggtgcatcctaattatcgtattagcgcctag

SEQ ID NO: 215262 - DNA, 234 bp, synthetic construct
  misc_feature 1..234: note = Description of Artificial Sequence: Synthetic coding sequence
  source 1..234: mol_type = other DNA
atggaggtcgaacagtatcgccgtgagagggaacatgaatttcagagtaaacagcaagctgctatgggaagtcagggcaatctatctgccgaggtcgagcaggctaccaggaggcaagttcagggaatgcaatcttctcaacagaggaatcgcgagagggttctcgcccaacttctggggatggtttgcgacgtaagaccccaggtccaccccaattataggatctcagcttag

SEQ ID NO: 215263 - DNA, 348 bp, synthetic construct
  misc_feature 1..348: note = Description of Artificial Sequence: Synthetic coding sequence
  source 1..348: mol_type = other DNA
gtcgagccagggatccagcagctcctgcaggcggaaaaacgagcagctgagaaggtggcagacgcccgtaaaaggaaggcaaggagactgaagcaagcgaaagaggaggctcagatggaggttgagcaatataggcgcgaaagggagcatgagttccagtctaagcaacaggcagctatgggatcacaaggaaacctttcagccgaggtggaacaggcaacccgccgacaggtgcaagggatgcaaagcagccagcaacggaaccgcgaacgtgtactggctcagcttctaggaatggtatgtgatgtcaggcctcaggtccaccccaattacagaatctccgcatag

SEQ ID NO: 215264 - DNA, 468 bp, synthetic construct
  misc_feature 1..468: note = Description of Artificial Sequence: Synthetic coding sequence
  source 1..468: mol_type = other DNA
atgagcgaatccaagtcaggaccggaatacgcttcttttttcgctgtcatgggagcttctgccgcaatggtgttctctgctctcggcgctgcctatgggacagcaaagtctggaaccggcatcgccgcaatgtctgtgatgagaccagagcagattatgaaaagcatcatacccgtggtgatggcaggcatcatcgcgatctatggcctggtcgttgccgtacttatcgccaactctctgaacgacgacatctcattgtacaaatcttttctacagctgggcgcagggctgtcagtggggctctccggcctagcggctggctttgccatcggaatagttggggacgcaggcgtccgaggtacagctcagcagcccaggctgttcgtgggaatgatactgatcttaatattcgccgaggtgttgggattgtacggtctgatcgtggccctcattctctcaactaagtag

SEQ ID NO: 215265 - DNA, 477 bp, synthetic construct
  misc_feature 1..477: note = Description of Artificial Sequence: Synthetic coding sequence
  source 1..477: mol_type = other DNA
atgtggagcaacctggggatcggtctggccattagtctaagcgtagtgggcgctgcctggggtatatatatcaccggttcatcgattattggtggaggagttaaagccccacggatcaaaacaaaaaacctcgtgtccatcatattttgcgaagccgtcgctatctacggtattatcatggcaatagtgatttcaaatatggcagagccctttagcgccactgaccctaaagccatcggccatcgcaactaccatgcaggttactctatgtttggggctggactaaccgtcgggctgtcgaacctgttctgtggagtctgtgtgggaatagtgggcagcggagctgcacttgccgatgctcaaaatccaagtctgttcgttaagattctgatcgtcgaaatatttggatccgccatagggctcttcggggtgattgtggccatcctgcagacaagccgcgtcaagatgggagactag

SEQ ID NO: 215266 - DNA, 129 bp, synthetic construct
  misc_feature 1..129: note = Description of Artificial Sequence: Synthetic coding sequence
  source 1..129: mol_type = other DNA
gtggggtctggagctgcgcttgccgacgctcaaaatccaagtctgtttgttaagattctgatcgtggaaatattcggttccctggcatccttgggtagttcaagccaattctttcgaccccctgagtag

SEQ ID NO: 215267 - DNA, 759 bp, synthetic construct
  misc_feature 1..759: note = Description of Artificial Sequence: Synthetic coding sequence
  source 1..759: mol_type = other DNA
atgactggtctggccctcttgtactctggggtgtttgtcgctttttgggcatgtgctctagccgtaggcgaagcagggagttggcgggcaggggcagccagccggccttcttggcccggacgcaactcagccggtaaatggccggcagggaacaccggcccaccaagggctctgcaccctagattatggggcctggccccagctcgggcaagcgacagtgataaaggggacccagattttcagctccttgaggagggcttcctgaccgaaacctcacctttcatgtggagcaaccttggcataggactggccattagtctgtccgtggtaggagccgcttgggggatctacataacaggctccagcattattggcggaggtgtgaaggcccctaggatcaagacgaaaaacttggtgtcaatcatcttctgcgaagccgtagcaatatacggaataattatggccatcgtgatctccaacatggctgagcccttcagcgccactgatcccaaagccattggccatcgcaattaccacgcgggatatagtatgttcggtgcgggactgacagtggggctgtccaacctgttttgtggggtctgcgtgggaatagttggctctggagcggcattagctgatgcccagaatccatccttgtttgtcaagatactgatcgtggaaattttcggctctgccataggattgttcggagtgatcgttgccatccttcagacttctagagtaaaaatgggtgactag

SEQ ID NO: 215268 - DNA, 618 bp, synthetic construct
  misc_feature 1..618: note = Description of Artificial Sequence: Synthetic coding sequence
  source 1..618: mol_type = other DNA
atgactggacttgcactcctgtactccggcgtgttcgtcgccttttgggcctgtgcactggcagtgggtgtgtgttacaccatctttgacctaggattcaggtttgatgttgcatggtttttgaccgagacaagccctttcatgtggtcgaacctgggaatcggtctggcgatctcgttaagcgtggttggagcggcttggggaatctacattactgggagttctataatcgggggaggagtgaaggcgccaaggataaaaaccaaaaacctcgtgagcattatcttctgtgaggcagtggccatatacggtattatcatggcaatcgtgattagcaacatggccgaaccattttcagccaccgacccgaaagctatcgggcaccgcaattatcacgccggttattccatgttcggtgcgggacttactgtggggctgtcaaacctgttttgtggtgtctgcgtgggcatagtcggaagcggcgctgctttggccgacgcccagaacccttccctgtttgtgaagattctaatcgtggagattttcggctctgccatcgggttgttcggcgtgatcgtagcaatacttcaaacttctagagtaaagatgggcgattag

SEQ ID NO: 215269 - DNA, 261 bp, synthetic construct
  misc_feature 1..261: note = Description of Artificial Sequence: Synthetic coding sequence
  source 1..261: mol_type = other DNA
atgtggtcaaatctcggcatcggcttggctatcagtctgtctgtcgtgggtgccgcttgggggatttatatcaccggatcttccattatagggggaggagtgaaggcaccgcgaatcaaaaccaagaacctggtctctattatcttctgcgaagccgtggcaatttatggcattataatggccatagtcataagtaacatggcggagccattcagcgcaaccgacccaaaggcaattggacataggaattaccacgcctag

SEQ ID NO: 215270 - DNA, 477 bp, synthetic construct
  misc_feature 1..477: note = Description of Artificial Sequence: Synthetic coding sequence
  source 1..477: mol_type = other DNA
atgtggtctaatttgggcataggactagcaatctccctgtccgtggtgggtgctgcctgggggatctacatcacgggttcgtccattattggaggtggcgtcaaagccccacggattaaaactaagaacctagtgtcgattatcttctgcgaagctgtggctatctacgggatcattatggccattgtgatcagtaacatggccgagccattctcagcaacagacccaaaagcaatcggtcacagaaactaccacgctggctactcaatgtttggcgcagggttgacagtggggctatctaatctgttctgtggggtctgtgtgggtatcgtggggtcgggggctgcattagctgacgcccagaacccaagcctatttgtgaaaattctgatagtcgaaatcttcggatcagccatcggactttttggagttatcgtggcaattttgcagacaagccgtgtgaaaatgggagactag

SEQ ID NO: 215271 - DNA, 786 bp, synthetic construct
  misc_feature 1..786: note = Description of Artificial Sequence: Synthetic coding sequence
  source 1..786: mol_type = other DNA
atgacagggcttgctctcttgtatagcggtgtgtttgtcgccttctgggcatgtgcccttgcggttggagtctgctataccatattcgacctgggcttccgctttgatgtggcctggtttctgactgagacgagccctttcatgtggagcaacctgggaatcggccttgctatttctctgtccgtggtgggagcggcatggggcatttacattaccggatcctcgattatcggcggaggcgtgaaggcccctagaatcaagaccaaaaatctcgtgtctattatcttctgcgaggccgtggccatatatggcattatcatggccattgttatttctaatatggccgaaccgttctccgctacggatcctaaagccataggccatcgcaactaccacgctgggtactcaatgtttggcgcagggctgactgtcgggctgagtaatctcttctgtggggtttgcgtcggaattgtgggctcaggggcagcactggccgatgcgcaaaacccaagtttatttgtgaagattctcattgttgaaatcttcggctcagccatcgggctattcggggtgatagtcgcgatcctgcaggttatgaatcctctgggaaaacccctgtgtccttgccctcagccaagcctcaccctcctgctggaaaaacttaaatgctccccttcgctccctattaccatcgactcaccgaagcagcttcccccaccacacttccatctattagtgttttcgtaccgcggaagtctgttcttgagcctcatctggtgtcactag

SEQ ID NO: 215272 - DNA, 681 bp, synthetic construct
  misc_feature 1..681: note = Description of Artificial Sequence: Synthetic coding sequence
  source 1..681: mol_type = other DNA
atggctctaagcgacgctgatgtgcagaagcagataaagcatatgatggctttcatcgaacaggaggcaaacgagaaagcagaagaaattgatgcgaaagccgaggaggagttcaacattgagaaaggcaggcttgttcagactcagcgtctaaagataatggagtattacgagaagaaggaaaagcagattgagcagcagaagaaaatccagatgagtaatctaatgaaccaggcgagactgaaggtgctgcgcgcacgcgacgacctcatcactgatctcttgaacgaggctaaacagcgactctcaaaagtagtcaaagataccacacggtaccaggtgctcctagacggcctggtcctgcagggcctctaccagctgttagagccccgaatgattgttcggtgtcggaagcaggactttcccctcgtaaaggcggcagtacaaaaggccatccccatgtacaagattgccactaagaatgatgtggacgttcaaatcgatcaggaatcctacctgcccgaagacattgctggtggtgtagaaatttacaatggcgatcgtaagatcaaggtgtctaatactcttgagtccaggctggacctcatagcacagcagatgatgccagaggtgcgcggagcactgttcggggcaaacgcaaaccgcaagttccttgattag

SEQ ID NO: 215273 - DNA, 591 bp, synthetic construct
  misc_feature 1..591: note = Description of Artificial Sequence: Synthetic coding sequence
  source 1..591: mol_type = other DNA
atggccctgtccgacgccgacgtgcagaaacagattaagcacatgatggcttttatcgaacaggaagccaatgaaaaggcagaggaaatcgatgcgaaagccgaagaggaatttaatatcgagaaaggcagactcgtacagacccagcgtctcaaaatcatggagtattatgaaaagaaggagaaacagatagaacagcagaaaaagattcagatgtccaatctgatgaaccaggcacgcctgaaagttttaagagccagagacgacctcataaccggcctgtatcaactgctggagcccagaatgattgtgaggtgccgtaagcaggattttcctcttgtgaaggctgcggtccagaaggccatccccatgtacaaaatcgctaccaaaaatgacgtcgacgtgcagatcgaccaggagagctatctgcccgaggatattgccggaggggttgaaatttacaacggagacagaaagataaaagtgagtaatacactggaatctcgtcttgacctgatcgctcaacagatgatgccagaggtaaggggggctctgtttggagccaacgccaatcgtaaatttctagactag

SEQ ID NO: 215274 - DNA, 615 bp, synthetic construct
  misc_feature 1..615: note = Description of Artificial Sequence: Synthetic coding sequence
  source 1..615: mol_type = other DNA
atggccttatcggacgcggatgtccagaagcaagccgaggaagagtttaacattgagaaggggaggctggtgcaaactcagagattaaagataatggaatactacgaaaagaaggagaagcagattgagcagcagaagaagatacaaatgtccaaccttatgaaccaggccagactgaaggtgctgcgcgcaagagatgatctgataacagacctgttgaatgaagccaagcagagactgtccaaggttgtgaaggacacaacaaggtaccaagtgctcttagatggactcgtgctgcagggtctctaccagctgcttgagccgaggatgatcgttcgttgccggaaacaggactttccgttagtcaaggctgctgtccagaaggcaatacctatgtacaagatagctactaaaaatgatgtggacgtccagatcgatcaggaatcctacttacccgaagacatcgcagggggagttgagatctataacggcgatagaaaaattaaggtgtcaaatactctcgagagccggctcgatctgattgcgcagcagatgatgcctgaggtccggggagctctgtttggggctaacgcaaatcggaagttcctcgactag

SEQ ID NO: 215275 - DNA, 1056 bp, synthetic construct
  misc_feature 1..1056: note = Description of Artificial Sequence: Synthetic coding sequence
  source 1..1056: mol_type = other DNA
atgagtttctttcccgagttgtacttcaacgtggacaacggatacttagaaggtttggttcgcggactcaaggctggtgtgctgagccaggctgactacctgaatctcgtccagtgcgaaactctcgaagatctcaagctgcatctccagagtactgactacgggaattttttagcaaatgaggcctccccactgacagtgtcagtcattgacgatcgactaaaggagaaaatggtcgttgagttccgccacatgcgcaaccacgcttacgaaccactagcctctttcctggatttcatcacctactcttatatgatcgacaatgtgatccttctaatcacagggaccctacaccagcggtccatcgctgagttggtgcctaaatgccacccattagggtccttcgaacagatggaagccgtaaacatcgcgcagacaccagctgagctttacaacgccatcctggtcgacactcccctcgccgcattctttcaggattgcattagcgagcaggaccttgatgaaatgaatattgagatcattcgtaatacactgtacaaagcatacctcgaaagcttctataagttctgcaccctcctgggaggcacaacagctgacgccatgtgccctatcctggaattcgaggcagaccgacgggcattcattatcacaatcaattcattcgggacagagctttccaaagaagatagagcaaagttattcccacattgtggtcgtctctatccagaaggcctcgcccaactggcaagggcagatgactatgagcaggtgaagaatgtggcagattactatccagaatacaagctactgtttgaaggcgcaggcagcaatcccggagacaaaacactcgaagaccgtttcttcgaacacgaggtgaaactcaacaagctggctttcctgaatcagttccactttggtgttttttacgcgttcgtaaaactcaaagaacaggagtgtagaaatatcgtttggatcgcagagtgcatagcacagaggcaccgagcaaaaatcgacaattatatacctatcttttag

SEQ ID NO: 215276 - DNA, 825 bp, synthetic construct
  misc_feature 1..825: note = Description of Artificial Sequence: Synthetic coding sequence
  source 1..825: mol_type = other DNA
atggtggtagaattccggcatatgcgcaatcacgcctatgaacctctggccagctttcttgatttcataacctattcttatatgatcgataatgtgatactactaataacagggacattgcatcagcggtccatcgccgagctggtcccaaagtgccaccctttgggcagtttcgaacaaatggaggctgtaaacatcgcccagactccagcggaattgtataacgccattctcgtggatacccccctcgccgcttttttccaagactgcattagcgagcaggacctcgatgagatgaatatagaaattatcaggaataccctttacaaagcctatcttgaaagtttttacaaattttgcacccttttggggggtaccacagctgacgcaatgtgccccattctggagtttgaagcagaccgccgagcgttcatcattacaatcaacagctttggtaccgagttatcgaaggaggatagagccaagctcttcccacactgtggaaggctttacccggaggggctggctcagctagcacgggcagacgattatgaacaggtcaagaacgtggccgactactatcctgagtacaagctgctttttgaaggcgcaggaagtaaccctggagacaaaacccttgaggacaggttctttgaacacgaagtcaagttaaacaagcttgccttcctgaaccagtttcattttggggtgttttacgcctttgttaagctcaaggagcaggagtgtcgcaacattgtgtggattgccgagtgtattgcacagcgacatcgcgctaagatcgacaattatattcccattttttag

SEQ ID NO: 215277 - DNA, 1179 bp, synthetic construct
  misc_feature 1..1179: note = Description of Artificial Sequence: Synthetic coding sequence
  source 1..1179: mol_type = other DNA
atgagctttttcccagagctgtattttaatgtcgacaacgggtatctggaggggctcgtacggggtttgaaggcgggagtgctaagtcaagccgactatctgaatctcgtgcaatgcgaaactctcgaggaccttaagctccaccttcagtccaccgattatggaaacttccttgctaatgaagcgtccccgctgactgtgagcgttattgacgacaggctgaaggagaaaatggtggtggaattccggcatatgagaaaccatgcctacgaaccacttgccagctttctcgactttatcacacaggaatcagaggcagggactccagagggccctgggaatatgcctaagctcggttccagaccgagcccaggccatagacccccttttttaagggtgtctttgctgccttggccacccagtagctatagctacatgatcgataatgttattctgctgatcactggcactttacatcagaggtccatcgctgagctggtccctaagtgccatcccctcggatcgtttgaacagatggaggccgtgaatatcgcacaaaccccggcagagctgtacaatgcaatcctggtggatactccattggctgctttctttcaagactgtatatccgagcaggacctggatgagatgaatatcgaaatcattaggaacaccctgtacaaggcttacctggaaagcttttataaattctgcactctgcttggcggaaccacggctgatgcaatgtgtcccattctcgaatttgaggccgacagaagagccttcataattaccattaatagcttcggcaccgagctgtccaaagaggaccgcgctaaactttttccccactgcgggcgactttaccccgagggcttagctcagctggcccgagcagatgattacgaacaggtgaagaacgtagccgattattaccccgagtacaagttgttattcgaaggagcaggttccaacccgggtgataaaaccctcgaggacagattcttcgagcatgaggtcaagctgaacaaacttgcctttttgaaccagttccacttcggtgttttctatgcattcgtgaaacttaaagaacaggagtgccgcaacatcgtatggatagccgaatgtattgcccagagacacagagccaagatagataattacattccaatcttttag

SEQ ID NO: 215278 - DNA, 1149 bp, synthetic construct
  misc_feature 1..1149: note = Description of Artificial Sequence: Synthetic coding sequence
  source 1..1149: mol_type = other DNA
atgaccgaattttggcttattagcgcccctggcgagaagacttgtcagcagacctgggaaaagctgcatgctgccacatccaaaaataacaaccttgccgtgacctctaagttcaatatccccgatctgaaagttggcaccttagacgtcttagtgggcctgtctgatgagctggcaaaactcgatgccttcgttgagggggtggtgaagaaagtggcccagtacatggcagacgttcttgaagactcaaaggacaaggtgcaggagaacctgttagctaatggagttgacctggtgacctacatcactcggttccagtgggacatggcaaaatacccgataaagcagtcactcaaaaatattagcgaaatcattgcaaaaggagtcacacaaatagacaacgatctgaagagcagagccagcgcctacaacaatctaaagggcaatctgcagaatctagagcgcaagaacgcaggcagcttgctcacccgctctctcgccgagatcgtgaaaaaagatgacttcgtactagacagtgagtacctcgtgaccttactggtggtcgtgcccaagctcaaccataatgattggattaaacagtacgagacactggccgagatggtggtgccgagatcatcgaatgttttgagcgaggatcaggacagttacctctgcaacgttacactatttcgaaaggcggtggacgatttcagacataaggcaagggagaataagttcatagtgcgggatttccagtacaatgaggaggagatgaaagctgataaggaggaaatgaaccgactcagcacagataaaaagaagcagttcggaccactggttagatggctgaaggtgaatttttcagaagcgtttattgcctggattcacgttaaggccttgagggtattcgtcgaatcagtgctgcgctacggacttcccgttaacttccaggctatgctactgcagccaaacaaaaaaacactgaagaaactgagggaggtgttgcatgagttgtataagcatctcgattccagtgcagccgcaatcatagacgcccctatggacatacctgggttgaacttgagtcagcaggagtactacccctatgtctattacaagatcgactgtaatctcctcgagtttaagtag

SEQ ID NO: 215279 - DNA, 1149 bp, synthetic construct
  misc_feature 1..1149: note = Description of Artificial Sequence: Synthetic coding sequence
  source 1..1149: mol_type = other DNA
atgacagagttctggttgatttcagcaccaggagagaagacttgccagcagacttgggaaaagctgcatgccgctacaagtaaaaacaataatctggccgtcactagcaaatttaacattccagacctgaaggttggtaccctggatgtcctggtaggactgtctgacgaactggccaaattagatgcattcgttgagggtgtcgtgaagaaggtcgcccagtacatggccgacgtattagaggatagcaaagacaaagtgcaggaaaacttgctagccaacggcgtcgacctggtcacttatatcacacggttccagtgggacatggccaaataccccatcaagcaatcgctgaaaaatatcagtgaaattatcgctaagggcgttacccagattgacaatgatttgaaaagcagggcctctgcctacaacaacctcaagggcaacttgcaaaacctggaacggaagaatgccggatcactactgactcggtcacttgcggagattgtgaaaaaggacgactttgttctcgattcagaatacttagtgacactcctagtagtggttcctaagttaaatcataatgactggatcaaacagtacgaaacccttgctgaaatggtggttcccagatcaagcaacgttctctccgaggaccaggattcatacctgtgcaacgtgactctatttcggaaggccgttgatgatttccgacataaggcgcgtgaaaacaagttcatagtgcgggatttccagtacaacgaggaggagatgaaagcggataaggaggagatgaatcggttgagtacggacaaaaagaagcagtttggccctctcgttagatggctgaaggtgaacttttcagaagcctttatcgcttggattcatgttaaagctctgagagtgtttgttgaatctgtgctacggtacggactccctgtgaatttccaggccatgctgttgcaaccgaataagaagactcttaagaagctgagagaggttttgcatgagctctacaaacatctggattcttcggcagcggctatcattgatgctccaatggacatcccgggactgaatctgtcacagcaggagtattacccatatgtgtactacaagatcgactgcaacctactagaatttaagtag

SEQ ID NO: 215280 - DNA, 1053 bp, synthetic construct
  misc_feature 1..1053: note = Description of Artificial Sequence: Synthetic coding sequence
  source 1..1053: mol_type = other DNA
atggctgtgttcgtagtgctcctcgcactggtggcaggtgttttagggaatgagttcagcatcctcaagtcgcctggatcggtagtgtttcgtaatggcaactggccaataccaggggaacggatccccgacgttgccgcattatcgatgggcttttccgtgaaagaggacctttcttggcctggactagcagtagggaacctgttccataggccccgtgcgaccgtgatggttatggttaagggggtaaacaaattagccctgccccctggcagcgtaatcagttacccactggagaatgctgtgcccttttctctggatagtgtggccaatagcatccactcactgttttccgaggaaacccctgtggtcctccagctcgctccgtctgaagagagagtctatatggtggggaaagcaaatagcgtctttgaagatttatcagtgacacttagacagcttcgcaacaggttgtttcaagagaatagcgtgctgtcgagcttaccccttaactctctgagtcggaacaatgaggtggatttgctgtttctctccgaactccaagttttgcatgatattagcagtttgctttccagacataaacacttagccaaagatcatagcccagatctgtactctctggaactggcagggctggacgagattggaaaacgctatggtgaggatagcgagcaattccgtgacgcttccaaaatacttgtggacgcacttcagaagtttgcagatgatatgtactccctctatggaggtaatgctgtcgtagagctggtgactgtgaagtccttcgacactagcctgatcagaaagacacgcaccattctggaagctaagcaggccaagaaccccgcatcaccatataatctggcttataaatacaatttcgaatacagtgtcgtgttcaacatggtgctgtggatcatgattgctctcgctcttgctgtgataatcacctcctataatatctggaacatggaccctggctacgactcaatcatataccgtatgacgaaccaaaagatcagaatggattag

SEQ ID NO: 215281 - DNA, 732 bp, synthetic construct
  misc_feature 1..732: note = Description of Artificial Sequence: Synthetic coding sequence
  source 1..732: mol_type = other DNA
tgatgtcccgcaggcccttttcgcgtggctccccaatgttgtggaagacgtgggacaatggcagtgtttgtcgtgctactcgctctggttgccggagtgcttggtaacgaattttctatactgaagtctcccggtagcgttgtgttccggaacggtaactggcctatccccggagagcggatacctgacgtcgcggctctcagcatgggctttagcgtgaaggaggatctgtcctggcctggcttagctgtcggcaatctgtttcaccgacctcgcgcaacagtaatggttatggtgaagggagtgaacaagcttgccctcccccctggatcagttatttcatatccactggaaaatgtagatctcctgttcctgtccgaactgcaggtccttcatgacatttcctccctgctctcacgccacaaacatcttgccaaggaccacagtccagatctgtatagcctggagctcgccggtttagacgaaataggaaaaagatatggagaggatagcgaacaattccgcgatgcttcgaagatcctcgtggatgccctacagaagttcgctgatgacatgtactcactgtatggcggaaacgctgtagtcgagctggtgacagtcaaatcattcgacacctcactgattcgcaaaactcggactatcttagaggcaaagcaggctaagaacccagcgtcaccttacaatctggcttacaagtataatttcgagtag

SEQ ID NO: 215282 - DNA, 612 bp, synthetic construct
  misc_feature 1..612: note = Description of Artificial Sequence: Synthetic coding sequence
  source 1..612: mol_type = other DNA
gaaagtgaacgcgtcactagctccaggtgtgggtgccgtccatgccccgcaggcccattcagagtggctccgcagtgctgtgggaggcggggtaccatggccgtgtttgttgtactactggccctggtagcgggagtattgggaaacgagttcagtattttgaaatctcctggctcagtggtgttcagaaacggcaattggccgattccaggagagaggatcccagacgttgcggctctttctatgggcttctccgtgaaggaggatctgtcctggcccggactggctgtgggaaacttgttccacaggccacgcgcaacagtgatggtgatggtcaaaggtgtaaataagttggcgctgccacccggatctgtgatatcgtaccctctcgagaaccgagtctatatggtgggaaaagccaacagcgtcttcgaggatctctccgtgaccctacggcagctccggaatcggctgtttcaagagaatagtgtgctgtcgtccctccctcttaacagcctgtccaggaacaatgaagttgatttgctattcctgtccgaactacaggtgctccacgacatatctagcctcctgagccgtcataagcatctttag

SEQ ID NO: 215283 - DNA, 780 bp, synthetic construct
  misc_feature 1..780: note = Description of Artificial Sequence: Synthetic coding sequence
  source 1..780: mol_type = other DNA
taagtaccaccagccaggagcgttagccccaggtccgccgcagctgccgctgccccttggctgtgtctgtcatgttcttggagatggtggagggatttaagttggccaggactggccgtgggtaacttgttccaccgccctcgcgcaaccgttatggttatggttaagggtgtcaataaattagctctcccccctggctccgtgattagttatccattggagaacgcagtcccattttcgctggatagcgtcgctaactcaatccattcactgtttagcgaagagacacccgtggtcctccagctcgctccatcagaagagcgggtttatatggttgggaaggccaacagcgtgttcgaggacttatctgttacactgagacaactacgcaacaggctttttcaagagaattcggtgctgagttcgctgcccttaaatagtctatctagaaataacgaagtggacctccttttccttagtgaactgcaggtcctgcacgatatatcatccctgctttccaggcataagcatctagcaaaggaccactcccctgatctctactctcttgaactggccggactcgacgagatcggtaagaggtacggggaagacagcgaacagttccgagacgcctctaagatcctcgtggacgccctacagaagttcgcagatgacatgtactcattgtatgggggaaatgcagtggtggagctagtgaccgtaaaaagctttgacacatcactgataagaaagacaaggactatcctagaagccaagtag

SEQ ID NO: 215284 - DNA, 957 bp, synthetic construct
  misc_feature 1..957: note = Description of Artificial Sequence: Synthetic coding sequence
  source 1..957: mol_type = other DNA
atggccgtttttgttgttttgctagcactggttgcgggtgtgttgggcaacgaatttagcatcctgaaatcaccagggtcggtggtgttcaggaatggtaactggcctatacctggcgagcggatccccgatgtggccgcactctctatgggcttttccgtgaaagaggacttgagctggccaggacttgcagtcggcaacctgttccataggccaagagccacggttatggttatggtgaaaggcgtgaataaactggccttgcctcctggctccgtgattagctacccactcgagaacagggtatatatggtgggaaaggcaaatagcgtcttcgaagaccttagcgtaaccctacgccagctgcggaatagactgtttcaggagaacagtgtgctctccagcctcccattgaacagcttgtcgcgtaataacgaggtggacctgctattcttgtctgagttacaggtacttcacgacatttcctccctgctgagtcggcacaagcaccttgccaaggatcattcacccgacttgtacagcttggaacttgccggactcgacgagattggaaaaagatacggcgaggactcagaacagttcagggacgcctctaaaatactggtggatgcccttcagaagtttgccgacgatatgtactctctgtatggtggtaacgctgtcgttgagcttgtgactgttaaatcctttgatacctccttaattcggaagacacgcacaattttggaggcaaagcaggcaaaaaaccctgcttcaccgtacaatctcgcctataagtacaactttgagtattcagtggtattcaatatggtgctctggatcatgattgcactggccttagccgtaatcataacctcttataatatttggaacatggatcctgggtatgatagtattatttacagaatgaccaaccagaaaattcggatggactag

SEQ ID NO: 215285 - DNA, 819 bp, synthetic construct
  misc_feature 1..819: note = Description of Artificial Sequence: Synthetic coding sequence
  source 1..819: mol_type = other DNA
atggctgtgtttgtggttctcctggccctggtggctggggtgctgggaaacgagttttctatcctgaaatctccgggatcagtcgtgtttcgcaatggtaattggcccatccccggtgagcgtatacctgacgtggctgcgctaagtatgggcttctctgttaaagaagatctgtcttggccagggctggctgtgggtaatctctttcaccgcccacgcgcaacagtgatggtcatggtcaaaggtgtcaataaactcgcccttcccccaggttccgtcatctcataccccctcgaaaacgtcgacctactctttttgtcggaactgcaggtcctgcacgatatttcttcattgctgtctcggcataagcacctcgccaaagaccactcaccagacctgtactctttagaactcgctggactggatgagattgggaagagatacggagaagatagtgagcaatttcgtgatgcgagtaaaattttggtcgacgcccttcagaagttcgccgatgatatgtattctttgtacggtggcaacgccgtggtcgaactggtgacggtaaaatcctttgacacatccttaatcaggaagacaagaactattctagaggccaagcaggctaagaaccccgcatccccatataatcttgcctataagtacaatttcgagtatagcgtggtctttaatatggtcttgtggatcatgatcgctctcgccttagctgtaattatcacatcctataatatatggaacatggacccgggatacgactccatcatttatcgtatgaccaatcagaagataaggatggattag

SEQ ID NO: 215286 - DNA, 498 bp, synthetic construct
  misc_feature 1..498: note = Description of Artificial Sequence: Synthetic coding sequence
  source 1..498: mol_type = other DNA
atggcagtattcgtagttctcctggccttagtggcaggtgtgctgggcaacgaatttagcatcctgaagtctcctggaagcgttgtattcagaaacggcaattggcctattcctggagagcgcattccggatgtcgcagccctgagcatgggtttttctgtcaaggaagacctttcctggcccggactggccgttggaaatctgttccatcggcctcgcgcaaccgtgatggttatggtcaagggggttaacaagttggccctgccccctggatctgtgatcagttatcccctggaaaacgccgtacccttttccctggactccgtcgcaaatagcatccactctctgttcagtgaagagacccctgtggtcctccagctggcaccaagtgaagagagggtgtacatggtcgggacgatgaagctaacatgcagtttttttctgaactgcaagtgttatatgatattccaggcttgttgcctggtcatctctatatag

SEQ ID NO: 215287 - DNA, 825 bp, synthetic construct
  misc_feature 1..825: note = Description of Artificial Sequence: Synthetic coding sequence
  source 1..825: mol_type = other DNA
atggtaatggtgaagggagtgaacaagctggccctgccgcctggttccgttatcagctaccctttggagaatgcagtgcccttttctctcgattcagtagctaacagcatacatagcctgttctctgaggagacccccgtcgttcttcagctcgccccaagtgaggaacgcgtgtacatggtgggaaaggccaatagtgtcttcgaagacctctctgtgacactccgacagttgcggaacaggctgttccaggaaaactcggtcttatccagcctgcctctgaactccctgtcacgcaacaacgaggttgatttgctctttctgagcgagctgcaggtgctccacgatatcagctcactattgtcccggcacaagcacttggcgaaggatcacagccccgatctctactcattggagctggccggactggatgaaatcgggaagcgctatggggaggatagtgagcagtttagagatgcaagcaaaatactggtcgacgccctccagaagttcgccgatgacatgtatagcctgtacggtgggaacgcagtcgtggagctcgtcaccgtgaagtctttcgatacatccctgatcaggaagacacgcaccatcttagaagccaaacaagccaaaaatccagcgtccccttataatttagcctacaaatataattttgagtattccgtcgtgtttaatatggtcctttggataatgattgctctggcccttgccgttataattaccagttacaatatttggaacatggaccccggttatgactcaatcatttaccgaatgactaaccagaagattcgcatggattag

SEQ ID NO: 215288 - DNA, 2517 bp, synthetic construct
  misc_feature 1..2517: note = Description of Artificial Sequence: Synthetic coding sequence
  source 1..2517: mol_type = other DNA
atgggtgaattattccgttcagaagagatgactctggcccagctctttcttcagtcggaagccgcttattgctgtgtgtctgaactgggggagttgggtaaggtgcagttccgggaccttaatccagatgtgaacgtgttccaacgtaaattcgtaaacgaggtgcgcaggtgcgaggaaatggatcgaaaacttcggtttgtcgagaaagagatccggaaagccaatatcccaattatggacacaggcgaaaaccctgaggttccattccctagggacatgatcgaccttgaggcaaatttcgaaaaaatcgagaatgagcttaaggaaatcaacaccaaccaggaggcacttaagcgcaactttttggagttgacagagctgaagttcatcctgagaaagacccagcagttttttgacgaggctgagctccaccaccagcagatggctgaccctgatctgcttgaagaatctagctcactccttgagccctccgagatgggcagaggtacccctctccgattgggctttgtggcaggcgtgatcaacagggagcgaatcccaacttttgaaagaatgctgtggcgggtctgtcgcggaaatgtgtttttacggcaagccgaaatagagaatcccctggaagaccctgtgaccggggattatgtgcacaaatccgtctttattatcttttttcaaggagaccagctgaaaaatagggtcaagaagatctgtgaaggcttccgagcatctctttacccctgtcccgaaaccccacaggaaaggaaagagatggcctcaggcgtgaacacccgcattgacgacctccaaatggtgttgaaccagactgaggatcatcggcagcgggtgctccaagccgcagcaaaaaacatacgggtttggttcatcaaagtgcgaaagatgaaagctatctaccacaccctgaatctatgcaacatcgatgtcactcagaaatgcctgatagctgaggtgtggtgtccagtcactgatctggactcgatccaatttgcacttagacgcggaactgagcacagtggctctactgtcccatcaattctgaatcgaatgcagactaaccagacccccccaacctacaacaaaactaataagttcacttatggctttcagaatattgtggatgcctacggaattggcacctatagggagattaacccagctccatatactatcattaccttcccattcctattcgcggtgatgttcggcgacttcggccacggcattttaatgaccttgttcgctgtatggatggtgctaagagaatcacgaatcttgtctcaaaaaaacgagaacgagatgttctccacagtgttctccggtcggtacattattctgcttatgggtgtattctcaatgtacaccgggctgatttacaacgactgcttctctaaatcattaaacattttcggaagctcctggtctgtgaggcccatgttcacttacaactggactgaggagactttacgtggtaatccagtcttacagctcaacccggctctgcccggtgtgtttggcggaccctaccctttcggaatcgatcccatttggaacatcgccaccaacaagctgacattcctgaattcctttaagatgaagatgagcgttattcttggcatcatccatatgctcttcggcgtaagtcttagcctgtttaatcacatctactttaagaaaccgttaaacatatactttggattcatcccggagattatctttatgacgagcctgtttggatacctggtcatattgatcttttacaagtggaccgcatacgacgcccacacgtcagagaatgcccctagcctcctgatccattttatcaatatgtttttgttctcctacccggagagcggctactcaatgctctacagcgggcaaaaaggaatacagtgcttcctggtggtcgtagcgctcctttgtgtcccctggatgctgctctttaaaccgctcgtccttcgacgtcagtatctgcgcaggaagcacctaggaactctgaacttcgggggtatcagagtcgggaacggtccaaccgaagaagatgctgaaatcatccagcacgaccaactgagtacacactcagaagatgccgacgagtttgatttcggtgacacaatggtacaccaagctatacacactatcgagtactgcctgggatgtattagtaacaccgcatcgtatctgcgcctgtgggctctgtccttggctcacgctcagctgagcgaggtgctttggactatggtgattcatattggcctcagcgtgaagagcctcgcaggtggtctcgtgttatttttctttttcacggctttcgccacattaactgtggcaatattgcttataatggagggtctttccgcatttctccacgccctgcgactgcactgggttgagtttcaaaataagttctattctgggacaggcttcaagtttctgcctttcagcttcgagcacattcgggaggggaagttcgaggagtag

SEQ ID NO: 215289 - DNA, 2514 bp, synthetic construct
  misc_feature 1..2514: note = Description of Artificial Sequence: Synthetic coding sequence
  source 1..2514: mol_type = other DNA
atgggggaactgttccgctctgaggagatgactctggcccagctgttcctccagtcagaggccgcatattgttgtgttagcgagctgggggaactcggcaaagtgcagttccgggacctcaaccccgatgtgaacgtgttccaacgtaagttcgtcaacgaggtgcgtcggtgcgaagagatggaccgcaagctaaggtttgtagagaaggagattcgcaaagctaacatccccatcatggacacgggagagaatcctgaagttccattcccaagggacatgatcgacttggaggcgaatttcgagaagatcgaaaacgaactgaaagagattaatactaaccaggaagccttaaagcggaatttcctcgaactcacagaactgaagttcatcttaagaaaaacgcagcagtttttcgatgaaatggccgatcctgacctcctagaggaaagctcctccctcctggagccatccgagatgggcaggggaacacctctgagacttgggtttgtggcaggggtaatcaaccgcgaaaggatccccacgttcgagcgaatgctgtggagggtgtgccggggaaatgtctttcttcgccaggctgagatcgaaaaccctctggaggaccccgtcacaggggactatgtccacaagtccgtgtttatcatttttttccagggagatcagctcaaaaacagggtcaaaaaaatttgcgaaggctttagggcctccctttacccgtgcccagaaacgcctcaggagcggaaggagatggcctctggggtaaatactagaatagatgatcttcaaatggtccttaaccagacagaggaccatcgacaacgggtgttacaagcagccgctaagaatatacgggtctggttcatcaaggtgaggaagatgaaggcaatttaccacactcttaacttgtgcaacatagatgtgactcagaagtgcctaattgccgaagtatggtgccctgtcaccgatctggattcgatccagtttgcacttcggcgagggactgagcactctggctccactgttccgagcatactgaatagaatgcagactaatcagaccccacccacttataacaaaacaaacaagttcacctacggattccagaacattgtcgatgcctacggcataggaacttatcgtgagattaatcccgcaccatatacaataattaccttcccatttctcttcgctgttatgtttggagattttgggcacgggattctcatgactctgtttgcggtctggatggtactccgggagagtaggatccttagccagaaaaacgagaatgagatgtttagcacagttttttcaggccgatacattatattattgatgggagtcttttctatgtacactggccttatttacaacgactgctttagtaaatcccttaacatctttgggagcagctggtcggtacggcctatgtttacatacaattggaccgaggagacactgagaggaaatcctgttcttcagcttaacccagccttgcccggtgtattcgggggtccctacccttttggcatagaccctatttggaatattgctaccaacaaactcactttcctcaacagcttcaagatgaaaatgtctgttattctgggcatcatacacatgctgttcggcgtcagcctatcgctttttaatcatatctatttcaagaagcctctgaacatctacttcgggttcattcctgagatcatttttatgacgtctctgttcgggtacttagtcatcctgattttctacaaatggaccgcttacgatgcccatacttctgaaaatgcgccttcactcctcatccatttcatcaacatgttcctgttctcctacccagaatctgggtacagcatgctgtacagtggccagaaaggcatacagtgtttcctggtggtggtcgccttattgtgcgtcccatggatgctgttgttcaagccactagtcctgagacgtcaataccttaggcgcaagcatctgggtacactaaactttgggggaatccgggtaggcaacggccctaccgaggaggacgcggaaataatccagcacgatcagctctccacacactctgaagatgctgatgagcctagcgaagacgaggtctttgattttggtgacaccatggtccaccaggccattcacaccatcgaatactgcctaggctgcattagcaataccgcgtcctacctgaggctgtgggctctctcattggcccacgctcaactgtcagaagtgttgtggactatggtcatccacatcggcctcagtgtgaagagcctggcaggagggctggttctcttttttttctttacggccttcgctactctcaccgtggctatactcttaataatggagggcctgtctgctttcctccacgctctgcggttgcattgggtggagttccagaataagttctactcagggaccggtttcaagttcctgccctttagcttcgagcatattcgtgaaggaaaattcgaagaatag

SEQ ID NO: 215290 - DNA, 2496 bp, synthetic construct
  misc_feature 1..2496: note = Description of Artificial Sequence: Synthetic coding sequence
  source 1..2496: mol_type = other DNA
atgggcgagctgttccgctctgaagagatgacccttgcccagctgtttttgcagtcagaggcagcatactgctgcgtgagcgagttgggtgaattggggaaagtgcagtttagggaccttaatcctgacgtgaatgtgttccaacgtaaatttgtgaacgaggtacgcaggtgcgaagaaatggatcgcaagctgagattcgtggagaaggaaatccggaaggctaatatcccaatcatggataccggggagaatccagaagtacctttccccagagacatgattgatctcgaagcgaactttgagaaaatcgagaatgagttgaaggagattaatactaaccaggaggctcttaagcggaatttccttgaactcaccgaattaaagttcatcttaagaaaaactcagcagttcttcgatgagatggctgaccccgatctcctagaagagagctcatctctgctggagccatccgaaatgggcagagggacgcctttgaggttggggttcgtggccggtgtgatcaaccgagagaggatacctaccttcgagagaatgttgtggagggtgtgccgagggaatgtgtttctgagacaggctgaaattgagaatcctctcgaggaccccgtcaccggagactacgttcataaatctgtgtttatcattttcttccagggcgaccagttgaagaatcgcgtgaagaaaatctgcgaaggctttcgcgcaagcctgtatccatgtcctgagacgccgcaggaaaggaaagagatggcatcaggggtgaatacaagaattgacgacctgcagatggttttgaaccagacggaagatcaccgtcagagagtcttgcaggctgccgcaaaaaacattagggtctggttcattaaggtgcgcaaaatgaaggccatctatcacacactgaacctttgtaacatcgatgttactcagaaatgtctcattgcagaggtctggtgccccgtgacggatctggattccatccaatttgcgctgagaagggggaccgagcatagcgggagtactgtgcccagcatcctgaacaggatgcagaccaatcagacgcctccaacttataacaagacgaataaattcacttatggctttcagaacatcgtcgacgcttacggaatcgggacttaccgcgaaataaacccagccccttacacaatcattacttttcctttcttgttcgccgtgatgttcggcgattttggccacggtatactcatgaccctcttcgcggtctggatggttctgcgagaaagcagaattcttagccagaagaatgagaacgagatgttctcaacagtcttttctggtagatacattatcctcctgatgggagtcttttcaatgtacaccggactgatttataacgattgttttagtaagtcactcaacatcttcgggtcaagctggagcgtgcgaccaatgttcacctataattggactgaggagactctgcgcggaaaccccgtcttacagctgaacccagcgctaccgggtgtatttgggggaccttacccctttggtattgacccaatctggaacattgcaaccaataagcttacgttcctgaacagtttcaaaatgaagatgtctgtgatcctgggcattattcacatgttgtttggggtgtcactgtctctttttaaccacatttactttaagaagcccctgaatatctatttcggcttcattcccgagatcatttttatgaccagtcttttcggctacttggttatactgattttttacaagtggaccgcctacgatgctcacacaagtgaaaatgccccatccctacttatccatttcataaacatgttcctgttctcatatcctgaaagcggctatagcatgctatattcaggacagaaagggatacagtgttttctcgttgtggtggcactgctgtgcgttccttggatgctcctctttaaaccactggtcctgcgtcggcaatatttaaggcgtaaacatctgggcactctcaatttcggaggaattcgtgtgggcaacggacctactgaagaggatgccgaaatcatccagcacgaccaactgtccacccactctgaggacgccgatgagtttgactttggcgatacgatggtgcaccaggccatccacactatcgaatactgccttggatgcatcagcaatactgccagttatcttagattgtgggccctgtcattagcacatgcccagcttagcgaagtgttgtggaccatggtgattcatattgggcttagcgtcaaatcgctggcagggggattagttctcttttttttcttcacggcctttgcaaccttgacagtggcaatactgttgattatggaagggctgtctgctttcttacacgccttgaggttacactgggttgaattccaaaataaattttacagcggaactggtttcaagtttctgcccttctcatttgaacatatcagagagggcaagttcgaagagtag

SEQ ID NO: 215291 - DNA, 2367 bp, synthetic construct
  misc_feature 1..2367: note = Description of Artificial Sequence: Synthetic coding sequence
  source 1..2367: mol_type = other DNA
atgggggaactttttagaagcgaagagatgactctggctcaactgttccttcagagcgaagccgcttactgctgtgtgtccgagctgggcgagctcggcaaagtacagttccgagacctaaacccagatgtaaatgtcttccaaaggaagttcgtgaacgaggtgaggagatgcgaggagatggaccggaaattgaggtttgtggaaaaggagatccggaaggctaatattcccatcatggataccggagagaatcctgaggttccatttccacgcgatatgatcgatctcgagatggcagatcccgacctgctggaagaatcaagctctctgctagaacccagcgagatgggcagaggtactcccctgcgcctcggttttgtggcaggggtcattaacagagaaagaattccgacctttgagaggatgttgtggagagtgtgcagaggcaacgtgtttctcagacaagctgagatcgagaatcccctagaagaccctgtcacaggtgattacgttcataaatccgtattcattatattttttcagggcgatcagttgaagaaccgggtgaagaaaatttgcgaaggtttccgcgcatctctttatccttgccctgaaacaccccaggagcgcaaggagatggcttccggagtaaacacgcgcattgatgacctgcagatggtattaaaccagactgaggatcatcggcagcgggtgctccaggccgcagccaaaaacatcagggtttggtttatcaaagtgaggaaaatgaaggctatataccacactttaaatttgtgtaacatagacgtgactcagaaatgtctgatagccgaggtctggtgcccagtgactgatcttgactccattcaatttgcactccgcagggggaccgagcatagcggcagcacagttccatctattttaaaccgcatgcagaccaaccagacaccacccacctataacaagaccaataagttcacatatgggtttcagaatatagtcgacgcgtacggaattggcacttatagggagatcaatcccgcaccttatacaattattacattccccttcctcttcgcagttatgttcggcgattttggtcacgggatattgatgacccttttcgcagtctggatggtcctgagagagtctcggatattatctcagaaaaatgagaacgaaatgttctctactgttttttctgggaggtacataatcctgcttatgggcgttttttctatgtatactgggttaatatacaatgattgcttctcgaagagcctgaacatttttgggagctcttggagcgtccggccaatgtttacatacaactggacagaagaaacgctccgtggaaacccagtactgcaactgaatccagctttgcccggagtgtttgggggaccctatccgttcggcattgaccctatctggaatatcgctactaataagttgacctttctgaactcctttaagatgaaaatgtctgtgattctcggaattatacatatgctgtttggcgtaagtctatcactgttcaatcacatttatttcaagaagccgctgaatatatactttgggtttatccccgagattatatttatgacatcactcttcgggtacctggtgatcctgattttttacaagtggactgcttacgatgctcacacgtccgaaaacgcacccagcctgctcatacattttataaacatgtttttgttttcttaccctgagtccggatacagcatgctatactcggggcagaaaggtattcaatgttttctggtggttgtggccctgctgtgcgtgccctggatgctgctcttcaagcccttagtcctgaggcgccagtaccttagaagaaaacacctgggaacactgaattttggtggtattcgggtgggaaatggccctactgaggaagacgcagagatcatccagcacgaccagcttagtacccacagcgaggacgctgatgaattcgattttggcgacactatggtccaccaggctatccacacaatcgagtactgtctcggatgcatctccaacaccgcaagctacttgcgcctgtgggctctttcattggcacatgcccagctgtctgaggtgctgtggactatggtgatccacattgggctcagcgtaaaatccctcgccggaggcttggtgctatttttttttttcactgcgtttgccaccctgaccgtcgccatcttactcattatggaaggcctgagtgccttccttcatgctcttaggctgcactgggtggaattccagaataagttctatagcggcacaggtttcaagtttcttcccttcagcttcgagcacataagggaagggaagtttgaagagtag

SEQ ID NO: 215292 - DNA, 1452 bp, synthetic construct
  misc_feature 1..1452: note = Description of Artificial Sequence: Synthetic coding sequence
  source 1..1452: mol_type = other DNA
atgcagaccaaccagacacccccaacatacaacaagacgaacaagtttacctacggtttccagaatatagttgatgcctatggcattggcacctatcgggaaattaaccctgcgccttataccattatcactttccccttcctctttgcggtcatgtttggggactttggccacggcatcttaatgaccctatttgctgtatggatggttttgagagaatcccgtattctcagtcagaaaaatgaaaacgaaatgttctccacagtcttctctggcagatatattatactgcttatgggcgtgttttctatgtatactgggctgatatataatgactgttttagcaaaagcctcaatatctttggtagctcctggtctgtgaggcctatgtttacgtacaattggaccgaggagactcttcggggaaatcccgtactgcaactgaatccagctcttcccggagtattcgggggaccctaccccttcgggattgatcctatttggaacatagctacaaacaaacttactttcctcaatagtttcaaaatgaaaatgtcagttatcttgggtattattcatatgctgttcggtgtgtctttgtctcttttcaatcacatctatttcaagaagccgctcaacatttatttcggcttcatccctgaaatcattttcatgacttccctttttgggtatctcgtgatccttatcttctacaaatggaccgcctatgacgcccacacatctgagaacgccccttccctgctgatccattttatcaacatgttcctgttctcatatcctgaatctgggtattctatgctgtacagcggacaaaagggcattcaatgtttcctggtcgtggtggctctgctgtgcgttccctggatgttactattcaagccacttgtgctgcggcgtcagtacctccggaggaaacatctgggcacacttaatttcggcggaatccgcgtgggcaatggaccaactgaagaagacgccgagattattcagcacgaccagctgtctacacatagcgaggacgcggatgagccttcggaggacgaagtcttcgacttcggcgacactatggtgcatcaggcaatccacacaatcgaatactgtctcggctgtatctccaacactgcctcgtacttgcgactgtgggccttgagcctggctcatgcacagctgtctgaggtgctgtggaccatggtgatacatataggtctgagcgtgaagtccctggccggtgggctggtgttgttcttttttttcacggctttcgccactcttaccgttgccatcctgctgatcatggaaggcctgtcagcatttctgcacgccctccgattgcattgggtcgagttccagaacaaattttactcaggtacgggcttcaagttcctccccttctcttttgagcacattagagagggcaagttcgaagagtag

SEQ ID NO: 215293 - DNA, 2514 bp, synthetic construct
  misc_feature 1..2514: note = Description of Artificial Sequence: Synthetic coding sequence
  source 1..2514: mol_type = other DNA
atgggcgagcttttccggagtgaggagatgaccctcgcccagctgttcctccagtccgaggcggcttattgctgcgtgtctgaactgggcgagcttggcaaagtgcaattccgtgaccttaacccggacgttaatgtctttcagcgcaaattcgtgaacgaagtgcggagatgcgaggaaatggatcgcaaattgcggttcgtggaaaaggagatcagaaaggctaacattcctatcatggacacgggcgaaaatccagaagtcccctttccccgagatatgatcgatctggaggctaactttgaaaagattgaaaatgaactcaaggagatcaatactaaccaggaggctttaaagagaaactttctggaacttacagagctgaagtttatactgaggaagacccagcagttctttgatgagatggctgatcccgatctgctggaggaatcttctagcctgcttgagcctagcgagatgggacggggaactcctttacgactgggctttgtggcgggagtcatcaaccgggaaaggatccccacattcgagagaatgctttggcgcgtgtgccgcggaaacgtcttcctcagacaggcagaaatcgagaaccctctggaggaccccgtaacgggagactacgtgcataagagtgtgtttatcatttttttccaaggcgatcagctgaagaaccgagtaaaaaaaatctgcgaggggtttagggcgtctttgtacccatgtccagaaacgccgcaagaaagaaaagaaatggcctccggcgtgaacactcgtattgatgatctccaaatggtgctgaaccagaccgaggatcatcgccagagagtactgcaggccgctgcaaagaatattcgtgtttggtttattaaagttcgaaaaatgaaagctatttatcataccctaaatttgtgcaacattgatgtgacacagaaatgtttgatcgccgaagtttggtgtcccgtcacggatctggacagtatccagttcgcgttacgccgaggaacggagcacagtggatcgacggtccctagtattctgaataggatgcaaaccaaccaaaccccacctacttacaataagaccaacaaattcacttacggctttcagaacattgtggacgcatatgggatagggacatatcgtgaaatcaacccagcgccatatacaatcattaccttcccatttctgtttgcagtgatgtttggagatttcggacacgggatattgatgactctatttgccgtgtggatggtgctccgggagtcccgaatcctgtctcaaaaaaacgagaatgagatgttctcaaccgtgttcagcggaaggtacatcattttactgatgggtgttttcagcatgtatactggtctgatttataacgactgtttctctaaatccctgaacatctttggcagttcatggagcgtgcgaccaatgtttacttataactggaccgaggagacactacgcggaaaccccgttctgcaactcaacccagcgttgcctggtgtgttcggaggcccataccccttcggtattgatcccatttggaatatcgcaacaaacaagcttacctttctcaattcgtttaagatgaagatgtctgtgattctgggcatcatccacatgctattcggcgtttcactgagtttgttcaaccatatttatttcaagaagcctctgaatatttactttggcttcatcccggagatcattttcatgacgagtctattcggctatctggttattttgattttctacaagtggactgcttacgacgcccacaccagcgagaatgccccttcgttactgattcactttattaatatgttcctcttttcctatccggagagcggatactcgatgttatactccggacagaaagggattcagtgctttctggtcgtggtggctctcctgtgcgttccgtggatgttactgtttaagcctctggttttgcgcaggcagtacctacgcaggaagcatctaggaacactgaactttggcggaatccgagtcggcaatggtcctacagaagaggatgcagaaatcatccaacatgatcagctcagtacccactccgaagacgccgacgaaccctccacttcaggccagtttgactttggcgatacaatggtgcaccaggcaattcataccatcgagtactgtctggggtgtataagtaatactgccagttatctgcggctctgggccttgagtttggctcatgctcagctgtccgaagtcctgtggactatggtgattcacatcggccttagcgtcaagtcattggcaggtggtctggtactattcttcttttttacagccttcgccaccctgaccgttgctatcctccttatcatggaggggctttctgcattccttcatgcactcaggcttcactgggtcgagtttcagaacaagttctactccgggaccggttttaagtttctgcccttctcttttgagcatatccgggaggggaagttcgaggagtag

SEQ ID NO: 215294 - DNA, 2571 bp, synthetic construct
  misc_feature 1..2571: note = Description of Artificial Sequence: Synthetic coding sequence
  source 1..2571: mol_type = other DNA
atggggagcctgttcaggtctgagaccatgtgcttggcacagctcttcctgcagtcagggacggcttatgagtgtctgtccgcattgggcgaaaaagggctggtgcaattccgtgatctgaatcaaaacgtgtcctctttccagaggaaatttgtgggagaggttaagagatgcgaagagctagagcgcatcctcgtgtacttagtgcaggagatcaaccgcgcagatatcccgctgcccgagggggaggcctcccctcccgcaccacctctgaagcaggtacttgagatgcaggagcaactgcagaagctggaggtagaactgcgggaggtgacaaagaataaggaaaaattgcgaaagaatcttctggagctcatcgaatacacacacatgctaagggtcacaaagacctttgtcaagaggaatgtggagttcgaaccgacctatgaggagttcccatctctcgaaagtgactcactcctggattactcctgtatgcagcgtttgggggctaaactgggtttcgtcagtgggctaatcaaccaagggaaagtcgaggccttcgaaaaaatgctttggagggtttgtaagggatatacgattgtttcgtacgccgaacttgatgagagccttgaggatcccgaaactggcgaagtcataaaatggtatgtgtttttgatctcattttggggagaacagatcggacacaaagtcaagaaaatctgcgattgttaccactgccacgtttatccttatcccaacacggcagaagaaagaagggaaatccaagagggactcaatacgcggattcaagatctgtacactgtgctgcacaagacagaggattaccttcggcaggtcctttgcaaggctgctgaatctgtgtactcccgggtgattcaggtaaaaaaaatgaaggctatataccacatgctgaacatgtgctccttcgatgtgactaacaagtgtcttattgccgaggtttggtgccccgaggcagatttgcaagatctgcgaagggcgctggaagaaggcagccgcgaatctggcgctactatcccttccttcatgaacataattcccacgaaagagaccccgccaactcggatacgtaccaataagttcactgaaggtttccagaatatcgtggatgcctacggggtgggttcatacagagaggtgaaccccgcactgttcactattattacattcccattcctgtttgccgtgatgtttggggacttcggacacgggtttgtgatgtttctattcgccttgcttctagtactgaacgagaaccatccacgcttgaaccagtcccaagaaattatgcggatgtttttcaacggaagatacattctgctcctgatgggcttgttttcagtatatacaggactgatatacaatgactgcttttcgaagtctgtgaatctgttcggcagcggatggaacgtgtcggcaatgtacagcagttctcaccctcccgcagaacataagaaaatggtactgtggaatgactctgttgtacgacacaatagcattttacagcttgatccaagtattcccggagtgttcaggggaccttatccactcgggatagatccaatctggaatttggccaccaaccgcttgacgttcctgaatagcttcaagatgaagatgtcagttattctgggaataatccatatgacctttggagtgattctgggtattttcaaccacctccactttcgtaagaagtttaacatttatcttgtttcaatacccgagcttctctttatgctatgtatcttcgggtacctgatcttcatgatcttttataagtggctggttttctccgcagagacctcgcgcgttgcaccaagcatcctaatagagtttatcaatatgttcctcttccctgctagcaagactagtggactttatactggacaagaatatgtgcagcgagtcctcctagtcgtgacagcactttctgtacccgtcttattcctgggaaaaccattatttctgttatggcttcacaacgggagatcgtgctttggggtgaaccgcagcggttacacgctgattagaaaggattcagaggaagaagtgtctctcctcggctcgcaagacatagaagagggcaaccaccaagtggaggacggctgtcgcgaaatggcctgtgaggagttcaactttggggagatcctgatgactcaggtgatccattcaatcgagtattgtcttggatgcataagtaacactgcttcctacctgcggctctgggccctgagtctggcccacgcgcagctgtctgacgtcctctgggccatgcttatgcgggtgggcttgcgggtcgacaccacatacggtgtcctgctgctgttacccgtcatcgcgctgtttgcagtcttgactatctttattctcctcatcatggaaggccttagtgcttttttgcacgcaataaggctgcattgggtggaatttcagaataagttctatgtgggggctggcactaagtttgtgccgttttcatttagcttgctctctagtaagttcaataatgatgattcagtcgcatag

SEQ ID NO: 215295 - DNA, 1119 bp, synthetic construct
  misc_feature 1..1119: note = Description of Artificial Sequence: Synthetic coding sequence
  source 1..1119: mol_type = other DNA
atgggcagtctattccgaagtgagaccatgtgtcttgctcagcttttcctacagtctgggaccgcgtatgagtgcctgagcgcgctcggcgagaaaggcctcgtgcagtttcgcgacctgaatcagaatgtgtctagtttccaacgcaaattcgttggggaagttaagcggtgtgaagagctcgagagaatcctagtttatctggtccaagaaattaaccgagctgacatccctcttccagaaggcgaggcatctccaccggcaccaccactgaaacaggtgttggagatgcaggagcagttgcaaaaattggaggtggagctgagagaagtcacaaaaaataaggaaaagctgcggaagaatctgctggaactaatcgaatacacacacatgctgcgggtgaccaaaaccttcgtcaagcggaacgtggagttcgagccaacatacgaagagttccctagcctggaaagcgactcattgctggactatagctgcatgcagcggctgggtgccaaactgggtttcgtgtccgggcttatcaatcagggaaaggtggaagcattcgagaagatgctttggcgcgtgtgtaagggctacacaatcgtatcctacgccgaactagacgaaagcttagaggatccagaaacaggggaggtgattaagtggtatgtcttcttaatctctttctggggggagcagattggacacaaggttaaaaaaatttgtgactgctatcattgtcatgtctacccctaccctaatactgccgaggaaagaagggagattcaggaagggctaaacactagaattcaagatctctatactgttcttcacaaaacagaggattacctccgtcaagtgctctgcaaagcagcagagtcagtttattctagggtgattcaggtgaagaagatgaaggcaatctaccatatgttgaacatgtgcagctttgacgtgacaaataagtgtctgatagccgaagtctggtgtcctgaggctgaccttcaggatttgcgcagggccttggaggagggctcagtgagactgcccagttccccccttccaggaaccgaggaacgcctgatggagctgatcaattcagagaagaagaggaagtag

SEQ ID NO: 215296 - DNA, 2523 bp, synthetic construct
  misc_feature 1..2523: note = Description of Artificial Sequence: Synthetic coding sequence
  source 1..2523: mol_type = other DNA
atggtgtctgtcttccggtcggaggaaatgtgtctgtctcagctatttctgcaggtcgaggccgcttactgttgcgtggcagagctcggggagcttgggctagttcagttcaaagaccttaatatgaatgtgaacagctttcagcggaaatttgtgaatgaggtgcggagatgtgagagcctggaaagaattctgaggttcttagaagatgagatgcagaacgagatcgtagttcaactcctggaaaaaagccccctcactccactgccacgagagatgataacactggagacagtcttagagaaactggaaggggagcttcaggaggccaaccagaaccaacaggcgctcaagcagtctttcctagaactcaccgaactgaagtacttgctgaaaaaaactcaggacttttttgagacagaaaccaatttagcggatgatttctttacagaagatacctctgggctgcttgaactgaaggcagtgccagcttacatgacagggaagttgggtttcatagccggtgttattaatcgcgaacggatggcttccttcgaacgtctgctctggcgcatctgccgcggtaacgtctaccttaagttttctgagatggacgcacccctggaggatcctgtcactaaggaagagatacagaagaacatctttattatcttctaccagggagaacaattaaggcagaaaatcaagaaaatctgcgacgggttcagggcaacagtgtatccctgccccgaacctgccgtagaacgccgtgagatgctcgagtccgtgaatgttagactggaagatctgataacagtgatcacccaaaccgagagtcataggcagagactgctgcaggaggctgccgctaactggcactcctggctcatcaaagtgcagaagatgaaggccgtgtaccacattctgaacatgtgtaacatcgatgtgacgcagcaatgtgtgattgctgagatttggtttccagttgcagatgccacccggataaaacgagcactcgaacagggcatggaactcagtggatcttccatggcgccaatcatgaccaccgtgcaatcaaaaaccgccccacctacgtttaacagaacaaacaagttcaccgctggctttcaaaacatagtggatgcctacggagtaggatcatatagagaaattaatccagcgccttataccatcatcacattcccatttctcttcgcagtaatgttcggggattgtggacatggaaccgttatgctactagccgctctgtggatgattctaaacgagcggcgtctgctcagccaaaagacggataatgaaatttggaacacttttttccacgggaggtatttgatcctgttaatgggcatattcagcatttatactgggctgatctacaatgactgtttttccaagtctctgaatatattcggttcatcctggagtgtgcagccaatgtttcgcaacggcacctggaatacccatgtaatggaggaaagcctttaccttcagctcgatccagctatccctggggtgtactttggaaatccgtatcccttcgggattgaccctatttggaatctggcgtctaataaactcacttttttaaatagctataagatgaaaatgtctgttattttaggcattgtgcagatggttttcggagtgattcttagcttattcaatcatatttacttccggcgtaccctgaacatcatcttacagttcatacccgaaatgatcttcatcctttgcctcttcggctatctcgtattcatgattatcttcaagtggtgctgttttgacgtccacgtgagtcagcatgccccttccattctgatccattttatcaatatgtttctgttcaactactccgactctagtaacgctccactgtataagcaccagcaggaagtgcagtcatttttcgtcgtgatggcattgatctccgtgccttggatgctccttataaagccattcatcttacgagccagccaccgcaaaagccaactgcaggccagcaggattcaagaggacgcaaccgaaaatatcgaaggggacagctcctctcctagcagtcgatcagggcagcggactagcgctgatacacacggtgctttggacgatcatggagaggaattcaatttcggggatgtattcgtccatcaggctatccacaccatcgagtattgcttagggtgcatctccaacactgcaagctacctgcgcctgtgggcactctctttagctcacgcccaactgtctgaagtcctgtggacaatggtcatgaactccggactgcagactagaggctgggggggaattgtgggcgtcttcataatttttgccgtctttgccgtattgaccgttgctatcctgcttattatggaggggttgagtgcctttctccacgccttgcgacttcattgggtggaatttcagaataagttttacgtcggcgatgggtataaatttagccccttcagcttcaagcacatactggatggaaccgccgaggaatag

SEQ ID NO: 215297 - DNA, 2523 bp, synthetic construct
  misc_feature 1..2523: note = Description of Artificial Sequence: Synthetic coding sequence
  source 1..2523: mol_type = other DNA
atggtaagtgtgtttcgctccgaggagatgtgtctcagccagctgttcttgcaagtggaggctgcgtattgctgcgtggcggagctaggcgagctgggattagtacagtttaaggatttgaacatgaacgtgaactccttccagaggaaattcgtgaacgaagtgcggaggtgcgagagtctggaacgaatccttagatttcttgaggacgagatgcagaacgagatcgttgtgcagcttctcgagaagtcccccctgactcctttgcctcgagagatgataacactggagaccgtgctggagaagctagaaggtgagttgcaggaggccaaccagaatcagcaagccttgaagcagtcattcttagaactcacggaattgaagtatttgctgaagaaaacccaggacttcttcgagacagaaactaacttagcggatgacttcttcactgaggataccagcggattgctcgagcttaaagctgtccctgcatatatgacggggaagttgggattcatcgcaggtgtgatcaatcgagagcgtatggctagcttcgagaggttactgtggaggatttgtagaggcaacgtgtacttaaagttctctgaaatggatgccccactcgaagaccccgtcaccaaagaagaaattcaaaaaaatatcttcattatattttatcagggtgaacagctgcgccaaaaaatcaagaagatttgcgatggattccgggcaacggtctatccgtgtcccgaaccagccgtggagaggagggagatgcttgagtctgtgaatgtgcgactggaggatctgattaccgtgattacccagacagagtctcacagacagaggctgctacaagaagccgcagctaattggcactcttggttaataaaagttcagaaaatgaaagccgtgtaccacatactgaacatgtgtaatatcgacgtgacacagcagtgcgtgattgcagaaatctggttcccagtggcggatgccactcggattaagcgagctctggaacagggaatggaactgtccggttcgagcatggcacccattatgacaaccgtgcaatccaaaaccgctcctcctacgtttaatcggactaataagttcacagccggattccagaatatagtcgatgcgtacggtgtcggcagctatcgtgaaattaaccctgctccctatacaataatcaccttccccttcctgttcgcggtgatgttcggcgattgcggccacggcactgtgatgctgttagctgctctttggatgattctgaacgaacgtaggctgctctctcagaaaactgataatgaaatttggaataccttttttcacggcagatatctaattctcctgatggggatttttagcatctataccggcctgatttataatgattgctttagtaagagtctgaatatttttggttcctcatggagtgtacaacccatgtttcgaaatggaacctggaatactcatgtaatggaggaatcattgtatttgcagcttgacccggcaatcccaggagtttacttcggtaacccttaccctttcggcatagatccaatctggaacctcgctagcaataaactgacattcctgaactcctataagatgaaaatgagtgtgatacttgggattgtgcagatggtgtttggcgttatcctgtcactttttaatcatatatatttccgcagaacgcttaacatcatcctgcaatttattccagaaatgatcttcatcctgtgcctgttcgggtacctcgttttcatgattatatttaagtggtgctgctttgacgtacatgtatcacagcacgcacccagcattctgatacatttcatcaatatgttccttttcaactacagtgactctagcaacgctcccctgtataaacatcagcaggaggtccagtcctttttcgtggttatggcactgatttcggtcccatggatgttgttaattaaacctttcatcttaagagcaagtcatcgtaagagtcagctccaagctagcagaattcaggaagacgctactgaaaatattgagggagattccagtagcccctctagccggtcagggcagcgaaccagcgctgatacacacggggcactcgatgaccacggggaggaatttaatttcggcgacgtattcgtacaccaggctatacatacaattgagtattgtctcggctgtatcagtaacacggcctcatatctgagactatgggctctgtcactagctcacgcacaacttagcgaagtactctggaccatggtgatgaactcgggactgcagacccgcggttgggggggtatcgtcggcgtgtttattatcttcgccgtgtttgccgttcttacggttgccattcttctgataatggaggggttgtcagctttcctgcatgctttgcgacttcattgggtggagttccagaataagttctacgtgggcgacggatacaaattcagccccttttcctttaaacatattctggatggcactgccgaagaatag

SEQ ID NO: 215298 - DNA, 2523 bp, synthetic construct
  misc_feature 1..2523: note = Description of Artificial Sequence: Synthetic coding sequence
  source 1..2523: mol_type = other DNA
atggtgagtgtgttcaggagtgaggagatgtgtctgtcccagctttttctgcaagtggaggccgcttattgttgcgtcgcagaattgggtgaattaggattggttcaattcaaggacctaaacatgaatgtgaatagctttcagagaaaatttgtcaacgaagtccgcagatgtgagtccctggaaaggatcctgagatttctcgaggatgaaatgcagaacgaaattgtggtgcaattgttggaaaaaagccctctcacaccacttccgcgtgaaatgatcaccctggaaaccgtgcttgagaaactggagggggagctccaggaagccaaccagaaccaacaagctctcaagcaatcattcctggaactgactgagcttaagtatctattgaaaaagacccaggatttttttgagactgaaaccaacctggcggacgacttctttacggaggacacttccggactgctggaattaaaggcagtacccgcatacatgacggggaagctcggctttattgcaggggtgatcaaccgtgagaggatggcctcctttgaaaggctgctgtggcgcatctgccggggtaacgtgtaccttaaatttagtgaaatggatgctccactggaagaccccgtgacaaaagaggagatacaaaagaatatcttcatcatcttctaccagggagagcagctgcggcaaaaaattaagaaaatctgtgatgggttccgggctacagtgtacccatgtcccgaaccagccgtcgagagacgagagatgttggaatctgtcaacgtcaggttggaagacctcataaccgtgataactcagactgagtctcatagacagagactgctgcaggaggcagcagcgaattggcacagttggctcatcaaggttcaaaaaatgaaggctgtgtatcacattctgaatatgtgcaatatcgacgtgactcaacagtgtgtgatcgcggaaatttggttccctgtggctgatgccaccagaattaagcgcgcactggagcaaggtatggaactgtctggaagctcgatggcacctataatgactactgtgcagtcaaagaccgcccctccaacctttaaccgcactaacaagttcaccgcaggatttcagaacattgtagatgcctacggtgtagggtcttatcgtgagatcaatcccgcaccttacactattattacctttccttttctgtttgcagttatgttcggagactgcgggcacggcaccgtcatgttgctagctgcactgtggatgattttgaacgagcgaagactcctttcccagaaaacagacaacgagatttggaataccttcttccacggacggtatctgattctgctcatgggaatattttctatatacactgggctcatctacaatgattgcttctctaagagcctgaacatctttgggtcgagttggtcggttcagccgatgttccggaatgggacctggaacacccacgtcatggaggaatccttatatcttcaactggatcccgctatacctggcgtatattttggcaacccatatccgtttggaattgaccctatttggaatctggccagtaataagttgacattcctcaactcatataaaatgaagatgtctgtcatcctgggcatagtacaaatggttttcggagttattctctctctgtttaatcacatttattttagacgtactctgaatatcatcttgcaatttattcccgagatgatatttatcctatgtctattcggatatctagttttcatgatcatcttcaagtggtgctgtttcgatgtgcacgtgtcacagcatgcaccgtccattctcatccacttcattaacatgtttctgtttaactattccgattcttctaatgcccctctgtacaaacatcagcaagaggtccagtctttttttgtggttatggccctgatcagcgtaccatggatgcttcttatcaagccttttattctcagagcaagccacaggaagagtcagctccaggctagccggattcaggaagatgccacggaaaacatcgagggagatagctcaagtcccagctcccggtccgggcaacggacgtccgctgacacgcacggtgccctggacgaccatggggaagagttcaacttcggcgacgttttcgtgcatcaggcaatacacacgattgaatattgcctaggatgtatctcaaatactgcttcatacctgaggctttgggctttaagcctggcccacgcccagttgagtgaggtgctgtggactatggtgatgaacagtggcctgcagacacgtgggtggggcggtatcgttggagtcttcatcatcttcgcggtatttgcagtactgaccgtcgcaatcctattaatcatggaaggactctcagcattcctgcatgctctccgtctacattgggtggagtttcagaacaagttctacgtgggggacggttacaaattttcacccttctcctttaaacacatactggacggaacagccgaggaatag

SEQ ID NO: 215299 - DNA, 3108 bp, synthetic construct
  misc_feature 1..3108: note = Description of Artificial Sequence: Synthetic coding sequence
  source 1..3108: mol_type = other DNA
atggggaaagcagagaattacgaactgtatagtgttgaactgggccctgggccaggtggggacatggccgcaaaaatgagcaagaaaaagaaagccggagggggaggagggaagagaaaggagaagctggaaaacatgaagaaagagatggagataaacgatcatcagttgagtgtggcagaactggaacagaaataccagactagcgcgaccaagggcctgtcagcatctttggcagctgaactgttactgcgcgacggccctaacgcactgaggcctccaagaggcacccccgaatatgttaagttcgcgaggcagttagctggaggcctacagtgtctgatgtgggtggctgcagcaatatgcttaattgctttcgcaattcaggcgagtgagggtgatctgaccactgatgacaatttgtacctggcgatcgccctgatcgcagtggtcgtcgtgaccggctgtttcggctactaccaggagtttaagtctacaaacatcatagcttcattcaagaatctcgttccccagcaagctacggtgatccgagatggagataagttccagatcaatgcggatcaactggtagtaggagacttggtggaaatgaaaggaggcgaccgcgtgcccgcagacattagaatactcgccgctcagggttgtaaggttgacaacagctccctgacgggggagtctgagccccagactcggtctcccgaatgcactcacgagtctccgctggagactcgtaatatcgccttcttctcgacaatgtgcctcgaaggtacggtgcagggcctggtggtgaacacgggggacaggaccatcatcggccgtatagcgagcctggcttcgggcgtggagaatgagaagaccccaatcgccatcgagatcgaacactttgtagatatcatcgccggtctcgctattctttttggggcaacatttttcattgtagcaatgtgcattggctatacattcctgcgggctatggtcttcttcatggcaatagttgttgcgtatgtgccggaggggctcctggctacagtgactgtatgcctgtccctaaccgccaagaggttagcgtccaagaactgcgtggttaagaacttagaggcggtggagactctgggatcaacaagcgtgatttgttctgataagaccggaacactaacccagaaccgcatgactgtttctcatctgtggttcgacaatcacatccacactgcagacactaccgaggatcagagtggtcagaccttcgaccagagctccgaaacttggcgtgcactttgccgagttctaacgttgtgcaaccgggcagcctttaagagtggacaggacgcagtgcctgtgcctaaaaggatagtgattggagacgcctccgagacggccttgctgaagttctcagagctgactctgggcaatgcaatgggctacagagacagattccccaaagtgtgtgagatcccattcaacagtacaaacaagttccagctgtccattcacacactggaagatccacgggacccacgccatctgctggtgatgaaaggtgcaccagagcgcgtgctggaaagatgttccagcatcctgatcaaagggcaggagctcccgctagatgagcagtggagagaggcatttcagaccgcatatttgtccctaggaggactgggggaaagagtgttggggttctgccagctgtacctgaatgagaaagattatccccctgggtatgcctttgacgtggaagccatgaatttccccagctcaggcttatgctttgctggccttgtctccatgatagaccctccacgggcaacagtccccgacgcagtgctgaaatgtcgcacagcgggtatccgcgtgatcatggtgactggagatcatccgatcaccgcgaaagcaattgctgcgtccgtcggaatcatcagtgaggggtcggagactgtcgaggacattgctgcccgtctccgggtgccagtggatcaggttaatcgaaaggacgccagagcgtgtgtcattaatggtatgcagttgaaggatatggacccctccgaactggttgaggcccttaggacccaccctgagatggtgtttgctaggacaagcccccagcagaagctagtaatcgtggagtcctgccaacgtctgggggcaattgtcgctgtgactggggatggggttaacgactcccccgcattaaagaaagccgacatcggtgtagccatgggcattgcgggatctgatgctgccaaaaatgccgctgatatgatcctgttggatgacaattttgcgtcaattgtaacgggtgtggagcagggacggctcatattcgacaaccttaagaagagcatcgcctacaccctaactaagaacattcctgaactaaccccgtatctgatttacatcactgtttcggtgcccctccctctaggttgcattaccatcctcttcatcgagctgtgcacagatattttcccgtcggtgtctctggcctacgaaaaagctgagtctgatatcatgcacttaaggccccgtaatcccaaaagagaccggttggtcaacgagccgttggccgcttattcttatttccagatcggtgctatccagagttttgcgggattcaccgattatttcaccgcgatggcacaggaaggatggttccctctgctgtgcgtggggctgagagcccaatgggaggaccaccacctgcaggatcttcaggacagttacggccaggagtggacatttggccaaagattatatcaacagtatacatgctacaccgttttctttatctccattgaagtgtgccagattgccgatgtactcatccgaaagaccaggaggctaagcgcctttcagcaggggttcttcaggaacaagatcctggtgattgccatcgtgtttcaggtttgtatcggctgtttcctgtgttattgcccaggcatgcccaatatattcaatttcatgccaatccggttccagtggtggttggtccctctcccgtatggaattcttattttcgtctacgacgagatacggaaactaggcgtcagatgttgtcccggaagctggtgggatcaagagctttattactag

SEQ ID NO: 215300 - DNA, 876 bp, synthetic construct
  misc_feature 1..876: note = Description of Artificial Sequence: Synthetic coding sequence
  source 1..876: mol_type = other DNA
atggccgctcttcaggaaaagaaaacttgtggccaacggatggaagagttccagcggtattgctggaatcctgacacaggtcagatgctaggacgcactctttcccggtgggtttggatcagcttgtactatgtcgccttttatgtggttatgacagggctgtttgctctctgtctctacgtcctgatgcaaacagtcgacccttacacccctgattatcaggaccagctgaggtctccaggggtcacactgaggcccgacgtgtacggggaaaagggactcgaaattgtttacaatgtctccgacaaccgaacatgggccgatctaactcagacactgcacgcttttctagcaggatacagtcccgcagcccaggaagactcgataaattgtacaagcgaacaatacttctttcaggagagcttcagggctccaaaccatactaagttttcctgcaaatttacagccgatatgttacagaattgcagcggtttggctgaccccaatttcggatttgaagaggggaagccttgctttatcattaagatgaatagaattgttaagttcttgccgtccaacgggagtgccccacgcgtggactgcgctttcctggatcagccgagagaactaggacagccattgcaggtgaagtattaccctcctaacgggacgtttagtctccattattttccatattatggcaaaaaggcgcaaccacactattccaatccgctggtcgccgcaaagctgctcaatattcccagaaatgctgaagtggctatcgtctgcaaagttatggcagagcatgtcaccttcaataacccccacgatccttatgagggcaaggttgagttcaagcttaaaatagaaaaatag

SEQ ID NO: 215301 - DNA, 1290 bp, synthetic construct
  misc_feature 1..1290: note = Description of Artificial Sequence: Synthetic coding sequence
  source 1..1290: mol_type = other DNA
atgcagctgaggaaccccgaacttcatcttggatgtgctctcgctcttaggttcctggctctagtaagctgggacataccaggagccagagctctcgacaacggcctggctagaacccccaccatgggctggcttcattgggaaagatttatgtgtaacctggactgccaggaagaacccgactcatgtatttccgaaaagctgtttatggaaatggccgagcttatggttagtgaagggtggaaagatgctggctacgagtatctgtgtattgatgattgttggatggctccgcagcgcgactcagaagggcgtctgcaagccgatccccagagatttccgcacggcatacgccagttggcgaactatgtgcattcaaaaggattgaagctgggcatttatgctgacgttggcaacaagacttgtgctggattcccgggatcctttgggtattacgacatagatgctcaaactttcgccgattggggcgtagatctactgaaatttgatggctgttactgtgactctctggaaaatctcgccgatggctataagcacatgtccctggccctcaaccggaccgggagaagcattgtgtactcatgtgaatggccattatacatgtggccttttcaaaagccaaactacaccgaaatccgtcaatactgcaatcactggcggaattttgcagatatcgacgattcatggaagtccatcaagtctatcctcgattggacatcgttcaatcaggaacgaattgtcgatgtggcaggaccaggaggatggaacgatcccgatatgttagtgattgggaacttcggactctcatggaatcagcaggtgacacagatggccctttgggcgattatggccgcaccgttgttcatgtccaatgacctacgacacatatctcctcaagcaaaggcactactgcaggataaagatgttatcgctatcaaccaggacccactcggtaagcaagggtatcagctgcgccagggcgacaattttgaagtttgggagcggcctctgtcagggctggcctgggctgtggccatgatcaatcgacaagaaatcggcggacccagaagctacactatcgccgtggcatccctggggaaaggggtcgcttgtaaccccgcatgcttcattacccagctcctgcccgttaaaagaaaattaggattttacgagtggacatcacgactcaggagtcatattaatccaacggggaccgtcctgctacaactggaaaatactatgcagatgtccttgaaggacctgttatag

SEQ ID NO: 215302 - DNA, 3120 bp, synthetic construct
  misc_feature 1..3120: note = Description of Artificial Sequence: Synthetic coding sequence
  source 1..3120: mol_type = other DNA
atgcatcagaaaacccctgagatctactctgtcgagttgagcggcactaaagacatcgttaagacagacaaaggggacggcaaggaaaaatacaggggactaaagaacaactgcctggagctgaagaaaaagaaccataaggaagagtttcaaaaagaactgcacttagacgatcacaaactgtctaatcgggagctggaagagaagtatgggactgatatcatcatggggctctcgagcaccagagctgcagaactgctggccagagacggacccaacagcctgaccccacccaagcaaactcccgagatagtgaagttcctcaagcaaatggtaggtggtttctccatcttattatgggtaggcgcattcctctgctggattgcatacggcatacaatattctagtgataagtctgccagtctcaataatgtctacctaggctgtgttttaggccttgtggtgatcctgaccggtattttcgcttattaccaggaggccaagtctacaaatattatgagctcattcaataagatgatcccccagcaggctctagtaattagagacagcgagaagaagactatcccatctgagcagctggtggtgggggatattgtggaggtgaaaggtggtgatcagataccggcagacatccgggtccttagctcacaaggatgccgggttgacaacagcagcctaacgggtgaatccgaaccgcaacccaggtcatctgaatttactcatgagaatccactggagacaaaaaacatatgcttttactccacgacatgtctagaaggcaccgtcactggtatggtgatcaataccggagaccgcacaattatcggccatattgcttccctggctagtggcgtggggaatgaaaagacccccatcgcaatagaaattgagcattttgtgcacattgtggccggagtagctgttagcattggaatactgttctttattatcgctgtgtccctgaagtaccaagtgctggatagtatcatctttctgatcggaatcattgtggccaacgtccccgagggactgctggctacagttacagtcactcttagcctgaccgctaaaagaatggcgaagaagaactgcttggtgaaaaaccttgaggctgtagagactctgggatccacctctatcatttgcagcgataagaccggtacactcacacagaatagaatgaccgttgcccatctgtggttcgacaatcagattttcgtagcagatacgagtgaagaccattctaaccaggtctttgatcagagcagcagaacatgggcaagcctatccaaaattatcacactctgcaaccgcgcagagtttaaacccggacaagaaaacgtcccgatcatgaagaaggcagtgattggggatgctagcgaaacagcactgctgaagttttccgaggtcatactgggggacgtgatggagatacggaaaaggaaccgaaaagtagcagagatacctttcaattcgacaaataagtttcaactgtctattcatgaaatggacgatcctcacgggaaaaggttccttatggtcatgaagggggcaccagaacggatcctggaaaaatgttccacaatcatgataaacggggaggaacatcctctggataagagcaccgcaaagacttttcacacagcctacatggaactgggcggactgggtgagagagtcctagggttctgccacttgtacttgcctgctgatgagttccctgagacatatagcttcgacattgacgctatgaatttcccaacctctaatttgtgttttgtcggcttgctgtccatgatcgatcctcccaggtctaccgtgccagacgcagtgactaaatgtaggagcgctggcatcaaggttattatggtgaccggcgaccaccctatcaccgccaaggcaattgctaaatcggttggaataatatctgccaactccgaaacagtcgaggatatcgcccacagactgaacatcgccgttgagcaggtgaacaagagagacgccaaggcggctgtcgttacaggtatggagctgaaagacatgtcctcggagcagctcgatgaaattctggccaattaccaggaaatcgtgttcgcacgaacgtcacctcagcagaagctgatcatcgtcgaagggtgtcagaggcaggacgccgttgtggccgtgacaggtgatggggtcaatgacagcccagcgctcaagaaggccgatatcggcattgccatgggaatcgccggttccgacgctgctaaaaacgcggcagatatggtgctgctcgatgacaacttcgctagcattgtgacgggggttgaggagggcagactgatctttgataatctgaaaaagactatcgcctactccctgacaaaaaatatcgccgagctctgtccatttctgatttacattattgtgggtttacccctcccaattggcacaattaccatccttttcatcgacctcggcaccgacatcataccgagcatagcacttgcttacgagaaggcagaatctgatattatgaatcgcaagcccagacacaagaataaagatcgcctcgtgaaccaaccacttgcggtgtattcatacctacacataggtctgatgcaagcgttgggcgcattcctggtatatttcaccgtgtatgcccaggagggcttccttcccagaactctcataaatctacgggtcgagtgggagaaggactacgtaaacgatcttaaggacagctatgggcaggagtggacaagataccaacgcgaatatttggagtggactggatatacggccttctttgtgggcatcctcgtgcagcagattgccgacctgatcatcaggaagacgaggcgcaacagcattttccagcaggggctgttccgcaataaagttatctgggtcggtatcacttcacaaatcatcattggcttaattctgtcctatggtctggggagtgtaactgcactgtcctttaccatgctccgcgcacagtactggtttgtggccgtaccccacgcgatcctgatttgggtttacgacgaagttcggaaactgttcatcaggctgtaccctgggtcctggtgggacaagaacatgtactactag

SEQ ID NO: 215303 - DNA, 3072 bp, synthetic construct
  misc_feature 1..3072: note = Description of Artificial Sequence: Synthetic coding sequence
  source 1..3072: mol_type = other DNA
atgggaaagggagtgggcagggataaatatgaacccgcagctgtctccgaacagggtgataagaagggcaaaaagggcaaaaaagatcgggatatggacgaactgaaaaaagaggtatcaatggacgatcacaaactgtccttggatgagttacatagaaaatatggcacagacctgagcagggggctcacttctgcacgggctgcagagatcttggctagggacggcccaaatgcgttgactcctccaccaactaccccagagtggattaaattctgccgtcaactgtttgggggattttcaatgcttctttggatcggcgcaatattgtgctttctggcctactccattcaagccgctacagaggaggagccgcagaacgacaatctgtatctgggtgtcgtgctctccgcagtcgtgattataactggatgtttcagttactaccaggaagctaagagcagcaagatcatggaatcctttaagaacatggtgcctcagcaggcacttgtcatccgcaatggtgaaaagatgtcaatcaatgcagaggaggtcgtcgtgggggacctagtggaagtaaagggcggtgatagaatcccagctgaccttcggattatctctgcgaatggatgtaaggttgacaacagctcccttaccggcgaaagtgagcctcagacgagatctcccgatttcactaacgagaaccctcttgagactaggaacatcgcgtttttttcgaccaactgcgtcgagggtacagcgagggggatcgtcgtgtatactggtgataggaccgtgatgggaaggatcgcaaccctggctagtggtcttgagggcggacaaacccctatcgcagccgagatagaacacttcatccacataattacaggagtggctgtgttcctgggcgtgtccttcttcatcttgtccctgatactcgagtacacatggctcgaggctgtgattttcttaataggcatcattgtggccaatgttcccgagggtctgctggccaccgtaaccgtttgcctcactctgactgctaagaggatggcaagaaaaaactgcctcgtgaaaaaccttgaggcggtcgaaacccttgggagcacgtctacaatctgctctgataagacagggacactgacacagaacagaatgaccgtggcccacatgtggtttgataaccagatccatgaggcagacactaccgagaaccagtcaggtgtgtcctttgacaagactagcgccacttggctggcattgtcgagaatcgccggactgtgtaatagagccgtattccaggctaaccaggagaacctgcccatcctaaaacgtgctgtcgcgggagatgcatcagagtccgctctgctcaagtgcattgagctatgctgcggcagcgtaaaggaaatgcgtgagagatatgcaaaaattgttgaaatcccttttaactctacgaacaaataccagctgagtatccacaaaaatccaaatacttccgagccccagcaccttctggttatgaagggggcacctgagagaatcttggaccggtgctcttcaatcctgttgcacggcaaagaacagccactggacgaggagctgaaagatgccttccagaacgcctatctagaactgggcggtctgggagagagggtcctgggcttctgtcacttgtttttgccggacgagcaatttccagagggatttcagtttgacactgacgatgtaaactttcccattgataacctttgtttcgtagggcttatctccatgatcgatccccctcgcgctgctgtaccggatgccgttggcaagtgtcggagcgccggtatcaaagtgatcatggtgactggagatcatccgattactgctaaggctatcgccaagggagtcggcattatcagtgaggggaacgaaacagtggaagatattgccgctaggctgaacattccagtgtctcaagtcaacccacgcgatgccaaagcttgcgtagtgcacgggtccgatctgaaggacatgacctcggagcagctggacgatattctgaaataccataccgaaattgtgttcgccagaacaagcccccagcagaaactgataatcgtggagggctgtcagcgacaaggcgcaattgttgcggtaacaggggatggcgttaatgattctcctgccctgaagaaagcagatatcggggtagcgatgggtattgctggaagcgacgtatcaaaacaagccgctgacatgattctgcttgacgataactttgctagcatagtgactggcgtggaggaggggagattgatttttgataacctgaaaaagtctattgcatacaccctaacaagtaacattccggaaatcactcctttcttaatctttattattgcaaacatcccactcccccttgggaccgtcacaatactgtgcatagacctggggactgatatggttccagctatctccctcgcctacgaacaggcggagtctgacattatgaaacggcagcccagaaatcccaagaccgataagctggtgaacgagcgactcataagtatggcctatggtcagatcgggatgatccaagcactgggaggattctttacgtattttgttattcttgctgagaatggcttccttcccattcatctattggggttacgcgtcgactgggatgacaggtggatcaatgatgtggaggatagttatgggcagcagtggacctacgagcagcggaaaattgtggaatttacgtgtcacacagcgttcttcgtgtccatagtggtcgtacagtgggcggacctggtgatttgcaagacccggaggaattctgttttccagcagggaatgaagaacaaaatccttatctttggactatttgaggagaccgccctcgccgcattccttagttactgtccaggaatgggcgtagccctgcgaatgtatccattgaagcctacctggtggttttgcgcctttccttattctcttctcatattcgtctatgatgaggttcggaagctgatcattagacgccgtcccggaggatgggttgagaaggagacgtactattag

SEQ ID NO: 215304 - DNA, 2043 bp, synthetic construct
  misc_feature 1..2043: note = Description of Artificial Sequence: Synthetic coding sequence
  source 1..2043: mol_type = other DNA
ggcaaggaggttggccgagacaagtatgaacctgcagccgtatcagagcagggagacaaaaaagggaagaaaggcaagaaggatagagatatggacgaattgaaaaaggaagtctccatggatgaccacaagttgagcctggacgagctgcatcgcaaatatgggaccgatttgtcccgtggactgacaagcgctagagcggcagagatccttgcccgagatgggccaaatgcgctgacaccacccccaacaacccctgagtggatcaagttttgccggcagctattcggcggattctccatgctactttggattggggcaatcctgtgcttcttagcctattctatccaggccgcaactgaggaagagccccagaacgataacttgtatctcggcgtggtgctcagtgccgtcgtgatcataacaggctgcttctcttactaccaggaagccaagtccagcaagatcatggagtcatttaagaacatggtaccccaacaggccctggttatccgtaatggtgagaagatgagtatcaatgccgaagaggtggtggtgggcgacctggtggaggttaaaggaggagacaggatccctgccgatctccggattattagtgccaatggctgcaaggtcgacaacagctctttgactggcgaaagtgagccgcaaacgcgtagccccgatttcactaatgagaacccactggaaactcgtaatatcgcattctttagcaccaattgcgtcgagggcacagctcggggtatcgtagtgtatacaggggataggactgttatgggcagaatagctacactggcgtccggcctcgaagggggacagactccaattgccgcagagattgaacattttatacatatcatcacgggagtagccgtctttctgggtgtcagttttttcatacttagcttaatcctggaatatacctggcttgaagccgtgatcttcctgatcgggattatcgtggccaatgtgcccgagggcctcctcgcaactgttaccgtgtgcttaaccctgacagcaaaaagaatggcacgcaaaaattgcctcgtgaagaacctcgaggcggtcgagaccctggggagcaccagtaccatctgttctgataagaccggaacacttacccaaaatcgtatgacggtggcacacatgtggttcgataaccagattcatgaagccgacacaaccgagaaccaatcgggagtgagcttcgacaaaactagtgccacttggcttgctcttagccgcatagcaggcctgtgtaatagagccgtcttccaggcgaaccaggagaaccttccgatccttaaacgcgcagtcgcaggtgacgcaagcgagagcgcactgctgaagtgtattgaactctgttgcggaagcgtaaaggaaatgcgggaacgctacgctaagatcgtggaaattccattcaattcaacaaacaagtatcagctgtctattcataaaaatcctaacacctccgagcctcagcacctcttggtgatgaagggggctcctgagagaatcttagatagatgttcgagcatcctgctacacggaaaagagcagcctcttgatgaagagctcaaggacgcatttcagaacgcctatctggaacttggaggactcggagaaagagtactcgggttctgtcacctgtttctgccggacgaacagttccctgagggtttccagtttgataccgatgacgtgaattttcccattgacaatttgtgcttcgtcgggctgatatccatgattgacccccctcgtgccgctgtgccagacgccgtgggaaagtgcaggtcagccggaatcaaggtgattatggtaaccggggatcatccaatcacagccaaggcaatcgccaaaggggttggcataattagtgaaggcaacgagccaatgagtaggggcaaaagctggtcaagccctgccacacagccatcaagcagtgtctcctggtggtgctcagggcctacatggagcagcgtaagacccggaggcatccgctctagcagccggggttag

SEQ ID NO: 215305 - DNA, 435 bp, synthetic construct
  misc_feature 1..435: note = Description of Artificial Sequence: Synthetic coding sequence
  source 1..435: mol_type = other DNA
atggacgaactgaaaaaggaggtttctatggacgaccacaagctgagccttgatgaactacacaggaaatatgggacggatctgtcaaggggcctcactagtgcaagggctgcagaaatccttgctcgcgacgggccaaatgctctgactcccccaccaactactccggagtggatcaaattctgcaggcagctgtttggaggattcagcatgctgttgtggattggggctattttgtgctttctagcctatagtatccaggcagccaccgaggaagagcctcagaatgataacctgtacctgggagtagtcctcagcgctgtggtgataatcaccggttgtttttcatactatcaggaagcaaaatcctccaaaattatggagtctttcaaaaatatggtgccacagcaggcactcgtcattcggaacggatag

SEQ ID NO: 215306 - DNA, 2979 bp, synthetic construct
  misc_feature 1..2979: note = Description of Artificial Sequence: Synthetic coding sequence
  source 1..2979: mol_type = other DNA
atggacgagcttaaaaaggaagtgagcatggatgaccacaagctgagtttagatgaactgcataggaagtacggcactgacctgagtcggggtctgacatccgccagggcagccgagatcctggctagggatggccctaacgctctaacacccccaccaacaaccccagagtggattaagttctgtcggcagctgttcggcggattctctatgctcctgtggattggggctatcttgtgtttcctcgcatactccattcaagcagccactgaggaggagccacaaaacgataacttatacctgggcgtagttctctcggccgtcgttatcatcacaggatgtttttcttactatcaggaagccaaatccagcaaaattatggagagctttaaaaacatggtgcctcagcaagctctggtgattcgtaatggggaaaagatgagcatcaatgccgaggaggttgttgtaggtgaccttgttgaggtcaagggcggtgataggattcctgccgacttgagaattatttccgctaatggctgcaaagtcgataattccagcctgaccggcgagtccgaacctcaaaccagaagcccagactttactaatgaaaaccctctggaaacaaggaacattgccttcttttctaccaattgtgtggaaggcactgccaggggaattgtggtctatacaggcgacaggaccgttatgggcaggatcgctaccctggctagcggacttgaaggcggtcagacaccaatcgctgccgagatagaacattttattcacatcatcaccggagtagccgtcttcctgggtgtgtcattttttatcctgagtttgattctcgagtacacctggctggaggccgtgatcttcctgataggcattatagttgctaacgtgccagaggggttgctggcaacagtcacagtttgtctgaccctgaccgcaaagaggatggcacgcaaaaattgtctggtgaagaacctcgaggctgttgagaccctgggatccacatctactatttgctctgacaagaccgggacgcttacgcagaaccgcatgacagtggcacatatgtggtttgacaaccaaatacacgaggccgacactacagagaaccaatcgggtgtgagttttgataagacctcggccacctggctcgctctgagtagaattgccggtctgtgtaatagggccgtgtttcaggctaaccaagagaatcttccaatccttaaacgcgctgtggctggcgacgcctcagaatcagcgctgctcaaatgcatcgagctttgttgcggatctgtaaaagaaatgcgagagcggtacgcaaaaatcgtggagattcccttcaatagtactaataaatatcaactatccatccacaaaaacccgaacacgtctgagccccagcacctgcttgttatgaagggcgctcctgaaagaatactagataggtgtagctccatcctgctgcatggcaaagagcagcctctggacgaggagcttaaagatgcttttcaaaatgcctatctcgagttaggcggacttggcgagagggtgctagggttttgtcacctgtttctgcctgacgaacagttccctgaaggcttccagtttgatactgatgacgtaaactttccaatcgacaacctgtgctttgtgggcctgatctccatgatcgatccacctagggctgcagtaccggacgctgtgggcaaatgtcgatctgctggtataaaagtcatcatggtaaccggagaccacccaattaccgctaaagcaatagccaagggcgttggcatcatcagtgagggtaacgagactgtagaagatatcgctgccagactaaatattccagtatcacaggtgaatcccagagacgctaaggcgtgtgtcgtacatggctctgatcttaaggatatgacaagtgagcagcttgatgatatattaaaataccataccgagatagtgtttgcccgtaccagtccccagcagaagcttatcatagtggagggatgtcagaggcagggcgctatagtggctgtgaccggagatggcgttaatgactctcccgcacttaagaaagcagatattggggtggcgatgggcattgcgggttctgatgtctctaagcaggccgcagacatgatactgctggatgataattttgcctctatcgtcaccggagtcgaagagggacgcctcatatttgacaacttaaaaaagtcgattgcgtacacgctcacctctaatattcccgaaattacaccatttctgattttcatcatagctaatattcctttgcccctggggacggtgacgatcttgtgtatagacttgggaaccgacatggtccccgcaattagcctggcctacgagcaggccgaatctgacatcatgaagcggcaacccagaaatcccaaaactgacaagctggttaatgagcgactcatctcaatggcctatggccagattggtatgattcaggcccttggaggttttttcacctatttcgtaatcctggccgagaatggcttcctccccatccacctactaggccttagagtggactgggacgaccgctggattaacgatgtggaggacagttacgggcagcagtggacctacgagcagcgaaaaatagttgagttcacttgtcacaccgctttttttgtgtcaatcgtggttgttcagtgggcagacttagtcatctgtaagactcggaggaatagcgtatttcagcaaggcatgaaaaacaaaattctgattttcggtctgtttgaggaaaccgctctggccgcatttctgtcttactgccctggcatgggtgtggccctgagaatgtatcccctcaagcctacgtggtggttctgcgcttttccttattctttgctgatcttcgtgtacgatgaagtcaggaaacttattataaggagacgaccagggggttgggttgagaaagagacttattactag

SEQ ID NO: 215307 - DNA, 321 bp, synthetic construct
  misc_feature 1..321: note = Description of Artificial Sequence: Synthetic coding sequence
  source 1..321: mol_type = other DNA
atggatgaacttaagaaagaagtgtccatggacgatcataagctgagcctagatgagctgcatcgtaaatatggcactgacctgtccaggggattgacttctgctagagcagcagagatcctcgcaagagatggacccaacgctctgactccccctcctacaactccagaatggattaagttctgtcgacagctttttggcggtttctccatgctgttgtggatcggcgcaatcctgtgtttcctggcctactctatccaggcagccactgaagaagaaccgcagaatgacaatctctaccttggcgtggtgctgtcctag

SEQ ID NO: 215308 - DNA, 474 bp, synthetic construct
  misc_feature 1..474: note = Description of Artificial Sequence: Synthetic coding sequence
  source 1..474: mol_type = other DNA
cgacaacctcgtaaccctaagaccgacaagcttgtgaacgagagactgataagcatggcctacggacagatcgggatgatccaggccctcgggggtttttttacgtacttcgtcattctggctgagaacggttttctgcccattcacctcttgggcctccgggtcgactgggatgacaggtggatcaacgacgtcgaagatagctatgggcagcaatggacctatgagcaacgcaaaatagtggaattcacttgccacacagcatttttcgtttcaattgtcgtggtccaatgggccgatctggtgatatgtaaaacccggcgtaatagcgtttttcaacaagggatgaagaataaaattttgatcttcgggcttttcgaggaaacagccctcgccgcattcttatcctattgccccggtatgggcgttgctctacgtatgtaccccctgaagaccctgacacaatactcctag

SEQ ID NO: 215309 - DNA, 480 bp, synthetic construct
  misc_feature 1..480: note = Description of Artificial Sequence: Synthetic coding sequence
  source 1..480: mol_type = other DNA
atgaagcggcagcccagaaacccaaagaccgacaagctagtgaatgagcggttaatcagcatggcctatggccaaattgggatgattcaggccctgggaggctttttcacttatttcgtgattctggctgagaacggcttcctacccattcacctcctgggactgcgagtcgattgggatgacaggtggataaacgacgttgaggattcttacggccagcagtggacttacgagcaaaggaagatagtggaattcacttgtcatactgccttcttcgtgtccatcgtagttgtgcagtgggccgacttggtgatctgcaaaacgaggagaaattccgtgttccagcagggtatgaaaaacaaaatcctgatcttcggactgttcgaagagacagcgctggccgcatttttatcttactgtccaggcatgggcgttgccctgcgtatgtatcccctgaagacattgacacaatactcctag

SEQ ID NO: 215310 - DNA, 3072 bp, synthetic construct
  misc_feature 1..3072: note = Description of Artificial Sequence: Synthetic coding sequence
  source 1..3072: mol_type = other DNA
atggcctttaaagtgggcagagataagtacgagccggcagcagtgtcagagcagggtgataagaaagggaaaaaagggaagaaggacagggatatggacgaattaaagaaagaagtttcaatggatgaccacaaactcagtctggacgagttacaccggaagtacgggacagacctgtccaggggcctgaccagtgcccgagcagctgaaatccttgccagagacggaccaaacgccctaaccccccctccgacaacgcccgagtggattaagttttgtcggcagctgtttggcggtttctccatgctcctgtggatcggggcaattttatgttttcttgcatactcaattcaggctgcaaccgaggaggaaccgcaaaacgataatctgtatcttggggtggtgctgtctgccgtggtcataattacaggctgcttctcctattaccaggaggcgaagtcaagtaaaattatggagtcattcaagaatatggttccccagcaagccctcgtgatccgaaacggggaaaagatgtcaatcaacgcagaggaagtagtggtgggtgacctcgtcgaggtaaagggaggagacagaattcctgccgaccttcgcattatttctgccaatggatgcaaggtggacaattccagtctgacaggagagtctgaaccacagactcggagtccagattttactaacgagaatccgctggaaacccgcaatatcgcctttttctccacgaactgtgttgaagggaccgcgagaggcatagtcgtctacacaggcgaccgaacagtgatgggaagaattgcaactctggcctccggccttgagggaggacagacacctatcgccgctgaaattgagcacttcatccacatcatcaccggggtagccgtgttcctgggtgttagtttttttattctctccctgattttagaatacacctggctggaggccgtcatttttctcataggcattatagtggccaacgtaccagaaggattactggccactgtaactgtgtgtctcacattgacagccaagcgcatggccagaaaaaactgtctggttaagaatctcgaagctgtggaaacacttgggtcaacatccaccatatgtagcgacaaaacaggtacactgactcaaaatcggatgaccgtcgcgcacatgtggttcgataaccaaattcacgaggccgatacaaccgaaaatcagtccggcgtcagttttgacaagacctctgcgacctggctggcactttctagaatagccggtttgtgtaaccgtgccgtctttcaggcaaatcaggagaacctcccaatcttaaagcgggcagtggccggagacgcatctgagtcagccctgctgaagtgtatcgagctttgctgtggcagtgtcaaagaaatgagggaacgctacgctaaaatcgttgaaatcccgttcaactcaaccaacaaatatcagttaagcatccacaagaatccaaatacatctgagccccaacacttgttggttatgaaaggcgctcctgaacgcatactggatcgatgttcgtccatcttgttacacggcaaggagcagcctctcgacgaggaattgaaagatgctttccagaatgcatacctggagctggggggtctgggagaaagagtccttggtttctgtcatctttttctgcctgatgagcagtttcccgaagggttccaatttgacacagatgatgtaaacttcccaatcgataacctttgcttcgtgggtttaataagtatgatcgatccaccacgtgctgccgtacctgacgcagtcggcaaatgccggagcgctgggattaaggtgatcatggtgaccggtgatcatcctatcacggcgaaggccattgcaaagggcgtcggcattataagcgagggcaacgagactgtggaagacattgctgcaagattaaacatccccgtatctcaggtcaacccaagagatgccaaagcctgtgtggtccatggatctgatctgaaggacatgacttccgaacagctcgatgacatattaaaataccacacggagattgtgttcgccagaacctctccccagcagaagttgataatcgtcgaagggtgtcagcgccagggtgcgatagtggccgtgactggtgatggagtgaatgacagtccagccctgaaaaaagctgacattggcgtggccatgggtatcgcgggatccgatgtcagcaaacaagcagcggacatgatcctcctggacgacaactttgcctcaatagtgactggtgtggaggaaggacgcctaatatttgataacctcaagaaatccatagcatataccctcacgtcaaacataccggagatcaccccattcctgatttttataatcgccaacattccactaccgcttgggaccgtgactattctctgtatcgatttggggaccgacatggtaccggcaatctcactagcctacgagcaggcggagagtgatattatgaaacggcagccacgaaaccccaagaccgataaactggtgaatgagagattaatcagcatggcctacggtcagatcggcatgatacaggccttggggggattttttacgtatttcgttatcctggctgagaacgggttcttgcctattcaccttctgggtctgcgagtggattgggacgatcgctggatcaatgatgtggaggacagctacggccagcaatggacatatgaacaaaggaaaattgtggagttcacttgccacactgctttttttgtatccatcgtagtggtacaatgggccgatctggtgatctgcaaaactaggaggaatagcgtcttccagcagggcatgaagaacaaaatactcattttcggcctctttgaagagactgcactcgccgcttttttatcttactgtccaggcatgggagtggcactgcggatgtacccccttaagcctacttggtggttctgtgcttttccctattccctgctgatcttcgtgtacgatgaggttcgcaaactcataatccgcagaaggccaggtggatgggtcgaaaaagagacgtattattag

SEQ ID NO: 215311 - DNA, 3063 bp, synthetic construct
  misc_feature 1..3063: note = Description of Artificial Sequence: Synthetic coding sequence
  source 1..3063: mol_type = other DNA
atgggacggggagccggaagggagtacagccctgcggcaactaccgcggaaaacggagggggaaagaaaaagcagaaggaaaaggaactcgatgagctgaaaaaagaagtggctatggacgaccacaagctctccctggatgaactgggacgcaagtatcaggttgatctgtccaagggtctaacaaaccagcgagcccaagacgtgctagccagagacggcccaaatgctcttaccccccctcctacgactcccgagtgggttaaattctgtcgccagttattcggtggtttttcaatcctcttatggatcggggctattttgtgtttcttagcctacggcattcaggcagccatggaggatgagccctctaacgacaatctttatttgggagttgtgttggccgcagtcgtgattgtgacaggttgtttctcgtactatcaggaggctaagtctagcaagattatggactcatttaaaaacatggtgccccaacaggccctcgtcattcgcgaaggagaaaaaatgcagattaatgctgaggaggtggttgtgggggacctagtcgaagtcaagggcggagatcgcgtgccagccgacctgcggataatatcttcccacggttgcaaggttgataactcctctctaaccggcgaaagcgagccccagacacgtagccctgagtttactcacgagaacccactggagacgcgaaacatctgcttcttctctaccaattgtgtggagggcacagcacgcggaattgtgattgcaacgggagaccgcacagttatgggacgaatagccactcttgccagcggactcgaagtgggcaggacacctattgccatggaaattgagcacttcatacagctgatcacgggcgtcgctgtgttcctgggggtgtccttcttcgtcctttccctaatcttggggtattcttggctcgaggcggtgatatttctcattggcataattgtcgccaatgtccctgagggcctgctggcaacggttactgtgtgtctcaccctgacagcgaaacgcatggcgagaaagaactgcctggtgaaaaatttggaagctgtggaaacactgggtagtactagcacaatctgcagcgataaaactggcacactcacccagaataggatgacagtagcacatatgtggtttgataatcagatccacgaagctgatacaactgaggatcagagcggcgctaccttcgacaaacgcagccctacttggacggcacttagccgtatagcagggctgtgtaaccgagcagtgtttaaagccggtcaagaaaatatatctgtctctaaaagagacactgcaggtgatgcttctgaaagcgccctgctaaaatgtattgagctttcatgtggaagcgtcagaaagatgagggaccggaatcccaaagtagccgaaatccccttcaactccacgaacaagtaccagctgtccatccacgagcgggaggacagtccgcagagccatgtgcttgtgatgaaaggagcacccgaacgaattctcgacaggtgtagcacaatcttggtgcaaggtaaggaaatccctctcgataaggagatgcaggacgctttccaaaacgcctacatggagctgggaggcttaggggaacgggtgctgggattctgtcagctcaatctcccctcaggtaagtttcccaggggattcaagttcgatactgatgagctgaattttcccacagaaaagctctgttttgtcggtcttatgtccatgattgacccgcctagagctgctgtcccagatgctgtagggaaatgtcgctcagccggaattaaagtcattatggtgacaggtgatcatccaattactgcaaaggctattgcaaagggcgttggtatcatttcggaaggcaatgagaccgtggaggatattgctgcacggctcaacattccaatgagtcaggtgaacccacgggaggccaaagcttgcgttgtccacggaagcgacctcaaggatatgacctccgaacagctggatgaaatcttgaaaaaccacaccgagatcgttttcgcccgtacatctccccagcagaaactgattatcgtcgagggttgccaacgccagggagcaatcgtggccgtgaccggggatggcgtgaacgatagtccagcactcaagaaagctgacattggaattgcaatgggcatcagtgggagtgacgtctctaagcaagctgctgatatgatactgctcgacgataacttcgctagcatcgttaccggtgtcgaggagggacggctgatcttcgacaacttaaaaaagtccattgcctacaccctgactagtaacattccagagatcactccgttccttttatttatcattgcgaatatccctttaccactaggcactgtgactattctgtgtatagacctaggcactgatatggtgcccgcaatctcccttgcctacgaagctgcagagtccgatattatgaagcggcaaccacgaaatagtcaaacggacaagcttgtgaatgagaggcttattagtatggcttatgggcaaattggtatgatccaggccttagggggattttttacgtattttgtgatactcgccgaaaatgggtttctgcccagcaggctgttggggatcagattggattgggacgaccgaactatgaacgacctggaagatagctatggccaggaatggacttatgaacaaagaaaggtcgtggagttcacctgtcacacggcattcttcgcctcaatcgtggtcgtccagtgggctgatttaatcatctgtaagaccagacgcaacagcgttttccagcagggcatgaaaaataaaattctcatttttggacttctggaggaaacagctctggctgcgtttctgtcatattgtccaggtatgggcgtggcactcaggatgtaccctctcaaggtgacatggtggttttgtgctttcccctactcactgttgatcttcatttatgatgaggtaagaaaattgatcttacgccgatacccgggtgggtgggtggagaaagagacgtattactag

SEQ ID NO: 215312 - DNA, 3030 bp, synthetic construct
  misc_feature 1..3030: note = Description of Artificial Sequence: Synthetic coding sequence
  source 1..3030: mol_type = other DNA
atgggtcgaggggcaggaagggagtacagcccagcggcaacaaccgcagagaacggtggaggcaaaaagaagcagaaagaaaaagagctggacgagctcaagaaggaagtggctatggatgatcacaagctctcccttgacgagctcgggaggaaataccaagtagacctgtctaaggggttgacaaatcaacgggctcaggatgtgctggccagagacggtcccaatgctctgacgcctccacctacaacccccgaatgggtgaaattttgcagacaactgtttgggggtttcagcattctgctatggatcggtgcgatcctgtgcttcctcgcatatggtatccaggcggctatggaggacgagccaagcaatgacaatctgtacctgggcgtggttctggcggctgtagtcatcgtgacagggtgtttctcctattatcaagaggccaagtcaagcaagatcatggattcattcaagaacatggttcctcaacaggctctggttattcgcgagggcgaaaagatgcagattaatgctgaggaagtggtggtgggagacttggttgaggtcaaaggtggggatagagtgcccgcagacctgagaatcatatcctctcatggttgcaaggtggataactcttccctcaccggcgaaagtgaacctcagacacgtagcccagaattcacacacgagaatcccctggaaactaggaacatctgcttcttctcaactaactgtgttgaagggaccgccaggggcattgtgattgccacaggggatcgcacggtcatgggacggattgcaacactggcatcaggccttgaagtgggccgaactcccatcgcaatggaaattgagcatttcatacagctcattacaggcgtggcagtgtttctcggcgtaagtttcttcgtactgtctctaattctgggttattcgtggctggaggccgttatcttccttataggcatcatagtggccaacgtaccagagggcctgttggcgaccgtgactgtgtgcctgactctcacagcaaagcgcatggctaggaaaaactgtcttgtgaagaatctggaagccgttgagaccttaggctccacctccactatctgcagcgataaaacaggcactctaactcagaacagaatgacggtagcccacatgtggttcgacaaccagattcacgaagctgacacaaccgaggatcagagcggcgctaccttcgacaaacgatcacccacgtggacagccctttcgcgaatagcgggattgtgtaacagagcagtgttcaaagccggacaggagaatatatccgttagtaaaagagacactgccggagatgcaagcgagagcgccctcctaaagtgcattgagcttagttgtggatcggtgaggaaaatgagagaccgaaacccaaaggtggctgagattccatttaattctactaacaagtatcagttaagcattcacgaacgcgaagatagccctcagtcacatgtgctcgtgatgaaaggcgcacctgagaggatacttgaccgctgttccaccatcttggtacagggcaaggagatccctctggataaggaaatgcaagacgcttttcagaatgcttacatggaactgggcggactcggcgaacgcgtgctcgggttttgccagctcaacttaccttctggtaaatttcctcgtggatttaaatttgacaccgacgagctgaacttcccaaccgagaagctgtgttttgtaggacttatgagcatgattgacccccctcgcgcagcagtaccagacgccgttggaaagtgtcggagcgccggaattaaggttatcatggtgacgggtgatcaccctatcacagcaaaagccattgccaagggagtggggatcatttccgaaggcaatgagacagtggaggacatcgccgcaagactgaatatccctatgtcacaggtaaatcccagagaggccaaagcctgtgtggtgcatggttctgatcttaaggatatgacaagcgagcagctcgatgaaattctcaagaaccacaccgaaatcgtgtttgcacggaccagcccacagcagaaacttataattgtggagggctgccagcggcagggcgctatcgtggccgtgaccggagacggtgtaaacgattctcctgccctcaaaaaggctgatataggtattgccatgggaatttcaggaagtgatgttagtaaacaagccgctgatatgattcttctggacgataactttgcaagcatagtgactggtgtcgaagagggccgactgattttcgacaatcttaaaaagagtattgcctacacactgacttcgaacattcccgagataacaccatttctgctgttcatcattgcaaatatacctttgcctctggggacggtgaccatcttgtgtattgatctgggcactgatatggtgcctgcgatcagcttggcctatgaagctgccgagtctgatataatgaagcgccagccacggaactctcagaccgataaactggtaaatgagcggcttatctccatggcatatggccagatcggcatgatccaggctctgggcggtttcttcacatactttgttatcctggccgagaacggtttcctgccatcccgcttattagggatacgcctggattgggatgaccggaccatgaacgacctcgaggatagctacggacaagaatggacttacgagcagcgcaaggttgttgaattcacctgtcacacagccttcttcgcttcaatcgtggtcgtgcagtgggcagatcttatcatttgtaaaactcgacgcaatagcgtattccaacaggggatgaaaaataagatcctcattttcggattactagaggaaacggccctcgccgcttttctaagctactgcccgggtatgggagtggccctgcgcatgtatcctctgaatctgctcatctttatctatgacgaagtacggaagctcattctacgcagatatccaggcggttgggtggaaaaagagacctattactag

SEQ ID NO: 215313 - DNA, 2172 bp, synthetic construct
  misc_feature 1..2172: note = Description of Artificial Sequence: Synthetic coding sequence
  source 1..2172: mol_type = other DNA
atgcttagcagtgctctggccctgtccggagccctggttaagagactgaaaccgccaaacggccatttcattctgactgacacacacgatctgaacacctcaaaaatcgagcactctctgtttacggtgtgtctgactcttacggcaaagagaatggccagaaagaattgcttagtgaagaacttagaagctgttgagaccctgggctctacctcaacgatctgttccgataaaaccgggactctcacacagaacagaatgacggtggcccatatgtggtttgataatcaaatccacgaggcggataccacggaagatcaaagcggagcaacttttgataagcgcagcccaacctggacagccctctccaggatagcgggactgtgtaatcgggcagtgtttaaagccggtcaggaaaatatcagtgtgtcaaaacgggacaccgccggagatgccagcgagtcagcattattaaaatgcatcgagctttcctgcggttctgtgcggaaaatgcgggatcgtaatcctaaggtggcagagattccctttaacagtactaacaaataccagctctcaatccacgaacgagaggatagtccacagtcccatgtgctggtaatgaagggcgcaccagagaggatcctggatcgctgttccaccatcctcgtccaaggtaaggagatacccctggacaaagaaatgcaggatgccttccaaaatgcatatatggagttgggtggcctcggggaacgggtccttgggttttgtcagttgaacttgccgtctggtaaatttcccagagggttcaagtttgatacagatgagcttaacttcccaactgagaagctgtgcttcgtcggtcttatgtctatgatcgacccgccaagggctgctgtgcccgatgcagtcgggaagtgccggtccgccggaattaaggtgataatggtaactggcgaccaccccataacagcgaaagccattgcaaagggggtgggcatcatctctgaagggaacgaaacagtggaggacattgccgctcgcctgaatattccaatgtcacaagttaatcccagggaggcgaaagcatgcgtagtccacgggtcggacctgaaggacatgacctcggaacaactggacgagatcctcaagaatcacacggaaatcgtgttcgcgcgaacatcaccgcagcagaaacttattattgtagagggatgccagcgccagggtgccattgttgctgttactggtgatggcgtgaatgattcccccgctctgaagaaagccgatattggcatagccatgggcatctctggttccgatgtctccaagcaagccgctgatatgatactgctcgacgataacttcgcttcaatagttaccggtgtggaagaggggaggctaatctttgacaatcttaaaaagtcgattgcttatacgctgaccagcaacatcccagaaattactccctttttgctgttcatcattgctaacattcccctgcccttgggcaccgtaacaattctgtgtatcgacctcggcactgacatggtgcccgctatctccctggcatacgaggccgctgaatcagatattatgaagaggcaaccccgaaatagccaaactgataaactcgttaacgaacgcctgatatctatggcatacgggcagataggcatgatccaggcgctgggaggcttcttcacttattttgtgatattggccgagaatgggtttcttccctcacgcttgttaggtattagactggattgggatgataggaccatgaatgatctggaagactcatatggacaggagtggacttacgagcagagaaaagttgtcgaatttacttgccatacagccttttttgcctcaatcgttgtggtccaatgggcggacctaattatctgcaaaacaagaaggaactccgttttccagcaggggatgaagaacaaaatcctgatatttggtctgcttgaggagactgcgttggccgctttcctatcctattgccccggaatgggagttgccctgcggatgtatccattgaaagttacctggtggttttgtgcttttccgtattcgttgctgatctttatctacgacgaggtacgtaagctgatactgaggcgctaccccggtggatgggttgagaaagaaacttactattag

SEQ ID NO: 215314 - DNA, 2145 bp, synthetic construct
  misc_feature 1..2145: note = Description of Artificial Sequence: Synthetic coding sequence
  source 1..2145: mol_type = other DNA
tgacagcttataactggggtggccgtgttcctaggtgtaagtttttttgtgctaagtttgatcttaggttatagttggttggaagccgtcatttttctcatcgggatcatcgtcgccaatgttcccgagggactactagctacagttacggtttgtctcacccttaccgccaaacggatggccaggaagaattgcctggtgaaaaaccttgaagccgttgagactctcgggagcacgagcacaatttgcagcgacaagacagggactctcacacaaaatcgcatgacggtagctcacatgtggttcgacaaccagattcatgaggccgatactaccgaagaccagagcggagccaccttcgataagaggtcccccacttggacagctctcagtagaattgctggtctgtgcaacagggccgtctttaaggcaggtcaagagaacatctcagtgtccaaacgggatacagccggtgatgcctccgagagtgccttattgaagtgtattgaactctcctgtggaagtgtgagaaaaatgagggacagaaacccaaaggtagccgaaattccgttcaacagcacaaataagtatcagctctccattcacgagcgggaagattctcctcagtcacatgtattggtgatgaagggggctccagagagaattttggaccggtgcagcacgatcctagtgcagggcaaagaaatacccctcgataaggagatgcaggacgcctttcagaacgcgtatatggaactgggcggattaggagagcgagtgttagggttttgccaactgaatttacccagtggcaaatttccgagaggttttaagtttgatacagatgagctcaatttccctacagagaaactgtgcttcgtcggcttaatgtcaatgatagatccccctcgcgctgcggtgccagatgccgtaggtaagtgtagaagtgcgggtataaaggtgattatggtgaccggggatcaccccattaccgcaaaggctatcgctaaaggagtagggattatctccgaggggaacgagacagtggaagatatcgcggctcgcttgaatataccaatgtcccaggtcaacccccgagaggctaaggcgtgtgttgtgcacggttctgacctgaaggatatgaccagcgagcagctcgacgaaatcctgaaaaatcacacagagatcgtgtttgctcgcacatcacctcagcagaaattgatcattgtcgaggggtgccagcggcaaggagccatagttgctgtgactggggatggggtcaacgactccccggcactgaaaaaagctgacatcggcatcgcaatgggcatctcgggatccgatgttagcaagcaagcggctgatatgatcctgctggacgataatttcgctagcattgtcacaggcgtggaagagggtcgtctcatttttgacaatttgaaaaagtcaatagcctatactctaacttctaacatcccagaaatcacccccttcctccttttcattatagcaaatatccctctgccactgggcaccgtgaccatactgtgtattgacctaggcacagatatggttcctgccatcagccttgcatacgaggcagccgagtccgacattatgaagaggcagcctagaaactcccaaactgacaaacttgttaacgagcgcctgatcagtatggcctacggccagatcgaaaatggatttttacctagccgtctgctaggcattcggttagattgggacgacaggaccatgaacgacctcgaagattcctatgggcaggagtggacatacgagcaacggaaagtggtcgagtttacctgtcacacagccttcttcgcctcaatcgttgtcgtacaatgggcggatctaattatctgtaaaaccaggagaaactcagtctttcagcagggcatgaaaaacaaaattctcatctttggcctgttagaggagactgctctggctgctttcttgtcatattgtccaggcatgggcgttgccttacgaatgtacccactgaaagtcacctggtggttttgtgcctttccgtacagcctgctgattttcatatatgatgaagtgcggaagctgattcttcgacggtacccaggtggatgggtagaaaaagagacatactattag

SEQ ID NO: 215315 - DNA, 819 bp, synthetic construct
  misc_feature 1..819: note = Description of Artificial Sequence: Synthetic coding sequence
  source 1..819: mol_type = other DNA
atggattccttcaaaaacatggtcccacagcaggcactggtgattagggagggggaaaagatgcagattaatgcagaggaagtggtggttggggatttggtcgaagtcaaagggggagacagagtgcctgccgatctgaggattatatctagccacggatgcaaggtcgacaactcttcactcaccggagaaagcgagcctcagacgcggtcacccgagttcactcacgagaacccactggagacccgaaatatctgtttcttcagcacaaactgcgtggaaggaacggcgcgagggattgtcatagctaccggagaccgtacggtgatgggcagaattgctacgttagcctcaggactggaggtgggcagaacacccatagcaatggaaattgaacattttatccaactcattactggcgttgccgtgttcttgggggtatctttcttcgtactgagcctcatcctgggttacagctggctggaagctgtcattttcctgatcgggataatcgtggctaacgtgcctgagggcttgctcgctaccgtgaccgtctgcctcacactcacagcgaaaagaatggcaaggaaaaattgccttgtgaaaaatcttgaggccgtggaaacattggggagtacatccactatctgttctgacaaaaccggtacacttacccagaataggatgacagtagcacacatgtggtttgataaccaaatccatgaagccgataccacggaagaccagtcaggcgattgggtcctccagaggggatggatcggactggaagaagctgaaggctcaggtgtcgttggatag

SEQ ID NO: 215316 - DNA, 3042 bp, synthetic construct
  misc_feature 1..3042: note = Description of Artificial Sequence: Synthetic coding sequence
  source 1..3042: mol_type = other DNA
atgggagataaaaaagatgacaaagacagccctaagaaaaacaagggaaaggaacggagagatttagatgatctcaaaaaagaggtggccatgacagagcacaaaatgagtgtagaggaagtgtgccgtaagtacaacacggactgcgtgcagggactgactcatagcaaggcgcaggaaattctggcccgagacgggccaaacgcccttacccctccccctaccacccccgagtgggtgaagttttgtcggcagctattcgggggtttttcaatcttgttgtggatcggagcaatcctgtgtttcctggcctacggaattcaagcaggcactgaggatgacccgtctggagacaatctctacctcggaatcgtgttagctgccgtcgttattataaccgggtgtttttcatactaccaggaggccaagtccagcaagatcatggaatcgttcaagaatatggtccctcaacaagccttggttatcagggagggtgagaaaatgcaggtaaacgccgaggaagtggtggtgggcgatctggtcgagatcaaggggggtgacagagtgccagccgacctgagaattattagtgcacatggctgcaaagtagacaactcttctctgactggcgagtcagaacctcagacccggagccccgattgtactcacgacaacccattggagactaggaacatcactttcttcagtaccaactgtgttgagggtactgcgagaggcgtggttgtggccactggagatcgcaccgttatgggacgaatcgccacccttgcatccggtctggaggtcgggaaaactcctattgcgattgagatcgaacacttcattcaactgataacaggagttgctgtgttcttgggggtgagctttttcatcttgtccttaatcctggggtacacctggctggaagctgtcatcttcctgattggaattatagtggcaaacgtccccgaggggttactcgcgacggtaactgtgtgtctgactttgaccgctaaacgtatggccagaaagaattgtctggtgaaaaatctggaggccgtcgaaactctgggtagcaccagcactatttgcagcgataaaaccggcaccttgactcagaatagaatgaccgtggcccatatgtggttcgacaaccaaattcacgaggccgacaccacggaggatcagtcagggacctctttcgacaaaagctctcatacttgggtcgcgctgtcgcatatagctggtctttgtaatagagctgttttcaagggaggccaggacaacatccctgtactcaaaagggacgtggccggagacgcgagtgaaagcgccctgctcaagtgcatcgaactgagctctggtagtgttaaactgatgagggaacggaacaagaaggtggccgagatcccgttcaactcgacgaacaagtaccagctgtcaattcacgagacggaggacccgaatgataaccggtatttgttagtgatgaaaggggctcccgagagaatcctggaccgatgcagcacaatattgctgcagggaaaggaacaacccctcgacgaagaaatgaaggaggcctttcagaacgcctacctcgagctgggtggtctgggcgagagagttctgggattctgccactattacctccccgaggagcagtttccaaagggattcgcgtttgattgtgatgatgtcaatttcaccacagacaacctctgctttgttggcctgatgagtatgattgacccaccacgtgcggctgtaccagacgccgtgggcaaatgcagaagcgcaggcatcaaggtcattatggtcaccggggaccaccccatcacagccaaagccattgcgaaaggcgtgggcatcatcagcgaaggtaatgagactgtcgaggatatagctgctcggctgaatatccctgtgtcacaagtaaaccccagggatgcaaaggcctgcgtgattcacggaacagatcttaaagatttcacctcggagcagatagatgaaattctacagaatcatactgaaatcgtattcgcccgtacttcaccccagcagaagcttattatcgtggagggctgtcagagacagggcgctatagtggcagtgaccggtgatggcgtcaacgattcccctgcccttaagaaagcagatataggcgtggccatgggtattgccggtagtgacgtgtcgaagcaggcagccgacatgattcttctggatgataattttgcatcaatcgtaacaggcgtcgaagaagggaggcttatttttgacaacttgaaaaagtcaattgcatacaccctgaccagcaacatcccagaaatcacgcccttcctccttttcatcatggcaaacatacctctgcctctaggtacgataaccattctctgcattgatctcggaacagatatggttcctgctatatccctggcatatgaagcagcagagtccgacattatgaagagacagccgaggaacccacgaacagataaattagtcaacgaaaggctcatctctatggcctatggccagatcggcatgattcaggccctcggaggctttttctcctattttgttatcttagccgaaaacgggttcctgcctggaaatctggtgggtatcaggcttaattgggatgaccggaccgtaaacgacctggaggattcttacgggcaacagtggacatatgagcagagaaaggtggtagaatttacctgtcataccgcctttttcgtttccattgtagtggttcaatgggctgaccttattatctgcaaaacccgacgcaacagtgtttttcagcagggaatgaaaaacaaaatcctgatcttcggcctattcgaggaaactgccttggcagccttcctttcatattgccccggtatggatgttgctttaagaatgtatcctctgaagccctcctggtggttctgcgcctttccctatagtttcctcatatttgtgtacgacgagattaggaagctaatattaaggcgaaaccctgggggttgggtagagaaggaaacgtactattag

SEQ ID NO: 215317 - DNA, 2952 bp, synthetic construct
  misc_feature 1..2952: note = Description of Artificial Sequence: Synthetic coding sequence
  source 1..2952: mol_type = other DNA
atgactgaacacaagatgagtgtggaagaggtttgtcgaaagtataatactgactgcgtgcagggccttacccatagcaaagcccaggagatactcgcaagggatggaccaaatgcactgactcctccacccactacgcccgagtgggttaaattctgccgccagctcttcggtggctttagcatactgctgtggataggcgctattctctgtttcctggcctatggaattcaggccggtaccgaagatgacccatctggagataatttatatctgggcatagtactagcggctgtagttataatcactgggtgcttcagctattatcaggaggccaagtcaagcaagataatggagtctttcaagaatatggtgccacagcaggcccttgttatccgggaaggcgaaaagatgcaagtcaacgcagaagaagtcgttgtaggagacctcgtcgagatcaaagggggtgaccgagtgcccgctgatcttcggataatttctgcgcatggatgtaaagtcgacaattcgagcttgactggagagtctgagccccaaaccagaagtccggattgcacccatgacaatccactggagaccaggaatatcacgtttttttccactaactgcgtggagggcacggcccgtggggtagtggtggcgactggggatcgtacagtgatgggtcgaatcgcgactcttgcaagtggtctggaagtggggaagaccccaatagccatagagatcgaacatttcatacagctgattacaggcgtggccgtgttcctgggagtgtcattcttcattctgagcttgattttgggatacacctggcttgaggccgttatcttcttaatcggcataattgtggctaatgtccctgaaggtctgctggccactgtcaccgtatgtttgactcttactgcgaaacgaatggctcgaaagaattgcctggttaagaacttagaggctgtggagacactgggttctacctccacaatatgctcggataaaacgggaacacttactcaaaaccggatgactgtggcccatatgtggttcgacaaccagatacacgaggcagataccactgaagatcaatccggcacaagcttcgataaaagttctcatacttgggtggcgctgtcgcacattgccggactttgtaatcgggcagtctttaagggaggccaggataacatacccgtcctcaaaagagacgtggctggagacgctagtgaatccgctctgttgaagtgcattgaattgtcatcaggatccgtgaaactgatgagagaacgaaataagaaggtagccgagatccctttcaactcaaccaataaataccagttatccatacatgagactgaggacccgaacgataatcgttatttactggttatgaaaggtgctccagaaagaattctagaccgctgctctacaattctgctgcaaggcaaggaacaacccttggacgaggagatgaaagaggctttccaaaatgcttacctggagctgggtggcctgggggagcgggtcctgggtttttgccattactaccttcccgaggagcaattccccaaagggtttgcctttgactgtgacgacgtgaattttaccacagacaatctttgtttcgttgggctgatgagcatgattgatccgcctcgggcagctgtccccgatgctgtcgggaaatgtaggtccgctggaatcaaggtgattatggtgaccggtgatcatcccataactgcgaaggcaatcgcaaaaggtgtggggatcatcagcgagggcaatgagacggtggaggacatagctgccagactgaatatcccggtctcccaggtgaacccgagggacgcaaaggcctgcgtcatccatggcactgacctaaaggattttacttcagagcagatcgacgaaattcttcagaatcataccgaaatcgtctttgccagaacctccccccagcagaagttaatcatcgtcgagggatgccagcgtcaaggtgccatagtcgccgtcactggagacggcgtgaacgattctccggctttaaagaaggctgacatcggagtggcaatgggaatagccggttctgacgtgtcaaaacaggcggcagatatgattttgctggacgacaacttcgctagcattgtcacaggcgttgaggaaggacgactcatttttgacaatctcaaaaagagtatcgcttatactttgacaagcaacatcccagagataaccccattcctattgttcattatggcaaatattcctttaccactgggcaccattactattctgtgtatcgacttgggtacggatatggtccccgctatctccctggcctatgaagcagcggagtccgatattatgaagaggcagccccgaaatcccagaacagacaaattagttaatgagcgtctgatctcaatggcttatggccagattggcatgatacaggcactcggaggtttcttcagctacttcgtgatcctagctgagaatggcttcctgcccggaaatcttgtgggcatacggttgaactgggacgatagaaccgttaacgacctcgaagactcctatggccaacagtggacttacgagcagcgcaaagttgtagaatttacctgtcatacagccttcttcgtttccatcgtggtcgtgcagtgggccgatctcattatctgcaagacccggagaaattcagtctttcagcagggcatgaagaacaagatcctgattttcggactgtttgaagagaccgcattggccgcatttctgtcctattgcccagggatggacgtcgcgcttaggatgtatccactcaagccttcctggtggttctgtgcatttccatacagctttctaatctttgtgtatgatgagataagaaaactgatccttcggcgaaatccaggagggtgggtggagaaagagacttattactag

SEQ ID NO: 215318 - DNA, 3681 bp, synthetic construct
  misc_feature 1..3681: note = Description of Artificial Sequence: Synthetic coding sequence
  source 1..3681: mol_type = other DNA
atgggtgataagaaggatgacaaggatagtcccaagaaaaataaaggcaaggaaaggagagatttggacgacttaaaaaaggaagttgccatgactgagcataaaatgtctgtggaagaggtttgtcggaagtataatacagactgtgtgcagggccttactcactccaaagctcaggagatcctcgcacgcgacggccctaacgcgcttaccccgccacctacgacgccagaatgggttaagttttgccggcagctattcgggggtttctcaatcctactgtggatcggagctatcctctgcttcttggcctacgggatccaagctggtaccgaggatgacccctctggcgataacctatatttgggaattgtcctggcagccgtggtgatcatcactggttgtttctcatactaccaggaagccaaaagtagcaaaattatggagtcattcaaaaatatggttccacagcaggccctggtgattagggagggggagaaaatgcaggtgaatgcagaggaagttgtggttggagatttggtcgagatcaagggtggcgacagggtgccagccgacctgcgcatcatctcagcgcatggatgtaaggtcgacaactcaagcctgactggagagtctgagccacagactagaagccccgactgtacccacgataatccgttggagaccagaaacatcaccttcttttccacaaactgcgttgagggaactgcacggggtgtggttgtcgccacaggggaccgtacagtgatgggtcggattgcaaccctggcctcagggctcgaggtgggtaagacgccaatcgccatcgagatcgaacatttcatccagttgatcaccggcgtagcagttttcctaggggtatccttcttcatcctgtcgctgattctgggatacacttggctggaggcggtcatattcctcatcggcatcattgtagctaacgtgcccgaggggttgcttgccactgtcacagtgtgtctgactctcactgcaaaacgcatggctagaaaaaactgtctggtgaagaacttagaggccgtagaaacactgggatccacttccactatctgtagtgataagacagggaccctgacacaaaatagaatgactgtggcccatatgtggtttgataaccagattcatgaagccgatacaaccgaagaccagtctggcactagcttcgacaaatcatcacacacctgggtggctctatcgcatatcgccggtctctgtaaccgggcagtttttaaaggcggacaggataacatccctgtgcttaaacgggacgttgccggagacgccagtgaatcagcactactgaaatgtatcgagctgagttccggttctgtgaagctcatgcgcgaacgtaataaaaaagtggccgagatcccttttaattccactaacaaatatcagctctccattcacgagacagaggacccaaacgataatagatatctgctcgtgatgaagggtgctcctgagaggatcctggacaggtgttccaccattctgttgcagggcaaggaacaacctctcgacgaagaaatgaaagaggcctttcagaatgcatacctagagctgggcggacttggcgaacgagtgctgggtttctgccattattacctgcccgaggaacagttcccaaaagggtttgccttcgactgcgacgatgtgaacttcaccaccgataacttgtgctttgtagggttgatgagtatgatcgatccacctagggccgcagtccctgacgcagtaggcaagtgcaggtcagcagggattaaagtaatcatggtgactggggatcatcccataaccgcaaaggcaattgccaaaggcgtgggtattattagcgagggaaacgagactgtggaagatatagctgccaggctgaacattcccgttagccaggtaaatcccagagatgccaaggcctgtgttattcacggaacggaccttaaagattttacatcagaacagatagatgaaattctgcagaaccatactgagattgtttttgcaaggacgagtccccagcagaagctgatcattgtggaaggctgtcagcgtcagggtgccatcgtggctgtgactggcgatggagtgaatgattctccagccctgaagaaagcagacatcggggtggcgatgggcatagcaggctccgacgtgagcaagcaggcagccgacatgatcctgctcgacgataacttcgcctcaatagtcacaggcgttgaggagggccgtctgatctttgacaatctcaagaagagcattgcttacaccctgactagcaacattcccgaaattacacctttcctattgttcattatggccaacatacccttgcctctaggcactataactattctgtgtatagatctgggcactgatatggttccagccataagcctcgcgtacgaagcagccgaatcagatattatgaagcgccagccgcgaaatcctaggacagataaattggttaatgagaggctgatctccatggcctacggccaaatcgggatgatccaagcgctcggagggttttttagctattttgtcatcctggccgagaatgggtttctgcctggcaacttagtgggcatccggttgaactgggacgatagaaccgtcaatgatttagaggacagctacggccagcagtggacatatgaacagcgcaaggtcgtggagtttacttgtcatacagcattcttcgttagcattgtagtggtccagtgggccgatctgatcatttgtaaaacacgcaggaacagtgtcttccagcagggtatgaagaataagatcctcatattcggtctgttcgaagagacagctctggcggcttttctgtcctactgccccggaatggacgtggccctgaggatgtatcctcttaagccaagttggtggttctgtgcattcccgtatagtttcctgatctttgtatacgacgaaatccgaaaattgatactccgcaggaaccctggcggagagggagcacggcagggatctaggggaggcagaggcgcagcgggatctcaggccgctgggcctcggttgccatctccgtgctggatggcactgcccccaggaagccattcgtccctctcatcacacctgtccgggcatcccctatgtctgcttacaggactgtgcctatgtggattcttagtgagcctccctctctgcccttccctgtgttgggccgctaggctagcatgcctcagcccttctctgacattgtctctgtcttttctcctgtgtctgagcagactaggcggtgagggaaacttactgcttaccagtgcgcctcctcatagaccaagtctccctcgcccaccaggcccaggacctcctctttccgtcccccctatcttatactccggaggtagatccccccttttcttatggccccaccttggaccgcatcccctgcactatctcttaccccctccgttgtggctggcctcgcttccatgtccaaagccactgagttctctgttttccgtgtccgtgagcctcccactgctcaccccccttagcattccgcctgcccctgctacttccctgggttcattcctgctgcccttctccccccctgcagacgcgattagtgggtccgggcagctgagcaacattagtgttggacgcgaatag

SEQ ID NO: 215319 - DNA, 444 bp, synthetic construct
  misc_feature 1..444: note = Description of Artificial Sequence: Synthetic coding sequence
  source 1..444: mol_type = other DNA
atgggatctggtggaagcgattcatacagaatcgctacttctcaagacaagaaggacgataaagattccccaaaaaaaaacaaagggaaagaaaggcgcgatctggacgacctaaagaaggaggtggctatgacggagcacaagatgtccgtggaggaagtatgtcggaagtacaacaccgactgtgttcaaggattgacccattcaaaagcccaggagattctagccagagatgggcctaatgcgctgactccacctcccactacacctgagtgggtgaagttttgccgacagttgttcgggggtttcagcattttgctctggataggagcaatcttgtgctttctggcatatggaattcaggccggaacagaggacgatccttccggcgacaatctgtacctgggtattgtgctagcagccgtcgtgattataactgggtag

SEQ ID NO: 215320 - DNA, 2049 bp, synthetic construct
  misc_feature 1..2049: note = Description of Artificial Sequence: Synthetic coding sequence
  source 1..2049: mol_type = other DNA
atggggagaattgccaccttggcgtctggactggaagtggggaagaccccaattgctattgaaatcgagcattttatccaactaatcaccggcgtagcagtatttctcggtgtgtcgttcttcattctgtccctgatcctgggatatacgtggctagaagcagtgatttttttgattggaatcatcgttgcaaatgtgcctgagggtcttctggccacagtgacagtgtgcctcactcttactgccaaacgcatggctagaaaaaattgcctggtgaaaaatttggaggccgtggaaacactaggttccacatctacgatctgcagtgataaaacaggaacccttacacagaatcgaatgacagtcgctcatatgtggtttgataaccagatacacgaggcagacaccacagaggaccagtccggcactagcttcgacaagagtagccacacctgggtggctttgagtcatatcgccggtctttgcaatcgggcagtgtttaaagggggtcaggacaatattcccgtcctgaaacgtgacgtcgcgggagatgcctcggagtcagccctcctgaaatgtatcgaattgagctcagggtctgtaaaacttatgcgagagcggaacaagaaggtggcggagatcccgttcaactccacaaacaagtatcagctctctatccacgagactgaagaccccaatgacaatcggtatctccttgtgatgaagggtgcaccggagagaatactcgaccgctgctcaacaattctcttacagggaaaagaacagccactggatgaggaaatgaaggaggcatttcagaacgcttacctagagctgggcggacttggggaacgtgtactgggcttttgccactattacctgccagaggagcaatttccaaaaggcttcgcattcgactgtgatgacgtgaacttcacaaccgataatctgtgttttgtcggcctcatgtcaatgatagacccaccgagagcagcagtccccgacgcagtggggaagtgtcgcagcgccggtatcaaagtcattatggtgaccggggatcaccctatcactgccaaagcaatcgctaagggggtcggaattatcagcgaaggtaacgaaactgttgaagacattgccgcacgcctaaacatcccagtaagtcaagtcaacccacgcgatgccaaagcctgcgtgattcacggaacagatctgaaagattttacctccgagcaaatcgatgaaattctgcaaaatcataccgaaatcgttttcgcacgcacgagtccccagcagaagctgatcatcgtggagggctgccagaggcagggggctatagtcgccgtgacaggcgatggggtgaatgactctcccgctctgaagaaagcggatatcggagtggccatgggcattgctggttcagatgtgtcaaagcaggctgctgatatgattctgctcgatgacaactttgcctctatagtgacaggtgtggaagagggccgtctcatttttgacaacctgaaaaaatccatagcctacacactgacctccaatattccagagatcactccatttctgttgtttattatggccaacatccctctgcccctcggcacaatcaccatactttgtattgacttggggactgatatggtgccagcaattagcctagcatacgaggccgctgaaagcgacattatgaagcgtcagcctcgaaatccaaggactgacaagctggtgaacgaaaggctaatctccatggcttatggacagatcggaatgatccaagcactcggtggttttttctcctatttcgtgattctggcagagaacggatttctacctgggaaccttgtgggcattcggctgaactgggacgacaggaccgttaacgacctggaggattcgtatggccaacaatggacctatgagcagcggaaggtggtggaatttacttgtcacacggccttttttgtttcaatcgtcgtggtacagtgggcggatctcattatatgtaaaacaaggcgaactcgcagttcctcccgggcatag

SEQ ID NO: 215321 - DNA, 3075 bp, synthetic construct
  misc_feature 1..3075: note = Description of Artificial Sequence: Synthetic coding sequence
  source 1..3075: mol_type = other DNA
atggggggttgggaggaagaacgaaacagaagagccaccgacaagaaggatgacaaagactctccaaagaaaaataaaggtaaggagagaagagacttagatgatctcaagaaagaagttgctatgactgagcacaagatgtcagttgaggaagtctgccggaagtataataccgactgtgtgcagggactgacccactctaaggctcaggagatattagccagagatggaccaaatgccttgactccccctccgaccacccctgaatgggtgaagttctgccggcaactctttggaggcttcagcatactgctgtggatcggggcaatactgtgtttcctcgcctacggaatacaagccggaacagaagacgatccatcgggagataacttgtatctgggaatcgtgcttgccgcagtagtaatcatcactggatgcttctcttattatcaggaggcaaaatccagtaagatcatggagagcttcaagaacatggttccccagcaggccctggtgattcgggaaggggagaagatgcaggtgaacgccgaggaggtcgtggttggcgatctggtggagatcaaaggcggtgatcgcgttccggcagacctcaggattatctccgctcacggctgtaaagttgacaatagttccctcacaggtgagtcagagccgcagacccgcagtcctgactgtactcacgacaatccattagagactaggaacattacctttttcagcacgaattgtgtcgagggcaccgccagaggtgtcgttgttgctacaggcgataggactgtgatgggtcggatagccaccctggcttccggtctcgaggttggcaagacgcccatcgcaatagagattgagcacttcatccagttgatcaccggagtggctgttttccttggcgtttcattctttattttatcgctcattctaggctatacctggttagaagctgtgatcttcctgatcggcatcatcgtcgcaaatgttccagaaggactgctcgccaccgtcacagtctgcctaaccctgaccgcaaagcgcatggcgcgaaaaaactgcctggtcaagaacctggaagccgtggagaccctgggatctacgtccaccatatgcagcgacaagactgggaccctcacacaaaataggatgaccgtggcacacatgtggtttgacaaccagattcacgaagccgacaccaccgaagatcagtctggaaccagctttgataagtcttctcatacatgggtggctctgtcccatatcgcaggcttgtgcaaccgtgctgtgttcaagggagggcaggacaatatcccggtgttgaagcgcgatgtggcaggagacgctagtgaaagcgcactgctgaaatgcatagagctatctagtggcagcgtaaaattgatgcgggagaggaacaaaaaggtggcagagatcccattcaatagcaccaacaagtaccagttgtccatccacgagaccgaagatcctaatgataacagatatctcctggtgatgaagggggcaccggaaaggattctcgacagatgttcaactattctgctccaaggcaaagaacagccgctagacgaagaaatgaaagaggccttccagaatgcatacctcgaattgggtggcctgggcgagcgtgtgttgggcttttgtcactattacctgccggaggaacagttccccaaaggcttcgcctttgactgtgacgacgtgaattttacaaccgacaatttatgcttcgttgggctaatgtcaatgatcgacccccctagggctgcagtcccggacgccgtgggcaagtgccgttccgcaggcatcaaggtaatcatggtaacgggggatcacccaatcaccgcgaaggccatagccaagggcgtgggcatcatttctgaaggaaatgaaaccgtcgaggatatcgctgctcgtctgaacatcccagtgagccaggtcaatcctagggatgcgaaggcctgcgtgatccacggcaccgatctgaaggatttcacctccgagcagattgatgaaattctccagaaccataccgagatagtcttcgctagaacgtctcctcaacagaaattgattatcgttgaaggatgtcaaagacagggagcaattgtggccgtcaccggggacggagttaacgattctccagccctgaagaaagctgatatcggggtcgccatgggcatcgcgggtagcgatgtgagcaagcaggccgcagacatgatcttactggacgacaatttcgcatctatagttaccggggtggaggaaggaagattgatctttgataatcttaaaaagtcaatagcctacactctaacaagcaacatccccgagattaccccattcctgctttttatcatggccaacatccctctgcccctaggaacaataacaatcttatgtattgatcttggaaccgacatggtgccagccattagtctggcgtatgaagctgcagagagcgacattatgaagagacagccacggaatcctcggactgataaactagtcaatgaacgactgatttccatggcctatgggcagatcggcatgatccaggcattgggtggctttttttcatacttcgtgatcctggctgaaaacggtttcctgccgggaaatctcgtaggtatccgccttaattgggacgaccgaaccgtgaatgacctggaagacagttacgggcaacaatggacttatgaacagaggaaagtggtcgagtttacatgccacacagccttcttcgtctccatcgtcgttgtccagtgggcagatctgatcatctgcaaaacgaggcggaatagtgtctttcaacagggcatgaaaaacaagatccttattttcgggctgttcgaggaaacagccctggcagctttcctgagctattgtccaggcatggatgttgctctcaggatgtaccctctgaagcctagttggtggttttgtgcatttccatactccttcctcatatttgtgtacgacgagataagaaaactcattttgaggcgcaacccgggaggttgggtagagaaggagacttattactag

SEQ ID NO: 215322 - DNA, 3081 bp, synthetic construct
  misc_feature 1..3081: note = Description of Artificial Sequence: Synthetic coding sequence
  source 1..3081: mol_type = other DNA
atgggctccggcggaagtgactcgtacaggattgctacctcacaagacaagaaagacgataaagactcacccaaaaaaaacaaagggaaagagcggcgtgacctcgacgacctgaagaaggaggtagcgatgaccgagcataaaatgtctgtggaggaagtctgccgcaagtacaatacggactgtgtgcaggggctgactcactcgaaagcccaggagatcctggcacgggacggacctaatgctctcacccccccacctacaactcccgaatgggtgaagttttgcagacagctgtttggcggatttagtatccttctgtggatcggagccatcctgtgcttcctggcttatggaatccaggcaggaaccgaggacgacccatccggagataacctatacctcgggatagtcctggccgcagtggtcataattaccgggtgcttctcctattatcaagaggctaaaagcagtaagatcatggagagtttcaagaatatggtcccccagcaggccttggttattagggaaggagagaagatgcaggtcaacgctgaggaagtggtggtgggagacttggtcgaaataaagggaggcgatagagtccccgcagatcttcgcattatctccgcccacggctgtaaggttgataattccagcctgaccggtgaaagtgagccccagacaaggagccctgattgtacccatgataatcctctggaaacccgaaacattaccttcttctcaacaaattgcgtggagggaacagccagaggagtggttgtggctacaggtgatcgaactgttatggggcgtatcgccaccctggcgagcggcctggaagtcggaaagacaccgatcgcaattgaaatagagcattttatccagctgataacgggtgtggccgttttcttgggcgtcagtttctttatcctatcgctaattttgggctatacatggctggaggctgtgatttttctgattggcataatcgtcgccaacgtccccgagggtctcctagcaactgtgaccgtgtgcctcacactgactgccaaaaggatggctcggaagaattgcctcgtcaagaatctggaggccgtcgaaacactgggatccacgagcaccatttgctccgataaaacaggcacactgacacagaaccgtatgactgtcgcccacatgtggtttgataaccagatacatgaagcagatactacggaggaccagtcaggcacgagtttcgataaaagttcccacacctgggttgcacttagtcacatcgccggactgtgtaacagggccgtgttcaaggggggacaggataatatacctgttcttaagagggacgtggccggtgacgcttccgaaagtgctctcctgaaatgtatcgaactgtcctctggcagcgttaagctgatgagggagagaaacaagaaagtcgctgaaattcccttcaactctaccaacaagtatcagctgtcaatccacgaaacggaggacccaaatgacaatagatacctgctcgttatgaagggcgctccagaacggattttagacaggtgctctacgatactgcttcagggtaaagaacagccactggatgaggaaatgaaagaggcgttccagaatgcttacctagaactgggtgggctgggagagcgggtgcttggcttttgtcactactatctgcccgaagagcagtttccaaagggctttgccttcgattgtgacgacgtgaacttcactacggataatctgtgttttgtggggttgatgtctatgattgacccccctcgcgctgctgtgcccgacgccgttgggaagtgtcgctccgccggaattaaggtgataatggtgacgggggatcacccgattactgcaaaggccattgccaaaggcgttggtattatctctgagggtaatgagacagtcgaggatattgctgcccgtctgaatatccctgtatctcaagtgaatcctcgagatgccaaagcatgcgtgatccatggaacagatctcaaggactttacctcggaacaaattgatgaaattctgcagaatcacacagagatcgtgtttgccagaacttctccccagcagaagctgatcatagtcgaagggtgtcagaggcagggcgcaatcgttgcagtaacaggggatggagtgaacgatagcccagctctgaagaaagctgacatcggggtggccatgggcattgctggctcagacgtctccaaacaggcagcggacatgatcctgctggatgataacttcgcctctatcgttaccggggttgaggagggacgccttatctttgacaatctcaagaaatccatcgcatatactcttacttcaaacattccggaaattactccctttttactgttcatcatggctaacataccgctcccactgggaacaataacaatcctgtgtatcgatctggggaccgacatggtgccggctatttccttggcatacgaagccgctgaatcagatattatgaagcgacagccaagaaatccccgtactgataagcttgtgaacgagcgcctcatcagcatggcttatgggcagattggcatgatccaggccctgggaggattcttctcatattttgtgatactggcggagaacggattccttcccggtaatttagtgggaattcgcctgaactgggatgaccgaacagtgaatgatctagaagactcctacgggcaacagtggacgtacgagcagcggaaggtggtcgaatttacgtgccatactgcatttttcgtgtcaattgtagtggtgcagtgggctgatctgatcatatgcaagactcgcagaaattcagtattccagcaaggcatgaagaataaaatcttaatcttcggcctgttcgaggagacagccctggcagcctttctgtcctattgccccggaatggacgtcgccctgcggatgtacccgttaaaacccagttggtggttctgcgcattcccttattccttcctcatcttcgtgtacgacgaaattcgaaagctgatcctgaggcgaaacccagggggatgggtcgagaaggagacctattactag

SEQ ID NO: 215323 - DNA, 3090 bp, synthetic construct
  misc_feature 1..3090: note = Description of Artificial Sequence: Synthetic coding sequence
  source 1..3090: mol_type = other DNA
atggggctctggggtaagaaaggaacagtggcaccccacgaccagtcgccccgaagaagaccgaagaagggcctcatcaagaaaaaaatggtaaagcgtgagaaacaaaagcggaacatggaggagctgaagaaagaggtggtaatggatgatcataaactgactctggaggaattaagtaccaagtactcggtagacctcacaaaagggcacagtcatcagagggccaaggaaattctcacacggggaggaccaaacaccgtgacaccaccccctacgacccccgaatgggtgaaattctgcaagcagctctttggaggtttcagtttgttactgtggacaggcgctatactttgtttcgtcgcatattccattcagatctattttaatgaagagcctacaaaggataatctctacctaagtatcgtgctgtccgtagtggtgattgtcacgggatgtttcagctactaccaggaggcaaaatcttcaaagatcatggagtcctttaagaatatggttccccagcaggcgcttgttataaggggaggcgagaagatgcaaattaacgtccaggaggtggtgttgggcgaccttgtggaaattaaggggggagaccgagtgcccgctgaccttcggcttatttcagctcagggctgtaaagtggataactcatccctaactggcgagagcgagccgcagtctcgatcaccagattttacccatgaaaatccccttgagactcggaacatctgtttcttttccactaattgtgtcgaagggactgcaaggggcattgtgatcgctaccggcgactctaccgttatgggcaggatagcgtcactaactagcggcttagcggtgggtcagacccctattgcggcagagattgagcactttatccatctcatcactgttgtggccgtcttcctaggggtgactttctttgccttatccttgctcttgggatatggctggcttgaagccattattttcttgattggcattatcgtggccaatgttccagagggcttgctggctacagtgactgtgtgcctcacgctcactgctaaaagaatggccagaaagaattgtttagtgaaaaaccttgaagctgttgaaaccctcggctccacctccactatctgtagtgacaagactgggacattgactcaaaacaggatgaccgtggcccatatgtggttcgatatgactgtgtatgaggcagacacgaccgaagagcagacaggcaagaccttcaccaagtcctctgacacgtggttcatgctggcccgaatagctgggctgtgcaacagggccgatttcaaggccaaccaggagattttgcccatcgccaagagagcgacgaccggggacgcctcagagagtgcattgctaaagttcatcgagcagtcttacagctcggttgcggagatgagagaaaagaaccccaaagtagccgaaatcccattcaacagtactaacaaataccagatgagcatccacctgcgcgaggacagtagtcagacccatgtgctcatgatgaagggagcaccagaacggattctggaattctgctctacgttcctgctgaatggccaagaatactcaatgaacgatgagatgaaagaagcctttcagaacgcatatctcgaacttggtggcctcggcgaacgagtcctcggattttgtttcctcaatctgccgagttcatttagcaaagggttcccctttaataccgatgaaatcaatttcccaatggataacctctgttttgtaggcctaatttcgatgatcgaccccccaagggcagcggtgcctgacgctgtgagcaagtgcagatctgcagggataaaggtaattatggtgacaggggaccatccgatcaccgctaaggccattgctaaaggcgtgggcattatcagcgagggaaccgagacagcggaagaagtggcagctcggcttaaaatccccatttccaaggtcgacgcctccgctgccaaagcgatcgtagtgcacggtgccgaactgaaagatattcagagcaaacagcttgaccagatcctgcagaatcaccctgagattgtctttgcgcgaacttctccccagcagaagctaataattgtcgaagggtgccagcggcttggggcagttgtggctgtgactggagacggcgttaatgacagcccagcactgaagaaggccgatatcggtattgccatgggtatatccgggtccgatgtttcgaaacaagcagcagacatgattttgctggacgataattttgcctcgatcgtgaccggagtggaggagggcaggctcattttcgacaatcttaagaagtctattatgtacaccttaacgtcgaacattcctgagattactcctttcctgatgttcatcatactgggtatccctctgccgctggggaccattacaattctgtgtatcgacctcgggactgacatggtacccgctatttctctagcttatgaaagtgccgagagcgacattatgaaaaggctcccaagaaatcctaagacagataatctggtgaatcatcggctgatcgggatggcatacggtcagattggtatgattcaggctctcgcaggcttcttcacgtattttgttattctcgcagagaacgggttccgcccagtagacctgctcggaattcggctccactgggaagataaatatttgaatgacctggaggactcttatggccaacagtggacatatgaacagaggaaagtggtcgagtttacctgtcaaaccgcttttttcgttactatcgttgtggtccaatgggccgacctaattatcagtaaaactaggcgcaattccctgtttcagcagggaatgcgcaacaaggtgttaatctttgggatcctcgaggaaaccctgctggccgcttttttaagttataccccaggcatggatgtcgcgcttaggatgtatccactgaagatcacttggtggttgtgcgctattccgtacagtatacttatctttgtgtacgacgagattcgtaagctcctcatcagacaacaccctgacggctgggtggaaagggagacttattactag

SEQ ID NO: 215324 - DNA, 498 bp, synthetic construct
  misc_feature 1..498: note = Description of Artificial Sequence: Synthetic coding sequence
  source 1..498: mol_type = other DNA
atgatccaggctctggctggatttttcacatattttgtgatcctggcggaaaacggctttagacccgtcgacttactaggcatacgtctgcattgggaggataaatacctcaacgacctcgaggacagttatggccagcagtggacctatgaacaacgcaaagtcgtggagtttacctgccaaaccgctttttttgtgaccatcgtggtggttcagtgggcggatcttattatctccaagacaagaagaaactccctcttccagcaggggatgcggaataaagtgttgattttcggaatcttggaggaaactcttctggccgcattcctctcatatacccccggtatggacgtcgccctgagaatgtaccccctaaagattacctggtggctttgtgcgattccttacagtatacttatattcgtgtacgatgaaatccgcaagctgctaattaggcagcacccggatgggtgggtagagagagagacttactactag

SEQ ID NO: 215325 - DNA, 888 bp, synthetic construct
  misc_feature 1..888: note = Description of Artificial Sequence: Synthetic coding sequence
  source 1..888: mol_type = other DNA
atggggaagaggaagtgttcaccagcatcacagtccctttttctcttccagtttcagaagatggagctgaaatttaagattctccttttctacgtcattttctatggctgcctggcaggtatttttattgggacgattcaagtcatgttactcactatttctgaattcaagcccacatatcaggaccgggttgcccctcctgggttgacccagatccctcaaatccagaaaaccgagatcagctttaggccaaatgacccaaagagctatgaggcttatgtgcttaatatcgtgcgtttcctggagaagtataaagactctgcacagcgggatgatatgatcttcgaagactgtggggatgtgccgtccgaacccaaggaacggggagattttaatcatgagagaggggaacgaaaggtgtgccggtttaagctcgagtggttgggcaactgctcaggcctcaatgatgagacatatggttataaggagggtaagccttgtattatcataaagctgaatagagtgctgggcttcaagcctaaaccacccaaaaacgagtccctggagacatatccggtgatgaagtataatcctaacgtacttcctgtccagtgcaccgggaagagggatgaagacaaagacaaggtcggtaacgttgagtatttcggcctgggaaattcaccaggcttcccgctgcagtactacccttattacggaaaacttcttcagccaaaatatctgcagcctctgctggcggttcaattcactaacctgacaatggacaccgagattagaatcgagtgcaaagcctatggagagaacataggctacagtgaaaaggatcggtttcagggtagatttgatgtgaaaatcgaagtgaagagttag

SEQ ID NO: 215326 - DNA, 912 bp, synthetic construct
  misc_feature 1..912: note = Description of Artificial Sequence: Synthetic coding sequence
  source 1..912: mol_type = other DNA
atggctagagggaaggccaaggaggaagggtcatggaagaagtttatatggaactcggaaaagaaagaattcctgggccgaactggcggaagctggttcaaaattttgctgttctacgtgattttttacggttgcttggccggaatatttatcgggacaatccaggtcatgcttctgaccatctctgagttcaagcctacataccaggatagggtggcccctccaggacttacccagataccgcaaattcagaagacagagattagttttaggccaaatgaccctaagtcctacgaagcctacgtgctgaacatcgtcaggtttctggaaaagtacaaggactccgcacaaagagacgacatgattttcgaggactgcggagatgtgccatccgaacctaaagagcgcggagacttcaaccacgaacggggagaacgcaaggtgtgcagattcaaactggagtggctaggaaattgcagcggactgaacgatgagacgtatggttataaggagggcaagccatgcattataattaaactgaaccgggttctgggcttcaagccaaaaccacctaagaatgaatccctggaaacatatcccgtgatgaagtacaaccctaatgtgctccctgtccagtgcacaggaaaacgagacgaggataaggataaggtggggaatgttgagtatttcggactcgggaatagtcccggattcccgctgcagtattatccttactatggaaagttactccagcctaaatacttacaacctctgctggctgtgcaatttacaaaccttactatggatacggaaatacgaattgaatgcaaggcatatggcgagaatattggatactccgagaaagacagatttcagggtagattcgatgtgaagatcgaagtcaagagctag

SEQ ID NO: 215327 - DNA, 912 bp, synthetic construct
  misc_feature 1..912: note = Description of Artificial Sequence: Synthetic coding sequence
  source 1..912: mol_type = other DNA
atggcacggggaaaagcgaaggaagaaggctcgtggaagaagttcatctggaactcagagaagaaggagttcttaggcaggaccggagggtcctggtttaagatcctgctcttctatgtgatcttttatggctgcttagccggaatttttattggcaccattcaggttatgctcctgacaatctctgaatttaaacccacctatcaggatagggtggccccaccagggttgacacagatccctcagatccagaagactgagatttcattccgacccaacgatcccaagtcatatgaggcctatgtactgaatattgtaaggttcctagaaaagtacaaagatagtgcgcaacgcgatgacatgatttttgaggactgtggagacgtgccttctgagccaaaggagcgtggtgactttaaccacgaaaggggcgagaggaaggtttgcaggttcaaactagagtggctaggaaattgtagcggtctcaatgacgaaacatatggctataaagagggcaagccatgcatcattatcaagctcaatagagttctggggtttaaaccaaaacccccaaaaaatgaatcattggagacttaccctgtcatgaagtataatcctaatgtccttccagtccaatgtactggcaagagagacgaggataaagacaaggtcggaaatgtggaatactttggacttggaaacagtcctggatttcctcttcagtactacccctactacgggaagctcctgcagcctaaatacttgcagccactgttggcggtccagttcacgaatctgacaatggacacggagatccgcatagagtgcaaggcatatggagaaaatattggatattcagaaaaagacagatttcagggccgtttcgatgtaaaaattgaagtgaagagttag

SEQ ID NO: 215328 - DNA, 744 bp, synthetic construct
  misc_feature 1..744: note = Description of Artificial Sequence: Synthetic coding sequence
  source 1..744: mol_type = other DNA
atgcttctgacaatctcagagttcaagcccacctaccaggaccgcgtcgctccacctggtctgacgcagatacctcagattcagaaaaccgaaatttcgtttcggcctaacgacccaaagtcatatgaagcttatgtcttgaacatcgtgaggtttttggaaaagtacaaagactccgctcagagagatgatatgattttcgaggattgcggagacgtgccaagcgaacccaaagaacgtggcgattttaaccatgagcgcggtgagagaaaggtgtgtcgatttaagctggagtggttaggcaactgttctggtctcaacgacgaaacatacgggtataaagaagggaagccctgtatcattatcaagcttaatagggtccttgggttcaaaccgaaaccaccaaaaaatgagtcgctggaaacttaccccgtcatgaagtacaaccctaacgttttacccgtgcaatgcacagggaaaagggacgaagataaggacaaggtgggcaacgttgagtactttggattaggaaatagccccggtttccctctccaatactacccttattatggaaagttactgcagccaaagtatctccagcccctgttggccgtgcagttcaccaatttgacaatggacacagagatcaggatcgagtgcaaagcctatggtgaaaacatcgggtattccgagaaggacagatttcaaggtcgctttgacgttaagatcgaagtgaagagttag

SEQ ID NO: 215329 - DNA, 873 bp, synthetic construct
  misc_feature 1..873: note = Description of Artificial Sequence: Synthetic coding sequence
  source 1..873: mol_type = other DNA
atggtaatccagaaagagaaaaagagttgtggccaagtcgtggaagagtggaaagagttcgtttggaatccaagaacccaccaattcatgggtaggaccgggacttcttgggcattcatcctgctcttttatctagtcttttatggattcctgactgcaatgtttaccctaactatgtgggtgatgctccagacagtgtctgatcacacgcccaaataccaggacaggctcgcaacccctggtctgatgattcggccaaagacagaaaacctcgacgtaatcgtcaatgtatcggatacagagagctgggaccaacacgtgcagaaactgaataagtttctagaaccttacaatgacagtatacaagcccaaaaaaacgacgtctgcagaccaggcagatattatgaacaacctgacaacggcgtcctgaattaccccaagcgagcatgccagtttaaccgaacacagctgggtaattgttccggcattggcgactcaacacactacggctatagcaccggccaaccgtgtgtttttatcaaaatgaacagggttatcaacttctacgcaggcgctaatcagtctatgaacgtgacctgcgccggtaagcgggacgaggacgccgagaatctggggaattttgtgatgtttcccgcaaacgggaacatcgatctcatgtactttccatactatggcaagaagtttcatgtgaactatacgcagcccctggtcgcagtgaagtttctgaatgtgacaccgaatgttgaggtgaatgtcgagtgtaggataaatgctgccaatattgctaccgatgacgaaagggataagttcgccggaagagtcgccttcaagctgcgcattaacaaaacatag

SEQ ID NO: 215330 - DNA, 840 bp, synthetic construct
  misc_feature 1..840: note = Description of Artificial Sequence: Synthetic coding sequence
  source 1..840: mol_type = other DNA
atgacgaaaaacgaaaaaaaatctctgaaccagtccttagcagagtggaagctcttcatttataaccccacaacaggggaatttctgggccgtacagccaaaagctggggtttaatcctcctgttttatcttgtgttctatggctttctggccgctcttttttcatttacaatgtgggtaatgctacagactctgaatgatgaagtgccgaaatatagggatcagattcccagcccaggattgatggtgtttcctaagcctgttacagctctggaatacaccttcagccgcagcgacccaacctcctacgctgggtatatagaggacttaaaaaagttcctcaaaccctacacacttgaagagcagaagaacctgaccgtgtgccccgacggcgcactattcgaacaaaaaggaccagtatacgttgcttgtcagtttcccatctccctcttgcaggcttgtagtggaatgaacgacccggattttggatattcccagggtaacccttgtatcctggtgaaaatgaaccggataatcggacttaaacctgaaggagtgcccaggattgactgtgtgtccaagaacgaggatatccctaatgtcgctgtttatcctcacaacggaatgatcgatctgaagtactttccctattacggcaaaaaactgcacgttggctaccttcagccgctcgttgccgttcaggtgtctttcgcgcctaacaacaccgggaaggaagtgactgtcgagtgcaagatcgatggttctgcaaaccttaaatcccaggacgaccgcgataagttcctcggacgcgtgatgttcaaaatcacagcccgtgcttag

SEQ ID NO: 215331 - DNA, 582 bp, synthetic construct
  misc_feature 1..582: note = Description of Artificial Sequence: Synthetic coding sequence
  source 1..582: mol_type = other DNA
atgttgagtgaaggcgatatcctatttagctctctactgagcagtccatctcttttctggcctcccggtctgatcttattgttttatctagttttctacgggtttctggcagctcttttcagctttaccatgtgggtcatgctacagacattgaatgacgaagtcccaaaataccgagatcagattccatctcctggcctgatggtgtttccaaaacccgtgactgctttggaatacacattttccagatcagatcccacttcttacgccggatacatcgaggatctcaagaaattcttgaagccttacaccctggaggagcaaaagaatctcaccgtgtgccccgacggtgcactcttcgaacagaaggggcctgtgtatgtggcgtgccaattcccgatcagcctgctgcaggcctgttcaggcatgaatgatcccgacttcggatatagccagggaaatccttgcattttagtaaaaatgaaccggatcatcgggctgaagccagaaggggtgccaagaatcgactgcgtttcgaagacgaataatgtcaaggatgggatgaaaatttatcagatgtag

SEQ ID NO: 215332 - DNA, 2139 bp, synthetic construct
  misc_feature 1..2139: note = Description of Artificial Sequence: Synthetic coding sequence
  source 1..2139: mol_type = other DNA
atggccctgctcgcaatgcacagttggcgctgggctgctgccgctgcagcatttgagaaaaggcggcatagcgccatcttgattagacccttagttagcgtttctggcagtgggccacagtggcgccctcaccagcttggggctctagggaccgctcgggcatatcagattcccgagtccctgaagtctatcacatggcagaggctgggtaagggaaacagcgggcagttcctggacgctgcaaaggcccttcaggtttggcccttgatcgaaaagcgaacatgttggcacgggcatgcgggtggaggtctgcacactgaccccaaggagggcgcaatgaacatcgtcgtgccattcatgttcaaatatgccgtggattcactgaatcaaatgtcgggcaatatgctcaatctgtcggatgcgcctaacactgtggcgacgatggccactgcggttctgataggttatggagttagccgcgctggggctgccttctttaacgaggtacgtaacgcggtgtttgggaaggttgcccagaattccattcggagaattgcgaagaatgtttttctgcacctgcacaatctcgatttaggcttccacctgagtagacagacaggggctctgagtaaggcaattgatcgcggaacccggggaatcagtttcgtgctgagcgccttggtcttcaatctgctgcctatcatgtttgaagttatgctagtttccggagttctgtattataaatgcggcgctcagttcgctctggttaccttaggcacactcggaacgtacactgcattcacggtggcagtgacaaggtggagaacgagatttcgaattgaaatgaacaaggcagataatgacgccggaaacgccgcaattgattccttgctgaactacgaaaccgtgaagtatttcaacaacgagagatatgaggcgcagcgctacgacgggtttctaaagacttatgagactgcctctctgaaatctacaagcacactcgccatgctgaatttcggacagtcagctattttctcagttggtctcactgcaatcatggtcctggcaagccaggggatagtggcgggaaccctgactgttggagacttggtaatggttaacggacttttgttccagctgagcttgccccttaactttttaggcactgtgtatcgggagactagacaggccctgatcgacatgaacactttgtttactctgctaaaagtcgacacccagatcaaggataaggtcatggcgagtcccctgcagattactccgcaaactgcgactgtggcttttgacaatgtgcattttgaatatattgagggacagaaagttttgtctggcattagctttgaagtgcctgcagggaagaaggtggcaattgtgggcggttcaggaagtggaaaatctacgatcgtgagattactgttcagattctacgagccgcaaaagggctctatttatctcgccggtcagaatattcaggacgtatccttggaatctcttaggcgtgccgtaggagtggtcccgcaggacgctgtgctctttcacaacacaatctactacaatctgttgtacgggaatataagcgcaagtcctgaggaagtgtacgctgtggccaagttggcaggcctgcacgacgctattcttaggatgcctcacggctacgacacacaggtgggcgaacggggattgaaacttagcggtggtgagaaacagcgggtggctatcgcacgggctattctaaaggaccctcccgtgatcctgtatgacgaagcaacgagctctctggacagtattactgaggagacgatcctgggagcaatgaaggatgtggttaagcaccggacctctatttttatcgcccatcggctctccaccgtagtggacgcggacgagattatcgtgctggaccagggcaaagtagctgagcggggaacccaccacgggctattggctaacccacactccatctatagcgagatgtggcacactcagtccagcagggtgcagaaccacgataaccccaagtgggaagctaagaaggagaatatctctaaggaagaggagcggaagaaactgcaggaggagatagtgaactccgtgaagggttgcggcaattgcagttgttag

SEQ ID NO: 215333 - DNA, 2046 bp, synthetic construct
  misc_feature 1..2046: note = Description of Artificial Sequence: Synthetic coding sequence
  source 1..2046: mol_type = other DNA
atgcgcctatggaaagcagtagtcgttactctggcatttatgagcgtggacatctgcgtgaccacagccatttacgtcttttcgcacctcgatcgctccctgctcgaggatattcggcattttaacatattcgatagcgtgttggatctgtgggccgcatgtctgtatcggagttgtctgcttctgggtgctaccataggcgtggctaaaaatagtgccttgggtcccaggcggctccgcgctagttggttagtaattacattggtctgcctgtttgtgggcatctatgcgatggtcaaactactgctgttctcagaagttcgcaggccaataagggacccttggttctgggccctcttcgtgtggacatatatctccctgggagcctccttcctcctctggtggttgctgtcgaccgtgaggcctggcacccaggcactggaacccggagctgccacagaagctgagggcttccccggttctggtagaccgcctccagaacaggcctccggggctacgctgcagaaactgttatcttatacaaagccagatgtggcttttcttgtcgcagcttcattcttcctgattgtggccgctctgggcgagacatttctgccttactataccggccgtgctatcgatgggattgtgatccagaagtcgatggaccagttttcaactgccgtcgtgatcgtgtgtctcctggcaatcgggtccagcttcgcggctgggatccggggtggtattttcaccctgatttttgctagactgaacattagactccgcaactgcctgtttagaagtctggtttcacaagagacatccttttttgacgaaaatcgcacgggtgatctcatctccagactaacatccgataccaccatggtcagtgatttggtgtcccaaaatataaacgtgtttctccggaataccgtgaaggtcacgggcgttgtagtgtttatgttctccttaagctggcagcttagtctggtcaccttcatgggtttccctataattatgatggtgtccaacatatacggcaagtattacaagagactgtccaaggaagtgcagaacgccctcgccagagcttctaatacggccgaggaaacgatttctgcaatgaagacagtgcggagcttcgctaatgaggaggaagaagccgaggtgtacctgagaaagctgcaacaggtgtacaagctcaatcgcaaggaagcagcagcgtacatgtactacgtctggggcagcggactgaccctcctggtggtgcaagtgtcaatcctttattatggaggacacctggtgattagcgggcagatgaccagtggcaacctgatcgcgttcattatctatgaattcgtacttggcgactgtatggaatctgtcggctctgtgtactctggactgatgcaaggcgtcggtgccgcagaaaaggtgtttgagtttatcgaccgccagccaactatggtgcacgacggctctcttgcacccgaccacctcgagggcagggtggatttcgagaatgtgacttttacgtaccggacaagacctcacactcaggttctgcagaacgtctcctttagtctcagtcccggaaaggtgaccgctttagtcgggccaagcggttcgggcaagtcttcttgcgtcaacatcttggagaatttctaccccctagagggcggtagagtcctgctggacggtaagcccatttccgcatacgatcacaagtatctgcaccgcgtcataagtttagtcagccaagagcccgtgctatttgctagatcaattacagataatatctcatacgggcttcccactgttcctttcgaaatggtcgtcgaggctgcacaaaaggccaacgctcacggctttatcatggagctgcaggacggctattcgaccgagaccggtgaaaagggtgcgcagctctccggtggccagaagcagcgggttgctatggcccgtgcccttgtaaggaatcctcccgtgcttatactggatgaagcaacaagcgcccttgatgctgagagcgagtacctcatatag

SEQ ID NO: 215334 - DNA, 2052 bp, synthetic construct
  misc_feature 1..2052: note = Description of Artificial Sequence: Synthetic coding sequence
  source 1..2052: mol_type = other DNA
atgcggctttggaaagccgtcgtggttaccctagcctttatgtctgtggacatatgcgtcactacagccatatacgtgttctcccacctagataggagtctgctcgaagatattcgtcactttaatatctttgattcggtgcttgacctgtgggctgcctgtctgtaccggagctgcctcttgcttggggctaccattggcgtggccaagaactctgccttaggtcctagaagactccgggctagttggctcgtgattacactggtgtgtctatttgtgggcatatacgccatggtcaaactgttgctgttcagcgaagtgaggaggcctatcagggacccctggttttgggctttgtttgtgtggacctacatttccctcggcgcatcttttctgctatggtggctgctgtcgacggtgagacctggaacccaggcccttgaaccgggagctgctaccgaggctgaaggattccctggatccgggagaccacctccagagcaggcaagcggggctacattgcagaagctgctatcctataccaagccagatgtcgcattcctggtcgccgctagctttttcctgatcgttgctgccctcggcgaaacattcttgccctattacacaggccgtgccatagacggaattgtgattcagaagagtatggatcaatttagcaccgcagttgtgattgtttgccttctggccattggttccagttttgctgccggaattcgcggaggtatctttacactgatcttcgcccgtctgaacatcagacttcggaattgcctgtttcgaagcctggtgagccaggaaacttccttctttgatgagaaccggacgggtgatctgatttcacgcctgacctccgatactacgatggtgagcgacctggtttcccagaatattaatgttttcctgagaaacacagtgaaggtgaccggcgtggtcgttttcatgttctctttatcatggcagctgagtctggtaacctttatgggttttcccattattatgatggtgagcaatatttatggaaaatactacaagcgcttatccaaagaggtacaaaacgcgctggcacgcgcttcaaacactgccgaagagaccattagtgccatgaaaacagtgagatccttcgcaaatgaagaagaggaggccgaagtgtacctccgaaagctccagcaagtgtataagttgaatcgcaaggaagccgctgcttacatgtattatgtttggggcagcgggctcacattactcgtggtccaggtgagtatcctttattatgggggacatcttgtgataagcgggcagatgaccagcggcaatttaattgcttttattatctatgagttcgtgctgggtgactgcatggagagcgtcggaagcgtttattccggtctcatgcagggcgtcggagccgcagagaaggtgttcgagtttattgaccggcagcccacaatggtgcacgacggttcccttgcaccagatcacctggaaggccgtgtagactttgagaacgtgacgtttacatatagaacacgtccccatactcaggtgctgcagaacgtgagctttagtctctcccccggaaaagtgacagccctcgtcgggccaagtggaagtggcaaatcttcctgcgtgaacatcctggagaatttctatcccctagagggcggacgcgtcctgttagacggaaaacctatttccgcttacgatcacaagtacctacatcgtgttataagcctggtgagccaggaaccggtcttgtttgcccgttcgattacggacaatattagctatgggctcccgaccgtcccatttgagatggtggtcgaggcagcccagaaagcaaacgcgcatggatttataatggaacttcaagacggatactctacagagactggggaaaagggagctcagctgtccggaggacagaaacagcgagtggcaatggccagggctctcgtgcgcaatcccccagtgcttattctcgacgaagccacttcggccctggacgccgaaagtgaatacctgtgtgccggttag

SEQ ID NO: 215335 - DNA, 300 bp, synthetic construct
  misc_feature 1..300: note = Description of Artificial Sequence: Synthetic coding sequence
  source 1..300: mol_type = other DNA
atggccgcaccagccgaaccttgcgccggacagggcgtctggaaccaaactgaacccgaacccgctgcaacctcactgcttagcctgtgctttttaaggactgctggagtgtgggtgcctccaatgtacctgtgggtcctggggcctatttacctgctgttcatccaccaccatggaagaggatatctcagaatgagccccctgtttaaggcaaaaatggtagctgcgatcccaggtagcctagagcctggcaacgttcggggaaggcagggtacaggatggaatttggtgaaaagctag

SEQ ID NO: 215336 - DNA, 372 bp, synthetic construct
  misc_feature 1..372: note = Description of Artificial Sequence: Synthetic coding sequence
  source 1..372: mol_type = other DNA
atgccttccgcaggaacgctgccctgggtccagggcatcatctgtaatgctaataacccctgcttccgttaccctactccaggcgaggcccctggcgtcgtgggtaatttcaacaagtcgatcgtcgccagactttttagtgacgccagacggctcctcctttactctcaaaaggacacttccatgaaggacatgcgcaaggtgctgaggaccttgcagcagatcaagaagagctcgtcaaatttaaagctgcaggattttctggtggataacgaaacattcagcgggtttctctaccacaacctctctctcccaaagtccaccgtggataagatgttgagggccgatgttatcctgcacaaggttagttag

SEQ ID NO: 215337 - DNA, 6785 bp, synthetic construct
  misc_feature 1..6785: note = Description of Artificial Sequence: Synthetic coding sequence
  source 1..6785: mol_type = other DNA
atggcctgttggccccagctgaggttacttctgtggaaaaaccttaccttccggaggagacagacatgccagctactgctcgaggtcgcttggccgctgttcatcttcctcatccttattagcgtgcgactctcctaccctccatacgaacagcacgagtgccattttccgaacaaggctatgccatctgctggaaccctgccctgggtacagggaatcatctgcaatgcaaacaatccatgctttcgttaccctaccccaggcgaggctcccggtgtggtcggaaattttaacaaatcgatcgtggcacgactcttttcagacgctcggcgactgttgctatatagccagaaggacacttccatgaaggacatgaggaaggtgctgaggaccctgcagcagattaaaaaatcaagtagtaatcttaaattacaagactttcttgtggacaacgaaactttttccggattcttataccataacctgagcctgccaaaaagcacggtagataagatgctgagagctgatgtcattctccacaaggtgttcctgcaaggctaccaactccatctaacctccttatgcaatggctctaagtccgaagaaatgatccagctcggggaccaggaagtgtccgaactgtgcggcctccctcgggagaagctcgcagccgcagaacgagtcctgcgcagtaacatggacatcctcaaaccaatcctgcggacacttaactccacatctccttttccatcaaaagaacttgcggaggccactaaaaccctgttgcattctcttggcaccctcgcacaggaactcttttctatgagatcatggagcgatatgcgccaggaagtgatgttcctgacaaacgtgaactcaagctcttcaagtacgcagatttatcaggccgttagccggatcgtttgcggacaccccgagggaggtggcctgaaaattaagtccttaaattggtacgaggataataattacaaagctctgtttggagggaatggcacagaagaagacgcggagactttctacgataactcaaccacgccatattgcaacgatctgatgaaaaacctggaatctagtccccttagccggattatttggaaggccctgaagcccctgttggtcggcaaaattctctacacgcctgacacacccgctactaggcaggtgatggccgaagtcaacaaaaccttccaagaactcgccgtgtttcatgatttagagggtatgtgggaagaattgtctccgaagatctggacgttcatggagaactctcaagaaatggacctcgtgaggatgctgctggacagtagggacaacgatcatttctgggagcagcaactggacggactggactggacagctcaggacatcgttgcatttctggccaagcatccagaagatgtacaaagctcaaatggcagcgtgtatacgtggagggaagcctttaacgagactaatcaggccattcgcaccatttctcgttttatggagtgcgtgaatctgaacaaacttgaacctattgcgacagaagtttggctgataaacaagtctatggagctgctggatgagagaaaattctgggctggcatcgtcttcactggcattaccccagggtctattgagctccctcaccacgttaagtataagatacgtatggacatcgacaacgttgagagaacaaataagatcaaggacggatactgggaccctggaccaagggcggacccatttgaagatatgagatacgtgtggggaggatttgcatatttgcaggatgtcgtggagcaggctataattcgtgtgcttacgggaacggagaaaaagacaggagtctatatgcagcagatgccttacccatgctatgtcgacgatatctttctgcgcgtgatgagccgtagcatgcctctcttcatgaccctcgcttggatctatagtgtggctgtgatcatcaaagggattgtttacgaaaaagaggctcgactcaaagagaccatgcggattatgggactggataatagtatactgtggttttcgtggtttattagctcactgattcccttgctggtaagcgctggactgctggtagtgatcctgaagttgggcaatttgttaccatacagtgaccctagcgtagtgtttgtgttcctctctgtgttcgccgtagtgacgattctacaatgtttcctgatcagcactttattctctcgagctaacctggccgcagcatgcgggggtatcatttattttactctttaccttccctatgtgctgtgtgtcgcctggcaggattacgtgggatttacactgaagatcttcgcttccctcttatctccagtcgctttcgggtttggctgcgaatacttcgccctgtttgaagaacaggggattggagttcagtgggataatttgttcgagtcacccgtagaagaggacggtttcaatctcactacctctgtctctatgatgctgttcgataccttcctgtacggagtaatgacttggtacattgaggcagtgtttcctggccagtatggcatcccgaggccctggtatttcccctgtaccaaatcctactggtttggcgaagaatcggacgaaaagtcacatcccggtagcaatcaaaagcgaatttccgaaatctgcatggaggaggaacccacacatctgaaactgggtgtgtctatacagaatctggtgaaagtgtaccgtgatggaatgaaggtggcggtcgatgggctggccctcaacttttacgaaggacaaatcacaagtttcctcggccataatggggcagggaaaaccacaaccatgtccattctgaccggcctgttccctcccacgtcaggcaccgcttatatcctggggaaggacattagaagcgagatgtccaccattcgccagaacctcggtgtctgccctcagcacaatgtactctttgacatgcttaccgtggaggagcatatctggttctacgctagactgaaggggctctccgagaagcacgttaaggcggaaatggagcaaatggccctggatgtgggcctgccttcctcaaaactaaagtctaaaacatcacagctgtcgggaggcatgcagcgtaagctgagtgttgcccttgcattcgtcggcggttcgaaagtcgtgatcttagacgagcccactgcgggtgtggacccctattcccgccgagggatctgggagttacttcttaaatacagacaagggcgtacaattatcctgagcacacatcacatggacgaggcagatgttctgggcgatcgcatcgccattatcagccatgggaagctctgctgcgtagggagttccctgttcctgaagaatcagctagggacagggtactacctgactctcgtaaagaaagacgttgaaagcagtctctcatcatgccggaactcctcaagcacagtatcctacctgaagaaggaggactctgtgagccagtccagctcggatgcaggcctggggtctgatcatgagtccgataccttgaccatcgacgtcagcgctatctctaacttaattcgaaaacatgtatcagaagccaggcttgtagaggatattggacatgagttgacctacgtcttgccctatgaagcagccaaggagggcgcttttgtagagcttttccacgagatcgacgaccgcctctctgacttagggataagcagttatggcatctcagagaccactctcgaggaaatttttttgaaggtagctgaggagtcaggggtggatgccgaaacttccgatggaacccttccagcaagacggaatagacgcgcttttggggataaacagagttgtctgcggcctttcacagaagacgacgccgcagaccctaacgatagtgatatcgatcctgaaagtcgggaaaccgatctcctgagcggaatggatgggaagggttcataccaggtgaagggatggaaactgacacagcagcagttcgttgccctgctatggaaacgtcttctgattgccagacgcagccgcaaggggtttttcgcccagattgtgctgcccgctgtattcgtttgtattgccctggtgttttcacttatagtgcccccttttggcaagtacccttcactggaactgcaaccctggatgtacaatgagcagtacacattcgtttccaatgatgcaccggaagacaccggcactcttgagcttctcaacgccctcacgaaggatcctggatttggcactagatgcatggagggcaatcctatcccagacaccccatgtcaggcaggggaggaagaatggacaacggcacccgtcccccaaacaatcatggacctgttccagaatggcaattggaccatgcagaacccatcccctgcgtgtcaatgcagctctgacaagattaagaagatgttacccgtatgccctcccggagccggagggctgccacccccacagcggaaacaaaacaccgcagatatcctacaggatctgaccggcaggaatatcagcgattatcttgttaaaacttatgtccaaattattgccaaatcgctcaagaacaaaatttgggtgaatgagtttagatatggcggtttctcgctcggcgtgagtaacacacaggctttacccccttcccaggaggtgaacgacgctatcaagcagatgaagaagcatctgaaattggctaaagattcatcagccgaccggtttctaaattctctgggacggttcatgaccggtcttgacaccaagaacaacgttaaagtctggtttaacaataaaggttggcatgccatatctagctttttgaacgtgataaataatgcaattctaagagccaatctccagaagggcgaaaatccatctcactacggcatcaccgcctttaatcatcccttaaatcttacgaagcaacagttatcagaggtcgcacttatgaccacgtccgtggacgtactagtttcaatctgtgtgatcttcgctatgtctttcgttcctgcttcatttgtggtgtttctgattcaagagcgcgtgagcaaagcaaaacacctgcaattcatcagtggcgtgaagcctgtgatctactggctcagcaattttgtgtgggacatgtgtaattatgtggtgcccgcaacacttgtcatcattattttcatttgcttccagcagaaatcgtatgtaagctccacaaacttgccagtacttgctctactcctgctcctctatgggtggtccattacccccctgatgtatcccgcttctttcgtgtttaaaataccctcaacagcgtacgtagtactcacaagcgttaaccttttcataggtattaacgggtccgtcgccacctttgttctcgagttattcactgacaataagctgaataatattaatgatattctcaagagtgtgttcctcatctttccacacttttgtctaggcagaggtctgatcgacatggtgaagaaccaggcaatggcggacgcactcgaaagattcggcgaaaatcgttttgtctccccattatcttgggacctggttggaagaaatcttttcgcaatggccgtggaaggcgttgttttttttctgatcacagtcctgatccagtaccgcttctttattcggcctcgcccagtgaacgcaaagctgagcccactgaacgacgaggacgaagatgtgcgcagggaacgccaacgcattctggatggtggcggacagaatgatattttggagattaaggaactgactaagatctaccggaggaagcgaaagcccgcagtagatcggatttgcgtgggaatcccacctggggagtgctttggtctcttgggagtgaatggagctggaaagagttctacctttaagatgctgaccggagacacaacggtgacaagaggtgacgccttcctcaacaaaaactcaatcctctcaaacatccacgaggtacatcagaacatgggctattgcccccagtttgacgccatcacagagctgctcacagggagggaacatgtggaattctttgctttgctaaggggtgtgcctgagaaggaggtaggcaaagtcggcgagtgggcgatcagaaagctcggcttggtgaagtacggagaaaagtacgccggaaactacagcgggggtaacaaaagaaaattgtctaccgccatggcccttataggaggaccgcctgttgtcttcctcgatgaaccaaccacggggatggaccctaaagcaaggcgatttctatggaattgtgctctgagtgtcgtgaaagaaggcagaagcgtcgtgctgacgtcccattccatggaggaatgcgaggcactttgcacccgcatggccatcatggtgaatggcagatttaggtgcctagggtcagttcagcatctgaagaacaggttcggagacggctatactattgtggtaagaattgcaggttccaaccccgatctcaagccagtgcaggattttttcggcttggcctttcctggctcagtgctgaaggagaagcacagaaatatgttgcaatatcaactgccaagcagcctgtccagtctggcaaggatcttctctattctgagccagtcaaagaagagacttcacattgaggactattctgtctcccagacgacgctggaccaggtgtttgtcaacttcgcaaaggatcagtctgacgacgaccatttgaaagatctcagtctacacaagaatcaaacagtcgtggacgtcgccgtgctcacatctttccttcaggacgagaaggttaaagagagctatgtcta

SEQ ID NO: 215338 - DNA, 1092 bp, synthetic construct
  misc_feature 1..1092: note = Description of Artificial Sequence: Synthetic coding sequence
  source 1..1092: mol_type = other DNA
atggcatgttggcctcagctccgccttctattatggaagaacctgaccttcaggcgtagacagacttgccagctgttgctggaagtagcatggcccctgtttatctttctcatactgatcagcgttagactgtcttaccctccctatgagcagcatgaatgccattttcctaacaaagccatgccctcagctggcacgctcccttgggtgcagggaatcatttgcaatgctaacaacccgtgctttagatatcctacccctggcgaggccccaggagtcgtgggcaattttaacaaatctattgtggctagactcttttccgacgccaggagactgctcctgtattctcagaaggacaccagtatgaaagatatgagaaaggtgttgcgaacgctgcagcaaattaaaaaaagctcctcaaatctgaagttacaggattttctggttgataatgagaccttctctgggtttctgtatcacaacctgtctctcccgaaatcaactgtggacaagatgctgagagccgacgtgattttacacaaggtgtttctacaaggatatcagctgcatttaactagtctctgtaacggaagcaaatctgaggagatgatccagctcggagaccaagaagtaagtgagctgtgcgggctgcctcgggagaagctcgcggcagctgaaagagtgctgcggagtaacatggacattctgaaaccaatcctcatggatgtcacctgtgatgatatcgcacacggccagttgactgttcctaggtctgctgctgttgccgctacaggcgacgccaagccgaacatgatgggacgggagaccctcttgtcgatatgtgccagcgtccccaaggttgagtttcacgagagacatattcttaagcacttctccttttgcgtttgcgtcagcgtgtcactctttcctgcaaagggtatagtgtccttcagctgggcctcttttcggatctgggtgctgtggaaagccgtgttttggcagcacggggagagcatggcggtctgggagggacaactcggtctggggctgaatatagcgttcgagtattttacatcaatcgatgtcgggtag

SEQ ID NO: 215339 - DNA, 4632 bp, synthetic construct
  misc_feature 1..4632: note = Description of Artificial Sequence: Synthetic coding sequence
  source 1..4632: mol_type = other DNA
atgaataaaatggccctcgccagcttcatgaaaggacggaccgtgataggcacccccgacgaggagaccatggacattgaattgccaaaaaagtatcacgagatggtcggggtcatcttctctgacacattctcctaccgattgaagttcaactggggatatcgcatcccagtgatcaaggagcattcagagtataccgagcactgctgggccatgcacggagagatcttttgctaccttgctaagtattggctgaagggctttgtggctttccaggcagccatcaatgccgcaattattgaggtaacaacaaaccattccgtgatggaagagctcacctccgtcatcggcatcaacatgaagatcccacctttcatctccaagggtgagatcatgaatgaatggttccactttacctgtttggtctcttttagctctttcatctattttgcgtcgcttaacgtagctagggaacgaggcaagtttaagaagttgatgacagttatgggactcagagagtctgccttttggctgtcttggggtctgacgtatatctgtttcatcttcattatgtcaatttttatggccctggtgatcacttccatcccaatcgtgttccatacgggctttatggtgatattcaccctctacagtttatatggcctgagcctgatagccctcgctttcctcatgagtgtgctgatcagaaaacccatgctggccggacttgcgggttttcttttcaccgtcttttggggctgtctcggatttacagtcctctacagacagttgcctttaagcctggggtgggtgctttccttactcagtccatttgcctttacagcgggtatggcacaaatcacccacctcgataactacttgtcaggagtcatcttccccgatccctcgggggacagctataagatgatcgccactttcttcattctcgcctttgatacactattctatctgatttttactctttattttgaacgtgttctgcccgataaggatgggcatggggattctccacttttctttctcaaatcctctttctggtctaaacaccagaacacccaccatgagattttcgagaacgaaatcaatcctgagcattcaagtgatgacagttttgagccagtgtcccccgagtttcacggcaaggaggccatccggattcggaatgtgatcaaagaatataatggaaaaacgggaaaagtggaggctctacagggcatcttcttcgacatttacgaaggtcagatcactgctatcttgggccataatggggcaggaaagtctaccctgctaaacatattaagcggcctgtcagtaagcacagaagggtctgccactatatacaatacgcaactctccgagatcacagatatggaggagatccggaagaacatcggtttctgtccccagtttaactttcaattcgatttcctgaccgtccgggaaaacttacgcgttttcgccaaaatcaaggggattcaaccaaaagaagtggagcaggaggtgaaacggatcataatggaattagatatgcaatctatacaggacattatcgctaaaaagctctcaggcggacagaaaagaaaactaactctcgggatagccatcttaggagaccctcaggtactcctgttagatgagcctaccgccggattggatcctttttctcgtcaccgtgtgtggtccctgctgaaggagcacaaggttgacaggcttattctgtttagtacccagtttatggatgaagcagatatactggcggaccggaaggttttccttagcaatggaaaacttaaatgtgccggaagcagtctgtttctcaaacgaaagtggggtattggctatcacctgagcctgcacagaaacgaaatgtgcgataccgaaaaaataacatctctcatcaagcagcacatcccagacgctaagctgacgacggaaagcgaggaaaaactggtctacagccttcccctggaaaagacaaataagttccctgatctgtacagtgacctcgataagtgcagcgaccaggggatccgtaactacgccgtcagtgttacttcactcaatgaggtgttcttgaacttagagggcaagagtgcgattgacgaacccgacttcgatataggcaagcaggaaaaaatccatgtgacacgcaatacaggcgatgagtctgagatggaacaggttctgtgctccctgcccgagacacgcaaagccgtctcatctgccgctctgtggcgcagacaaatttatgctgtcgcaactctgcggttcctgaaactcaggagggagaggagagctctgctgtgtctgctgctagtactcggtatagcctttattccgattattcttgagaaaattatgtataaagtcaccagggaaacacactgttgggagttctccccctctatgtatttcctgagcctggaacagatacccaagactccactgacatcactactcattgttaacaacacaggctccaatatcgaagacctggtgcactccttgaaatgtcaggacatcgttctggagatcgatgatttccgcaataggaacggaagcgatgacccttcatataatggagctatcatagtgtccggagatcaaaaggactacaggttcagcgtggcctgcaacaccaaaaaactgaactgtttcccagtgctgatgggcattgtgtctaacgctctcatgggcatcttcaactttaccgaacttatccaaatggagtcaacttcattttcccgcgacgatatcgtcctcgatctgggcttcatagacggcagtatctttctcctgcttataacaaactgcgtatccccatttattggaatgtcctcaatctctgactataagaaaaatgtgcaatctcaactgtggatctcaggtctatggcccagcgcctattggtgcggtcaagccctggttgacattcctttgtatttcctcatcctgttcagtatccacttgatttattattttatatttctgggattccaactgtcatgggagctcatgttcgtcttagttgtttgcatcattggatgtgctgtttctctcattttcttgacttatgttttgagttttattttcaggaaatggaggaaaaacaatggattttggagctttggcttttttatcattctgatctgtgtctctacgatcatggtgtcaacacaatacgaaaagcttaacctgatcctgtgcatgatattcattcctagcttcaccctgctgggatatgttatgttgctcatacagctggactttatgcgcaacctcgactcactggataaccggatcaatgaggtaaacaagaccattctgctcactacacttattccgtacttgcagagtgtcatttttctgttcgttattcgctgtttagaaatgaaatatggaaatgaaattatgaataaggacccggtgttcaggatctcccctagaagtagggagacgcacccgaaccctgaagaacccgaggaggaagacgaggacgtgcaggcagaaagggtgcaggctgcgaacgctctgaccgcaccgaaccttgaggaagagcccgttataactgctagttgtctgcacaaggaatactatgagacaaagaagagctgcttctctactcgcaagaaaaagatcgctatcaggaatgtgagcttttgtgtgaagaagggcgaagtcctgggcctcctaggacataatggagcaggcaagtccaccagcatcaagatgatcacaggatgtacaaagcctacggccggtgtcgtggtgttgcaaggttcacgggcttccgtgaggcagcaacacgataactccttgaagttcctcgggtattgccctcaggagaacagcctatggccgaaactgactatgaaggaacaccttgaactctatgcggctgtcaaaggcctcggtaaagaggatgcagcgctctcaataagcagacttgttgaggctctgaagttgcaggagcagttgaaggcgcctgtgaaaactctctcggaaggcattaagcgaaaactctgtttcgtcctcagcatcctagggaatccgtccgtggtgctcctcgatgaaccattcactggaatggatccggagggccaacagcagatgtggcagattctccaggcgactgtcaagaacaaggagcgcggaactctgctcacaacccactatatgagtgaagccgaggcggtgtgcgatcgaatggcaatgatggtgtcagggacactccgctgcatcggttcaatccagcacctcaagaataagttcggcagagactacctgctggagattaagatgaaagaaccaacccaggtggaggctctccacaccgagattttaaaacttttcccgcaggctgcctggcaggagcggtattctagcctgatggcctacaagctgcctgtggaggatgtgcacccattgtcacgcgctttctttaaactggaggctatgaagcagacttttaatttggaagagtacagcctgagccaagctacactagagcaggtcttcttagagctctgtaaagagcaagagctgggaaacgtggacgataagattgacactactgttgagtggaagctgctcccgcaagaggacccttag

SEQ ID NO: 215340 - DNA, 1401 bp, synthetic construct
  misc_feature 1..1401: note = Description of Artificial Sequence: Synthetic coding sequence
  source 1..1401: mol_type = other DNA
atgaacaagatggccctggcaagcttcatgaaaggacgaaccgttatcgggaccccagacgaagagaccatggacattgaactgcctaaaaagtaccatgaaatggtgggcgtaattttttcagatacattctcctatcgcctgaagtttaattgggggtacagaatccctgttatcaaggagcatagtgaatatacagaacattgctgggcaatgcacggcgaaattttctgctaccttgcaaagtactggcttaaaggctttgtggcctttcaggccgcaatcaatgctgcgatcatagaagtgacaaccaatcattctgtcatggaggagctgactagcgtgattggcatcaatatgaagattcctccctttatcagcaaaggcgagatcatgaatgagtggttccatttcacgtgcctggtcagcttttccagctttatatatttcgctagtctgaacgtcgctagggagagaggcaaatttaaaaagctgatgacagtgatggggttgcgcgaaagtgccttttggctctcatggggactgacttatatttgttttatatttatcatgtctatctttatggcattagtcattacctcaataccaatagtatttcacaccgggttcatggttatatttaccctctattccctttacggattgagtctcattgcgctggccttcttaatgtctgtcctgataagaaaacccatgctggccggactcgctggctttctcttcaccgtcttctggggctgcttgggtttcacagtgctgtacaggcagttgccactatcgctgggctgggtactgtccctcctatccccttttgcctttacagctggaatggcccaaatcactcacttagataattacctcagcggcgtgatcttccctgatccctccggagactcttataagatgattgccaccttctttattttggcatttgatacactgttttatctgatatttactctctactttgagcgcgttttgccagacaaagatggccatggcgatagtccacttttcttccttaagtcctcattctggtcaaaacatcaaaacactcaccatgagatatttgagaatgagatcaatcctgaacactcaagtgatgacagctttgaacctgtgtcccctgaatttcatggaaaggaggccattaggatcaggaatgttataaaagagtataacggcaagacgggtaaagtggaggctctacagggcattttctttgatatttacgaagggcagatcacggcaatactcggtcacaacggggcaggcaagtctactctcctcaacatactctcggggctgtctgtctccactgaggggaagaaaaattataatggtatccgtcacgccaaacactctaggcactactgctag

SEQ ID NO: 215341 - DNA, 279 bp, synthetic construct
  misc_feature 1..279: note = Description of Artificial Sequence: Synthetic coding sequence
  source 1..279: mol_type = other DNA
atgaataaaatggcgctcgcaagcttcatgaagggcagaaccgtgatcggtactcccgatgaagaaactatggacatcgagctgcccaagaaatatcacgagatggtgggcgtgatcttttctgatactttttcctaccgcctgaaattcaattggggttataggatccctgttataaaagaacactccgaatacaccggtcacaacaaatctttctgtaatgggggagttgacatcagttattggaataaatacgaagatacaacctttcatttctag

SEQ ID NO: 215342 - DNA, 1359 bp, synthetic construct
  misc_feature 1..1359: note = Description of Artificial Sequence: Synthetic coding sequence
  source 1..1359: mol_type = other DNA
atgaacaaaatggccctcgcctcatttatgaaggggaggactgtcattggtacccccgacgaggagactatggacattgagttgccaaaaaagtaccacgagatggttggagttatattctccgacaccttttcctatcgactcaagtttaattgggggtacaggatcccagtcattaaggaacattcagaatataccgagcactgttgggccatgcatggagaaatcttttgctatctggccaaatactggctaaaggggtttgtagcgttccaagccgctattaacgccgcaatcatcgaggtaacgaccaaccactccgtgatggaggagttaaccagcgtgatcgggatcaacatgaaaatcccacctttcatatcaaaaggtgaaattatgaacgagtggttccactttacttgcttggtgtcctttagctcattcatctactttgcctcgctgaatgtggcacgagaacgcggaaaattcaaaaagttaatgacagtgatgggcctgcgcgagtcggcattttggctgtcctggggcctgacgtatatctgttttatctttattatgtccattttcatggccttagtcatcacaagcatccccattgtgttccataccggcttcatggtcatcttcactctgtattccctctatggcctttctttgatagcattggccttcctgatgtccgtcttgatacgaaaaccaatgctagcaggtcttgctggatttctcttcacggttttctgggggtgtctgggatttaccgtgctgtacagacagcttccattgtctctggggtgggtactaagtctgctgagtccttttgcattcacagctggcatggcacaaattactcacctggataactatcttagcggggtgattttccccgatcccagcggagattcctacaagatgattgccacatttttcatcctggccttcgatacccttttctacctcatctttaccttgtacttcgaacgggttcttccggacaaggacggccacggcgacagcccactgtttttcttgaaatcaagtttttggtccaaacatcaaaatacccaccacgaaatcttcgagaacgaaatcaacccagaacattcctcagacgactccttcgagcctgtctccccagaatttcatggcaaggaggccattcggattcgaaatgtcatcaaagagtataacggaaagacaggaaaagttgaagcccttcagggctctgaagaacgattgtgccctgccgctcacaggctgcggtgtggtgaacggctgtgcccagcagctcatcacttaggttgcgaggagaggccctgtccggctgcaactccttcaggcaattag

SEQ ID NO: 215343 - DNA, 7788 bp, synthetic construct
  misc_feature 1..7788: note = Description of Artificial Sequence: Synthetic coding sequence
  source 1..7788: mol_type = other DNA
atggccagccttttccaccaactacagattttggtgtggaagaactggcttggggtgaagcgtcagcctctctggacgcttgtgctgatcttgtggccagtgataattttcataatcctcgctattaccagaactaagtttcctcctaccgctaagcccacctgttacctagccccaagaaatctgccttcaaccgggttctttccttttctgcagaccctcttatgtgacactgattctaagtgtaaagacactccctatggcccacaggaccttctgagaaggaaggggatagatgacgcactctttaaggactctgagatattaaggaaaagtagtaacctcgacaaagactccagtctcagcttccaaagtacccaggtgcctgagagaagacacgccagcctggctacggtctttccttcaccctcttcagacctggagatccctgggacatatacctttaacggcagccaggtgcttgctcggattctcggcttagagaagctgctgaaacagaatagcacatctgaagatatcaggagagaactgtgcgattcctactcaggctatattgtggacgatgccttcagctggacttttctggggagaaatgtgttcaataagttttgtctctcaaacatgacactgctggaaagttcacttcaggaactgaacaaacagttctctcagttgagctcagatcccaataatcagaaaatcgtttttcaggagattgtccgcatgcttagttttttctcccaggtgcaggagcagaaagcagtctggcagcttctctcctctttccccaacgttttccagaatgatacctcactctctaatctgttcgacgttctgcgaaaagcaaactcggtgttgctggtagttcagaaggtctacccaaggttcgccaccaatgaagggttccgaacgctccagaagagtgttaagcacctcctgtacactctggacagtcctgctcagggagatagcgacaacatcacccacgtgtggaacgaagatgacgggcaaacgttaagcccctctagtctcgctgcacaattgctcatcctggaaaatttcgaagacgccttactcaacatctcagcaaattcaccatacattccttacttggcatgcgtgcgtaacgttacagacagcctggcccgaggctctccggagaatctaagattactgcagtcaaccatccgtttcaaaaaatctttcctcaggaatggaagttatgaagactatttccccccagtgcctgaagtacttaagtctaagttatcccagctgcggaatttaacagagctactctgtgaatctgagacttttagtctgatagaaaagagctgccagctttctgatatgtcttttggttccctgtgcgaggaatccgaattcgacctgcaactgctcgaggcggcagaactcggaaccgagattgcggcttcacttttgtatcacgataatgttatctctaagaaagtcagagatctgctgactggagacccttccaaaatcaacctaaatatggaccagttcctggaacaggctctgcagatgaattaccttgaaaacattactcaattgatccccattattgaggccatgctccacgtgaataattcggccgacgcctctgagaagccaggacagctccttgagatgtttaagaacgtggaggaattgaaagaggacctgcgtagaacaactggcatgtccaaccgtacaattgataagcttctcgctatccccatccccgacaatcgggctgagatcatctcacaggtgttttggctccactcttgtgatacgaacattacaacaccaaagctagaggacgccatgaaggagttctgtaatctgtccctctcagagaggagtcggcagagctacctgataggattgactctgttacattacctgaatatttacaattttacatataaggtgtttttccctagaaaggaccagaagcctgtggagaagatgatggagctttttatcaggctcaaagaaatattaaatcagatggcgagcggtacacatcctctgcttgataagatgcgttcactcaagcaaatgcacctgccacgatccgtgcctcttacacaggctatgtatcgctccaacagaatgaatacacctcaaggcagctttagtaccatctcccaggctctatgcagtcaggggattaccacggaatatcttacagcgatgctacctagtagtcaacgacctaagggaaaccataccaaagattttctgacctataagctcactaaggagcaaattgccagtaaatatggcattccgatcaactctacacctttttgtttctcgctgtataaggatatcatcaatatgccagcaggtcctgtgatctgggctttccttaagcccatgctgttgggccgtatcctgtatgcgccttataaccccgtaactaaagctatcatggagaaatcaaatgtcacactgcgccagctcgctgaattacgggaaaaatcccaagagtggatggacaagtcaccactgttcatgaactctttccatttacttaatcaggctatcccgatgctgcagaacacacttcgaaacccattcgtgcaggttttcgttaaattttcagtaggactggacgcagtggagttactaaaacagatcgacgaactcgatattctgagactgaagctggagaataatatcgatatcatcgaccagctgaacacccttagcagtctgaccgtaaatattagctcctgcgtactatacgataggattcaggctgcaaaaaccatcgatgaaatggaacgcgaagctaagcgactctacaagtcaaacgaactcttcggttccgtgatttttaaattacccagcaaccgctcatggcataggggctatgattccggcaacgtgttcctgccacccgtgattaaatacacaatcaggatgagcctgaaaactgcacagaccacccggagtctccggaccaagatttgggcccctgggccacacaactcgccctctcataaccaaatttacgggagagcttttatttacctacaggactccattgaacgggcaattatcgagctccagaccggaaggaattcgcaggaaatcgccgtgcaggtgcaggcaattccctacccatgtttcatgaaggacaattttctgacatccgtcagttactcgctgcccattgtgctgatggtcgcgtgggtggtgtttatcgccgctttcgtgaagaagcttgtgtacgagaaagatctcaggcttcacgagtatatgaagatgatgggcgtgaacagctgttcacacttcttcgcttggctgatcgagtcagtcggtttcttattggtgactatagtcatactgatcattattctcaaattcggcaatatactacctaaaaccaatggattcatcctgtttctgtacttcagcgattattcattcagtgtgatagctatgagctacctgattagcgtattttttaataacacaaatatagctgccctcatcggctccttgatctacattattgctttcttcccgttcattgtcttagttactgtggagaacgaattatcttacgtcttaaaggttttcatgtcactactgagcccaacggctttttcctatgctagccaatatatcgccagatacgaggagcaaggcatcggtctccagtgggaaaatatgtacacaagcccagtacaggacgacactacgtcatttgggtggctctgctgcttaatattggcagacagcttcatctatttcctcattgcgtggtacgtgcgaaacgtgtttcccggaacatacggcatggccgctccatggtattttccaattctgccctcctattggaaggaacgtttcggatgcgcggaggtgaagccagaaaagagcaacggtctgatgttcaccaacatcatgatgcagaatacgaatcctagcgcctctcccgaatatatgttttcctctaacatcgaacctgagcctaaggacctcactgtgggcgtggcccttcatggcgtgacaaaaatttatggttcaaaggttgcggtggacaatttgaatctcaacttctatgagggacacatcacctcccttttggggccaaacggtgccggaaaaacaacaacaatttcaatgttaacaggcttgtttggcgcaagtgctgggaccatatttgtttatggaaaagacattaagacagatctgcacacagttagaaagaacatgggggtctgcatgcagcacgacgtgctgttttcttacctgaccactaaagaacatctgctcctttacgggagtatcaaggtgcctcattggactaagaagcaactgcacgaggaggtgaagcggaccctaaaggacaccggtttatatagccaccgccataagagggtgggcaccttgagcgggggtatgaagcgcaaactgtctatcagcatcgcgctcattggaggctctcgagtggtgatattggatgaaccatccactggcgtggatccctgcagcagaagatctatatgggatgtgatttccaaaaataagacagcgagaacaatcatattgtctacccaccatctcgacgaggctgaggttctgtcggatcggattgcgttcctggagcagggaggccttcggtgttgtggctcccctttctacctcaaagaggcatttggggatgggtaccacctgacactaaccaagaagaaatcccccaatctgaacgcaaacgcagtgtgtgacactatggcagtgactgccatgattcagtcacacctgcccgaggcttacctgaaggaggatattggcggtgagctagtttatgtcctgcctcccttttctaccaaggttagcggcgcttatcttagcttgctgcgggcactggataatggcatgggtgacctgaacatcggatgttatggcatttcagacaccacagtggaagaagttttcctcaatctcaccaaggaatcacagaaaaactcagccatgtcactggaacatctgacacagaaaaagatagggaattctaacgctaatggcatctcgacccccgacgatctgtcagttagcagcagcaatttcaccgaccgcgacgacaaaatcttgacacgtggggagcggctggatgggtttggtttactcctgaagaagattatggccattttgatcaagcgattccaccacacgagacggaattggaagggcctgattgcacaggtcattctgcccatcgtcttcgttactactgccatggggctcggcactctgcgtaactccagcaattcctaccctgagatccaaatctctcccagcctctatggtacctctgaacagaccgctttctacgcaaattaccacccctctactgaagctttagtttctgccatgtgggactttcctggcatcgacaacatgtgtctgaacacttccgacttgcagtgtttaaacaaggacagcctcgaaaagtggaatacaagcggagaacccataacaaactttggcgtctgctcctgcagcgaaaacgtgcaggagtgtccaaaatttaactacagccccccacataggagaacctattcgagccaagtgatttacaacctgactggtcaacgggtggagaactatctgatttccacagcaaacgaattcgtccaaaagcggtacgggggttggagcttcgggctccctctcactaaagaccttcgctttgatatcacgggggtgcccgcaaatcggaccctggctaaggtatggtacgatcccgaggggtatcactcattacctgcttatctgaactcactaaacaactttctgctccgtgtgaatatgagtaaatacgacgcggctagacatgggattatcatgtacagccacccttatcccggtgtacaggatcaggaacaggcaacaatctcttccctgattgatatactcgtcgccctctccatcctgatggggtactctgtaaccacagcatcgttcgtgacctacgtcgttcgcgagcatcagacaaaagctaaacaactccagcatatttctgggatcggcgtcacctgctactgggtaacgaacttcatctacgacatggtcttctatctcgtccccgtggctttctccatcggcatcattgctatcttcaagttgcccgctttctatagtgaaaataacctgggcgcagtgtccttgttgctattactattcggctatgctaccttttcttggatgtacttgttggccggactatttcacgagactggtatggctttcatcacatatgtctgtgtgaacctctttttcgggatcaacagcatcgtcagcttatccgtggtatacttcctttccaaggagaagcccaatgatcccacattagagctgatctccgagaccctcaaacgcatctttttaatttttcctcaattttgttttgggtatggcctcatagagctgagccagcagcagtcagtccttgattttttgaaggcttacggagtagaatatccaaatgaaacgttcgaaatgaacaagttaggcgctatgttcgtcgccctggtatcccagggaaccatgtttttttctctgaggctattgataaatgagagcttaataaaaaagctcaggctctttttccggaaatttaactcctcccacgtacgggagaccatcgacgaggacgaggatgtacgcgcagaacggctgcgggtggagagcggagccgctgagttcgatctggtgcagctctattgccttacaaaaacctatcagctgatacataaaaaaataattgcagtgaataatattagtattgggatcccagctggggaatgtttcggacttcttggggtgaatggagccggtaagacaactattttcaagatgcttacgggcgacatcataccttcctctggaaatattttaattagaaacaagacaggcagcctggggcacgtggattctcactcaagcttggtcggctattgcccacaggaagatgccctcgacgatctcgtcactgttgaggagcacttgtatttttacgccagagtccatggcatcccggagaaagacattaaggagactgtgcacaagctgttgcgacgattacatctaatgcctttcaaggatcgtgccacgtccatgtgttcctatggcacgaaacgcaagctgagtactgctcttgcactgataggcaagccatcgattctgctgcttgacgagccctcttctggaatggatcccaagtctaagcgccatctgtggaagataatatctgaggaagtgcagaacaagtgttctgttatcctcacatcccactctatggaggaatgtgaggccctgtgtacacgcctggctatcatggtgaacgggaagttccagtgcatcggctccctccagcacatcaaaagtcgcttcggccgaggcttcactgtgaaggtccacctcaaaaataacaaagtcaccatggagaccctgactaaattcatgcagttgcacttccccaagacctatctcaaggaccagcatttaagcatgcttgaatatcacgtgccagtaaccgctgggggtgtggcaaatatctttgacctgctggaaaccaataagacggctctcaacatcacaaatttcctggtgagtcagaccactctggaagaggtgttcatcaatttcgccaaggatcagaagtcttatgagactgccgacacttcctcacagggttccacaatcagcgtcgatagccaagacgaccagatggaatcctac

SEQ ID NO: 215344 - DNA, 6833 bp, synthetic construct
  misc_feature 1..6833: note = Description of Artificial Sequence: Synthetic coding sequence
  source 1..6833: mol_type = other DNA
atgttcacatatatcaaaattatcacctctggagacagcgataacatcacgcacgtatggaacgaggatgatggccagacattgagtccctctagtctggcagcccagctgcttatcctggagaatttcgaggatgccctgcttaacatatccgcaaattccccttacataccctacctcgcctgtgtgcgaaatgtgaccgatagtctggcgagaggctctcccgagaacctgcggctgctgcagtccacaatccgattcaagaaatcttttctcaggaatggaagctatgaagactacttccccccagtgcccgaggttctgaaaagtaagctcagccagctgagaaacttgacagaactcttgtgcgagagcgagacctttagccttatcgagaagtcctgtcagctgagcgacatgagcttcggcagcctgtgcgaggaaagcgagttcgatttacaactgcttgaggcagctgaattgggcactgagattgctgcgtccctcctgtaccacgacaatgtgatcagcaaaaaggtgcgtgaccttttaaccggcgacccctctaagataaatctcaacatggaccagtttctcgagcaagcattgcaaatgaattacctcgagaacattacgcagctgatcccaattatagaagccatgttacacgtgaataattcggccgacgctagcgagaaaccgggacagctactggagatgttcaagaatgttgaggaactgaaggaggacctgcgcaggaccacaggaatgtccaataggactatcgacaagctgctagctattccgatacccgacaaccgtgccgaaattatctcccaggtcttctggcttcactcgtgcgacaccaatatcactactccaaagctggaggacgctatgaaagaattttgcaatctgagcctaagtgagaggagtagacagagctatctcatcgggctgaccctgttgcactacttaaatatttacaacttcacatacaaggtgttctttccgagaaaagaccagaagccagtggagaaaatgatggagttgttcattcgcctcaaggagatcctgaatcaaatggcttccgggactcacccactcttagacaaaatgaggtctctcaagcaaatgcatctccccagatcagtccctctgacacaggctatgtaccgcagcaatagaatgaatactccacaggggtcttttagtacaatcagtcaggccctttgttcccaggggatcaccaccgagtatttaactgctatgctgccatcctcccagagacctaaagggaaccatactaaagatttcctgacttataagctgactaaagaacaaatcgcctcgaagtacggcatccccattaacagcactccgttttgtttcagtttgtataaagacatcatcaacatgccagcagggcctgtgatctgggcatttctcaagcccatgcttttgggtcgtattctgtatgcaccctataatcccgtcacaaaggccataatggagaagagcaacgtgaccctgcggcagctggctgaattgcgcgagaagtcccaggagtggatggacaaatcgcccctcttcatgaacagctttcatctgctcaatcaggcaatccccatgctccaaaatacgctcagaaacccctttgtacaagtcttcgtgaagttcagcgtgggacttgatgcagtagagctgcttaagcagattgacgagctggacattctgaggctgaaattagagaataacatcgacatcattgatcagctgaacacattgtcgtctctgactgtaaacataagtagctgcgttctgtacgacaggattcaggccgctaagacgatcgacgaaatggagcgggaagcaaagaggctgtataagtccaatgaactcttcgggagcgtgatatttaagctgccctctaatcgctcatggcatcgaggctatgattccggcaatgtcttcctgccccctgtcatcaagtacactatccgcatgtctcttaagactgcccagacgacccgaagtctgagaacgaagatttgggcacccggaccgcacaactcacccagccataaccaaatttacgggagagccttcatttacctgcaagacagtatagaacgcgctattatcgagctccagaccggaaggaactctcaggagatcgctgtgcaggtacaggccatcccctatccctgttttatgaaagacaatttcctgacaagcgtctcctattctcttccaatagtgctgatggttgcctgggtcgtattcattgccgcattcgtcaagaaacttgtctatgaaaaagatttacgcctccacgagtacatgaagatgatgggcgtgaactcatgttcccatttcttcgcctggttgattgaaagtgtcggattccttctggtgactatagtgatcctgatcataatcctgaaattcggaaatatcctccctaagacgaacggtttcatcctgttcctgtacttctcagattactcttttagcgtgatcgcaatgtcctacctcatcagtgtcttctttaacaatactaatatagctgcactgataggctccttgatctatatcattgctttttttcccttcattgtactggttactgtcgagaatgagctctcctacgtgctgaaagtgtttatgtctttactctctcccaccgcctttagttacgcctcgcaatatattgcacgctatgaagaacagggaatcggcttgcagtgggaaaatatgtatacatcccccgtgcaggatgacacaacatcctttgggtggctgtgctgcctcattctggccgattcattcatctatttcctgatcgcctggtacgtgaggaatgtgtttcccggtacgtacggaatggcggctccttggtatttccccatcctgccctcctattggaaagagagatttgggtgtgccgaagtaaagcccgaaaaatccaacggccttatgtttacaaacataatgatgcaaaacaccaaccctagcgcttcccccgagtacatgtttagtagcaatatagagcctgagccaaaggatctaaccgtgggtgtagcgctgcacggcgtcacgaagatctacggatcgaaggtggccgtggataacttaaacctgaatttttacgaaggtcacatcacctcgctgctgggacccaatggcgctggtaagactactactatctctatgctaactggactgttcggcgcatctgctggcaccatatttgtctatggtaaggatatcaagaccgacctgcatacagttcgcaagaatatgggcgtgtgcatgcaacatgatgtgctgttttcatatctgacgaccaaggaacacctcctgctctacggaagtataaaggtgccccactggaccaagaagcagttgcacgaagaggtgaagcgaacgctgaaagataccgggctgtactcccacagacataaacgcgtgggcacattgtccgggggaatgaagcgcaagctgagtatttcaattgctctcattggcggtagtcgcgtggtcatcctggatgaacccagtacaggggtggatccatgctcgcggcgatctatttgggacgtgataagcaaaaacaagaccgctagaactatcattttgagtacccaccatctcgatgaagccgaagtgctatccgatagaatcgccttcttagagcagggcggtctccgttgctgtgggagtcctttctaccttaaggaagccttcggagatggttaccatctcacactcacaaagaaaaagagccccaacctcaatgcaaacgctgtctgtgacacaatggccgtcacagcaatgattcagtctcatttacctgaggcctatctcaaggaagacataggaggtgagctggtgtatgtattgcccccttttagcactaaagtttcgggcgcatacctgagcctgctgagggcactggataatgggatgggtgatttaaacattggctgctatggaatatccgacactaccgtcgaggaagtgtttctgaatcttaccaaggagtcacaaaagaattccgccatgtcactggaacacctgacccaaaagaagatcggaaactcaaacgcaaatggcatatcgacacctgacgatttgtccgtcagctctagcaactttactgacagggacgacaagattctcacacggggtgaacgcctggacggcttcgggcttctcctcaagaagattatggctatcctgattaaaagatttcatcatacaagacgaaactggaaggggctgattgcccaggtcatcttaccaattgtctttgttactaccgccatggggttaggcacgctaagaaactcgtccaactcctatcctgaaatccagatctcgccctccctgtacgggacttctgagcagacggcattttacgccaattatcatccgtctacagaagccctggtgagtgccatgtgggacttccccggaatcgacaacatgtgcttgaacacgagcgacctacagtgtttgaataaggactctctggagaaatggaacacgtccggggagccgatcaccaactttggagtctgttcctgctcagagaacgtgcaggaatgcccaaagttcaattatagtcctccccaccggagaacctattccagccaggtgatctacaacctgaccgggcagcgagtggagaactatctgatctctaccgccaatgagttcgtgcaaaagagatacggcggatggtcttttggcctgcccctgacaaaagatcttcggttcgacatcaccggagtacccgcaaatcgcacactggccaaggtgtggtacgacccagaagggtaccactcattacctgcctacctgaatagcttgaacaacttcctgctgagagtgaacatgagcaaatacgatgccgctcgtcacggaataataatgtattcacatccatatcccggagtgcaggaccaagagcaggccactataagcagtctcatcgatatactagtagctctctccatcttgatggggtactctgtgaccacagccagcttcgtgacctatgtagtgcgcgaacaccagaccaaagcaaagcagttgcaacatattagtggaataggggtcacttgctattgggtaacaaattttatatacgatatggttttttatctggtgcctgttgcattttctattggaattatcgccatcttcaaacttccggctttctatagcgagaataatctcggggctgtcagtctgttgctccttctgttcggttatgcgaccttcagttggatgtatttacttgccggtctcttccacgagaccggtatggccttcatcacatacgtgtgcgttaatctcttcttcggcattaatagtatcgtctccttgtcagtggtctactttttgagcaaagagaaacctaacgacccgaccttggaactgataagcgaaacactcaagagaattttcttgattttcccacagttttgtttcggatacggattaattgaactttctcaacagcaatctgttctcgattttctaaaggcctacggtgtcgaatacccgaacgagaccttcgagatgaacaaactgggtgccatgttcgtggccctggtaagccagggaactatgttttttagcctccgactgttgatcaatgaatcgctcattaagaagctgaggctgtttttccgtaagttcaattcctcgcacgttcgggagacaatagatgaggatgaggacgttcgcgcagagaggttaagagttgaatctggagccgctgaattcgacctggtccagttgtattgtctgaccaagacatatcagttaatccataaaaagatcatcgccgttaataacatatcgattggaattcccgctggagagtgcttcgggctcctaggagtgaacggggcagggaagacaaccattttcaaaatgctcaccggcgacattatccccagtagcggaaatatcttaatccgaaacaagaccggtagtctgggccatgtagacagccattcctctctggtgggttactgtccacaggaggatgccctggatgatcttgtcacggtggaagagcatctttatttttacgcaagggtacatggcattcctgagaaggacattaaggagaccgtgcataagctcttgcgaaggctgcacttgatgccttttaaggacagggctacttcaatgtgttcttacggtaccaagaggaagctgtctaccgccttggccttgatcggcaagcccagcattcttctcctagacgaaccaagttctggaatggatcccaaatcaaaaagacatctgtggaagataataagtgaggaagtgcaaaataagtgctctgttatcttgacgtctcatagcatggaggaatgtgaagccctctgtacaagactggccattatggtcaacggcaaatttcagtgtattggctcacttcagcacatcaagtcccgcttcgggagaggtttcaccgttaaagtgcacctcaaaaataataaagtgactatggaaacactcactaagtttatgcagctgcattttccaaagacctatctgaaggatcagcatctctcgatgttagagtaccacgttcctgtcacagcaggaggggtagcaaacatttttgatttactggagaccaataagacggccctcaatatcaccaactttcttgtgagtcagaccacactcgaggaggtgttcattaactttgccaaggaccagaaaagttacgagactgcggacactagctcccaagggagcacaatcagtgtggatagccaggatgatcaaatggagtcata

SEQ ID NO: 215345 - DNA, 15177 bp, synthetic construct
  misc_feature 1..15177: note = Description of Artificial Sequence: Synthetic coding sequence
  source 1..15177: mol_type = other DNA
atggggcacgcaggatgccagttcaaggccttactctggaagaactggctatgtcgactgcggaatccagttctgttccttgcagaattcttctggccctgcatcctgttcgtgatcctgaccgtgcttcggttccaggagcctccaaggtacagagacatatgttacttacaacctcgcgacctaccctcttgtggggttataccctttgtgcagagcctgttgtgcaacaccgggtcccgctgccgcaatttctcgtacgagggatccatggagcatcattttagactgtcccggtttcagaccgccgctgatcctaagaaggtaaataatctggcttttctgaaggagatacaggaccttgctgaggaaatccatgggatgatggacaaggccaaaaatcttaagagattatgggttgagcggtccaatactcccgatagcagttacggatcatcattctttacaatggatctcaataagaccgaggaagttatcctgaaactcgagagcctgcaccagcagcctcacatctgggatttcctattattgctcccccgactccacaccagccacgaccacgttgaggatgggatggatgtcgccgttaacctgttgcagactattttaaacagtctcattagtctggaggacctcgactggctccctctcaatcaaaccttttctcaggtgtccgaacttgtgctgaacgtgaccatcagtactctaacctttctacagcagcatggggtggcagtgaccgaacccgtataccacctctccatgcagaatatagtatgggatccgcagaaagttcagtacgacctgaagagccaattcggtttcgatgatctgcacactgaacagattctaaactctagcgccgaattaaaagagatccctactgataccagtttagaaaaaatggtgtgctccgtactgtccagtacctctgaagacgaagccgaaaagtggggtcacgtcggcggatgccaccctaaatggtctgaagcaaagaactaccttgtgcatgcagtatcttggctcagggtgtatcagcaggttttcgttcagtggcagcaaggaagccttctgcagaagaccctgactggtatggggcacagcctggaggctttacgcaaccagtttgaggaagagtcgaagccatggaaggtagtcgaggcccttcacactgccctgctccttctgaacgactccttgtccgcggacgggccaaaagataaccatacatttcccaagatactgcaacatctgtggaaactccagtcgctgcttcagaatctcccccagtggccggcactgaaacgattccttcagctggatggcgctctgcgcaacgccattgctcaaaatctccacttcgtgcaggaagttctgatttgtctggagacctctgctaatgatttcaagtggttcgagcttaaccagctaaaactcgaaaaggacgtttttttttgggagctgaaacagatgctggccaagaatgctgtgtgtcccaatggtaggttcagtgagaaggaggtgttcctgccacccggaaactcctcaatctgggggggacttcaaggactactgtgttattgcaattcaagcgagacttcagtgctgaataaactgcttggctccgtcgaggatgccgatcgcattctccaggaagtcattacatggcataagaatatgtccgtacttattcctgaagagtacctggattggcaggagctggaaatgcaacttagtgaggctagtctgagttgcacacggctgttcctcctgctcggtgcagatccttcacccgagaatgacgtcttttccagcgactgcaaacatcagctggtatccacggttatctttcacactctcgaaaaaactcagttttttctggaacaggcatattattggaaggcatttaaaaagttcatccgaaaaacttgcgaggtggcacagtatgtgaatatgcaggagtcctttcagaatagactcctggcatttcctgaagaaagcccatgcttcgaagaaaacatggattggaaaatgatcagcgataattacttccagttcctgaacaatctcctaaagtcccctacagctagcatttctagggcactgaattttacaaaacacttgctcatgatggagaaaaaactgcacactctggaggatgagcagatgaattttctgttgagttttgtggagtttttcgagaagcttctgcttccaaacctcttcgatagctctatagttccgtccttccacagtctgccatctctgacagaggacatcctcaatatatcttccctttggactaaccacctgaagagtcttaagcgcgatccatctgcaacggacgctcagaagctgctggagttcggaaatgaggtcatatggaagatgcagactctggggtcccactggattagaaaagaacctaagaaccttctgcgttttattgaactcattttgttcgagataaacccaaaattgctagagttgtgggcatatggcatatcaaaaggaaagcgggctaaactcgagaatttcttcacactgctgaatttttccgtgccagaaaacgagattttaagtacatcattcaatttctcacagctcttccactccgactggcccaagtcacctgccatgaatatagacttcgtgcgactgagcgaggcgattatcaccagcctgcatgagttcggattcttagagcaagaacagatctcagaggcgttgaatactgtctatgccatcagaaatgcttcagacctgttttcagccctctctgagccacaaaaacaggaagtagataagatactcactcatattcacctaaacgtcttccaggacaaagacagtgctttgttacttcagatctatagctccttctatcgatatatttatgaactgctgaatatccagtctagaggatcatcactaaccttcctgactcagatatctaaacacatactggacattatcaagcagtttaattttcagaacatctccaaagcgtttgcctttctattcaagacagcagaagttttaggtggaattagcaacgtgtcgtactgccagcagttactgagcatctttaattttctagagctgcaagcacagagcttcatgagtaccgagggacaggaattagaggtgatccacacaacacttaccggtctaaaacaactgctgatcatcgatgaagatttcagaattagcctgttccagtacatgagtcagttcttcaatagttctgtcgaagatttacttgacaacaaatgcctgatctccgataataagcacatcagcagcgttaactactctacctcggaagagagctccttcgtgtttcctttggctcagatcttttctaatttgagtgccaatgtgtctgtgttcaacaaattcatgagcatccattgcacagtgagttggctgcaaatgtggaccgagatatgggagacaatctcacagttattcaagttcgatatgaacgtctttacatccctgcatcacgggtttacgcagctattggacgaattggaggacgatgtgaaagtttccaaatcctgtcaggggatacttcccacgcacaatgtggcccgactgattctaaacctcttcaagaatgtgacacaggctaacgacttccataattgggaagactttttggatctgcgagatttcctagttgccctaggcaatgcccttgtctccgtgaagaagctgaacctcgagcaagtcgagaaatccctattcacaatggaggctgccctgcatcaactcaaaacatttcctttcaatgagtctacctctagggaatttttgaattctcttttagaggtgtttatcgaatttagtagtacttctgaatatattgtgcggaacctggacagtattaatgacttcttgagtaacaacctgaccaactacggagaaaagtttgaaaatatcataaccgagctccgggaggctatcgtattcctgagaaatgtgagccacgaccgcgaccttttcagctgtgccgacattttccagaatgtcaccgagtgtatacttgaggatggctttctgtacgtgaacacctctcagcgtatgctccgtatactcgataccctcaattcaactttttcaagcgagaatacaatctcaagtttgaaagggtgtatagtatggctcgacgttataaaccacctttacctcctttccaactcttcattctcacaggggcatctgcagaatattttggggaactttcgggacattgaaaataagatgaattccattctgaagatcgtgacgtgggttctcaatatcaaaaagcccttgtgcagctccaacggatcccacattaactgcgtgaacatctacctgaaagacgtaacggatttcctgaacatcgtcctcactacggtgtttgaaaaagagaagaagcccaagttcgagatattactcgctctcctcaacgatagcactaagcaggtgcgtatgagtattaacaatttaaccactgattttgactttgcttcccagtcgaattggcggtatttcacagaactaatcttgagaccaattgaaatgagtgacgaaattcccaaccagtttcagaacatctggctccatctgatcacactgggtaaagagtttcagaaactggtcaagggcatctattttaatatcttggaaaataattcgagttctaaaaccgaaaatttgctcaatatcttcgccacctctcccaaagaaaaggatgtgaattccgttggcaattccatctatcatttggccagctatttggcctttagtctgagccacgatctgcagaactcaccaaaaattatcatttcaccggagattatgaaagccaccggcctcggaatccagctcatccgagatgtgtttaactcgctcatgcctgtcgtccatcacacaagtccgcaaaacgccggatatatgcaggccctcaagaaagtgacatcagtgatgcgcacgctgaagaaggcagacattgatctgcttgtggatcagctggagcaggtgagcgtgaacctaatggattttttcaagaacatctcttctgtgggcacgggtaatctcgtagtcaatctgcttgtagggcttatggagaaattcgccgactcaagccactcctggaacgtcaatcatctcctgcagctcagccgcttgtttcctaaggacgtggtagatgccgtgatcgatgtctattacgtgctgcctcacgctgtgaggctgttacagggagtacccggaaaaaatataacagaaggactgaaagatgtctatagctttaccttacttcacggtattacgatcagcaatatcacaaaggaggatttcgccattgtgataaagattctgctcgatactatcgagctggtgagcgacaaacccgatatcatttccgaagcccttgcatgtttcccagtggtttggtgttggaatcatacaaattccggttttagacagaattccaagatcgatccttgcaatgttcacgggctcatgtccagttccttttacgggaaagtggccagcatcctggatcacttccacttatcacctcaaggagaagacagtccatgctcaaacgaatcttccaggatggaaatcactcggaaggtggtgtgtattatccacgaactggttgattggaattccattcttcttgagctgagtgaggtgtttcatgtgaacatttccctcgtgaagacagtccagaagttctggcacaaaatcctcccctttgtaccaccatctatcaaccagacaagggactctatctccgagctctgtccatcagggtctatcaaacaagtggcccttcagatcatcgagaagttgaaaaacgtcaacttcaccaaagtcaccagtggcgaaaatatcctggataaactctcctcactcaataagattctgaatatcaatgaggacacagaaacctctgttcagaacattatcagctccaatcttgagaggactgtccagttgataagcgaggattggagtctggagaagtccacccataacctgctctccctcttcatgatgctacagaacgccaatgtgaccggttcttcattagaggccctctcatcatttattgaaaaatccgagacaccctacaacttcgaagagctttggcccaagtttcaacagattatgaaagacctcacgcaggacttccggatcagacatctgctgtctgagatgaataaaggcattaaatccatcaacagtatggccctccagaagataaccctgcaattcgcccactttctagaaatcttagatagcccgtcccttaagactctcgagattatcgaggactttctcctggtgactaaaaactggctgcaggagtacgccaatgaagattattcacgcatgatcgaaaccttgttcatacccgtaaccaatgagtcttcgaccgaggacattgctctgttggcgaaagctattgcgactttttggggatccctcaagaacatatctagggcagggaacttcgatgttgctttcctgacccacctgctgaaccaggaacagctgactaacttttctgtcgtgcagttactgtttgagaacatcctgatcaaccttattaacaatctggcaggaaactcccaggaagcagcgtggaacctgaatgacaccgacctgcagattatgaactttatcaatctgatcctgaaccacatgcagagcgagacctcgagaaagactgtcctgagcctgcggtcaatagtcgacttcactgaacagttccttaagacgttcttctcactctttcttaaggaggattccgagaacaagatctctctcctactcaagtatttccataaggacgtcatagccgagatgagcttcgtgcctaaagataaaatattggagattctgaaactggaccagttcttaacgctgatgattcaggatcgcctgatgaatattttttcctctctcaaggaaacaatctatcacctgatgaagagttcttttattcttgataatggtgagttttacttcgacacccatcagggtctaaagttcatgcaggacttgtttaacgccctcctgagagagacatctatgaaaaataaaaccgaaaataacatcgattttttcaccgtcgtgagtcagctgttctttcatgtgaataaatcagaagacctctttaagctgaatcaggatctgggaagcgctttgcatctcgtccgggagtgttctactgagatggcgaggctgctggacacgattctccattcccctaacaaggacttctatgcactataccccacactccaggaggttattctcgcaaatctgacagatctcttgttttttattaataattcgtttcccctacgaaatcgcgctacgctggaaatcacgaagcgtctcgtgggggcaatctcccgtgcttctgaggagtctcacgttttgaagcccctgttggagatgagtggcacactggtgatgctgcttaatgactcagcggacctacgtgacttggctacttccatggattctatcgtgaagttacttaaactggtaaagaaagtgtccggaaagatgtcaaccgtgtttaagacacacttcatttctaataccaaggactccgtgaagttcttcgacacgttgtactcaataatgcagcaatccgtgcaaaacctcgtcaaggaaattgccacactgaagaaaatcgaccactttaccttcgaaaaaatcaatgacctcttggttcctttcctcgacctagcttttgaaatgatcggcgtggaaccgtatatttctagcaactccgacattttttcaatgagccctagtatcctcagttacatgaatcaaagcaaagattttagtgatatcctggaggaaatcgctgaatttttgaccagtgttaaaatgaatttagaagatatgagatccctggctgtcgccttcaacaacgaaacgcaaactttcagtatggactcggtcaatctgcgggaagaaatcctgggatgtttggtgcctatcaacaacatcaccaatcagatggactttttgtatcctaacccaatctcgactcatagtggcccacaggatatcaaatgggagatcatccatgaggtgattcccttcctggataaaattctgtcacagaacagcaccgaaattggttctttcctgaaaatggtcatctgcctgaccctagaagcactatggaagaacctgaagaaggataactggaacgtgagtaatgttctgatgaccttcacccagcaccctaacaaccttctgaaaaccatcgaaactgtattagaggctagctccggcattaaaagtgactacgagggggacctgaataaaagtctctatttcgatacaccgctgtcccagaatatcacccaccaccagctggagaaggctatccataacgtactttccagaatagcgctttggagaaaaggactactcttcaacaattctgagtggataacgtcgacaaggaccttatttcagccgcttttcgaaatctttattaaggccactacaggtaagaatgtgacttccgagaaggaagaaaggactaagaaggaaatgatcgatttcccctattcattcaaaccgttcttttgcctcgagaagtacctgggagggctattcgtgctcaccaagtattggcagcagatcccgttaacagatcagagcgttgtggagatttgcgaggtgtttcagcagacagtgaagcctagcgaggctatggagatgttgcagaaggtgaagatgatggtggtgcgagtgctaaccatcgttgctgagaatccttcttggactaaggatatcctgtgtgccactctctcctgcaaacaaaacgggattaggcatttaatactctctgccatccaaggggtgacactggcccaggatcactttcaggaaatcgaaaagatttggtcaagccccaatcagctgaattgcgagtcactgtcaaaaaacctgagctccaccttagagtcatttaaatctagcctggaaaatgcgaccggccaggattgcaccagccagcccaggctggagaccgtccagcagcatctttacatgttggcgaaatccctcgaggagacttggtctagcggcaacccaatcatgactttcctgtcaaacttcactgtgactgaggacgtcaaaattaaggacctgatgaaaaacatcacaaaactcacggaggaattacggagttccatacagataagcaacgaaactatccactcgattttggaagctaatatctctcattcaaaagtgctgttctccgccttaactgtggccttgagcggcaaatgtgatcaggaaattttgcacctgctcctgacatttcctaagggagagaagtcgtggatcgcggctgaggaactttgcagtctcccgggttcaaaagtatacagtttaattgttctccttagccgcaacctcgacgttcgtgcttttatctacaagaccctaatgccaagtgaggctaacggtctcctcaacagcctgctggacatcgtgtcttcactgagcgcgcttttagcaaaggcccagcatgtcttcgagtacctgcccgagttccttcatacttttaaaatcacggctctgttagaaacattagacttccaacaagtgtctcagaacgtccaggctaggagctccgcatttggtagtttccaatttgtcatgaagatggtctgcaaagatcaggcttcctttctgagtgactcaaacatgttcatcaacctgcctcgagtcaaagagttactggaagatgacaaagagaaattcaacattcctgaggactcaaccccattctgccttaagctctaccaggagatcctccaactgccgaatggcgcactcgtttggaccttcctcaagccgattctccatgggaaaattctgtatactccgaacacaccagagataaacaaagtgatacagaaggctaactacacattctacatcgttgataagctaaaaaccttgtccgagactctactggagatgagctctctgttccaacgatccgggagcggccagatgttcaaccaactgcaggaagcgctgaggaacaagtttgtgaggaactttgtggagaatcaactgcatattgatgtggacaagcttactgagaagctacagacctatgggggtctgctggacgagatgtttaaccatgccggagccggtcggtttcggtttctggggtccatcctggtgaatctgtcttcatgtgttgcgttaaatcgattccaggctcttcagtctgtagacattctggaaacaaaggcgcatgaactgctgcagcagaacagctttcttgcgtctataattttcagtaattctcttttcgataaaaacttccgcagcgaatccgtgaaattgccccctcatgtatcttataccattcgcacaaacgttctgtatagtgtccgaaccgatgtggtcaagaacccaagctggaagtttcaccctcagaacctgcccgcagacggatttaagtataactacgtgttcgcaccattacaggacatgatcgagagagctattatcctggtccagaccggccaggaagcgcttgagcccgctgcacagactcaggccgcaccctacccgtgccacacgtctgaccttttcctgaataacgtgggcttctttttccccctaattatgatgctgacctggatggtctccgtagcctctatggtccggaaactggtgtatgagcaggagattcaaatagaggaatatatgcgaatgatgggagtccatcccgtcattcatttcctagcttggtttttagaaaacatggctgtcctcacgatcagttccgcaacgcttgctattgtccttaaaactagcggcatcttcgcccatagcaatacctttatcgtttttctgtttctgctcgatttcggcatgtccgtagtgatgctgagttacctgctctcagcattcttcagtcaggccaatacagcagccctgtgcacgtccctcgtatatatgatctctttcctgccttatatcgttctgcttgtgttgcacaaccagctttcctttgttaatcaaactttcctttgcctgctttcgacaaccgcatttggacaaggagttttcttcataacttttttggagggccaggagactggaatccagtggaataacatgtatcaggcgctggaacaaggcggaatgaccttcggctgggtttgctggatgatcctcttcgatagctctctgtatttcctctgtgggtggtacttgagtaatctcatccccggtactttcggactcagaaaaccatggtatttccctttcacagcctcctattggaagtccgtggggttcctcgtggaaaagagacagtattttctcagcagctctctcttcttctttaacgagaacttcgataacaaaggcagcagcctgcagaatcgggaaggcgagctggagggttcagcgccaggtgtcacgttagttagcgtgaccaaagaatatgaaggacacaaagcagtggttcaggacctgagtctgaccttctatcgtgaccagataaccgccctcttgggcacaaacggtgccggtaaaactaccatcatctccatgttgactgggctgcacccccctaccagtggcacgataataatcaatggtaaaaatctgcagacagacctgtcccgagtcagaatggaactcggcgtttgcccacagcaggacatcctcttggacaacttaacagtcagggagcacttgctgctttttgctagcatcaaggcgcctcagtggacaaagaaagagctccatcagcaagtaaatcagacactccaggacgttgatctgactcaacaccagcacaagcagacccgcgcactcagcggtgggcttaagagaaaactttcgcttggtatagccttcatgggaatgagcagaaccgtggtgcttgatgaacctacgtccggcgtggacccctgcagtcgccacagtttgtgggacatcctgctgaagtatcgtgaggggaggacgattatttttaccacgcaccatctagacgaggctgaggcattgagcgaccgagttgccgtgctacagcacggcaggctgaggtgttgcggcccacctttttgcttaaaggaggcatacgggcaaggtttgcgcctcacacttactcggcagccaagtgtcttagaagcgcatgatttgaaggacatggcatgtgttacgtccttgattaagatttatatcccgcaggcctttttgaaggacagctctggttcagagctgacatacaccattcccaaggacactgacaaggcgtgtctcaaaggactctttcaggctctggatgagaacctgcatcagctccatttgacaggctatggtatttccgataccactctggaggaggtctttctcatgcttctccaggactctaataaaaaaagtcatattgcgcttgggaccgagagtgagctgcagaaccaccgcccaacaggacatttgtctgggtactgcgggtctctggcgagaccagccactgtccagggggtacaattgctgagagcacaggtggctgctatactcgccaggcggctgagacggaccttgagagcaggaaaatcgaccctggcagaccttcttctccctgtgttattcgtcgccctggccatgggtctgttcatggtaaggccactggcaaccgaatatccccctctacgactgaccccaggccattaccagagagccgagacatactttttttcatcaggcggagataatctggatcttacaagggtactcctccgcaagttcagagaccaagacctgccatgcgccgacctcaacccccgacagaagaatagctcctgctggagaacagatccatttagccatcccgagtttcaagactcttgtggctgcttgaagtgcccaaacagatcagccagtgccccatatctcacgaatcacctggggcacaccttgcttaacctgtccggattcaatatggaagaatatctgctggctccaagtgagaaacctcggctcggtggctggagctttggtctgaaaatcccctccgaagcaggcggagcgaacggcaatattagtaagccccctaccctggcaaaggtctggtataatcaaaaggggttccatagcttacccagctacctgaaccacctgaataacctgatcctgtggcagcacctgcccccaaccgtggattggcgtcagtacggtattaccttgtattcccacccatacgggggtgccctgctgaacaaagataaaatcctggaatcaatcagacaatgtggcgttgctctgtgcatcgtgctcggcttctctattttaagtgcaagtatcggcagctcagttgtgagagatcgcgtcattggggctaagcgcctccagcacatctctggccttggctacagaatgtactggtttacgaatttcctgtatgacatgctcttttacctcgtgtctgtatgcctttgtgtggccgtcatagtcgcgtttcagctgactgcctttacattccggaagaatttagctgccaccgccctgctgctctcactcttcggctacgccacactgccttggatgtaccttatgtctaggattttctcaagttccgatgtggcattcatctcctacgtctccctgaacttcatttttgggctgtgcaccatgctgataaccatcatgccccgactcctggccatcattagcaaggccaaaaatttgcaaaacatatatgacgtgctgaagtgggtgtttactattttcccgcagttttgtctcgggcaggggctcgtcgaactgtgttataatcagataaagtacgatttgacgcacaattttggaatcgacagctacgtctccccgtttgagatgaactttctgggttggatcttcgttcagctcgccagtcaggggactgtacttcttctgttgcgagtgctcctgcactgggatctcttgagatggcccaggggccactcaacactccagggcaccgtcaaatcatctaaagatactgatgttgagaaggaagagaaacgggtatttgaaggaaggacgaatggcgacatcctggtgctgtacaatttaagcaagcactatcggaggttcttccagaacattatagcagtacaagacattagccttggaattcctaaaggcgagtgcttcggcttacttggcgtcaatggtgctggcaaaagcacaacattcaaaatgctaaacggcgaagtgtctctcacgtcaggacacgccatcatcagaacaccaatgggggacgcagtggacctgtccagcgctggcaccgccggtgtgctcataggctactgcccccaacaggatgcactggatgagctcctgaccggctgggagcatctttactactattgcagcctcagaggaataccccgtcagtgcatccccgaggtggctggagacctgattagaagactccaccttgaggcccatgccgataagcccgttgctacatactcgggcggaacaaagcgcaagctgagcactgccttggcactcgttggcaaacccgatatcctccttctggacgagccttcgagtggcatggacccttgctcgaaacgctacctgtggcagaccataatgaaagaggtgagagaggggtgcgctgccgtcctgacgagccattctatggaggagtgcgaggcattatgcaccagactagccatcatggtgaatggttccttcaagtgtttgggctcgccgcagcacatcaagaatagattcggcgatgggtacaccgtgaaggtgtggctgtgcaaggaggccaatcagcattgcaccgtgtcagatcatcttaagttgtattttcctggaattcagttcaagggccagcatctcaacctgttggagtaccacgtccccaagcgttggggatgtctagccgacctcttcaaggttatcgagaacaacaagacctttctaaacatcaaacactattccataaaccagaccaccctcgaacaagtcttcatcaatttcgcctccgaacaacagcaaactctccagtcgacattggacccgtcaacagactctcaccatactcaccacctccccatctac

SEQ ID NO: 215346 - DNA, 2367 bp, synthetic construct
  misc_feature 1..2367: note = Description of Artificial Sequence: Synthetic coding sequence
  source 1..2367: mol_type = other DNA
atgggcctgttcatggtaagacccttggctaccgaatacccgcctctgcgtcttacaccaggccactatcagcgggctgagacgtacttttttaggaaaaactctagttgctggagaaccgaccctttcagccaccccgaatttcaggattcatgcggatgtctgaagtgccccaatcgatctgccagtgcgccatacttgactaaccacctaggccacactctgctgaacctgtccgggttcaatatggaggaatatctgctggcaccatctgagaaacctaggctgggtggatggagtttcggactcaaaatccccagcgaagctggtggagccaacggtaatatctcaaagcccccaacgctggccaaagtttggtataaccagaaagggtttcatagcttgccttcatatcttaatcacctcaataatctgattctctggcaacacttaccccctacggtggattggcggcaatacgggattactttgtactcccacccctatggcggtgcgctgttaaataaggataagatcctagagagcattagacagtgtggcgtggccctgtgcatcgtcctgggcttctcaattttatcggccagtattggctcttccgtcgtgcgtgacagagtgatcggagccaagcgcctgcaacacatttccggtctgggatatagaatgtattggtttaccaatttcctgtacgacatgttattttatctcgtctccgtttgtctgtgcgtcgcggttatcgtcgcctttcagctcactgccttcacattccggaagaacttggccgctacagcgttgttgctgtctctgtttggatacgcgacattaccatggatgtatctaatgtccagaatattcagttccagtgatgtcgcatttatcagctatgttagtctgaactttatcttcggcctctgcactatgctaatcaccattatgccccgtctgctagctatcatctctaaagccaagaatctgcagaatatctacgacgtgcttaaatgggttttcactatatttccccagttttgcctggggcaggggctcgtggaactctgctacaatcagatcaagtatgacctcacccacaacttcgggatcgatagttacgtaagcccatttgagatgaacttccttggttggattttcgttcagctggcatctcagggcactgtgctcctactgttacgtgtactgctccattgggatctcctcagatggcctcggggtcattccaccctacaagggacagttaagagctcaaaggatacggacgttgagaaagaggagaagcgggtgtttgaaggcagaacaaatggtgatattcttgtgctgtacaacctgtcgaaacactacaggaggttctttcagaatattatagccgtgcaagatatttccctcggcatacctaagggtgagtgtttcggcctgctgggcgtcaatggggctggcaagtcaacaactttcaagatgctcaatggagaggtgtccctgacaagtgggcacgccattattagaacccccatgggtgatgcggtcgacctgagttcagcgggaaccgcaggcgtcctgattggatactgcccgcagcaggatgccctggacgagctgctcacaggatgggagcacctgtactactattgtagcctgcggggtatacctagacagtgtatccccgaggtcgccggtgatcttattagacgcctgcacctggaggcccatgccgataaaccggtcgccacctactccggcggaaccaagcggaagctctccacagccctcgccttggtgggaaaacctgacatcctgcttctcgatgaaccatccagtggaatggacccgtgttcaaaaaggtacctgtggcagactattatgaaggaggtaagagagggatgcgcagctgtacttacctctcatagcatggaggaatgcgaagccttgtgcactaggctggcgattatggttaacggctccttcaaatgcctgggctcaccacagcacatcaaaaaccgttttggggatggctatacagttaaggtctggctctgcaaggaggctaaccagcattgtacagtgtcagaccacctgaaactgtactttccgggaattcagtttaaggggcagcaccttaacctgctggagtaccatgtaccaaaaaggtggggctgcttggccgacctgtttaaagtgatcgagaataataagacttttctgaatatcaagcattatagtattaatcaaactaccctcgagcaagtgttcattaatttcgcctccgagcagcaacagaccttacagagtactctggatccgagcacggacagtcaccacacacaccatctgccaatctag

SEQ ID NO: 215347 - DNA, 7311 bp, synthetic construct
  misc_feature 1..7311: note = Description of Artificial Sequence: Synthetic coding sequence
  source 1..7311: mol_type = other DNA
atgggttttctccaccagctgcaacttctactttggaaaaacgtgacacttaaacgaaggagcccctgggtgctggcctttgagatctttatacctttagtgctgttttttattctgctgggtctgaggcaaaagaaacccaccatttctgtgaaagaagtggctttctatactgctgccccactaacgtccgccggtatcctgccagtgatgcagtctctgtgtcccgacggccagcgcgacgagtttggattcctccagtacgcaaacagtacggtgactcagctgctcgaacgccttgatcgcgtcgtcgaagaaggcaatctattcgaccctgcacgtcccagcctgggctccgagctggaggcccttcggcagcatttagaagcgttgtccgcaggtccgggtacctccggaagtcatctcgatcgtagtactgtgtctagcttctctttggattccgtggctagaaatcctcaggaattgtggcgtttcctcacgcagaatctctcattgccaaacagcactgcacaagcattgctggccgctcgggtcgaccctcctgaagtataccacctgctttttggaccttcgtcggctctcgactcgcaaagtgggttgcacaagggccaggagccttggagccggctcggtggcaaccccttattcagaatggaggagctcctcctggctccagccctgctggaacaactcacatgcacccccggatcaggtgaactgggcagaatccttacagtacctgagagtcagaaaggggcactccagggatatcgcgacgccgtgtgctccggtcaagctgccgctcgcgcaagaaggttcagcggtctatccgcggaactgcgtaaccagctagatgtggcaaaagtgtctcagcaactcggcctagacgcacctaacgggtctgactctagccctcaagcccctccacccagaaggctgcaggcactgcttggtgacttgctcgacgcacagaaagtgctgcaggacgtagatgtgctctctgctctggcactccttctgcctcagggtgcttgcactggacggactcccggaccacccgctagcggcgcagggggtgcagcaaatgggactggagccggagccgtcatgggccctaacgccactgccgaagaaggtgctccttctgcggcagccctagccacccctgataccctccagggccagtgctcggccttcgttcagctgtgggcgggtctccaacccatactgtgcggcaacaatcgcaccatcgagccagaggcgctgcgcaggggaaacatgagctcactgggctttaccagcaaagagcaacgcaacctcggactccttgtgcacctgatgacatctaatcccaaaatcctgtacgcacctgctgggagtgaagtagaccgtgtgatcctcaaggcgaatgaaacgtttgcattcgtgggcaatgtaacccactatgcacaagtgtggctgaacatctctgctgagatcagatcctttctcgaacaggggagactccaacagcacctgcgatggctgcagcaatacgtggctgagctgcgcctgcatcctgaggccttaaatctgagtctggatgagctgccgccagcactccgccaggataacttttcacttccctctgggatggctcttctccaacaactggatactatcgataacgcagcttgcggctggatacaattcatgtccaaggtgagcgtcgacatttttaagggatttcatgacgaggagagcatcgtgaactataccctaaaccaggcctaccaggataacgtcaccgttttcgctagtgtaatttttcagacaagaaaagacgggtcacttccacctcacgtgcactataaaatacgccaaaattctagctttaccgaaaaaacaaacgagatcaggagggcgtattggaggcctggacccaatactggcggacgattttatttcctctacggcttcgtttggattcaggacatgatggagagggccattatcgataccttcgtcggccacgacgtggtggagcctggctcctacgttcaaatgttcccatatccctgctatacaagagatgactttctcttcgtgatcgagcatatgatgcctctttgcatggttatttcctgggtttactccgtggctatgactatccaacacatcgtggcagagaaagagcaccgcctgaaggaggtcatgaagactatgggcctgaataacgctgtacattgggtcgcctggttcattactgggttcgtgcagcttagcatctctgtgacagccctcactgccatccttaaatacggccaagtgttgatgcatagccacgtggtgatcatttggttattccttgcggtctacgcagtggcaacgatcatgttttgtttcctggtcagtgtgttgtatagcaaggctaaactggctagcgcttgcggaggtattatctatttcctgtcgtatgtgccttacatgtatgttgcgatccgagaggaggtggcccatgataagataaccgccttcgaaaagtgcattgctagtctaatgtctaccacagctttcggccttggctcaaagtactttgctctgtacgaagttgccggtgtgggaattcagtggcatacgttttctcagtctccagtggaaggcgatgatttcaacctgttactggccgtgacgatgctaatggtggatgcagtagtatacggtatactgacttggtacatagaagctgtccaccccggaatgtatggcctacctagaccttggtactttcccctgcagaagagttactggctgggatctggtcggaccgaggcctgggaatggtcatggccttgggcccgtaccccacggctttctgtgatggaggaggatcaggcttgtgctatggagagccgcaggttcgaggagaccaggggcatggaggaggagcccacacatctaccactggtcgtatgtgtggataaactaaccaaggtttacaaggacgataagaaactggcattgaataaactatcactaaatctttacgaaaatcaagttgtatctttcctgggccacaatggcgcagggaagacgaccaccatgagtatcctgactggactcttccctcctacctctggcagcgccactatttatgggcacgatatccgaacagaaatggacgagattagaaaaaacctcggcatgtgcccgcaacataacgtgctgttcgacaggctgacagtagaagagcatctatggttttacagtcggcttaagagtatggcgcaggaggaaatccgaagggaaatggacaagatgatagaagacctggagttgtccaacaaaaggcattccctagtgcagaccctatcaggtgggatgaaacgaaaattgtccgtagctattgcattcgtggggggatctcgagcaatcatcctggatgagccgaccgccggtgtggatccttatgcgagaagggcgatctgggacctgatcctgaaatacaagcctggaagaacaatccttctcagtacacaccatatggatgaggcggacttgctgggtgaccggatagccatcatctcccacggaaaattgaagtgctgtgggagtccactatttcttaaaggaacttatggagatggatacaggctgacattggtgaaacgacctgctgagcccggtgggcctcaggagccgggtctcgcaagttcaccaccaggcagagctcccctgagcagctgctctgagctgcaggtgagccagtttatacggaagcacgtggccagctgtttactagttagcgatacctcaacggagctgtcatatatccttccctccgaggccgcaaagaagggggcatttgaacgcttattccagcatctggagagaagtcttgatgcgttgcatctgtcctctttcggactgatggataccactcttgaggaggttttccttaaggtgagcgaggaggatcagtccctcgagaattccgaggccgatgttaaggaaagcaggaaagatgttctacccggagccgaaggtccagcctctggcgaggggcatgctggtaatttggcaaggtgcagcgaactgacccagtcacaggcatccctccaatccgcctcctccgtcgggagcgcgaggggagacgagggagctggttatacagacgtctatggcgactaccgtcccctattcgataaccctcaagaccccgataatgtgtcactgcaagaggttgaagcagaggcactttcaagagtgggccaaggaagcaggaagctcgacgggggatggctgaaggtccgccaatttcatggactgctggtgaaaaggttccactgtgccaggcgaaactctaaagcactgttctcacaaatcttgctacctgccttttttgtatgcgtcgctatgacagtcgcgttaagcgtccctgagataggtgatctcccgccattggtgctttctcccagtcaataccataattatactcaacccagaggtaattttatcccttacgcaaacgaggagagaagggagtacaggttgcggttgtctcccgatgcatcaccgcagcaactggtctccaccttcagactacctagtggggtgggagctacgtgcgtgctcaaatctccagcgaatggatcactcgggccaactttgaatttgagttcaggcgaaagccggcttttggccgctcgctttttcgactcaatgtgtctggaatcatttacgcagggcctgcctctatctaactttgtcccaccaccgccatcacccgctccttctgactctcctgcgtcccccgacgaagacttacaagcttggaatgtgtccctacctcctaccgctggaccggagatgtggacctctgctccaagtctgccacgcttggtaagagaaccggtgagatgcacctgttctgcccaaggaacgggattcagctgcccatcctcagttgggggacaccccccacaaatgagggttgttactggagatatcttgactgacataacgggccacaacgtgtcggaatacctcctatttacctccgaccgattcagactgcaccgctatggtgcaatcactttcggcaatgttctgaaatcaatccccgcttcctttggcacccgtgctccgcctatggtacgtaagatcgcggtacggcgtgctgcgcaggttttctataataacaagggataccactccatgcctacctacctcaatagtctgaacaatgccatcctacgcgcaaacctgcccaaaagcaagggcaaccccgctgcttacggaatcacagtcaccaaccaccccatgaacaaaacatccgctagcctcagtttagactacctcctgcaaggaaccgatgtagttatcgcaatctttatcatcgtagcaatgtcattcgtacctgcgagcttcgtcgtgttccttgtggctgaaaagtctacaaaagccaaacatttacaatttgtgtccgggtgcaatcccattatttactggctcgctaactacgtctgggacatgctgaattacctagtccctgcaacctgctgcgtgataatcctgttcgtgtttgacttacccgcttacacctcccctactaatttccccgcagtgttgtcactgtttttgctgtacgggtggagtattacaccaatcatgtaccccgcatccttttggtttgaggtgcccagctccgcctatgtgttcctgattgtgattaacctctttatagggattactgccactgtcgccacctttttgctgcagctcttcgagcacgacaaggatttaaaagtagttaatagttacctgaagtcctgttttctgatatttcccaactacaacctgggccatggactaatggaaatggcttacaatgagtacatcaatgagtactacgccaaaatagggcagttcgacaagatgaagtccccgttcgagtgggacattgtgacccgcggtttggttgctatggctgtcgaaggcgtcgtcggtttcttgctcaccattatgtgtcagtacaacttcctcagacgtccacagcggatgcctgtcagcacaaagcccgtggaagacgacgttgacgttgctagtgaacgacagcgggtgttgagaggggatgcagataacgacatggtgaagattgagaatcttacgaaggtatacaagagtagaaagattggccgtatcctggcagtggatcgcctgtgcttaggagtgagacccggtgaatgctttggcttgctgggggtgaacggtgcgggtaagacttcaacttttaaaatgctcacaggagacgagagcacaacgggaggtgaagccttcgtcaatggacacagcgttctcaaggaattgctgcaggtgcagcagagtttgggatattgcccacagtgtgacgccctcttcgacgaactcactgcacgcgagcatctccagctttatactaggctgcgaggcattagttggaaggacgaggctagagtggttaaatgggccttggaaaagctggagctcaccaaatacgctgataagcccgcaggcacttacagcggcggaaacaagaggaagctgagcaccgccattgctctgatcggttaccccgcttttattttcttggacgagcctacaaccgggatggaccctaaagccagacgctttttatggaacctgatccttgatttgataaagacggggagaagtgtggtgctaacctcacattctatggaagagtgtgaggccctttgcactcgtctggccataatggtcaatggacgcctgaggtgcctcgggtccatccagcatttgaaaaatcggtttggcgatggctatatgatcacggtgcgtacaaaatcgagccagtcagtgaaggacgtggtgaggttcttcaacagaaacttccccgaggccatgcttaaagaacgacaccatacgaaggtgcagtaccagctgaaaagtgaacatattagcctggcccaagttttcagcaagatggagcaggtgagcggagtgctcggaatcgaagattatagcgtgtcacagaccacgctggacaacgtgttcgtgaattttgctaaaaagcagagcgacaacttggagcagcaggaaacagaaccgccaagcgctctacagtctcctctgggttgtttacttagccttctgcgcccacggagcgcccctaccgagttgagggctttagttgcagacgagccggaggatttagacacggaagacgagggactgatctcctttgaagaagaacgtgctcagctgtctttcaacacagacaccttatgctac

SEQ ID NO: 215348 - DNA, 7310 bp, synthetic construct
  misc_feature 1..7310: note = Description of Artificial Sequence: Synthetic coding sequence
  source 1..7310: mol_type = other DNA
atgggattcttacatcaattgcagctccttttgtggaaaaacgttaccctgaagcgcagatcaccatgggtattagcctttgaaatatttattccattggtgctgttcttcatcctgctgggactccgacagaagaagcccacaatttctgtcaaagaggtcagtttctacacggcagccccactgacgtctgctggcattcttcctgtcatgcagagtctgtgtccagacgggcagcgggacgaatttggctttcttcaatacgccaactccaccgtgacacagctgctggaaaggcttgacagggtagtcgaggagggcaatctcttcgacccagccagaccatcactgggatctgaactggaagccctgagacaacacctcgaagccctgtccgctggcccaggaacctctgggtcccatctagatagaagcacggtgagctcttttagtctcgatagtgtggctaggaatcctcaggagttatggagattcttgacccaaaacctctcgctgccaaattcgacagctcaggcgctccttgccgctcgagtggaccctccagaggtgtaccatctgttattcggccctagctcagccctggatagccaaagtggcttgcacaaagggcaagagccctggtcccgactcggcggaaaccccttgttcaggatggaggaactcctcctggccccagcgctgttagagcagctaacatgcacccccggttctggagagctaggaagaatcctgactgtgcccgagagccagaaaggggcactgcaaggctatcgagacgcagtatgctcagggcaggctgctgcgagagcacgacgcttctccggcttatccgctgagctgaggaatcaacttgacgtagctaaggtttcgcaacaactggggctggatgccccaaacggctcggattcttcaccgcaggcacctccaccccgtagactccaggccctgttgggcgatctgctggatgcacaaaaggtcttacaggacgtggacgttctctccgccttagcccttcttctgcctcagggcgcatgcactgggaggacacctgggccaccagcctcaggcgctgggggagcagccaatgggaccggtgcaggcgcagtgatgggtcccaacgccactgcggaagagggagcaccaagtgccgctgccttagctacccccgacactctgcagggccagtgctccgccttcgtccaactatgggcaggattgcaacccatactgtgcggcaacaatcgaaccatagagccagaagcattgcggagaggtaatatgagtagccttggattcacttctaaagagcagaggaaccttggactactggtacacctaatgacctctaatcccaaaatcctgtacgctccggctggaagcgaagtcgatagagtcatcttgaaagccaacgaaacgtttgccttcgtcggaaatgtgacgcactacgcccaagtttggctcaacatttctgctgagattcgctcctttttggagcaggggagacttcaacagcatctgaggtggctccagcagtacgttgccgaactccgactgcatcctgaggccctcaatctcagcctggacgagctgccacccgcactgagacaagacaacttttctctgccctctggaatggcgttactgcagcagctcgatacgatcgacaatgcggcttgtggatggatacagttcatgagtaaggtcagcgtggacatatttaaggggttccatgacgaagagagcatcgtgaactataccctgaaccaggcttaccaggataacgtgactgtgttcgcttctgttatttttcagactcggaaagacggaagtctgccgcctcacgtgcactacaagatcagacagaattcctctttcacagagaagactaacgaaatcaggcgcgcatattggaggcccggtcctaacactggcggacgcttctactttctttacggatttgtatggattcaggatatgatggagcgcgctattatcgacaccttcgttgggcatgacgtggtggaaccgggaagttatgtgcagatgtttccttacccttgttacacccgggatgactttttgtttgtgatcgagcatatgatgcccttatgtatggtgataagttgggtttattcagtggcgatgactatccagcatattgtcgcagaaaaagagcacaggcttaaagaggttatgaaaacaatgggtctaaacaatgccgttcattgggtcgcttggttcattactggattcgtacagttatctatatctgtcacagccctcaccgctattcttaagtacggtcaggtgttaatgcattctcacgtggttattatctggctgtttctggctgtatacgcagtcgccacgataatgttttgtttcctagtctctgtcctgtattctaaggctaaactagcctctgcctgtggaggcatcatatattttctaagctatgtgccctacatgtatgtggcaatcagagaggaagtggcccatgacaagatcaccgccttcgagaaatgtatcgcctcactcatgagtaccacagcctttggtcttggctccaagtatttcgctctgtatgaagtcgccggagtcggtatccagtggcacaccttcagccagtcacccgtggagggtgacgatttcaatctgctcctcgccgttaccatgctcatggtggatgcggtggtatatggtatcctaacttggtatatcgaagcagtccatccaggtatgtatggcctgccccgtccgtggtatttcccccttcagaagagctactggctcggatccggacgcacagaggcctgggaatggtcatggccttgggctcgcaccccacggctttctgtgatggaagaggaccaggcctgcgctatggagagtcgccgattcgaggaaacccgtgggatggaggaagagcctactcacctaccgttggtcgtgtgtgtagacaaactgaccaaagtttacaaagacgataaaaaacttgccctaaataaattaagtcttaacctgtatgaaaaccaggtggtgtccttcctgggccataacggtgctgggaaaactacgactatgagtatcctgaccggcctatttccccctacgtctggtagtgccacaatctatggacatgacattcgcaccgagatggatgagatcagaaagaaccttggaatgtgtcctcagcacaacgtgctgtttgatcgcctgaccgtggaggaacacctctggttttacagcagactgaagtcaatggctcaggaggaaattcgcagagagatggacaaaatgattgaagacctggaactatcaaataagcgccacagcctggtgcagacactctctggaggaatgaaacggaaactatcagtcgctatagcttttgtggggggttcacgcgctatcatcctagacgaaccaacagctggtgtagatccttacgcacgcagggcaatttgggaccttatcttgaagtataagccaggtcggacaatactgctcagtactcatcatatggacgaggcagacctcctcggtgatcggatagccatcattagccacggcaaactcaagtgttgtggatctcctctgtttctgaagggcacatacggtgacggctatcgccttacactggtaaagagacccgcagagcctgggggaccgcaagagccagggcttgcaagctctccgccaggacgggcacccttatcctcttgttccgagctccaagtgtcccagtttatacgtaagcacgttgcatcctgcctgttggtgtccgacacgtctaccgaactcagctatattttacctagcgaggcagcgaagaagggtgctttcgagcgcctgttccagcacttggagcgctcgctggacgccttgcacttatcaagtttcgggctaatggataccaccctcgaggaagtgttccttaaggtctccgaggaggaccaatccctcgaaaacagcgaggctgacgtcaaagaatcacggaaggacgtgcttcccggagccgaaggtccagccagtggtgaaggtcacgcgggaaacctcgcacggtgtagtgagctaacccagtctcaggcgtcattgcaaagtgctagtagcgtgggaagtgcgcgtggcgatgagggggcagggtatacagacgtctatggcgactatcggccactgttcgacaatccacaggatcccgacaacgtatcgctgcaggaggttgaggcggaggctctctcccgcgttggccagggttccagaaaattagacggagggtggctaaaggttaggcaattccatgggctcctagtgaagaggttccattgcgctcgcagaaactcaaaagccctgttttctcagatcctgctacctgcgttctttgtgtgcgtggctatgacagtggcacttagtgtgccagagattggtgacttgccccctctcgtactctccccttctcagtatcacaattacactcagccacgaggcaacttcataccttatgccaacgaggagcgtcgcgaatataggttgaggttgtcacccgatgctagcccccagcagttggtctctactttccggttgccttctggggtgggagcgacgtgcgttctgaaaagtcctgcaaacggcagcctagggcctaccctgaatctgagctctggagaatccaggcttctggccgcaagattttttgatagcatgtgtcttgagtcattcactcaagggttgcctctgtctaatttcgtcccccctcccccatctcccgcaccatcagacagccccgcttctcctgatgaggatctgcaagcttggaatgtgtctttgcccccaacagctggcccagagatgtggacttctgcccctagcctgcccagattggtgcgtgaacccgttagatgtacatgctctgcacagggcacagggtttagttgcccctcctcagtgggcggacacccgcctcagatgcgggttgtgaccggggacatactcacagatattaccggacataacgtgagcgaatatctcctttttacttccgataggttccgtttacatcgttacggggcaattactttcggcaacgtccttaagtctatcccagccagtttcgggacgcgcgcacctcctatggtgcgcaagatcgccgttaggagagccgcacaagtgttctacaacaataaaggctatcacagcatgcccacctatctgaatagtctaaacaacgccatcctgagggcaaatctgcctaagagcaagggtaaccccgcagcttatggtatcaccgtgacaaaccaccccatgaacaaaacatctgcaagtctcagcctcgactatctgctgcagggcaccgacgtcgtcatcgcaatttttattattgtcgccatgagctttgtgcccgcatctttcgtcgtttttctggtggccgagaaaagtaccaaagcaaaacaccttcagttcgtctctggctgtaacccgattatctattggctcgcaaattatgtgtgggacatgttgaattatctggtgcctgccacctgctgtgtgatcattctgttcgtctttgacctccctgcgtacaccagtcctaccaattttcccgcagtgctatcgctcttcctcctgtatggctggtctattacccccatcatgtacccagcttctttctggttcgaagttccaagctcagcatatgtttttttaattgttatcaacctgtttatcggtattactgccacggtcgctacatttctgctgcagctgttcgaacatgacaaagacctcaaagtggtgaattcctatctgaagagttgtttcttgatcttcccaaactataacctgggccatggccttatggaaatggcctacaacgaatatattaatgagtattacgcaaaaattggccaattcgacaagatgaagtcccccttcgaatgggatatcgtgacacggggactagtggccatggctgtggaaggggtagtagggttcctgctcactataatgtgtcaatataatttcttgcgacgaccccagcgaatgcctgtatccacgaagcctgtcgaggatgatgtagatgtggcctccgagcgccaacgtgtgctgaggggagacgcagataatgacatggtgaaaatcgaaaacctgacaaaggtgtataagagcaggaaaatcggacgaatcctcgcggtggatagactgtgtttaggcgtgcgacccggagagtgttttggactgctcggggtgaatggcgctggtaagacctctacatttaagatgttaactggtgatgagtcgacgacaggaggagaggccttcgtgaatggacatagcgtgctgaaggaactgctgcaggtgcagcagtccttaggctattgtccacaatgtgacgcattgtttgacgagcttacagcacgggagcatctgcagctgtatactcgcctgcgcggaatttcctggaaggacgaggcccgtgtggtgaagtgggccttggagaaacttgagctgaccaagtacgccgataagcctgccggaacatacagcgggggaaataagcgtaaactgagtacggccatcgccctcattgggtatcctgcttttatcttcctggatgagcccactacaggcatggacccaaaagccagaagattcttatggaacctgattctggacttgatcaaaaccggcagaagcgtggtcctgacttcacatagcatggaggagtgcgaagctctttgtaccaggctggcaattatggtgaatggtcggcttcgatgcttaggctcaatccagcacctgaagaatcggttcggcgatggctatatgattactgtgcggaccaaaagcagccagtcggttaaggatgtagtgcggttctttaacagaaattttcccgaggcgatgctgaaagaaaggcaccataccaaggtacagtaccagttaaagtcggaacatatatcactggcccaggtcttctctaagatggagcaggtatccggcgtgctgggaattgaagactacagtgtgtcccagactaccttggacaacgtgtttgtgaattttgcgaaaaaacagagcgacaatcttgaacagcaagagaccgagccacccagtgctctccagtccccacttgggtgcctgctgtctttactacgacccagaagcgcacctaccgagttgagagccctggtcgccgacgaacccgaagacctggacactgaggacgaggggctaatcagcttcgaggaggagcgggctcaactcagctttaacacggacaccctgtgcta

SEQ ID NO: 215349 - DNA, 7400 bp, synthetic construct
  misc_feature 1..7400: note = Description of Artificial Sequence: Synthetic coding sequence
  source 1..7400: mol_type = other DNA
atgggtaggaaaacttccagagtgcagcagggtccgcctagatcccccgcatgttccgcccatggtgagaggtcatgggggctggaatttcctccattccgttggttactgggcatcgccggacgaacacacctggccgcactcccaccatttcagtgggttcttgcatttgagatctttattccgctggttctattcttcatcctgcttggactgagacagaagaaacccactatctccgtgaaggaagtggctttttataccgcagcaccccttacatcggccggtattctgcccgtcatgcagtccctttgccctgacgggcagagagatgagttcggtttcctgcagtacgccaacagcactgtgacacagctcctggagcgcctggatcgcgttgtcgaagagggaaatctcttcgatcccgctaggccctcgcttgggagcgagctcgaagcgttacgacagcacctcgaggccctttccgccggacccggtaccagtggtagtcacctagataggtccactgtctccagtttttccttagacagtgttgccagaaacccacaagagttatggaggtttttgacacaaaaccttagccttcccaactccacagctcaggcactcctggcagctagagtggatccacctgaggtatatcatctcttatttgggccttcttcagctctcgatagtcagtctggcctgcacaagggacaggaaccgtggagtcggctgggcggaaatcccctgtttcggatggaggagctactgctggccccagccctgttagaacagctaacgtgcacgccaggaagcggagaacttggacggattctgaccgtgccagaaagccagaaaggtgcccttcaggggtaccgggatgcggtttgttctggacaggcagctgcaagggcccgtcgcttctccggattgtctgccgaactgagaaaccagctcgacgtggcaaaagtgagtcagcagctgggcttggatgctcctaatggatctgacagttctccacaggcaccaccgccacggcgacttcaggcactgctaggagacctcctggatgctcagaaggtactgcaggacgtggatgtgctctcagctcttgctctgcttttgccacagggtgcctgcactggacgaacacctgggccaccagccagcggagctggcggtgcagccaatggcactggcgcaggcgctgtgatgggtcctaatgccactgccgaggagggcgctccatcagctgcagctttagctactccagatacattgcaggggcagtgttccgccttcgttcaactttgggccggtctgcagccaatcttgtgtggcaacaaccgtacaattgagcctgaggctctccgtcggggaaacatgagctcccttggattcacgagcaaggagcagcgtaacctgggactactcgtgcacctgatgacgtccaatccaaaaattctgtacgcgccagcgggatccgaagtggaccgggtaattttgaaggctaatgaaaccttcgcttttgtgggaaatgttacgcattacgcacaggtgtggctcaacattagtgctgagatcaggtcctttttggagcagggcaggttacagcagcacctaaggtggctccaacagtacgttgctgagttgaggctgcacccagaggcactaaatctcagtctagatgaattgcccccagccttgcggcaagacaatttctctctgccatctgggatggctcttcttcagcagctggatacaatagacaacgccgcttgcggttggattcaattcatgtccaaagtctctgtcgacatcttcaaagggtttcacgatgaggaatccatagtgaactacacactgaatcaggcctaccaggataatgtgactgtctttgccagcgtcatatttcaaactcggaaggatggcagtctgccccctcatgttcactataaaatcaggcagaactcttccttcactgagaaaacaaacgaaattcgtagagcttattggcgccctgggcctaataccggaggtagattttatttcctgtacggttttgtttggattcaggatatgatggaaagggctatcattgacacgttcgtgggccatgacgttgtggaaccaggatcctacgtgcagatgttcccttacccatgttatacaagggacgatttcctctttgtcatcgagcatatgatgccgctttgtatggtaatttcctgggtgtacagtgtcgctatgaccattcagcacattgttgccgaaaaggagcatcggcttaaggaggtaatgaagacgatgggccttaacaatgcagtgcactgggtcgcatggtttattaccggcttcgtgcagctctcaatttccgtgacggcccttaccgctattctcaaatatgggcaagtcctgatgcattctcacgtggtgatcatttggctctttcttgctgtgtatgctgtggcaactatcatgttctgctttttggtgtccgtgctgtactccaaggctaagcttgcatccgcttgcggaggaattatttattttctgagttacgttccgtatatgtatgtagccattagagaagaggtcgcccatgataaaattactgctttcgagaagtgcatagcctcacttatgtccacaaccgcttttggattggggagcaaatatttcgccttgtatgaggttgcaggcgtgggcatccagtggcatacattctcacaaagtcccgttgagggagacgacttcaatctgctgctggcggtgaccatgctgatggtggatgcggtggtgtacgggatcctgacttggtacatcgaagccgtacaccctggtatgtatggtctgcccagaccatggtacttcccgctgcagaagagctactggctgggctcaggaaggactgaggcctgggaatggagctggccatgggctaggacccctagactgtccgtaatggaggaggaccaggcctgcgctatggagtcaagacggtttgaagaaacacgaggaatggaggaggagcccacacatctgccactcgtagtctgtgtggataaactcaccaaggtatataaggacgataaaaagctcgcgctcaacaaattgagtctgaatctgtacgagaaccaggttgtgtcattcctgggacacaacggtgctggcaaaaccaccaccatgtccatcctcaccggtctgttccccccaacttcaggttccgcaaccatttatggacatgacattagaaccgagatggatgagattcgtaagaacttagggatgtgtccgcaacacaatgtcctcttcgataggttgaccgtggaggagcacttgtggttttattcccgcttgaaaagcatggcccaggaagaaattcgcagggaaatggacaaaatgatcgaggacttggaacttagtaataaaagacactcactggtgcagaccctgagtggcggtatgaaaagaaagctctctgtagctatcgccttcgttggcggatcgagggcgataatcctggacgagccgacagctggcgtcgacccctacgcaagaagagctatttgggacttgatactgaagtataaaccaggcagaactatactgttgagcacacaccacatggatgaggctgacctgctgggcgacagaatcgctatcatcagccacgggaaactgaaatgctgtgggtcccctttgttcttaaagggaacgtacggcgatggataccggcttactctagtgaagcggccagcagaaccaggtggtcctcaagagcccggtttagcctccagtccccctggaagggcacctctgtcatcctgtagtgagctgcaagtgtcccagtttatccgcaagcacgtcgccagctgtttactggtgagtgatacttcaaccgaactctcatatattctccctagcgaagctgcaaaaaaaggggcattcgaacggctgtttcaacatttagagcgatcactggacgcgttgcacctgagctcgtttggactcatggacacaaccttggaggaggtgttcctgaaagtaagtgaggaagaccaatcactcgaaaattcagaagccgacgtaaaggagtcaagaaaagacgtgctgccgggagcagagggaccggctagcggggaagggcacgctgggaatctcgccagatgtagcgaactgacccagtctcaagcctctcttcagtcagcgtcaagcgtgggtagtgccaggggcgacgaaggagccggatacacagacgtctacggggattaccggcctctctttgataacccacaggaccctgataatgtgagcctgcaagaggtggaagcagaagctctgtcacgggttggccagggcagcaggaaactggatggcggttggcttaaagttaggcagttccacggacttctcgttaagcggttccattgtgcacggcgaaacagcaaagctctgttttcgcagattctgctgcctgcatttttcgtgtgtgtggccatgaccgtggccctctccgttccggagatcggggatctgccacctctggtcctctctccttcgcagtaccacaactacacgcagccacgaggaaatttcattccatacgccaacgaggagcggagggaatatagactgcgactatcccctgacgcaagtccccagcagctggtcagtacatttcgtctgccatccggcgtgggcgctacgtgtgtgctcaaaagtcctgctaatgggtccttaggacctactctcaacctgtcttctggcgagtccagattgctggcggctcgctttttcgacagcatgtgtctggagtcattcacacagggcttgcccctttctaactttgtgcctccccctccttctccagctccgagtgatagtccagccagtccagatgaagatcttcaggcctggaacgtcagccttccgccaacagccggacctgagatgtggacatcagccccttcactcccaaggcttgtcagggaacctgtgcgatgtacctgttctgcccagggcaccgggttctcatgtccatcaagcgtaggcggtcacccgcctcaaatgcgcgtggtaactggggatatattgacagacatcactggccacaacgtgtctgaatatttgctcttcacttcggatcgctttcgcctccatcgatacggagctatcacgtttggtaatgtgctgaagtccattccagcctcttttggaacgcgcgcaccacccatggtacggaagatagctgtcaggcgagccgctcaggtgttttacaataacaaaggctatcacagcatgcccacctacttgaattccctgaacaatgccatcctccgagccaatttgccaaagtccaagggcaatcctgctgcgtacggcatcacagttaccaaccacccaatgaataaaacctccgcttccctgagtctcgattaccttctacagggcaccgatgtcgtgatcgcaatttttattatcgtcgctatgtcattcgtgccggcatcattcgttgtcttcttggttgcagaaaagagcacaaaagcaaagcatctccagttcgtgtccggttgcaatcccattatctactggctagcaaattacgtgtgggatatgctgaactacctagttccagctacgtgttgcgtgataatacttttcgtgttcgatctacctgcctatacctctcccacgaactttccagctgtgcttagtctgtttcttctctatggatggtctattacacccatcatgtatcccgctagcttctggtttgaggtaccctcaagcgcctacgtgtttctaattgttataaacctgtttataggcatcacagccaccgtggctaccttccttctgcagctgttcgagcatgacaaggatctcaaggtggtgaattcatatctgaagtcttgttttttgatattcccgaattacaacctcggacatgggttgatggaaatggcttacaacgaatacattaatgaatattacgcaaagatcgggcaattcgataaaatgaaatccccattcgagtgggatatcgtcacccggggtttagttgctatggcagtggagggcgttgtggggttcctgctgacaattatgtgtcagtacaactttctgagaagaccccagaggatgccagtaagcacaaagcccgtggaggacgacgttgatgtggcgtcagaaaggcagcgagtgcttcgaggcgatgcggacaacgacatggtcaaaatcgagaaccttaccaaggtatacaaatccaggaaaatcgggagaatccttgcggtcgatcggctttgtttaggagttcggccaggtgagtgttttggcctgctgggtgttaatggcgctggaaagaccagcacatttaaaatgcttactggggacgagagcaccaccggcggtgaagcctttgtgaatggccatagcgtcctgaaggaactgcttcaagtgcagcaatccctcggctattgtcctcagtgtgatgccttatttgacgaactcacggctcgcgaacacttgcaactgtacactagattgcgtggcataagttggaaagacgaagcccgagtcgtgaagtgggctttagaaaagctggaactcaccaaatacgcggataaacccgctggtacctattctggagggaacaagaggaaactgagcaccgccatcgctcttattggataccctgccttcatctttctggatgagcccacaaccggaatggatccgaaagccaggcggtttctgtggaacctgatcctcgacttgattaaaaccggccgatcggttgtcctcaccagccatagcatggaagaatgcgaagcactttgtacccgcctggcgattatggtgaatggtaggttgcgctgtctcgggtcaattcagcatctgaagaatcggtttggggacggttacatgatcactgttcggaccaagtccagtcagtctgtgaaggatgttgttaggttctttaacagaaacttcccagaagcgatgctcaaggagcgacatcatactaaggtgcagtaccaattaaagtcagagcacatatcgcttgcccaggtgtttagtaaaatggaacaggtatctggtgtgctgggaatcgaggattactcagtttctcagactacattggacaacgtatttgtgaacttcgccaaaaaacagagtgacaacctcgaacaacaggaaactgagccccctagcgctctccagtccccgctgggctgcctgttatccctgctgcggccacgatctgccccaaccgagcttcgtgccctcgtagccgatgagccagaggatctcgacaccgaggatgagggattaatcagcttcgaggaggaaagagctcagttgagctttaacacagatacgttgtgtta

SEQ ID NO: 215350 - DNA, 7307 bp, synthetic construct
  misc_feature 1..7307: note = Description of Artificial Sequence: Synthetic coding sequence
  source 1..7307: mol_type = other DNA
atgggcttcttacatcagctgcaactcctcctttggaaaaacgtgacactgaaaaggcggagcccctgggtgcttgctttcgaaatcttcataccacttgttctgttctttatcttgctgggactgagacagaaaaagcctacaattagtgtgaaagaagcgttttatacagcagctcccttgacctcggccggtatacttccagtcatgcaaagcttgtgccccgacggccagagggacgagttcgggttccttcaatatgctaactcaactgtaacgcagctcctggaacggctggacagagtcgtcgaggaggggaacttgttcgatccggctcgaccttccctcggcagcgaactggaagcgttacgccagcacctcgaggccttgtctgcaggtcccggaacgtccgggtctcatctggatcggagcactgtgagcagtttctctcttgattcagttgcgaggaatccgcaggaactgtggaggtttttgacccagaacttatctctgccaaatagcacagcgcaagctctcctggctgcacgcgttgaccccccagaagtgtaccatttattgttcggtcctagttccgccctggactcacagtcagggctccacaaaggacaggagccgtggtccagattaggagggaaccccttgttccgtatggaggagttgcttttagccccagctcttctggaacagcttacttgcacaccaggatccggtgagctggggaggattttaacagtccccgaatctcagaaaggggcactgcaaggatacagggacgcagtgtgttccggacaggctgctgccagggcacgacgctttagcggtctgagtgccgagctacgcaatcagctagatgtagcaaaggtgagtcaacaactcggtctagatgctccaaacggctctgactcttcaccccaggcgccacctccacggaggctccaggcactgctcggagatttactcgacgcccagaaggttttgcaggatgtggatgttttaagtgccttggcactacttctgccccaaggggcatgcaccggcagaacccccggacctcccgcttcaggagccggaggcgctgctaacggcaccggtgccggagctgttatgggacctaatgccaccgctgaagagggggctccctcagccgcagccctcgctacacctgacaccctgcaaggacagtgctcagcatttgtccagttatgggcgggtttgcaaccaattctgtgtggtaacaaccgaaccatcgagccagaagcattgcggagaggcaatatgtccagtcttggctttacctccaaggagcagcggaatcttggcctgctggtgcacctgatgactagcaaccctaagatcttatacgcaccagccggatcagaggtggatcgcgtgatcctcaaggcgaacgagaccttcgccttcgttggaaacgtaacacactatgctcaagtgtggctgaacatcagtgcggagatccgctcattcctcgagcaggggcgtctgcagcagcacctgcggtggctccaacagtacgtggccgagcttaggctccaccctgaggcccttaatctgtctctggatgaactccctcccgctctgcgacaggacaacttcagccttccttccgggatggccctactccaacagctggatacaatcgataatgcggcatgcggctggatccagtttatgagcaaggtgtcagtggatatcttcaaaggcttccatgacgaagagtccatcgtcaattacaccctcaaccaagcgtatcaggataatgttaccgtgtttgcatccgtgatctttcaaaccaggaaggacggaagcctcccacctcacgtccattataagattcgccaaaattcctcttttaccgagaaaactaacgagatacggagggcatattggcgcccaggacctaacaccgggggacgtttctacttcctgtacggcttcgtctggattcaagacatgatggagcgggcaatcattgacacctttgttggccacgacgtggtcgaaccgggatcatatgtccagatgttcccctatccttgctacacgcgcgatgacttcctcttcgtgatcgagcatatgatgcccctatgtatggtgatatcttgggtatattccgtggctatgactattcaacatatcgttgccgaaaaagagcatcgccttaaggaagtaatgaaaaccatgggacttaacaacgccgtgcattgggtggcatggttcatcaccggctttgtccagctgagcatctcagtcacagccctgaccgccatattgaagtacggacaggtgctgatgcacagccatgtcgtgatcatttggctttttttagcagtatatgcagtcgcaacaatcatgttctgctttctggtgtcagtgctgtattctaaagccaagctggccagtgcttgcgggggtatcatttactttctgtcttatgtgccctacatgtatgtcgcgattcgtgaagaggtggcacatgataagataactgcttttgagaaatgcattgctagtctgatgtctaccaccgctttcggcctaggaagcaaatatttcgccctgtacgaagtggccggagtgggtatacaatggcacaccttctcacagagccctgtagaaggcgatgactttaatctgttattggccgtaacaatgctgatggtagacgcagtggtctatgggattttaacatggtatattgaggccgttcacccaggtatgtacggcctccccagaccttggtacttcccactgcagaagtcttactggctaggatcgggtcgaaccgaagcttgggaatggagttggccgtgggctagaacgccgcgattgagcgtgatggaggaggatcaggcatgcgccatggaaagccgtcggttcgaggagacccgcggtatggaggaagaaccgactcatctgcccctggtcgtttgcgtggataaactcacaaaggtctacaaggacgataaaaaactggccctgaataagttgtctctgaacctctacgaaaaccaagttgtctctttcctcggtcacaatggagccggaaagactacaaccatgtccattctcaccgggcttttcccccctaccagcgggtccgctaccatatacggccatgacatcagaactgaaatggacgagatcagaaagaatttaggtatgtgccctcagcacaacgtgctgtttgatcggctcacggtggaggagcatctttggttttattcccgattaaagtctatggcccaggaggagattagaagggagatggataaaatgattgaagacctggaactatccaacaaacgacatagccttgtgcaaactctcagcgggggtatgaagagaaaactgtccgtcgccatcgcgtttgtggggggatctagggcaattatcttagatgagcctaccgccggtgttgacccctacgccagaagagcgatttgggaccttattctgaagtacaaacccggtcggaccatcttgctgtctactcaccacatggatgaagctgatctgcttggagaccgtatcgctatcattagtcacggtaaactcaagtgctgtggctcccctctgtttttgaaaggtacctacggtgatggctatcgactcaccctcgtgaagagacccgctgagcctggaggcccacaagagcccggtctggcctcgagccctcctgggcgtgccccactgtcaagctgttcagagctgcaggttagccagttcatacgcaaacatgtggccagttgtctgctggtctctgacacaagtactgagttgagctacattcttccctctgaggctgccaaaaaaggtgcttttgaacgcctgtttcaacacctggaaaggtcactggacgctttacatcttagctcctttggtctgatggacactactctggaagaggttttcctcaaggtgagcgaagaagaccagtctttagagaactctgaagccgacgttaaggagagccggaaagacgtgctgcctggcgctgagggacccgcttccggggagggacatgcgggtaatctcgccagatgttccgagttgacccagtcccaggcaagtctgcaaagcgcatcctcagtcggcagcgctcgcggtgacgagggcgctggttacacagacgtgtatggagactatcggcctctttttgataaccctcaagatccagataatgtgtctctccaggaggtggaagccgaggccctgagtcgtgttggacaaggttcacggaaactggatggaggctggctgaaggtgaggcagttccacgggctcctggtgaaaagatttcactgtgccagaagaaattccaaagctctcttttcccagatccttctgccagccttctttgtctgtgtggccatgacagtggctttgtctgtgcctgaaattggtgacctacctcctttagtattaagcccgagccagtaccacaattacacccagccaagaggcaactttatcccttacgccaacgaagagcgccgtgaatatagactccggctctcacctgatgcgtccccccaacaacttgtgagcacctttagactgccttccggtgtcggtgctacctgtgtactgaagtccccagccaatggcagcctgggtcccaccctgaacctgtccagtggggagtccagattgttggcggctcggttttttgactctatgtgtcttgagagcttcacacaagggctcccactctcaaacttcgtgcctccacctccttccccagccccaagcgactcccccgcaagcccagacgaggatctgcaagcttggaacgtgtccctcccccctacagctggcccagagatgtggacttccgctcctagcctgcctagactcgtaagggagccagtgagatgcacgtgctctgcacagggcaccggattttcgtgcccgtcttccgtcggcggtcacccccctcaaatgagagtcgtgacaggtgatattttaaccgacatcacaggtcataatgtttccgaatacttgctattcacgtcagatcgcttccgattgcacagatatggcgctattacctttggaaatgtcctgaagtctattcccgctagtttcgggaccagggccccacccatggtacgcaagattgccgtgcgacgggctgcccaggtattctacaacaataaaggctaccattccatgccaacttacttgaatagtcttaataacgccatcctgcgagcaaatttgccaaagtctaagggtaaccccgcagcgtacggcatcacagtgaccaaccaccctatgaacaaaacatctgcctccttgtccctggactatctcctccagggaacagatgtggtcattgctatttttattatcgtggcaatgagcttcgtgccggctagttttgtagtgtttctagtggccgagaagagtaccaaagctaaacatctgcagttcgtgagtggctgtaatccaataatttattggctggctaactacgtgtgggacatgctaaactatctcgtgccagccacatgttgcgtgatcattctttttgtatttgacttaccggcttacacctctcctacaaacttccctgctgtcctgagtctgtttctattatacggctggagcatcacacccatcatgtatcccgcaagcttctggtttgaggtgccaagcagtgcttatgtcttcttgatcgtcatcaatctgtttataggcattaccgccaccgtcgctaccttccttctgcagctcttcgaacacgacaaagacctcaaagtggtaaactcatatctgaagtcctgttttctaatctttcccaactacaatctaggccatggtctgatggaaatggcatacaatgagtacattaacgagtattatgccaagataggccagtttgacaaaatgaagtccccatttgaatgggacattgtgacccgtggcctggtggcgatggcggtggagggcgtggtgggctttctgttgacgatcatgtgtcagtacaatttcctgaggaggccccagagaatgcccgtctcaaccaagccggtagaagacgacgtggacgtagcctccgaacggcagagagtcctgcgcggagatgccgacaacgacatggtgaagatcgagaatctcacaaaggtttataagagccgtaaaatcggtcgcattcttgcagtcgaccgtctgtgtctgggggtacgacccggtgaatgttttgggcttctgggggttaatggcgcaggaaagacatcgacattcaagatgctcactggagatgaatccactactggaggggaagccttcgttaacggtcattctgtcttgaaggaactgctccaggtgcagcaaagccttggttactgtccgcagtgtgacgccctgttcgatgagttaaccgctcgggaacatctccagctttacacacggttgcgcggaattagttggaaggatgaagcacgcgttgttaaatgggcgttagagaaactggaattgactaagtacgcagacaagccagcaggtacttactccggaggcaataagcgcaaactctccaccgctatcgctctgattggctaccccgcattcatcttcttggatgaacccacaacaggcatggatcctaaggctcggagattcctgtggaatctgatcctggacttaattaagaccggacgatctgtagtgctgacttcccattccatggaagaatgtgaagccctgtgtaccagacttgctatcatggttaatggcaggttaaggtgtcttggatcaatccagcatcttaagaatcgcttcggagatggctatatgattaccgtacgcacaaagagctcacaaagtgtgaaagacgtggtccgcttttttaaccgcaatttccctgaggccatgcttaaggaaagacaccatacaaaggtacagtaccagctcaaatccgaacatatctctctcgctcaggttttttctaaaatggaacaggtttctggcgttctgggcattgaggactacagcgtgtctcagactacattggataacgtcttcgtgaattttgcgaagaaacagtctgacaacctcgaacagcaagaaacggagcctccatccgcactgcagtctcctctgggctgtcttctgagcttgctccgcccacgaagtgcgcctacagagctccgagcgcttgtggcagatgagccagaggaccttgacacagaagacgaagggttgatttcattcgaagaagagcgagcccagctctcttttaacactgataccctttgcta

SEQ ID NO: 215351 - DNA, 591 bp, synthetic construct
  misc_feature 1..591: note = Description of Artificial Sequence: Synthetic coding sequence
  source 1..591: mol_type = other DNA
atgctgacaggcgacgaaagtactactggcggtgaggcttttgtcaacgggcattccgtgctgaaggagctgctccaggtccagcagtccctgggctattgtcctcagtgcgatgcactgtttgacgagttaaccgcccgtgagcatcttcagctgtatacaagattacgcggtatttcctggaaggacgaagcgagagtggtgaagtgggccctggaaaagctggaattgacgaaatacgcagacaagcccgctggtacgtattctggcggaaataagcgcaaactgtctaccgcaattgcgcttataggatatcccgctttcatatttctcgacgaacccaccaccggtatggatcccaaagcacggaggttcttatggaatctcatcctggatctgatcaaaaccggccgaagcgtggtactgacctcacatagcatggaggagtgtgaggccctgtgcactagactagccattatggagaggtccccagctgtgcccggacagcatcctgcccctgaagagcctgtctggcggtggctgcacgatcatggagctgatcaggaacagccagaatgcgagggacgttag

SEQ ID NO: 215352 - DNA, 5114 bp, synthetic construct
  misc_feature 1..5114: note = Description of Artificial Sequence: Synthetic coding sequence
  source 1..5114: mol_type = other DNA
atggcagtcttacgacagctcgctctgctcctctggaaaaactatacactgcagaagaggaaggtgctggtgacagtgctcgagctgtttctgcccctgctgttctccggcatattgatttggttgcgcttgaagatacaatccgagaacgtacctaatgccacaatttaccccggtcagagcatccaggagctccctctcttctttacttttcctcctcccggtgacacatgggaacttgcttatatcccgagccattccgatgccgcaaaaacagtgaccgagaccgtccggagggccctcgtgatcaatatgcgcgtacgaggctttcccagcgagaaagacttcgaagattatatcaggtacgacaactgttcctctagtgttttagccgctgtggttttcgagcatccgtttaatcacagcaaggagccacttcctctggccgtgaagtaccatctacgcttttcatatactcgaagaaactatatgtggacccagacaggctctttcttcctgaaagaaactgagggttggcataccaccagtctgtttccactctttcctaaccccggtcctagagagccgacttccccagacggcggtgagcctgggtacattagggagggatttctggcggttcagcatgctgtggatcgggctatcatggagtatcatgccgacgccgctacacggcagctctttcaacggctgaccgtcaccatcaaaaggttcccgtaccccccattcatcgcagacccttttctcgtggctattcagtatcagctcccactgctgctactgcttagctttacatacaccgccctgactattgcgcgagctgtggttcaagaaaaagagcgaaggctgaaagaatatatgcggatgatgggcctttcttcctggttgcactggtctgcatggtttctgttattctttctcttccttttaattgcagcctcgttcatgacgttactgttctgtgtgaaggtcaaaccaaatgtggccgttttgtcccggtccgatccgtcgttggttctggccttcctgttgtgcttcgccatatcgacaattagcttttctttcatggtgtccacttttttcagcaaggcaaacatggcggcagcattcgggggattcctgtatttcttcacatacatcccctatttcttcgttgcgccacgatacaattggatgacactgtcccagaaattgtgcagctgtctgctgagtaacgttgccatggccatgggcgcacagctgatcggaaagtttgaggcaaaaggcatgggcatccagtggcgtgacctacttagtcccgtgaatgtggacgatgacttctgtttcggccaggtcctgggtatgcttctgctcgattccgtcctctatggcttggtgacctggtacatggaagccgtgttccctggacaattcggtgtaccacagccatggtacttttttattatgccatcatactggtgcgggaaaccgagagcggtcgcaggcaaagaagaagaggatagcgaccctgaaaaggctttgaggaacgagtattttgaagctgaaccggaggacttagttgcgggaattaagattaagcatctctcgaaggtgtttcgggtgggaaacaaggaccgcgctgcagtgcgggacttgaatctgaatctttatgaggggcaaattaccgtgcttctgggccacaatggagctggcaaaactaccaccttgtccatgcttacagggctgtttccaccgacatctggcagagcttacatttctggctatgaaatatcacaggatatggtgcaaatccgaaaaagcctgggcctttgtcctcagcatgatattctatttgataacctgacagttgcggaacacttatatttctacgcccaactaaagggactatcgaggcagaaatgtcccgaagaagttaagcagatgctgcatattataggcctggaggacaaatggaattccaggtctaggttcctctctggtgggatgaggagaaaactatcaatcgggattgctctcattgcaggatctaaagtcctcattctggacgaaccgaccagtggcatggacgccatcagccggcgagcgatctgggacctgcttcagcgccagaagagcgaccggacgattgtgcttactacgcactttatggatgaggcagatctcctgggggaccggatcgcaatcatggcgaagggagagctacagtgttgtggatcaagtctgtttctcaaacagaagtatggcgcaggctaccatatgaccctagttaaggaaccccactgcaatcccgaggacatttcacagctcgtgcaccatcatgtgccaaacgccactttggagtcttccgcaggagcagagttatcatttatcctgcccagagagagcacccacagattcgagggactgtttgcaaagcttgagaagaagcagaaggaactcggcatcgcaagtttcggagcgtctattactaccatggaagaagtcttcctgcgtgtgggaaagcttgtggatagtagcatggatatccaggctatacagctacctgcgctccagtaccaacatgagcggagggcctccgattgggcagtcgatagtaatctgtgcggcgcaatggatccaagtgatggtattggagcgttaatcgaggaagaacgaaccgcggtcaaactcaatacgggtctggctctccactgccagcagttctgggcaatgttcctgaagaaggcagcttactcttggcgggagtggaaaatggtcgccgctcaggtcctggtcccgctgacctgcgtcaccttggctttacttgccattaattattccagtgagctgtttgatgaccccatgctgagacttacgctcggcgaatatggtcgcactgtcgtacccttttcagtaccaggtacgtctcaattgggccagcaactgtccgaacacctcaaggatgctctgcaggcggaggggcaggaaccccgtgaggtgttaggcgacctggaggagttcttgatcttcagggccagcgttgagggaggaggatttaacgaaagatgcctggtcgctgcttccttcagagacgtgggtgaaaggactgtggtaaacgcactgttcaataatcaggcctaccattcacccgcaactgctttggccgtggtcgataacctcctatttaaactgttgtgcggtcctcacgcatctattgtcgtcagtaactttccacagcctaggagtgctctgcaggccgcaaaagaccagttcaacgagggcaggaagggttttgacatcgctctgaacttgctgtttgcaatggccttcctcgcaagcacgttcagtatactggcggtgtctgagcgcgcagttcaggctaaacacgtgcagttcgtcagcggtgtgcatgtggcctccttctggctgtctgcactcctatgggatttgatctcatttctcatcccgtccctgttattattggtcgtctttaaggccttcgacgtgagagcatttacaagagacggacacatggctgacacccttctgcttctcctactgtacgggtgggccatcattcctctcatgtacttgatgaattttttttttctgggtgctgcaactgcatatacaagactcaccatcttcaacatcctcagtggcatcgcaaccttcttgatggtcaccataatgagaattccggctgtaaagctggaggagctctccaaaactctggaccacgtttttttggtcctgcccaaccattgcttaggcatggccgtgagctcattttatgagaactacgagacacgtaggtattgtaccagctccgaagtagctgctcactactgcaagaagtataacatccagtaccaggaaaacttttatgcgtggtctgcccctggcgttgggagatttgtggcctctatggctgcctcaggctgtgcttatctgatcttgctctttctcattgagactaatttgttgcagaggctccgaggcattttgtgtgcgctgagacgcagacgaacactcaccgagctgtatactaggatgccagtcttaccagaggatcaggacgtcgctgacgagaggactcggattctcgccccatccccagattctttgttgcatacacccctgatcattaaggagctttccaaggtgtatgaacagcgagttccacttcttgctgtcgataggttgagtctggcagtgcagaaaggggaatgtttcggcctgctgggcttcaacggagcgggaaaaaccactacgtttaaaatgttgacaggcgaggaatcactaacctctggagatgctttcgtgggagggcaccggatctcgtccgatgtgggaaaggtgcgccagaggattggatactgccctcagttcgatgccctcctggaccacatgactgggagggagatgctggtgatgtatgctagactgcgaggaattccagagcgccatattggagcctgtgtggagaataccctacggggactcctgttagaacctcacgcaaataagcttgtgagaacttacagtggtggaaacaagcgcaagctttctacaggcattgcactgatcggtgagcccgctgtgattttcttggatgagcccagtacaggaatggaccctgtggcccgaaggctcctttgggataccgttgcgcgagccagagagagcggtaaggctattataattacttctcacagcatggaagaatgcgaggccctctgtacacggctggctattatggttcaggggcagtttaagtgcctgggtagccctcagcacctcaaatccaagtttgggtccggttactccttgagagccaaggtgcagtcggagggccaacaggaggcactcgaagagttcaaagcctttgttgatcttacctttcctggttcagtgctggaggatgaacatcagggtatggtgcattatcacctgccagggagagatctctcttgggctaaggtgttcgggatcctcgaaaaggctaaagaaaagtatggagtggacgattacagtgtgtcccagataagcttagaacaggtctttcttagtttcgctcacctccaacccccaacagcggaggaaggccgtta

SEQ ID NO: 215353 - DNA, 5126 bp, synthetic construct
  misc_feature 1..5126: note = Description of Artificial Sequence: Synthetic coding sequence
  source 1..5126: mol_type = other DNA
actgcccctcctcctagcccttcactccccctacaagatcgcgctgccacgagtgcccacctggctctctttacactttctttccagtcgacgtttctgttattccccgcagggtgtagcgcttatctgaacttgctgagacctcctaccagtttggctgctttgggtgtaccattttcaaagacaatggctgtgctacgccaactcgcgctgctcttgtggaagaattacactcttcagaaaaggaaggtccttgtgacagtacttgaactgttcttgcccctcctcttcagcggcatcctaatctggcttaggctaaaaattcagtccgagaacgtacctaatgccaccatttatcctgggcagtctatacaggagttacccttattttttactttcccacccccaggcgacacatgggaactcgcctacataccctctcatagtgatgccgctaagaccgtaactgaaacagtacgacgcgcactcgttatcaacatgcgggtgcgaggcttccctagtgagaaagacttcgaggactacatccggtacgataattgttcctcaagcgtgctagcagccgtcgtatttgagcacccctttaaccattctaaagaacccttgcctctggcggtgaaataccacctccggttttcttatacacgtcgaaactacatgtggacgcaaacaggttcattcttcctaaaggagacggaaggctggcacactacgtcattatttccattattccccaacccgggtccacgagagccaacttcacccgatggcggtgaacccggatatataagggagggattcctggccgtacaacatgcagtggaccgcgcaatcatggagtaccacgctgacgctgcaactagacaactgtttcagagactcactgtcacaataaagagattcccttaccctcctttcatcgccgatccgttcctggttgccattcagtaccagttgcccctccttctcctgctatcatttacgtacactgctttgacgatagctcgcgcagtggtgcaggaaaaggaaaggcggctcaaggagtatatgaggatgatgggcctctccagctggctccactggagcgcttggttcttgctattctttttgttcctactgattgccgctagctttatgacactgctattctgtgtgaaggttaaaccaaacgtagccgtgctaagccgatccgacccctccctggtgctcgctttcctgttgtgtttcgccattagtaccatctcatttagtttcatggtgtctacatttttctcaaaggggatgggtatccagtggcgggacctcttgtctcctgttaacgtggacgatgacttttgtttcggccaggtactgggcatgctgctcttggatagcgtgctgtacggcctcgtgacctggtacatggaggccgtgtttcccggacaattcggggtccctcaaccctggtatttcttcattatgccctcctactggtgcggcaaaccgagagcagtggccggaaaggaggaggaggattccgatcctgaaaaggccttacgcaacgaatacttcgaagcagagcccgaggatctcgtcgccggaattaagatcaagcatctgtccaaagtgttcagagtggggaacaaggacagagctgcagtgagggacctgaatctgaatctctatgagggccagatcacagtcctgttaggtcacaacggcgctgggaagaccacaacattaagtatgctcactgggctcttcccccctacttcaggcagggcatacatctcaggctatgaaatttcccaggatatggttcagatccgtaaatccctggggctctgcccacagcacgacatcttgttcgataacctgaccgtggctgagcacctgtatttttacgcacagctgaaaggcctgagcaggcagaagtgcccggaagaggtgaagcagatgctgcacataatcggactggaagacaagtggaactcccgcagccggttcttgtctgggggaatgcgacggaagctatctatcggcatcgccctcattgccggatcaaaggttctgatcttggacgaaccaacttcagggatggacgccatcagccgaagagctatctgggatctcctgcagaggcagaaaagtgataggacaatagtattgaccacacacttcatggatgaagctgacctgctgggagacagaattgcgattatggcaaagggggaattgcagtgttgcggaagtagcttatttctgaaacaaaagtacggcgcagggtaccacatgaccctggtcaaggagcctcattgcaacccagaggatatatctcaacttgtgcatcatcatgtccctaacgccacccttgaatcttcggcaggagccgagctcagcttcatcttaccacgagaaagcactcataggttcgagggcctgttcgctaagcttgagaagaagcagaaggagttgggaatcgccagtttcggagcaagcatcacgactatggaggaggtctttctgagagtggggaaactcgtggatagctcgatggacatccaggccatccagctcccagccctccagtaccaacacgagagaagggcttcggactgggctgttgacagtaacttgtgcggcgctatggacccatctgatggaataggcgcattgatcgaggaggaaagaactgcagttaagctaaatacaggtctcgcactccattgtcagcaattttgggctatgttcctgaagaaagccgcttattcttggcgggaatggaagatggttgccgcacaggtactagtgcctctcacttgtgtgaccctggcactgctggcaattaactacagtagcgaactattcgatgacccgatgctgcgcctcaccttaggcgaatatggaagaacagtggtgccattctccgtgcccggaacaagccagctgggtcaacagctcagcgagcatcttaaagatgctcttcaagctgaaggtcaagaaccgagggaagtgttgggtgacctggaagagtttctgatttttagggcctccgtagagggcggaggcttcaatgagagatgcctcgtggccgcatcatttcgggacgtcggcgagcgtacggtggtgaacgccctcttcaacaaccaagcatatcactccccagcgacagctttagccgtggtagataatctcctgttcaaactgctgtgtggaccccatgcatctatagtcgtgtcgaactttccccagccgaggagcgctttacaagctgcaaaagatcagtttaacgaggggaggaaaggctttgatatagcccttaacctcttatttgccatggcatttttggcatcaacctttagcatactcgctgtttctgagagggctgtccaagctaagcatgtccaatttgtgtccggcgtgcatgttgcttcattttggctttctgcgctgttgtgggatttgatctcgttcctgattccctccttactgctactggtggtttttaaagccttcgacgtgcgagcttttacaagagacggccacatggccgatacactactgctcctacttctgtatggctgggcaatcatcccgctgatgtacttgatgaactttttttttctgggtgccgcaacagcctacaccaggctgactattttcaacattctgtctggcatcgcgacgttcctaatggtgactatcatgagaatccctgcggtaaagctggaggaactgtctaaaactctggaccacgttttcctcgtgttgcccaaccactgcttgggtatggcagtgagctcattctacgagaattatgagacccggcgatattgcacatcatccgaggtggctgcccattactgcaaaaagtacaatatccagtatcaggagaatttctacgcctggtcggccccaggggtagggagattcgttgctagtatggccgcttctggatgcgcttacctgatcctgttgttcttgatcgaaaccaatctactccagcggcttaggggaattctgtgcgcactgcgtcggcgaagaacactcaccgagttatacacccgcatgccagtactgcccgaggatcaggacgtggcagatgagagaaccaggatcctcgccccatcaccagacagcctcctgcatactccactgatcattaaagaactttctaaggtgtacgaacagagggtccctttgctggcagtcgaccggctgtccctcgctgttcagaagggggagtgtttcggactgcttggtttcaatggtgctggaaagaccactacttttaagatgctgaccggggaagagtctctgaccagtggcgatgcgttcgtcggagggcataggatcagctctgacgtggggaaagtgagacagcgcatcgggtactgtccacagtttgatgcgctgctggatcacatgacaggccgtgagatgttagtcatgtatgctagactgcgcggtatccctgagagacatatcggagcatgtgtcgagaacaccctgaggggactcctgctggagcctcacgccaacaagctcgttagaacttactcagggggtaataaacgaaaactgagcaccgggattgccctgattggagagcctgccgtcatttttttggatgaaccctccaccgggatggaccccgtggcacggaggctcctctgggataccgtggcacgggcacgcgaatcaggcaaggctataatcattacctctcatagtatggaagaatgtgaggccttgtgtaccagactggctattatggtccaggggcagtttaagtgtctgggcagccctcagcacctgaagtctaaatttggcagcgggtatagtctgagagcaaaagtccagagcgaggggcaacaggaggctctcgaggagtttaaagcgtttgtggacttgactttccccggaagtgtgcttgaggatgagcatcagggcatggtccactaccatctgccaggccgagatctgtcttgggcgaaggtgttcgggatcttggagaaagccaaagagaaatacggggtcgatgactactctgtgagccagatctctctagagcaggtcttcctcagcttcgcccatctgcagcctccaaccgcagaggagggaaggta

SEQ ID NO: 215354 - DNA, 6821 bp, synthetic construct
  misc_feature 1..6821: note = Description of Artificial Sequence: Synthetic coding sequence
  source 1..6821: mol_type = other DNA
atggggttcgttagacaaatacagctgctcttatggaaaaactggacattgagaaaaagacaaaagatccggtttgtcgtggagttggtttggccgctgtccctgtttctggtgctaatctggttgaggaatgctaaccctctttattcccaccacgaatgccacttccccaacaaagccatgccttccgccggaatgctcccatggctgcagggaattttctgcaacgtgaacaatccatgtttccaaagcccaaccccaggagagtccccgggaattgtcagcaactataataacagcatcctggctcgtgtctatagggattttcaagagctcttgatgaatgccccagagtcccaacacctcggacggatttggactgaactccacattctatcacagttcatggacactctgaggacccacccagagagaatcgccggtcgaggtattaggatacgggatatcctcaaagatgaggagacgctgactctctttctcattaaaaatatcggcctatctgatagtgtggtctacctgcttattaactcccaggtgcggcctgagcagtttgcccacggcgtgcctgatctggccttgaaggacatcgcttgttctgaggcattactcgagcggtttatcatcttttctcaaaggcggggtgcaaagaccgttcgttacgctctttgctctctgtcacagggaactctgcagtggatcgaggacacactctatgcgaatgtggatttctttaaactgttccgcgtcctgcccaccctcctggactcccgctcacagggaatcaatctgcggtcttgggggggtattctctccgacatgtctcctcgcatccaggagtttatccacagaccaagcatgcaggacctcctgtgggtaaccagacccctgatgcagaacggcggacctgaaacttttactaagttgatgggcatcctgtccgacttgctctgtggataccccgagggtgggggatccagagtgttgtcctttaactggtatgaggacaacaattataaggccttcttgggcatagacagcacccgtaaagaccccatctactcgtacgatcggcgaacgaccagtttctgtaatgctctcattcagagtcttgagagcaatcccctgaccaagattgcctggagagccgcaaaaccgcttctgatgggcaaaatactttataccccagactcccccgcagccagacggatactgaagaacgccaactcaacatttgaagagctggaacacgttcgcaagctggtcaaggcctgggaggaggtcggccctcaaatttggtacttctttgacaattcaacccagatgaacatgatccgggatactctgggcaacccaaccgtgaaagacttcctgaaccgacaacttggcgaggaagggattactgccgaggctatactgaatttcctgtacaagggccctcgggagagccaggccgacgacatggccaactttgactggagagatatctttaatattaccgacagaacgttgcgtttggtaaaccagtatcttgagtgtctggtgctggataagttcgagtcttataatgatgaaactcaactgacacagagggctctgagtcttctggaggagaatatgttctgggcaggagtcgtcttccccgacatgtacccatggacgagttctctccctccacacgtcaagtacaagattagaatggacatcgatgttgtggagaagactaacaaaatcaaagaccgctactgggactcggggcctcgggctgatcccgtcgaggacttccgctatatctggggcggtttcgcctacctgcaagatatggtggagcagggtattactcggtcccaggtgcaggcggaggcaccggttggtatttatttacagcagatgccgtatccctgttttgtggatgacagctttatgatcatcctcaataggtgctttcccatctttatggtcctggcctggatatacagcgtctccatgaccgtgaaaagtatcgttcttgaaaaggaattgcgactcaaggagactttaaagaaccagggtgtgtcaaacgcagtgatctggtgtacatggttcctcgatagcttcagcatcatgagcatgagtatctttctgctcacaatcttcatcatgcatggtcgcattctccactattccgatccatttatattatttttgttcctgcttgcattctccaccgccacgataatgctgtgtttcctactgtcaacttttttctcaaaggctagcctggctgctgcctgttccggcgttatctatttcactctgtacctgccccacatcttgtgcttcgcttggcaggataggatgaccgcagagctgaagaaagccgtatccctcttgtcgccggttgcattcggatttgggactgagtacttggtcaggtttgaggagcaaggtctcgggctacagtggtcaaacataggtaattctccaacagagggggacgagtttagtttcttgctgtccatgcaaatgatgttgctggatgcagctgtgtacggattacttgcctggtatctggatcaggtcttcccgggagactatggcacgccattgccgtggtacttcctgctccaagagagttattggctcgggggtgagggttgttccaccagggaggaacgcgctctggagaagactgagcccctgacagaggagactgaagacccggagcaccctgaaggcatacatgatagcttcttcgagagagagcaccctggctgggtccctggcgtatgcgtcaagaacctggtaaaaatttttgagccctgtggtcggccagccgtggaccgcctgaacattacgttctatgaaaaccagattaccgcatttctgggacataacggagcagggaaaactacgacactgagcattttaacaggtctcctgcccccaactagcggcactgtcctggtgggcggacgagacatagagacttccctcgacgcagttcgccagtccctcgggatgtgccctcaacacaatatcctgttccaccacttgactgtggcagaacatatgctgttctacgctcaactgaaaggaaagtcgcaggaggaagctcaattggagatggaggccatgctcgaggacaccgggcttcatcacaaaaggaatgaggaagcccaagatctctcggggggaatgcagcgaaaactttccgtagctatagcctttgttggagatgccaaggttgtcatattagacgagcccacttctggagtagacccttactcgagaaggagcatttgggacctcttgctcaaataccggtccggcagaacaattataatgagcacacatcacatggacgaggctgaccttctgggggacagaatcgctattattgcccaaggtcgactgtactgttccgggacgccgctttttttaaagaattgctttggaactggattgtatctaaccctcgtgaggaagatgaagaatatacagtcccagagaaagggctcggaagggacatgctcgtgctcttccaagggctttagtacaacgtgccctgcacatgtcgatgacttgactcctgaacaggtgctcgacggggatgtaaatgagttaatggacgtggtcctccaccacgtgccggaggccaagttagtcgagtgtattggacaggagctgattttcctgctccctaataagaactttaagcacagagcttatgcttctttgtttcgcgagctagaggagacattggccgatctcgggttgtccagcttcgggattagtgacacgccattggaagagatctttttgaaagttactgaggatagtgatagcgggccacttttcgccggtggtgcgcagcagaagcgcgagaacgtgaaccctcggcatccctgcttaggaccgcgtgagaaagcgggacagacaccccaagattcaaatgtctgttcgccgggagccccagcagcccatcctgaaggccagcccccacctgaaccagaatgtcccggtccccagctaaacactggtacccagctggtcctgcagcatgtgcaggcactgctggtcaagagattccagcataccatcaggtctcacaaagactttctggcacagatcgtcttacctgcgacttttgtatttctggccttgatgttgtccattgttatcccaccctttggagaatatccagccctgactctgcacccctggatctatggacagcagtataccttcttctccatggacgagcccggatccgaacagttcaccgtgctggcagatgtgctcctgaacaaaccgggattcggtaatagatgtctcaaggagggctggctgcccgaatacccatgcggcaatagtactccttggaagactccctccgtctctcctaacataacccagctcttccagaagcagaaatggacccaggtcaatcccagcccatcctgccgatgttcaactcgggagaaactgactatgttgccagagtgccccgaaggtgctggaggcctccctccaccacaaagaacacagagatcgactgaaattctgcaagacctgaccgatcgtaacatcagtgatttcctggtgaagacttaccccgctctcattagatccagcctgaaatccaagttctgggtgaacgagcagcgctacggcggaataagcatcggcggtaagttacctgtggtccctattaccggggaggcactcgtcggctttttgagcgacctggggaggatcatgaatgtgtccgggggtcccatcaccagggaggcgtcaaaagagattcccgatttcctaaagcacctggaaaccgaagataatatcaaggtgtggtttaacaacaagggctggcacgcattggtgagttttcttaatgtggcacacaacgccattttgcgggcttctctgcctaaggacagaagccctgaagaatacgggatcaccgtgatatcccagcctcttaatctcaccaaggagcagctctccgaaatcaccgtgttaaccaccagcgtggacgctgtcgtggcaatctgtgtcatcttctcaatgtccttcgtccccgcaagttttgtgctatacctgatccaggagagagtgaataagtctaagcacttacagttcatcagcggggtctcccccacaacctattgggtgactaactttctgtgggacatcatgaattatagcgtgtcagccggtctggtggtcggtatcttcatcggatttcagaagaaggcctatacatccccagagaatctccccgcactggtggctctcctactgctttacggctgggccgttatccccatgatgtatcctgctagttttttgtttgacgttccttctacagcatatgtggccctgagctgcgctaatttgtttataggcataaattcatcagccatcaccttcatcctggagctgttcgaaaacaataggaccctgctgcgctttaacgctgtgcttcgcaaactgttaatcgtatttccgcatttttgcctgggtcgaggcctgatagatctggctctgagtcaggccgtcaccgatgtctacgcacggttcggggaggagcactcagccaatcctttccactgggacttaataggaaagaatctcttcgcgatggtggtggaaggggtcgtgtactttctgctgaccctcctggttcaacgtcactttttcctgtcccagtggattgccgagcccaccaaggagccgattgtggacgaggatgatgatgtggccgaggagcggcagagaatcatcaccgggggaaataagactgatatactgagacttcacgagctcaccaaaatttatcccggtacctctagccccgcagttgaccggttgtgcgttggcgtgagacccggagagtgtttcggcttactgggtgtgaatggtgctggcaaaaccacaacctttaaaatgctgacaggcgacactactgtaaccagtggcgacgccaccgtggccggtaagagcatccttacaaacatcagcgaagtgcaccaaaatatgggctattgcccccagtttgacgcaatcgacgaacttctaacgggtagagaacacctgtatctgtatgccagactgagaggcgtacctgcggaagagattgagaaagtcgctaactggagcataaaatctctggggctgaccgtttatgcagattgcctagcgggaacctatagcgggggaaacaagagaaaactgtccacggctattgcactcattggctgtccgcctctcgtcctcctggatgaacccaccacgggaatggatcctcaggcgagaaggatgctctggaacgttatagtgtccattattagagaggggcgagctgtggtcctgaccagtcacagcatggaagaatgcgaggctctgtgtaccaggctcgccataatggtgaaaggggcatttaggtgtatgggcacgattcagcatctgaagtcaaaatttggcgatggatatatagtgaccatgaaaatcaaatccccaaaggacgacctgttacccgacttaaatccagtggagcagttctttcagggcaactttcctggatctgtccaaagggagcgccattataacatgctgcagtttcaggtctccagttcttcccttgccaggatattccagctgcttctgagccataaagatagcctgctcatcgaggaatactctgtcactcaaacgaccctggaccaggtttttgttaactttgccaaacaacaaacagagagccacgacttaccactgcacccacgtgccgctggtgctagccgacaggctcaggatta

SEQ ID NO: 215355 - DNA, 2940 bp, synthetic construct
  misc_feature 1..2940: note = Description of Artificial Sequence: Synthetic coding sequence
  source 1..2940: mol_type = other DNA
atgggctttgtgcgccaaattcagctgctcctctggaaaaattggaccctcagaaagaggcaaaaaataaggtttgttgtggaactagtgtggcctctgtctctgttccttgtcttaatttggctgaggaatgctaatcctctttacagtcatcatgaatgccacttcccaaacaaggcaatgccaagtgctggcatgctgccttggctgcagggcattttttgtaacgtaaataacccctgcttccagtctcctacacctggggaatctcctggtattgtgtccaattacaacaacagcattctcgccagggtttacagagacttccaagagctgcttatgaacgccccagaatcacagcatctgggcaggatctggacagagcttcacatcctctcgcagtttatggatacactccgcacccatcctgagcggatcgctggaaggggcatcagaattcgggatatcctaaaggacgaagagactctaacgctgtttctgataaaaaatataggcctaagcgacagcgtcgtatacctgctaatcaacagtcaggtgcgtcccgagcagttcgctcacggtgtgccagacctggcactcaaggacattgcctgctccgaggctctcttggaaagatttatcatcttctcccaacgcaggggcgcaaaaactgtccgatatgctctctgtagcttatcccagggtactctgcaatggatcgaggacacattgtacgctaatgtggacttcttcaaactctttagggtgcttcctactctcctcgactctagatctcaggggattaatctccgtagttggggtggaatcctctccgacatgtcgcctcgtattcaagaattcatacacagaccgagcatgcaggacctcctttgggtgacacgccctttaatgcaaaacggtggcccagaaacattcacgaaacttatgggaattctctccgacctcctttgcggctatcctgaggggggtgggagtagagtgttgtccttcaattggtatgaagataacaattacaaagcgttcctgggaatcgactctacccgtaaagaccctatttactcttacgatagacgcactaccagcttctgcaacgccctgatccagtccctcgagagcaatccccttaccaaaatagcatggcgggctgccaagccactgcttatgggaaaaatcctgtacacgcccgattcccccgcagctcggaggattctgaagaatgccaatagtacgtttgaggagctggagcacgtccgcaaactcgtcaaggcttgggaagaggtgggtccccagatctggtattttttcgacaacagtactcagatgaacatgattcgcgacaccctgggaaaccctacagttaaggattttctgaaccggcaacttggagaagagggtataacagccgaggcaatcctgaacttcctctataaaggacctcgcgaatcccaggctgatgatatggcaaatttcgactggcgggacatattcaacattaccgatcggaccttgaggttggtcaatcagtatttggagtgcctggtacttgataagttcgagtcgtataacgacgagacacagctcactcagagagctctaagtctcctggaagagaacatgttttgggctggcgtggtatttccagacatgtatccttggacgtcctcccttcccccacatgtgaaatataaaattcggatggacatcgatgttgtggagaagaccaataagatcaaggacaggtattgggactctgggccaagagcggatcccgttgaggattttaggtacatctggggcggtttcgcttacctgcaggatatggtggagcaaggtataacacgtagccaggtccaggctgaagccccagtgggaatctatctgcaacaaatgccttacccttgctttgttgatgacagtttcatgattatcctgaaccgctgttttccaattttcatggttttagcttggatctatagcgtgtcaatgacggtgaaatccattgtgctggaaaaagaactgagactgaaagagactctgaagaaccagggcgtgagtaatgcagttatttggtgtacctggtttctggattccttcagtattatgagcatgtcaattttcctgctcacaatcttcataatgtccttactgtctcctgtggcctttggcttcggtaccgaatatctggtgagattcgaggaacagggcctcgggctccagtggagtaacatcgggaactcccctactgagggcgacgagttctcattcttgttatccatgcagatgatgcttcttgacgctgccgtctacggtttgcttgcgtggtaccttgaccaggtttttcctggcgattacggcactccgctgccatggtatttcctcctccaagagagctactggctcggaggagagggctgctctacccgagaagaacgggctctggagaaaaccgaacctctaactgaggaaaccgaggacccggagcatcccgagggcatccacgattcttttttcgaacgcgagcatccagggtgggtgcccggagtctgcgtgaaaaatcttgtgaagatcttcgagccatgcggacgtcctgccgtcgaccgcctgaatattactttctacgaaaaccagatcactgccttcctcggacacaacggcgctggtaagaccaccacctttagtgctggcgctcctctcagcagcaaggggcctgagcggcacttgctgagaggagaacacggccctccctggtttcccaaagaacagcagacccgcacatcgcaaggcgcagccaatcccagggacacagtatttaagtcatttggagaaccccaggaggggactactgcctgcaccccctgcgacggtatgttttcaagagccgttcagtgcgaatggaatgttggacctgtgcccttctag

SEQ ID NO: 215356 - DNA, 1179 bp, synthetic construct
  misc_feature 1..1179: note = Description of Artificial Sequence: Synthetic coding sequence
  source 1..1179: mol_type = other DNA
atggtggtggagggtgtggtgtactttcttctgactctgttggtccagagacacttctttttgagtcagtggattgccgaacctaccaaggagccaattgtcgatgaagatgacgacgtcgctgaagaacgacagaggatcataacaggagggaataagacggatattctcagattgcacgagttgacgaaaatttatccaggaacctcttcccctgccgttgataggctgtgcgtcggggttaggccaggtgaatgctttgggctgctgggggtcaacggggcaggcaaaactactacctttaaaatgctgacgggcgacactactgtaacctcgggggacgccaccgttgcaggaaagagcatcctgaccaacatcagcgaggttcatcaaaacatggggtattgcccccagtttgatgcaatcgatgagttactgactggacgggaacatttatatctgtacgcgcgtctgagaggcgtgccggctgaggaaattgaaaaggttgcaaactggagcataaaaagtctgggactgacagtctacgctgactgcctggccggtacttatagtggaggcaataagcgcaaactgagcactgccattgccctgatcggctgccctcctcttgtgctgctcgacgaacctaccaccgggatggacccacaggctcggcgaatgctatggaacgtaattgtttccattatcagggagggacgggcagtggtccttacctcgcacagtatggaggagtgtgaagcattgtgtactaggcttgccattatggtgaaaggggcatttagatgcatgggtaccatccagcatctgaagtctaagttcggagacggatatattgttacgatgaagattaagtctcctaaggatgaccttctcccagatctgaatccagtggagcagttttttcaaggcaacttcccaggcagtgtgcaacgtgaacggcattacaacatgctgcagttccaagtctcctcatcgagtttggccaggatttttcagttgctgctttcacacaaagattctttattgatagaggaatacagcgtgacacagacaactctggaccaggtgttcgttaattttgccaaacagcagacagagagccatgacctgccgcttcatcccagggccgcaggcgctagtcgacaggctcaggattag

SEQ ID NO: 215357 - DNA, 1632 bp, synthetic construct
  misc_feature 1..1632: note = Description of Artificial Sequence: Synthetic coding sequence
  source 1..1632: mol_type = other DNA
atgatgatgaactatagcgtgtctgccggattggtggtgggtatcttcattggcttccagaagaaagcatatacgagtcccgaaaatcttccagccctggtcgcgctgcttctcctgtacggctgggcagtgatcccaatgatgtacccagcgagcttcttatttgatgtaccctctaccgcctatgtcgcactgtcatgcgccaatttattcattggtattaactcatcagccattacattcatcctggaactatttgagaacaatcgcactctgctacggtttaatgcagttctccggaaactgctgattgtgttcccccacttttgcttgggcagaggactcatcgatctcgcacttagtcaggccgtgacagatgtgtatgccagattcggagaagaacactccgcaaatcccttccactgggaccttatcggcaagaatctgttcgcaatggtggtcgagggggtggtttacttcctcctgacccttctcgtgcagcgccactttttcctctcacaatggatcgctgaaccaacaaaagagcctatcgtggatgaagatgacgatgtcgcagaagagcgacagcggatcatcacaggtggtaataagacagacattttgcgactgcacgagctgacgaagatttacccaggtacctcgtcaccggcagtggaccggctgtgtgtgggtgtgagacctggggaatgtttcgggctgctgggggtcaacggtgctggcaaaactaccactttcaagatgttaaccggcgataccacggtcacgagtggggatgccactgtggctggcaaatccatactcaccaatatttccgaggtgcatcagaacatgggatattgccctcagttcgatgctatcgatgaactcctgaccggcagggagcatctgtacctgtatgcccgtttgcgaggcgttcctgcggaggaaattgaaaaggtagccaactggtctattaagtccctcggtctgactgtctacgcagactgccttgcaggaacttactctggaggaaacaagagaaaactgtcaacggccatcgctctgattggctgccctccactggtgctcctggacgaaccaacgaccggcatggatccccaagcgagaaggatgctgtggaacgtaatcgtctctattattcgggaggggagggccgtggtactgacctcacatagcatggaagaatgcgaggccctctgcaccaggctggcgatcatggtgaagggcgcttttagatgtatgggcactattcagcacttgaaatctaagtttggagacggatacatcgttactatgaagattaaatccccaaaggacgaccttctccctgacctcaatcctgttgaacagttctttcagggtaatttccccggtagcgtccagcgcgagcgtcactataatatgcttcagtttcaagttagtagttcatcactcgctagaatattccaactgctgctgtcccacaaggacagtctcctcatcgaggaatattctgtgactcagaccaccctggatcaggtttttgttaacttcgccaaacagcagacagaatcccatgaccttccgctgcacccaagagctgcaggcgcaagccggcaggctcaggactag

SEQ ID NO: 215358 - DNA, 3198 bp, synthetic construct
  misc_feature 1..3198: note = Description of Artificial Sequence: Synthetic coding sequence
  source 1..3198: mol_type = other DNA
atggatgtggtcctgcaccatgtgcctgaggccaaactggtcgagtgtattgggcaagagctgatattcttgttaccaaacaagaactttaagcaccgagcctacgccagtctcttccgggagctggaggagactttggcagacctgggactgagttcattcggcattagcgatactcccctggaggagattttccttaaagttaccgaagacagcgactccgggccactgttcgctggcggtgcgcagcagaagcgcgagaacgtcaacccccgtcatccctgtctgggacccagagagaaggccggacagacgccccaggatagtaacgtctgttctccaggagccccagccgcacaccctgagggccagccccctccggagcccgaatgtccgggaccgcaattaaacactggcacacagttggtgcttcagcacgttcaggcccttcttgtaaagcggttccagcatacgattcgtagccacaaggacttcttagctcaaatagtgttgcccgcaacgttcgtctttctggctttgatgctgagtatcgttatcccaccatttggggaataccccgctcttaccttgcatccatggatttacggacagcagtatacctttttttccatggatgaacctgggtccgaacagtttaccgttcttgcagacgtgctcctcaataagcccggtttcggcaatcggtgcctgaaggaggggtggctacccgagtatccctgcggtaattctactccgtggaagacaccgtctgtgtcgcccaatatcacacagctgtttcaaaaacagaagtggactcaggtgaacccatcccccagctgccgctgcagtacccgcgagaaacttactatgttgcctgagtgccctgagggggctggcggactgcctccccctcagcgaacgcaaagaagcaccgagatcttgcaggatctgacagatagaaatataagtgactttctggtgaagacctatcctgcattaataagatctagcttaaagagcaaattttgggtgaacgaacaacgctacgggggaatttctatcggcggtaaacttcccgtggttccaataacgggtgaggcgctcgttggatttttgagcgatctgggcaggattatgaatgtctcaggtggccctatcaccagagaggcaagcaaggagattcctgacttcctgaagcacctggaaaccgaggacaacatcaaggtttggtttaacaacaagggatggcatgcgctggtgtcatttcttaacgtagcccataacgccattttgcgcgcatctctgcctaaggacagatcccctgaggagtatgggatcaccgtgatcagccagcctttgaacctaacgaaggagcaactctctgagattaccgtgctcacgaccagcgtggacgccgtggtggccatttgcgttattttcagtatgtctttcgtgccggcatctttcgtgctatatctaatccaggaaagggttaacaaatcgaagcacttacagtttatttcaggggtcagcccgacaacctactgggtgactaattttctgtgggatattatgaactatagtgtttcagcaggcctggtggtggggatctttatagggttccaaaagaaggcttatacctcgcctgagaacctccctgccctcgtggctttactcttgctctatggctgggccgtaattccaatgatgtaccctgcgtccttcctttttgacgtcccatcaacagcatacgttgccctttcatgcgctaatcttttcatcggaatcaactcctctgccatcacttttatcctcgaattgtttgaaaacaacagaacactgctgaggttcaacgccgtgctgcggaaactccttatcgtgttcccgcacttctgccttggtaggggtctaatagacttagccctgagccaggccgtgactgatgtatacgctcggtttggcgaggagcattcagccaatccatttcactgggacctgatagggaaaaaccttttcgcgatggtggtggaaggggtggtgtatttcctgcttactctccttgtgcagcggcactttttcctttctcaatggattgctgagcccacaaaagaacccattgtggatgaggacgacgatgttgccgaggagaggcagaggatcattaccggcggtaataaaaccgatattctgcgcctgcacgaactgacgaagatttaccccggaacctcctcaccagccgtggaccgactctgtgtgggggttcggccaggagaatgttttgggctgctgggcgtgaacggggcaggaaagacgaccacattcaagatgctgaccggtgacaccacggtgacttctggggatgcaaccgttgcaggcaagagcattctgactaacatctccgaagtgcaccagaacatgggttactgtcctcagtttgacgccattgatgagctgctgaccggacgagagcacctttatctctatgcacgtttgaggggtgttcctgcagaggagattgaaaaagtagccaattggagcataaaaagcttaggcttaactgtttacgctgattgccttgcgggtacctattccgggggaaataagcggaaactgagtactgcaattgccttgattggctgtccgcctttagtcttactcgacgagcctacgaccgggatggatccccaggcacgtcggatgttgtggaatgtcattgtatctataatccgggagggcagagccgtggttttgactagccacagcatggaggaatgtgaagcgctgtgcactcgactggccataatggtgaagggtgcatttagatgcatggggaccattcagcatcttaagagcaaatttggagacggatatatcgttaccatgaagattaagtcccccaaagacgatcttttaccagaccttaaccctgtggagcagttcttccagggcaatttcccaggatctgtgcaacgggagcggcactacaatatgttacagttccaggtttcctctagtagcctcgccaggatctttcagcttctgctaagccacaaggattctctgcttatagaagagtactctgtgacacagaccacgctggatcaggtcttcgtgaacttcgctaagcaacagactgaatctcacgatttaccacttcatccacgagcagccggagcatccagacaagcacaggattag

SEQ ID NO: 215359 - DNA, 4928 bp, synthetic construct
  misc_feature 1..4928: note = Description of Artificial Sequence: Synthetic coding sequence
  source 1..4928: mol_type = other DNA
atgtctactgcgatccgtgaggttggtgtctggcggcagacgaggacattgcttttgaagaactacctcataaagtgccggactaagaagtcctcggtgcaggaaattctgtttccgcttttctttctgttctggctcatacttatatcaatgatgcatccaaataagaagtacgaagaagtccccaacatcgagctgaaccccatggataagttcaccctgtccaatttgattttgggctacacgcctgtcactaatattacaagttctatcatgcagaaagtctctaccgaccatctccccgacgtgataatcaccgaagagtataccaatgaaaaagagatgttgacttcaagtttatcaaagccctcgaatttcgtaggggtggtcttcaaagattctatgtcctacgagttgaggttctttcccgacatgatccccgtgtcatccatatacatggactcccgggctggctgcagcaaatcttgcgaggccgcacagtattggtcttctggatttaccgtgttgcaagcatccatcgacgctgctattattcagctcaagaccaatgtttcactgtggaaggagctggagagtacaaaagctgtgatcatgggagaaacagctgtggtggagatcgatactttcccgcgaggggtgatccttatttatctggtcatcgctttttcgccctttgggtattttctggctattcatatagtggctgagaaggaaaagaaaataaaagaatttctgaaaatcatggggctgcatgacacagctttctggcttagttgggtgttactctatacgagcctgatttttttaatgtcactccttatggccgttatcgcaactgcgtcactgctgttccctcaatcatcctcaatagttatctttctgctctttttcctttatggactgagcagcgttttcttcgctctgatgctcactccgctctttaagaaatcaaagcacgtgggtattgttgaattctttgtgactgtcgcctttgggttcatcggactcatgatcatccttatcgaatctttcccaaagtctctggtgtggctgttctctccgttctgccactgcaccttcgtcatagggatcgcccaggtgatgcacctcgaggattttaacgaaggggcatccttcagcaaccttacagccggtccgtatcccttgataattaccattatcatgctgacattaaatagtattttttacgtattactggctgtctatctggaccaagttatccccggagaattcggcctgcggcgttcttcactctactttcttaaaccttcatactggtctaaaagtaaacgcaattacgaagaactttccgagggaaatgttaatggtaacatatcgttcagtgagattatcgagccagtgtcaagtgagtttgtcggtaaggaagccattcggatctccggtatccagaagacgtatcggaagaagggagaaaacgtcgaggcactgcgcaatctgtcttttgacatttacgaagggcagattacagcattattaggtcatagcggcactggaaagagcacacttatgaatatcctgtgcggcctgtgtccaccatcagacgggttcgcatccatctacggacaccgtgtctcagaaatcgatgagatgttcgaggcgaggaaaatgatcggtatttgtccgcaactggacatccactttgatgtgcttacggttgaggagaatttatctattctggctagtattaaaggtatcccggcaaacaatattattcaggaggtccagaaggtcctgttagatctggatatgcagaccatcaaagacaaccaggccaagaagctgtcgggaggacaaaaacgcaaactctccctggggatcgccgtactgggcaatccgaagattctcctgttggacgaacctactgccggtatggatccgtgcagccgtcacatcgtctggaatctgctcaagtaccgcaaggcgaacagagtgactgtgttcagtactcactttatggatgaggccgacattctcgccgataggaaagcagtcatttcccaaggcatgctgaaatgcgtaggaagcagcatgttcctcaagagcaagtggggaattgggtatcggttatctatgtacatcgacaaatattgcgccacagagagcctgtctagcctggtgaaacaacacattcctggggctacactgctccaacagaatgaccagcaacttgtgtacagcctcccattcaaggacatggacaagttcagcgggctattctcagctctagactctcattccaatcttggagttatatcatatggagtgagtatgaccacactggaggacgtcttcctaaagctggaggttgaggccgaaatagatcaggccgattattccgtgtttacacagcagcccctggaagaggagatggactcgaaaagcttcgatgagatggagcagtcactgctcattctgtctgaaacgaaagcggctttggtgtccaccatgtctctttggaagcaacagatgtacacaatcgccaagttccattttttcacactcaaacgcgaatccaagtctgtccgcagtgtcctacttcttctgctgatctttttcactgtgcaaattttcatgttccttgtgcatcacagctttaaaaatgctgtggtccctattaagcttgtgccagacttgtatttcttaaagcccggagacaaacctcacaagtacaagactagcctgcttcttcaaaacagcgccgacagcgacatctcggacctcatcagctttttcacgagtcaaaacatcatggtgaccatgataaacgacagtgactacgtgtctgttgcacctcactcagctgccctgaacgtcatgcattccgaaaaggactacgtgttcgctgcggtgtttaacagcactatggtttattctttgccgatactggtgaacataatttctaactactacttgtaccatctgaacgtgacagaaacaatacaaatttggagcacgcctttttttcaggagattaccgacattgtttttaaaatagaactgtacttccaggccgctctgctcggaatcattgtaaccgccatgcccccatacttcgctatggaaaatgctgagaaccacaagatcaaggcctacacccagctcaaactctccggccttctcccctctgcctattggattgggcaggccgtggtagacattccgctattcttcatcattcttatactgatgttgggttcacttctcgcctttcattatggactctacttctacactgtgaagtttttggcagtcgtcttttgcctcataggttatgtgccgtccgtgatcctttttacttatattgcgagctttacgttcaaaaagattttgaacacaaaggagttctggtcttttatatatagtgtggcggctttagcttgtattgcaataactgagatcacattttttatggggtacacaatcgcgaccatccttcattacgcattttgtataatcatccccatttatccgttgctcggctgtctgatctcgtttattaagatctcctggaagaacgtgcggaagaatgtagacacctataatccgtgggaccgtctatctgttgccgttatcagtccctacctacaatgtgtcctgtggatctttttgctccagtactatgaaaagaagtatgggggtcggtccattcggaaggatccgttcttcaggaatctgtccacaaaatctaaaaaccggaagcttcccgaaccccctgacaacgaggacgaggatgaggatgtgaaggcagagcgcttgaaggttaaagagttgatggggtgtcagtgctgtgaagaaaaacccagcataatggtcagcaacctccacaaagaatacgatgataagaaagactttctgctctcgcgcaaggtcaagaaagtcgccaccaagtatatcagcttctgtgttaagaaaggcgaaatactgggactcctcggtcccaatggagccggaaagagcaccatcattaatatcctcgttggtgacatcgaacccacctctggccaggtgttcctcggcgattatagttcagagaccagtgaggacgacgattctctgaagtgcatgggttattgcccacagattaaccctttatggcctgataccaccctccaagaacacttcgagatttacggagctgttaaagggatgtctgcgagcgatatgaaagaagtcatatctcgtattactcatgctctcgacctgaaggagcacctgcaaaagactgtgaaaaaactgcccgcaggcattaagcggaaactctgcttcgcgctgtccatgctggggaaccctcagatcaccctcctggacgagcccagtactggcatggaccctaaggctaaacagcatatgtggcgcgctattcgcacagccttcaagaaccgcaaacgcgctgcgattttaacaacacactatatggaggaggccgaagcggtctgcgaccgcgtggccatcatggtctccggccagctccgatgcattgggaccgttcagcacctgaagagcaagttcgggaagggatactttctcgaaatcaagttgaaggattggattgagaatctggaggttgaccggttgcagcgagaaatccagtacatcttcccaaacgcaagtcgtcaggaatcctttagttccatcctcgcctacaaaattcctaaagaggacgtgcagtctctgtcccagtccttcttcaagctagaggaagcgaagcacgcatttgcgatcgaagagtattctttctcgcaagccacactggaacaagttttcgtggagctgactaaggaacaggaagaggaggacaacagttgcgggacactaaacagtacactgtggtgggaaagaacacaggaggatcgagtcgtattcta

SEQ ID NO: 215360 - DNA, 4931 bp, synthetic construct
  misc_feature 1..4931: note = Description of Artificial Sequence: Synthetic coding sequence
  source 1..4931: mol_type = other DNA
atgagtacagcgatccgagaggtgggggtttggcggcagaccagaactctcttactaaaaaactacctgattaaatgtcgcactaagaagtcgtccgtccaagagatcctcttccccctcttcttcctgttttggctcatcctcattagtatgatgcacccgaacaagaaatatgaggaggtcccaaacatcgaactgaaccccatggacaagtttaccctttcaaacctaattctggggtatacccctgttacgaacatcactagcagcatcatgcagaaggtgagcacggaccacttgcccgacgtcatcataacggaggagtacaccaacgagaaggagatgttgacgagctccttatccaaaccatctaactttgttggagtggtgtttaaagactccatgagttacgagctccggttctttccagacatgattcctgtctcaagtatttatatggatagccgggcaggatgttcaaagtcttgcgaggccgcacagtattggtcctctgggtttacggtcttacaggccagcatagacgcagccatcatacagttgaagactaatgtgtcgctgtggaaagagctagagtccaccaaagccgtaataatgggggagacggccgtggttgaaattgacacatttccacgtggcgtgattctgatctatctcgtcatcgccttttccccctttggttatttcctggccatccatattgtcgctgaaaaagaaaagaagatcaaggaattcctgaaaataatggggctgcatgatacagcgttctggctgtcatgggtgctgttgtacaccagccttatcttcctgatgagcctcctgatggccgtgattgccaccgcctcactcctgtttccgcagagcagctccattgtaatctttctcttgtttttcctttacggcctgtccagtgtgtttttcgcactcatgctgactcctctttttaagaagtccaagcacgtgggcatagtggagttcttcgtcacagttgcctttgggtttatcgggcttatgataatacttatcgaaagcttccccaagtctttggtttggctgttctctcccttttgtcactgcacattcgtaattggcatcgcccaggtcatgcacttggaggattttaacgaaggcgcttcctttagtaatctgaccgcagggccttaccctttaatcatcacaatcatcatgttgaccctgaacagtattttctacgtgctcctggcagtgtatctagatcaggtgatcccaggcgagttcggcttgaggagaagttctctgtatttcttgaaaccttcttattggagcaaaagcaaaagaaactacgaggagttgtctgaaggaaacgtcaacggtaatatctcattttccgaaattattgagcccgtgtcatccgagttcgtcgggaaggaggccatcagaatctcaggcattcagaagacatacagaaaaaagggggagaatgtcgaggctcttaggaacttatcctttgatatttacgagggacaaatcactgccctgctgggtcacagcggtacgggtaaatccacgctgatgaatatactgtgcggtctgtgtcccccttctgacgggttcgcatcaatttacggtcatcgtgtatccgaaatagacgagatgttcgaggctcgcaagatgattggcatctgtccacaacttgatatacactttgatgtgctgaccgtggaggagaacctatccatactggcttctataaagggcattccagccaacaacattatacaagaagtccaaaaggtgctcctagacctggatatgcagaccatcaaggacaatcaggcaaagaagctgagcgggggacagaaacgtaagctgagccttgggattgctgtgttgggtaatcctaagatccttctgttggacgaacccactgccggaatggacccgtgcagcagacatatcgtttggaatctgttgaaatatagaaaggccaacagggtcaccgtcttctcaacccattttatggacgaagcggatattttggctgaccgaaaggcagtgattagccagggcatgctaaaatgcgtcggtagctcaatgttcttgaaatcaaaatggggaattgggtaccggctgtccatgtatatcgacaagtactgtgctactgagagcctttcatctctggtgaagcagcatatcccaggagcaaccctactgcagcagaacgaccagcagctggtctatagcctcccttttaaggacatggacaagttcagcggcttgttcagcgcccttgatagtcactcgaatctaggcgtcatctcttacggggtgagcatgacaacgctcgaagatgtattcctcaaacttgaggtcgaagcggagattgaccaggcggactacagtgtgttcacccaacagccgctagaggaggagatggactctaagtccttcgatgagatggaacagagcctccttattcttagtgagacaaaagctgccctggtgagcactatgagcctgtggaagcagcaaatgtacaccatcgccaaattccacttcttcacattgaaaagagagtctaaaagcgttcgctccgtgctgctgctcctgttgatcttttttaccgtacaaatatttatgttcttagtgcatcatagctttaagaacgccgtggtacccatcaagctggtgcctgacctctacttcctaaagccaggcgataaaccccataaatacaaaacctcactgttgcttcagaacagcgccgctgacagtgatattagtgacctcatttctttcttcacctctcaaaacataatggtgaccatgattaacgacagcgactacgtgtctgtagccccacatagcgctgcactcaacgtcatgcacagcgagaaagactacgttttcgcagcggtgttcaattcaactatggtgtactccctgccaattctggtaaatattatctccaactactacctgtatcatctgaatgtgacggagacaatccagatctggtccactccattctttcaagaaattaccgatatcgtgtttaagattgaactgtatttccaagctgctctcttgggcataattgttactgctatgcccccttacttcgccatggagaacgctgagaatcataagattaaagcatacacgcagttgaaactgtccggattgctgcccagcgcttactggatcggccaggccgttgtggacattcctctctttttcataatacttatccttatgctgggatcccttttagcctttcattacggtctttatttttacaccgtgaaattcctggcggtggtgttttgtttgattggctacgtgcctagcgtcatcctctttacttacatcgcatcgttcacgttcaaaaagattctcaacacgaaagagttctggagtttcatctatagcgtggccgcacttgcatgcattgccatcaccgagataaccttcttcatgggctatacaattgccacaatccttcattacgctttttgtattataatccctatctacccgctgctcgggtgcctcatttcatttattaaaattagctggaagaatgtgagaaaaaacgtagacacctataacccatgggacaggctaagtgttgccgttatttctccatacctgcagtgcgtactttggatctttcttctacagtattatgagaagaaatacggtggacgcagtatccgcaaagatccatttttccgcaacctgtccactaagagtaagaaccggaagcttcctgagccccctgacaacgaagacgaagatgaggatgtcaaagccgagcggctgaaagtgaaagagctgatgggatgccaatgctgcgaagagaagccgtcaatcatggtgagcaacctacacaaagaatatgatgacaagaaggacttcctcctgagtagaaaagttaagaaagttgccaccaagtatatctctttttgtgttaagaagggagagattctgggactgttgggccctaacggcgcaggaaagtccactatcattaatatccttgtcggagatattgagcctacttccggccaagtctttttaggcgactacagcagcgagacttcagaggatgacgactctctgaaatgtatgggctattgccctcagattaaccctttgtggcccgacaccactctgcaggagcatttcgagatatacggcgctgtgaaggggatgtcggcttccgacatgaaagaggtgatatccagaattacccacgccttagacctgaaagagcacctccagaaaaccgtgaaaaagcttccggcagggatcaaacgtaagctgtgcttcgcactcagtatgctcgggaacccacagataactctcctggacgagcctagcactggtatggaccccaaggctaaacagcacatgtggagagctatcaggaccgccttcaagaataggaaaagggctgcaatcctcacgacccactatatggaagaggccgaagcagtgtgcgatcgagtagccatcatggtttcaggacagctgcgctgcataggcaccgttcaacatctaaaatcgaaatttggcaaaggttatttcctagaaatcaagctcaaggactggattgagaatctcgaggtagataggctgcagcgggagatccaatacatttttccgaacgcaagcagacaggagagcttctcatctatactggcctataagattccaaaggaggacgttcagtcgttgtcccagagctttttcaaactggaggaagcgaagcacgcgtttgccatcgaggaatacagcttctcgcaggccacgctggagcaagttttcgtagagctcaccaaagagcaggaggaggaggacaattcatgcggaactctgaattcaacactgtggtgggaacgcacacaagaggatagggttgtattcta

SEQ ID NO: 215361 - DNA, 4854 bp, synthetic construct
  misc_feature 1..4854: note = Description of Artificial Sequence: Synthetic coding sequence
  source 1..4854: mol_type = other DNA
atgaacatgaagcagaaaagtgtgtatcagcagactaaagccctcctgtgcaaaaattttctgaagaaatggcggatgaaacgggaatctctgctggaatgggggctatcaattctgctgggactctgtattgccctcttttcatcatctatgcgcaacgtgcagttccccggaatggctcctcagaacttaggccgagttgataaatttaatagctccagtcttatggtggtctacacccccatatctaaccttacccagcagatcatgaataagaccgctcttgccccattactgaagggcacctccgtgataggtgcgccaaataaaacacatatggatgaaattttgctggagaacttaccctacgccatgggaatcatcttcaacgagacattctcatacaaactgatattttttcagggttacaatagcccactgtggaaagaggacttttccgcccattgttgggacggatacggcgagtttagctgtaccctgaccaaatattggaatagaggtttcgtcgcactccaaaccgccatcaatactgcaatcatagaaatcacaactaaccaccctgtaatggaagaactgatgagcgtgacagccatcactatgaaaacattgccgtttatcactaaaaatctactgcataacgagatgttcatcctcttttttttgctgcacttttcgcctctggtctactttatttctttgaacgtcacgaaggaacgcaaaaagtctaagaatctaatgaaaatgatgggtttgcaagacagcgccttctggctgtcgtggggtctcatttatgcaggctttattttcattatctccatttttgtgactatcatcatcaccttcacacagatcatcgttatgaccggcttcatggtgatttttatccttttctttctgtatggcttgtcactcgttgccctggtgttcctgatgagtgtcttgctcaaaaaggctgtgttaacgaatctcgtcgtgttcttattgacactgttctggggctgtctggggtttaccgtcttctacgagcagttgcccagtagcttggagtggatcctcaacatttgctccccgtttgcttttacgaccggtatgatccagatcatcaaactggactacaacttaaatggggtgatatttcccgatccaagcggtgactcttacactatgatcgctaccttcagtatgttactgctggatggcctgatttatctgctgctggcgctatattttgacaagatactgccttatggcgacgaaaggcactactctcccctcttttttctgaacagctcctcatgtttccagcatcagcggactaacgctaaggtgatcgagaaggagattgacgccgagcacccctccgacgattacttcgagccggtggcacctgagtttcaggggaaggaagcaattcggattagaaatgttaagaaagagtataagggaaagtcagggaaggtcgaggcgttaaaaggtcttcttttcgatatatacgaaggtcagattaccgcgattctggggcactctggcgctggaaagtcttcccttctgaacatactgaacggcctgtcagtgccgaccgaaggaagcgttacaatctataataagaacctcagcgagatgcaagatctggaagaaatcaggaagattacaggagtatgcccccagttcaacgttcagttcgatatcctgacagtgaaagagaacctgagcctgtttgccaaaataaaagggatccatcttaaagaggtcgaacaggaggttcagcgcatcttactggagttggacatgcagaacattcaggacaaccttgcgaaacacctgtcagagggacagaagaggaagctcaccttcgggataactatccttggcgacccgcagatattgctgctcgacgaacctaccactggcctggaccctttcagtcgcgaccaagtgtggagcctcttaagagagagacgcgcagaccatgtgatcctcttctccacgcagagcatggacgaggctgatatcctcgccgaccggaaggtcatcatgtccaatggtaggctcaaatgcgctggttcgagtatgtttctgaagcggcgttggggactaggttaccatctatccctccaccgaaacgaaatctgcaatcctgagcagatcaccagctttatcacccatcacattcccgacgcaaagctgaaaacagaaaataaggaaaagctcgtctataccttgccgctggagcgcacaaatacctttccagaccttttcagcgatctggacaagtgttcagatcagggtgtgaccggatacgatatctcaatgtcaacgctgaacgaagtcttcatgaaactggaaggccaatctacaattgaacaggactttgagcaagtcgaaatgataagggattccgagtcattgaacgaaatggagctggcacatagctccttttctgagatgcagacggccgtgagtgacatggggctgtggagaatgcaggtgtttgctatggctcggctaaggtttctgaaactcaagcgccagaccaaggtcctgttaacactgctactcgtcttcggaattgctatatttcccctgatcgtggagaacatcatgtacgcaatgctgaacgagaagattgattgggagtttaagaatgaattgtactttctgagccccggacaattaccccaggagcctcggacttctctgctgatcattaacaatacggaatctaacatcgaggattttattaaaagtctcaaacatcagaacattcttctggaagtagatgactttgagaataggaatgggactgacgggctgtcttacaacggcgctatcattgtctctggaaaacagaaagattacaggttctcagttgtgtgtaacactaaacgattgcactgtttccctattctaatgaacattattagtaacggcctgcttcaaatgttcaatcacacacagcacatcaggattgaaagctccccctttcccctgtcacacattggtctttggaccggtcttcctgatggatctttctttctgtttctggttttgtgctccatctccccttacattaccatgggcagtataagcgactataaaaagaatgccaaaagccagctgtggatctccgggctctacactagtgcttactggtgcgggcaagcattggtggacgtctccttttttattctcattctactcttgatgtatctgatcttttacatcgaaaatatgcagtatctcctcataacctctcagattgtcttcgccctcgtgattgtgactcctgggtatgcagcatcacttgtctttttcatttacatgatatccttcatctttcgcaagcggaggaaaaacagcggcctgtggagcttctacttctttttcgcctccactattatgttctcaatcaccctcatcaatcatttcgatttgagcattctgattacaactatggtgcttgtgccctcttatacactgctggggtttaaaacatttctggaagtcagagatcaggagcactacagggagttccctgaggccaacttcgagctctcagctacagatttcctggtgtgttttattccctactttcaaacactcctgttcgtgttcgtgctccgctgtatggaactgaagtgcggaaaaaaacgcatgcgaaaggaccctgtgttccgtatctccccccaatcaagggacgcaaagcccaatcctgaagagcctatcgacgaagacgaggatattcaaacagagcgaatccgtacagcgaccgctctgaccacatcaatcttggacgagaagcccgttattattgctagctgcctccataaggaatatgcagggcagaaaaagagttgcttcagcaagaggaaaaagaaaatcgctgcccgaaatattagcttctgcgtgcaggagggcgaaatcttaggactgctaggaccgaatggtgcaggcaagagttctagtattaggatgatcagcggaatcacaaagcctacagccggagaggtggagttgaaagggtgtagttccgtgctggggcacttaggctactgcccgcaggagaacgttctatggcctatgctgaccttgcgagaacatctggaggtatacgctgcggtgaagggactgcgaaaagccgacgcaaggctcgccatcgcccgactagtgagcgccttcaaactgcatgagcagcttaacgtgccagttcaaaaactgacagccggtataacaagaaaactttgtttcgtgttatctctgctcggcaatagccccgtccttttgctggacgaaccatccaccggcatcgaccctacggggcagcagcaaatgtggcaagccatccaggcggttgtcaaaaacaccgaacgaggggtcctcctcactacccacaacctggccgaagccgaggcactctgtgatcgagtcgcaatcatggtatccggtcggctccgctgtatcggttctatccagcatctgaaaaacaagctaggcaaggactacatcttggaactcaaagttaaggagacatcccaggtaactctggtgcacacggagatcttaaagctttttcctcaggccgcaggacaggaacggtactcctcgctcctgacatataagttacccgtagcggatgtgtacccattgagccagaccttccacaaactggaggctgtaaaacacaacttcaacttagaggaatacagtctcagccagtgtactctagagaaggtatttctggaactcagcaaggagcaggaggtgggcaactttgatgaggagatcgacacaaccatgaggtggaaactcctcccacattctgatgaaccttag

SEQ ID NO: 215362 - DNA, 1434 bp, synthetic construct
  misc_feature 1..1434: note = Description of Artificial Sequence: Synthetic coding sequence
  source 1..1434: mol_type = other DNA
atgttcagtatcaccctgatcaatcacttcgatctgtccattctgattaccactatggtgctagtgccttcatacactctgctgggatttaagaccttcctggaggttcgggatcaggagcattatagggagtttccagaagccaattttgaactttccgcgactgatttcctggtgtgtttcatcccctatttccagaccctgttgtttgtgttcgtgctgaggtgcatggaactgaagtgcggtaagaaacgaatgagaaaggaccccgtgtttaggatcagcccccaatcccgggacgccaagcccaaccctgaggagccaattgatgaagacgaggacatacaaactgagcgcatcagaactgccacggccctgactaccagcatactcgacgagaagcctgtgataattgctagttgtctccataaggagtacgccggacagaaaaaaagctgtttttccaaaaggaaaaaaaaaatcgctgcaaggaatatcagcttctgcgtacaggagggcgagattttgggactgttaggccctaatggagccggaaagtcaagctccatcagaatgatctctggcatcaccaaaccaaccgcgggtgaggtggaactgaaaggctgcagctccgttttgggacatcttggatactgtccccaggagaacgtgctgtggcccatgctcaccctgcgcgagcatctggaggtgtatgccgcagtcaaaggcctaagaaaggccgatgccagactggctatcgccaggctggtgagcgcctttaagttgcacgagcagctgaacgtgccggtgcagaagctaaccgccggaattacaagaaaattatgttttgtactgtcactactcgggaactctcctgtgcttcttttggatgagccctctactggcattgacccaactggacagcaacaaatgtggcaggccatacaggcagtggtaaaaaataccgagaggggcgtgttactgactactcacaacctggctgaagccgaagcgttatgtgaccgggtggctatcatggtctcagggcgactgaggtgcatcggatcgatccagcacttgaaaaacaagctcggcaaagactacattctggaactcaaggtgaaagaaacttctcaggtcaccctcgtacataccgagatccttaagctgttcccacaagctgccggacaagaacgctattcaagtctcctaacctacaaactccctgtggcagacgtgtatcctctcagccagacattccataaattggaggctgtaaagcataattttaacctcgaggaatatagtctgtcacagtgtactctggaaaaggtgtttctcgagttgagtaaggagcaagaggttggaaatttcgatgaggagatagacacgaccatgcgatggaagctcctgcctcatagtgatgagccttag

SEQ ID NO: 215363 - DNA, 6441 bp, synthetic construct
  misc_feature 1..6441: note = Description of Artificial Sequence: Synthetic coding sequence
  source 1..6441: mol_type = other DNA
atggctttttggacacagctcatgctgttgctgtggaagaactttatgtatcgcagacgacagccagtccagctcttggttgaactgctgtggcctctgtttttgttcttcattctcgtcgccgtacgccacagccaccctcccctggaacatcacgagtgtcatttccccaacaaacctctcccatctgctggcacagtaccctggctccagggccttatatgcaacgtgaataatacgtgcttcccacagctcacccctggagaagagcccggtcgcctgtctaacttcaacgactctctagtatccagactcctggctgatgcaagaacggtgctgggcggagcttctgctcaccggacccttgctggcctggggaagctgattgccacactgagagcagccaggtctaccgcccagcctcagccaaccaagcagagcccccttgaaccgcctatgttggacgtagctgaactgttgacttcactacttagaactgaatctctgggccttgccctgggccaggctcaagagcctctgcactctctgctggaagctgcagaggatttagcccaggagctgctggcactgcggtctctggtggagttgcgggcattgctgcaaagacccagagggacaagtggcccactagagttattgtccgaggctctctgtagcgtcagggggcctagttccaccgtcgggcctagcctcaattggtatgaggctagcgacctcatggagctggttggccaggagccggagtctgctctgccagacagctccctgtcccccgcatgctccgagctgattggggctctggacagccatcccctgtccaggctgctttggcgacggcttaaaccccttatcctggggaagttgctgtttgcacccgatacaccatttacacggaaactgatggcacaggtgaacagaacgtttgaagagctgaccctcctccgcgacgtgcgagaggtgtgggagatgctgggcccacgcatttttacgtttatgaatgattcctctaacgttgcgatgctccagcgtttactgcaaatgcaggacgaagggcgacgtcagcctaggccgggtggtagggatcatatggaggcgctgaggtcattcctggatcctggatccggcggttatagctggcaggacgctcatgctgacgtgggacacctagtaggcactctcggtcgcgtgaccgagtgtctgagcttagacaagttggaagcagccccatccgaggcagcgcttgtgtccagagcattgcagctgctggccgaacaccggttttgggccggagttgtgttcttgggaccagaggatagcagcgatccaactgaacatcccacccctgacctgggccctggacatgtgaggattaaaatacggatggatatcgacgtagtgacacgtactaataagattcgcgatcgattttgggaccccggtccagctgccgaccctctgaccgacctgagatatgtttggggtggatttgtttatctgcaggaccttgtcgagcgcgctgcggtgcgcgtgctgagcggcgctaacccacgcgcaggactatacttgcagcagatgccatacccatgctatgtggatgacgtgtttctccgcgtgttgagccgcagcctgccgctattcttgacgctcgcttggatctattccgtcaccctgaccgtgaaggctgtggtgagggaaaaagagacaagacttcgggatactatgagagccatgggactgagccgggctgttttgtggctgggatggttcttgtcatgtctggggccttttctcctatcagccgctttgctcgtcctcgtcctgaaactcggtgacatccttccctacagccatcccggtgtcgtgttcctgttcctcgccgctttcgctgttgctaccgttactcaatcctttctcctgagcgccttcttttcccgggcaaatctggccgctgcttgtggaggcctggcctacttctccctgtacctgccttacgtcctgtgcgttgcttggagagaccgtctccccgctgggggtcgagtagccgcttccctcctaagccccgtggcctttgggtttggatgtgaaagcctcgccttactggaggagcaaggggagggggctcagtggcataatgtggggacgcgcccaacggcagatgtgtttagtctagctcaggtatcagggctcctgctgctggatgccgctctctacgggctggccacctggtatttagaagccgtctgtcctggccagtatgggatacctgagccatggaatttcccttttcgtaggtcgtactggtgcggacccagacccccaaaatcaccagcaccttgccctacccccctagatccgaaagtgctcgtcgaggaagctccgccaggcctctcaccaggagtgtccgtaaggagccttgaaaagcgtttccccggaagtccacagcccgctctgagaggactgtcactggacttttaccaaggacacattactgccttcctcggccataacggtgccggaaaaactacgactctaagtattctcagtggtctgttccccccatccgggggttccgcattcattctgggccatgatgtgcgctcatctatggccgcaatccgcccacacctgggagtatgtccacagtacaacgtcctgttcgacatgctgacagtggacgagcacgtatggttttacggccgacttaaggggctttcagccgcagtggttggacctgaacaagatagactgcttcaggatgttggattagtgagtaagcagtctgtgcagacccgtcacctctctggcggtatgcagaggaaattgtccgtcgcaattgcgttcgttggagggagccaagttgtcatacttgatgaaccgacggcgggtgtggatcccgcttctcgaagggggatctgggaattactcctgaagtatcgggaaggaagaacacttatcttgtctacacaccatctggacgaagcagagctgcttggcgatcgggtggcagtggtggctgggggaagactctgttgctgtggaagccccttattcttacgccgacacctggggagcggatattatttaaccttggtcaaggccaggctacccctgacaacaaacgagaaagcagatacagatatggaagggtcggtggacacaagacaggaaaagaagaacggatctcaggggtcaagagttggcaccccacagctccttgccctagttcagcactgggttcctggcgcacggcttgtggaggagcttccacacgagctggtcctggtgcttccttacactggagcacatgatggcagcttcgccacactatttcgagaattagacacccgactggcagagctgagactcaccggctacggcattagcgacacaagtctggaggagatcttcttgaaagtagtggaggaatgcgctgcagatactgatatggaagatggcagttgcggccaacatctgtgtaccggcatcgctgggttagatgttaccttgcggctgaaaatgcctcctcaggaaaccgctctggagaatggagagcccgcaggatccgctccagaaacagatcaggggtcaggcccagacgctgttggcagagttcagggctgggcccttaccagacagcagcttcaagccctgttgctcaaacggttcctgctagcgcgtcgaagcagaaggggactgtttgctcaaattgtactgcctgcactcttcgtggggctggccctcgttttcagcctgatcgtgccccctttcggccactaccctgcgctgagactgtcacccaccatgtatggggctcaagtctcattcttttcagaggacgccccaggtgatccgggtagagctcgtctgctggaggccttgctgcaggaagctggtctggaagagccccctgttcagcatagtagccatagattttccgcgcctgaagtccctgcagaagtggccaaagtgcttgcatcgggcaactggacgccagagagtccttctcccgcttgtcagtgtagtaggcctggagcccgtaggcttctccccgattgccccgctgcagcagggggacctcccccaccacaggctgtgactggcagcggcgaggtcgtccaaaatctcacgggccgtaacctgtccgatttcctggtaaaaacataccctcgactggttagacagggactcaagacaaaaaaatgggtgaatgaggttagatacggcggattttcactcgggggtcgcgaccccggacttccatccggccaagaacttggtcgctccgtagaggaactttgggccctactgtcccctctgcccggaggtgcactcgacagggttctcaagaatcttaccgcctgggcccatagtctggatgcacaggacagtctgaagatctggtttaacaacaaaggatggcactccatggtcgccttcgtaaatcgcgcaagcaatgccattcttagggctcacttgccacctggtcccgcaaggcatgcccacagcataacgactctcaaccatcccctgaatctgacgaaggagcagctcagtgaaggagctcttatggctagcagtgtcgacgtactggtgtctatctgcgttgtattcgccatgtctttcgtgccagcgtcctttacactggtgctcatcgaagaaagggtgacccgagccaagcatttgcagcttatgggcggactgtctcccacattgtattggttgggaaacttcctctgggatatgtgcaattacctcgtgccagcctgcatcgttgtgcttatctttctcgccttccagcagcgagcctatgtagctccagcaaaccttcctgcgcttctgttgttactcctgctctacgggtggagtatcactccactgatgtaccctgccagctttttcttctccgttccttctaccgcatacgtcgtgttaacctgcatcaatttgttcattggaatcaatgggtctatggccacgtttgtgctagaactgttttccgatcagaaactgcaagaagtatctcgaattctcaaacaagtgtttcttatatttccacacttttgcttaggaagaggactaattgatatggtccgcaatcaagccatggcagacgcgttcgagcggctgggagaccgccaatttcagtctcccctgagatgggaagtggtcgggaagaatctgctggccatggtgattcagggcccactgtttctgctcttcacactgttgctgcagcatcgctcacaattgctgccccagccgagagtgcgtagccttcccctccttggggaggaagacgaagatgttgcccgtgagagggagagggttgtacagggcgctactcaaggagatgtccttgtgcttaggaatctgaccaaggtttataggggtcaacgcatgcccgctgtggatagactttgtctgggaattcctccaggcgagtgtttcggtctgctaggggtgaacggagcaggcaaaacatctactttccgtatggtaacaggagatacgcttgcctcccggggagaagcggtgctggccggtcactctgtcgccagggagcctagcgccgctcacctgtccatgggctattgcccacaatccgacgctatctttgaactgcttacagggagggaacacctcgagctgttagctaggctgagaggcgtgccggaggctcaggtcgctcagaccgcaggctccggcctggccaggcttggactatcatggtatgccgacagaccagcaggcacatacagcggcggaaacaagaggaagcttgccacagccctggcactggtgggcgatcccgctgttgtctttttagacgaacccacaacgggaatggatccaagtgccaggcggttcctctggaactctcttctggcagttgtcagagagggcaggtccgtaatgctgacgtcccattccatggaggagtgcgaggctctctgctcacgactggctatcatggtgaatggccgttttaggtgcctcggtagtccacaacatttgaaggggaggttcgccgctgggcacacgctgactctgcgggtgcctgcggcaagaagccagcctgctgcggcattcgtggccgctgaattcccaggtgcggagctgcgtgaagcccatggtggacggctgcgatttcaactgcccccaggaggtcgttgtgctctggcccgagtttttggcgagttagcagtccacggggcagagcatggagtcgaagatttttcagtatctcaaaccatgctagaggaggtctttttatatttctctaaggatcaggggaaggacgaagatacggaggaacaaaaggaagctggtgtgggggtggatccagctcctgggctacaacatcctaagcgagtttctcagttcctggatgatccatcaacagcagagacagtactgtat

SEQ ID NO: 215364 - DNA, 6440 bp, synthetic construct
  misc_feature 1..6440: note = Description of Artificial Sequence: Synthetic coding sequence
  source 1..6440: mol_type = other DNA
atggcattctggacccagctgatgctgctgctgtggaaaaactttatgtataggcgcagacaacccgtgcaactcttggtggagttgttatggcccttgtttctgttctttatactggttgccgtccgtcattcccaccccccactcgaacaccacgaatgccacttccctaacaagcctttgccttcagctgggactgtcccctggctccagggtctcatatgtaatgtgaacaatacatgttttccccagcttacgcccggagaggagccagggagactctctaatttcaacgacagcttggtcagtagactcttagcagatgccaggactgtcttggggggagcgtctgcacaccgaaccctggctggcttggggaaactcattgcaacactacgcgctgctagaagcaccgctcagcctcagcccaccaaacaaagccctttagagccacctatgctcgatgtggccgagctgctgacatctctgctgcggaccgaaagcctggggttggccttaggacaggcacaggaacctcttcactctctccttgaggccgctgaggatctcgcccaggaactgctggcactcagaagcctggtggaactgagggcccttctgcagagacccaggggcacaagtggacccttggaactgctgagcgaggccctctgttctgttcggggacccagcagcaccgttggaccaagcttgaactggtatgaagcttctgaccttatggaacttgtgggacaggagccggagtcagctttgcccgatagctcgctgtcccctgcatgctccgaattgatcggagcacttgactcccaccctctatcgagactcctatggagacgtttaaagccgttgattctgggtaagcttctttttgcacctgacacgcctttcactaggaaattgatggcgcaggtcaatcgtaccttcgaggaactgacacttctgagggatgtcagggaggtttgggaaatgctcggtcccagaatctttacatttatgaacgattcctccaatgtggcaatgcttcagcggctgctacagatgcaggacgaaggcaggcgtcagccacgtcctggcggaagggatcacatggaggccctgaggtcttttctcgacccaggctcagggggatattcctggcaggatgcccacgctgacgtggggcatctcgtgggcacgctcggcagagtgaccgagtgcctgtctctggacaagctggaagccgctccgtcagaagcggctctagtctcgcgcgcactgcagctgctagccgaacaccgattctgggctggcgtggtgtttctagggccagaggacagcagtgacccaacagagcatccaaccccagatctgggtcccggacacgtacggatcaaaattcgtatggacatcgacgtggtgacccgcaccaacaaaattagagaccgattctgggatccgggtcctgcggcagacccattaaccgatctgaggtacgtatggggcggatttgtgtacctgcaagacctggtagagcgcgctgctgtgagagtgttatcaggcgcaaatccccgagctggcctctacctccagcagatgccttatccctgctacgttgatgacgtgttcctgagggtgctgtccagatcccttccattgtttctgacgctggcctggatttactccgtgaccctgacagtgaaagccgtggtgcgtgagaaggagactcggctccgggacactatgcgagcgatgggcttgtccagggctgtcttatggctgggctggttcttgtcatgtcttggaccatttcttctttcagcggctttgctggtcctggtgctgaagctgggcgacatactgccctacagccaccctggggtagtctttctattcttggccgcttttgcagtggcaactgtgacacagagtttcttgcttagtgcctttttttcccgcgctaacctcgccgcagcgtgtggcggactcgcctacttctcactctacctgccgtatgtcctttgcgttgcctggcgagacaggcttccagctggcggacgggtcgccgcttccctactgagccccgtggcttttggcttcggctgtgagagcctggctctgctggaggagcagggggagggcgctcagtggcataacgttggtactagaccaaccgctgatgtatttagtttggcccaggtgagtggcctgttactgctggacgcagcactgtacggactggccacctggtacctggaggcggtgtgcccgggacagtatggcatccccgagccctggaacttccctttccggcgatcgtattggtgcggcccaaggcccccaaaatccccggcaccctgcccgaccccactagacccaaaagtgttagttgaagaggccccaccgggactctcccctggcgtttccgtgcgcagcttagagaaacgatttcccggatctcctcaaccagccctcagggggttatcactagatttttatcaaggacacatcactgcctttctcgggcacaacggagctggcaagaccactacactgtctatactctctggtttgtttcctccctcagggggatcagcctttattttaggccatgatgtgaggtcgtccatggcagcaattagaccccacctaggggtatgccctcagtataacgtcctgtttgacatgctgacagtggatgagcatgtctggttctatggcaggctgaaaggattgagcgcagccgtggtcggcccagaacaagaccggctgttgcaggacgtagggcttgtatctaaacaatcagttcagaccagacacctgtctggtggtatgcagagaaaactgtcagtcgccattgcattcgtggggggttctcaagtcgttattctcgacgagcccaccgcgggagtggatccagccagcaggaggggcatttgggagttgctgttaaagtatcgtgaagggagaacacttatcctgagcactcatcacctcgatgaagctgagctccttggcgaccgggtggctgtggtggccggtggtcgtctatgttgctgcggttctccgctgtttctgcgcaggcatcttgggagtggctactatctcaccctggtaaaagctaggcttcctctgacaactaatgagaaagctgataccgacatggaggggtctgttgacacccggcaggaaaagaagaatggctcccagggctccagggtgggtacgcctcagttactggcactagtccaacactgggtgcccggagcacgcctcgtggaggaacttccacatgaactggtactcgtgcttccatatactggagcgcatgatggatcttttgccacactgttccgggaactggacactcgcctggcggagctccgcctgactggatacggcatcagcgacacttccctggaggaaatattcctcaaagtggtggaagaatgcgcagccgacaccgacatggaagacggctcatgtgggcagcacctctgcaccggaattgcgggtctggatgtgaccctgcggttgaaaatgccccctcaggaaacagctcttgaaaacggagaaccagccggttccgcgcctgagaccgatcagggttcagggccagatgcagtgggtagagtgcaggggtgggcactcacgcgacaacagctgcaggctcttctcctaaagcgctttctgctcgccagacgcagtcgtagaggtctgtttgcccagatcgttcttcctgcactctttgtgggtctcgctttggtcttcagcttaattgtgcctccattcgggcattaccctgcgttacgcttgtcccctacaatgtatggggctcaggtgtcgttcttttccgaggacgccccaggtgatccgggtagagccaggctcctggaagccttgctccaggaggccggtcttgaggaaccaccggtgcaacacagctcccataggttttctgcacctgaagtgccagccgaggtggccaaagttctggcatctggaaattggacccccgagtcgccttccccagcttgccagtgttctagaccaggggctcggagactcctccccgattgtcccgcagctgccggagggcctccacctccccaggccgtgaccggttcgggagaggtagtccagaacttaactgggagaaacttgtcagactttttggtgaaaacataccctagactggtgagacaagggctcaagacaaaaaagtgggtgaacgaggtgagatacgggggattcagcctggggggtcgggatcccggtctgccttcgggacaggaactggggaggagcgtagaagagttgtgggctcttcttagccccttacctggtggggctctggaccgggtgctcaaaaaccttactgcttgggcgcactccctggacgcacaggacagcctgaagatttggtttaacaataaaggatggcacagcatggttgcattcgtgaatcgcgcatccaacgcaatcctccgggctcacctccctcctggcccagctcggcacgcccactcaattaccacactgaaccaccccctgaacctgactaaagaacagctgagcgagggcgctttgatggcctcttccgtggatgtccttgtatcgatctgcgtggtcttcgcaatgagtttcgttcctgcctcctttaccctggtattgatagaagagagagtcacaagagcgaaacacttgcaactgatgggcggactttccccaacattgtactggttgggaaactttctgtgggatatgtgcaactacctggtgcccgcttgtatagtcgttttgatttttctggctttccagcagagggcctatgtagcgccagccaatttacctgctctcctgctgttactgttgctgtacggctggagcatcacgccactgatgtaccctgccagcttcttcttcagcgttccgtccaccgcctatgtagtactgacatgtatcaacttattcatcgggataaacggtagcatggctaccttcgtgttggaacttttctcagatcagaaattacaggaggtatcccgtatcctgaagcaggtctttcttatcttcccccacttttgtctgggtcgcggtttgattgatatggtgaggaatcaggctatggccgacgcctttgagaggcttggcgacagacagttccagtccccattaaggtgggaagtggtaggtaagaatctgctggccatggttattcagggcccactattcctcctctttactctgctgttacaacaccgatcccagctcctcccccagccacgagtgcgaagtctgccactgctaggagaggaagatgaagacgttgcgagggagagagagagggtcgtgcagggggcaacccagggcgacgtcctggtgctgcggaaccttacaaaagtgtaccgagggcagagaatgcccgctgttgatcggctgtgccttggcattcctcccggtgaatgtttcgggcttctaggagtcaacggagcaggcaagacgagtaccttccgaatggtgacaggcgatacgctggccagcaggggagaggctgtcctcgcagggcattccgttgccagagagcctagcgccgctcatctttcaatgggttactgtccccagtctgacgccatatttgagctgctcactggaagggaacacttagaactgttagcaagactgaggggcgttccagaggcccaggtcgcccagacagcaggcagcggcctggccaggcttggcctcagctggtacgccgaccgcccagccggtacatactcaggcggtaacaaacgaaagctggccacagcactggcattagtcggggacccggcagtcgtctttctggacgagcccaccacagggatggatccgtcagccaggagatttctctggaactcactgcttgcggtggttagagagggcaggtccgtcatgttaacgtctcacagcatggaagaatgcgaggccctatgctcccggctggccataatggtcaacggtcgctttagatgcctaggctccccacagcatctgaagggcaggttcgccgcaggtcacacattgacacttcgcgtccctgccgctcggagtcagcctgcagcagcatttgtcgcagcagagttcccaggagctgaactgcgtgaagcacacgggggacgccttcggtttcagttgccccctggcggacggtgcgccctagccagggttttcggagagctcgctgtgcatggtgcggagcacggggtggaggacttttccgtgagccaaacaatgctggaagaagtttttctctatttcagtaaggaccagggaaaggacgaggacacagaagaacaaaaggaggctggggtgggggttgatcccgctcctggcctccaacaccctaaaagggtatcccagttcttggacgacccctcaactgcagagaccgtgttata

SEQ ID NO: 215365 - DNA, 495 bp, synthetic construct
  misc_feature 1..495: note = Description of Artificial Sequence: Synthetic coding sequence
  source 1..495: mol_type = other DNA
atggcattctggacccagttaatgttgctcctctggaagaactttatgtaccgcagacgtcaacctgtgcaactcctcgtcgaactcctgtggcctctcttcctgttttttatcttggttgcagttcgccattcccacccccctctagaacaccatgagtgccacttcccgaacaaacctcttcccagcgccggaactgtgccttggctccagggactcatctgtaacgtgaacaacacatgcttcccccagctcacccctggtgaagaacccggacgcctatccaacttcaacgatagcttggtcagccgtcttctggccgatgccagaacagtgctgggcggtgcctcagctcatcgaaccctcgctgggttgggaaagcttattgcaactttgagggcagccaggtccactgcccaaccccagcccaccaaacaatcaccgctcgagccacccatgctggacgtggcggagcttctgactagtctgctatag

SEQ ID NO: 215366 - DNA, 4746 bp, synthetic construct
  misc_feature 1..4746: note = Description of Artificial Sequence: Synthetic coding sequence
  source 1..4746: mol_type = other DNA
atgaggaaacgaaaaatcagtgtgtgccagcagacatgggccctcttatgcaagaactttctaaagaaatggcgcatgaaacgtgagtccctgatggagtggctgaatagcttacttctgttattgtgcctgtacatctatccccatagtcaccaagtgaacgacttctcatctttattgacaatggatctgggacgggtggacacttttaacgaatctcgattctcagtagtgtatacccccgttactaacacgactcagcagatcatgaataaggtcgcctcaacaccatttctagccggtaaggaagtactgggccttcccgatgaagaaagcattaaggagtttacagctaactaccctgaagaaatagtgcgggtcacttttaccaatacttatagctaccatttgaaatttctgctcgggcacggtatgcctgcgaaaaaggaacataaggatcataccgcccattgctatgagaccaatgaggatgtgtattgcgaggtgtcagttttttggaaagaggggttcgtggcactgcaagccgctatcaacgccgcaattatcgagatcactacgaaccattccgtaatggaagaactgatgagtgtgacaggcaagaacatgaagatgcactcatttattggccaatcgggagtgatcacagacctctatctctttagttgtataatcagcttctcgagcttcatttactatgccagcgttaatgtgacgcgggagcgcaaacgaatgaaagcacttatgacaatgatggggctaagggatagcgccttttggctgtcttggggtcttctgtacgccggatttatcttcattatggctctgttcttggctctggttattcgaagtactcagtttataatattatcagggtttatggtcgtgttcagcctgtttctgctgtacggcctcagtcttgtcgctttggccttcctcatgtccatcttggtgaaaaagagcttcctgaccggacttgtggtgttccttttaaccgtcttctggggctgtttgggttttaccagtctgtaccgccatctgccggcatccctggaatggattctgtccctcctctcgccattcgccttcatgctcgggatggctcagctcctccacctggattacgacctgaattcaaatgcttttccacacccttccgatggcagtaacctgatagtggctaccaatttcatgctcgcctttgacacttgcctgtacctggctctagccatctattttgagaagatccttccgaatgaatacggacaccgccgaccgcctctgttctttcttaagagctcgttctggtctcagacacagaagaccgatcatgttgccctggaggatgaaatggacgctgaccccagcttccacgattcatttgaacaagctccccctgagtttcagggcaaggaagccatcaggatacggaacgtgacaaaagagtacaaaggaaagcccgacaagattgaggccttgaaggatttagtattcgatatatatgaaggccaaattactgcaatcctcgggcacagcggggctggaaagagtactctcctgaacattctttctggcctgagtgtgcccacaaagggttctgtgaccatatacaataacaaactgtccgaaatggcggacctagagaatctttctaaattaacgggcgtgtgcccgcagtctaacgttcaattcgactttcttaccgtccgcgagaaccttcggctcttcgccaaaattaagggcatccttcctcaagaggttgataaggaaattttcttgctggacgagcccactgctggcctcgatcccttctccagacaccaggtctggaatctcctgaaggaaagaaaaaccgacagggttatcctctttagcacgcagttcatggatgaggccgacatcctggcagatcgcaaagtctttctgtcgcaaggtaagctgaaatgcgccggatcatccctcttcctgaaaaaaaagtggggaattggctaccacctcagcctccagctgaacgaaatttgtgtggaagagaacatcacatccctggtgaagcaacacatcccagatgctaagctcagtgcaaagtcagagggcaagttgatctatactttgcctctggagagaaccaataagtttcctgagctctacaaagatctggatagctatcctgacttaggaatagaaaattacggagtcagtatgacaaccttgaatgaggttttcttgaagctggagggaaagtctaccattaatgagtcagatatcgctatcctaggcgaagtacaggcagaaaaggccgatgacaccgagcgactagtggagatggagcaggttttgtccagtcttaataagatgcgcaagaccatcggcggtgtggccctgtggagacagcaaatttgtgctatcgcccgagtgaggctgttaaagctaaagcacgagcgcaaagccctacttgcgttattgcttatcctgatggcgggattctgccccctcttggtggaatatactatggtaaagatataccaaaatagctatacctgggagttgtccccccatctgtatttcttggctcccggtcagcagccccacgaccccctcactcagctgctgattattaacaagaccggcgctagcatcgatgattttattcaaagcgttgagcaccaaaacatcgctttagaggtagacgcgttcgggactaggaacggaaccgacgatccttcttataacggtgctatcaccgtttgctgtaatgagaagaactattcattctccctagcatgcaacgccaagaggttaaattgcttcccggtcctgatggacatcgtgagtaatggactgctcggcatggtgaagccgtctgtacatatccgcaccgaacgaagtacatttctcgaaaacggtcaggataaccctataggattcttggcatacataatgttctggttagttttgacgagcagttgtcctccttacatcgccatgtcctccatcgacgattacaagaatcgggctcgctcgcaactgcgtatctctggcttgtccccctcggcctattggtttggtcaagccttagtcgatgtatctctctacttcctggtgtttgtgttcatttaccttatgagttacatttccaattttgaggacatgctgctcaccattattcacatcatccagatcccttgcgcagtcggatactccttctcgctcatattcatgacttatgtaatatcatttatcttccggaagggccgaaagaactccggcatatggagcttctgcttttacgttgttactgtcttctcggtggcagggtttgcttttagtatctttgaatccgatatcccttttatcttcactttcttgatcccgcctgccacaatgatagggtgcctatttctgtcttctcacctgctcttctcctctctattttctgaagagcggatggacgttcagcccttcttagtgtttctgatccccttcctccacttcattatcttcttgtttactttgcgatgcctggagtggaagtttggcaaaaaaagtatgagaaaggaccctttttttcgaatctcccccaggtccagtgacgtgtgtcagaaccccgaagaacccgaaggtgaggacgaggatgtgcaaatggagcgggtgcgcactgccaatgccttgaactcgacaaactttgacgagaagcccgtaatcattgcgtcttgccttcggaaggagtatgctggaaaacggaagggatgtttctcaaaaaggaagaataagatcgcaacccgcaacgtgtcattttgcgtgcgcaaaggagaggtattgggactgctcggccataatggcgctgggaaatcgaccagcatcaaagtgataactggggacacaaaacccactgccggacaggtacttcttaaaggtagcggcggtggagacgcactagagttcctcgggtattgtcctcaggagaacgccttgtggcctaatttaacagtgcggcagcacctcgaagtttatgcagccgttaagggactacgtaaaggcgatgccgaagtggccataacgcgcctggtggatgccctgaagttgcaggatcagctcaagtccccagtgaagacgttgtctgaaggtatcaaacgcaaactttgttttgttctcagtattctgggcaatccatcagtcgtgttattggacgaaccttccactgggatggatccagagggccagcagcagatgtggcaagctattagagccacattccggaataccgaaagaggggctcttctcacaactcactacatggctgaagctgaggctgtgtgcgacagggtcgctatcatggtaagtggcaggctacgctgcatcggcagcatacagcacttaaagtccaagttcggcaaggattaccttttagagatgaaggttaaaaatctggctcaggtcgagccattgcatgctgaaatactgcggctgtttccccaggccgctcgacaggagagatactcctcactcatggtatataagttaccggtggaggacgtgcagccgttagcccaagccttctttaagctggagaaggtcaagcaatccttcgacctggaggaatactccttgagccagagcacccttgagcaggtgtttctggaactgtccaaagaacaagagttgggcgacttcgaggaagatttcgatccttcagtcaagtggaagttgctgccccaagaggagccgtag

SEQ ID NO: 215367 - DNA, 801 bp, synthetic construct
  misc_feature 1..801: note = Description of Artificial Sequence: Synthetic coding sequence
  source 1..801: mol_type = other DNA
atgcgtaagcggaaaattagcgtgtgtcaacaaacgtgggcactgctctgtaaaaacttcctcaaaaagtggagaatgaagcgagaaagtttgatggaatggcttaattccctcttactgctgctttgtctttacatctatccgcatagccatcaggtgaatgactttagctccttactaaccatggaccttggccgagtggacacctttaacgagagcaggttttcagttgtgtacacaccagtgactaataccacccagcagatcatgaacaaagtggcttcaacaccttttttagccggaaaggaggtgctggggctgcctgacgaggagtctatcaaagagttcaccgccaattatcctgaagaaatcgtgagagtgacctttactaatacttactcatatcatctaaagtttctgttggggcacggcatgccagccaaaaaggagcataaggatcacactgcacattgttacgagaccaacgaggacgtgtattgcgaagttagcgtcttctggaaggagggctttgtcgcacttcaggccgctattaatgccgctattatagagatcactactaaccactctgtcatggaagaactgatgtccgtgacgggtaagaacatgaagatgcattcatttatcggtcaatccggcgtcattacagatttgtatctcttcagctgcattatatctttttccagtttcatctactacgcatcagttaacgttacccgggagcggaaaaggatgaaggccctgatgactatgatgggtttgagggatagcgcattttggtag

SEQ ID NO: 215368 - DNA, 4866 bp, synthetic construct
  misc_feature 1..4866: note = Description of Artificial Sequence: Synthetic coding sequence
  source 1..4866: mol_type = other DNA
atgagaaaaaggaaaatctccgtgtgccagcaaacatgggcgcttttatgtaagaacttcctgaaaaaatggaggatgaagcgggagtcactcatggagtggctgaactctttactcttgctgctgtgtttgtatatttatcctcatagtcaccaggtgaatgacttctcctccttgcttaccatggacctgggcagggtagacaccttcaacgagagcagatttagcgtcgtatacaccccagtgaccaacacgacccagcaaatcatgaacaaagtggcgtcaactccctttttagctggaaaggaggttcttgggctacctgatgaagagtcaattaaggagtttacggcgaattatccagaggaaatagtgcgagtgacatttacaaatacctattcataccatttgaagtttcttttaggacatggtatgcctgcaaagaaggagcataaagaccacacagcgcattgctacgaaacaaacgaggatgtttactgcgaagtgtccgtgttttggaaggaagggtttgtggcgttgcaggccgcaatcaatgctgccatcatcgagatcaccacgaatcactccgtgatggaagagttgatgtccgtaactggcaagaacatgaagatgcactctttcatcggccaaagcggggtcataaccgatttgtatctcttcagctgtatcatcagtttcagcagtttcatttactacgcctccgtgaacgtcacccgtgaacggaagcgaatgaaagctctgatgacgatgatgggcctgagggatagtgcattctggctttcttggggtcttctgtatgcaggtttcatcttcatcatggccctgttcctggcactggtaattcggtctactcagttcattattctaagcggctttatggtggtgttcagcctgtttctgctctatggtctctcccttgtggcgctggcctttcttatgtctatcttggtcaagaaaagcttcctgacgggcctcgtcgtgtttcttttgaccgttttctggggatgccttggctttacgtccctataccgtcatctaccagcaagcttagagtggatcctgtctttgttgtcccccttcgccttcatgctgggaatggctcaattgctccatctcgactatgacctcaattctaatgcctttccccatccttccgatggctcgaatttgattgtcgccaccaatttcatgctagcgttcgacacctgtttatatttggccctggctatatacttcgagaagattctccccaacgaatacggtcaccggaggccgcctttgttcttcctgaagagctcattctggtctcaaacacagaaaaccgatcatgtggcactcgaggatgagatggatgccgacccttcatttcatgatagttttgaacaggcacctcctgaatttcagggtaaagaagccattcgaattaggaacgtaactaaggagtacaaaggcaagcccgataaaatcgaagctctgaaagacttggtgttcgacatctacgagggccagatcactgcaatcctcggtcactcgggcgcaggaaagagtactctcttgaatatcctatccgggctgagcgtgccgacgaagggttcagtcaccatatataacaataagctgtctgagatggccgacctcgaaaatctatctaaactgaccggggtgtgcccccagagcaatgtgcagtttgacttcctaaccgtccgcgagaacctccgacttttcgcgaagataaaaggaattctaccgcaagaggtggacaaagagatccaacgtgtcctcctggaactagagatgaaaaatattcaagatgtgctggcacaaaacctgtcaggcggtcaaaagcggaagcttacatttggaattgcaattctcggagatcctcagatttttctcctcgacgagccaacagcaggactggaccctttcagtaggcaccaggtatggaaccttcttaaagagaggaagacagatcgggtgatcctcttctccactcagtttatggacgaagcagacattctagccgacaggaaagttttcctttcacagggcaaattaaaatgtgctggatctagtctttttctaaagaaaaagtgggggatcgggtaccatttatccctacagctcaacgagatttgcgtggaagagaatattacctccctggttaagcagcatatcccggacgccaaattgtctgccaaaagtgaaggaaagctgatatacaccctgcccctggaaaggacgaacaagttcccagagttgtacaaggacctggactcataccccgatctcgggatcgaaaactacggtgtgtctatgaccaccctgaatgaggtctttcttaaactcgagggcaaatctactatcaacgaatccgatattgccatccttggcgaggtgcaggccgaaaaagccgatgatacagagcggttagtggaaatggagcaggtcctgtccagtctcaataagatgcggaagacaatcgggggagtagccttgtggcgccagcaaatttgtgcgatagccagggtgcgactgctcaaacttaagcacgaacgcaaggcactcctggccctgcttcttatcctcatggcgggattttgcccattgctggtggagtacactatggtgaagatctatcagaacagctatacttgggaattgagcccacacctctatttcttggcacccggtcagcagcctcacgatcctctgacgcagctgctgatcattaacaagaccggagctagtatagatgattttatccagtctgtggaacaccagaatattgctctggaggtcgacgctttcgggacccgaaatggcacagacgacccatcatacaatggagcaatcaccgtatgctgcaatgaaaaaaattatagtttttccttggcttgcaatgccaagcggctcaactgcttccctgtcctgatggacatcgtttcaaatgggcttctgggcatggtgaaaccaagcgtgcatatacgtacagagcggagcactttcctggagaacggacaggataatccaattggttttttggcttacattatgttttggctggttctgacatcttcttgccccccttatatagctatgtcctctatagatgactacaagaacagagctaggagccaattaagaatctccggactcagtccttccgcttactggtttggtcaagctctcgtcgacgtgagcctgtactttttggttttcgtattcatttatcttatgagctacatctccaacttcgaggatatgctgttaaccattatacacattattcagatcccatgcgccgttggatatagtttttcactcattttcatgacatacgtgatctcttttatctttagaaaaggccgaaaaaattctggcatctggagtttctgcttttacgtggttaccgtcttcagcgtcgcgggattcgcttttagcatattcgaatctgatatacctttcatcttcacatttctgatccccccagctacaatgatcggctgtctctttctgtccagtcacctactgttctccagccttttctctgaagaacgcatggacgttcaaccattcctggtcttcctgattcccttcctgcatttcataatcttcctgttcactctaaggtgcctggaatggaagttcggaaaaaagagcatgcgtaaagatccgttcttccgcatcagcccgagatcgtcggatgtgtgtcaaaatcccgaggaaccggagggagaggatgaggatgtccagatggaacgggtcagaactgccaacgccctgaattcgactaacttcgacgaaaagccggtcatcatcgcgagctgccttcgcaaggaatacgcaggtaaacgcaagggctgctttagtaaacggaaaaacaaaatcgcgacccgaaacgtctctttttgtgtgaggaagggcgaagtgttgggtctgctgggacataacggcgcaggaaagtcgacctctattaaggtcattaccggggatactaagcctaccgccggacaggtgctacttaagggcagcggtgggggagatgctctcgagttcctggggtattgcccacaggaaaacgcgctgtggcccaatctgaccgtgcgacaacatctggaggtgtatgctgctgtcaagggtctaagaaagggtgacgcggaggtcgccattactcgcttggtggatgcgctgaagctacaggaccagctcaaatctccagttaagacactcagtgagggcatcaaaagaaaactgtgttttgtcttgtccatcctgggcaatcctagcgtggtgttgttggacgaaccctctaccggtatggacccagaagggcagcagcagatgtggcaggccatacgagccactttcagaaacactgaacgcggagctctgctgactacacattacatggcagaagctgaggccgtgtgtgacagggtagccataatggtgtctggtcgattgcgctgtatcggtagcatccagcacctgaagagtaagttcggaaaggactacctgctggaaatgaaagtgaaaaacctggcgcaggtcgagcccctgcatgctgagatcttgcgcctcttcccccaagccgcaagacaagagagatatagttccttaatggtttacaagctaccggtggaagacgtccagcctctggcgcaggccttctttaagcttgaaaaggtgaagcaatcatttgatcttgaagagtacagcctgagccaatccacacttgagcaggtctttctggaactgtcaaaggagcaagaactgggggactttgaggaggattttgacccctcagtaaagtggaaactgctcccgcaggaagagccgtag

SEQ ID NO: 215369 - DNA, 3312 bp, synthetic construct
  misc_feature 1..3312: note = Description of Artificial Sequence: Synthetic coding sequence
  source 1..3312: mol_type = other DNA
atggaccttggtagagtcgacacctttaacgagagtcgcttcagcgttgtctacaccccagtaacaaacactactcagcagattatgaataaggttgcctctactccatttcttgctggaaaagaggtgctcggattgccagacgaagaatcaattaaagagtttacagctaattacccggaagaaatcgtaagagttacattcactaacacctactcctatcatctgaagtttcttctgggccacggcatgcctgccaagaaagagcacaaggatcatacagcccactgttatgaaaccaacgaagatgtatattgcgaagtgtcagtcttttggaaagagggcttcgttgcattacaagcagcaattaacgccgctatcatagaaattaccacgaaccactccgtcatggaggagctgatgagtgtgactgggaagaatatgaaaatgcactcttttatcggccagagcggcgttatcaccgatttgtacctcttctcttgcatcattagtttcagctcctttatctattacgcctctgtgaacgtaacaagggaacggaagcgcatgaaggctctcatgactatgatgggcctcagagactctgctttctggctgagctggggccttctctacgcgggtttcatctttatcatggcattatttttggccctcgtcatccgtagcacacaattcatcatcctgagcgggtttatggtggtctttagtctgtttctcctgtacggcctctcactagtggctctagctttccttatgtcaatactggtcaagaagagctttctcaccggcctggtagtgttcttgctgacagtgttctggggatgcctgggattcacaagtctttatcgccacctccctgcctccctcgagtggatcttgtcactactgtccccctttgcattcatgcttggaatggcgcagctcctccatctggactacgacctcaactctaacgctttcccccatccttcagatggatcaaacctgatagtggctactaactttatgttggcctttgacacatgtttatacctcgccctggccatctactttgaaaaaatcttgcccaacgagtacggtcaccggagacctccactgttcttcctcaaaagttcattctggtcccaaactcagaagacagatcacgtggccctcgaagatgaaatggacgcagacccttcttttcatgatagctttgaacaggccccaccggagtttcagggaaaagaggcaatcagaattcgaaacgtcacaaaagagtacaagggcaagcccgacaaaatcgaagctctcaaggatctggtatttgatatctatgaagggcagataactgccattcttggacactcaggtgccggaaaaagcacactgctgaatatcctctctgggctgtcagttcccacaaagggatcagttacaatctacaacaataagttgtcagaaatggccgacctggaaaatctgagcaaattaaccggcgtctgtccacaatctaacgtgcagttcgatttcctcacagtgcgggagaatctgcgtctttttgcaaaaatcaaaggaatccttccacaggaggtggacaaggaaattcaaagagtcctattggagctcgagatgaaaaacattcaagacgtgctggcgcaaaatctaagcgggggacaaaagaggaagctgacctttggaattgcaatcctcggcgacccacagatatttctgcttgatgaaccaactgcaggactggatcccttttcgcggcatcaggtctggaatctcctaaaagaacggaaaaccgatagagtaatcctattctctacccagtttatggacgaagctgatatattagccgacagaaaggtgttccttagccagggtaagttgaagtgtgcgggtagtagtctttttcttaagaagaaatggggcattggctaccatctgtccttgcagttgaacgagatctgtgtcgaagagaacatcaccagcctggtgaaacagcacattcccgacgctaaactgagcgccaagagcgagggaaagctcatttatacactgccactggagcgcaccaacaaattccccgagctgtataaggacctagatagctatccagatcttggaatagaaaactacggcgtctccatgaccacactcaacgaagtattcctgaaattggagggtaagagcacaatcaacgagtccgacattgccatcctgggagaggtgcaggcagaaaaggcggacgataccgaacggttagtggagatggaacaggttctgagttctttaaacaagatgaggaaaaccattggcggtgtcgcactctggcggcaacaaatctgcgccatcgcccgagtgcggctcctcaagttgaaacatgaaagaaaggccctactggcgctgctgctgatactgatggccggtttctgccccctgctggtggaatataccatggtgaagatttaccagaactcctacacatgggagctgagcccccacctttactttctggcaccgggacagcaaccacacgaccccctgactcagctgctaataatcaacaaaaccggagcatctattgatgactttatccagtccgtggaacaccagaacattgcattagaggtggatgcctttgggacccggaacggcactgacgacccctcttacaacggtgcaataaccgtttgttgcaatgaaaagaattattccttttctctggcttgtaacgctaagcgcctcaattgtttccccgtgttgatggacattgtgtccaacgggctgttgggtatggttaaacctagcgtacatattcggaccgaacggtccacgttcctcgaaaatggtcaggataatccgataggcttcttagcctacataatgttctggctggtactcacaagcagttgcccaccttacatcgctatgagctccattgacgattacaagaaccgggctagatcacaactgcgaatttctgggctgtccccatctgcctactggtttggccaagctttggtagatgtgagcctatatttcttggtatttgtgttcatttatctcatgtcctatatctctaatttcgaggacatgctgctcactatcatacatattatccaaatcccttgcgcggttgggtattccttttcacttatatttatgacttacgtgataagcttcatcttccggaaaggacggaaaaactcgggtatatggtctttctgtttctacgttgtcagtatttttctggtcgacgtctattgcatctatctgatttacaattcggaattgatcctttag

SEQ ID NO: 215370 - DNA, 471 bp, synthetic construct
  misc_feature 1..471: note = Description of Artificial Sequence: Synthetic coding sequence
  source 1..471: mol_type = other DNA
atgctaggaatggcacaactgcttcatcttgattacgacttgaactctaatgcttttcctcaccctagtgatggctccaacctgatcgtggccactaactttatgctggcctttgatacgtgcttatatcttgctctcgccatatacttcgaaaagattctccccaatgagtatggccacaggaggcccccactgttcttcctgaaaagtagtttctggtcccaaacccagaagactgatcacgtagccctggaggacgagatggacgcagaccctagcttccatgacagctttgagcaggcacctccggagtttcaagggaaggaggcaattcgaatccgcaatgtcaccaaagagtataaaggtaagccggacaagatcgaggctctcaaagacttagtgtttgatatttacgagggtcagattacggccatccttgtcacagtggagttagaatcccagcattgttag

SEQ ID NO: 215371 - DNA, 4875 bp, synthetic construct
  misc_feature 1..4875: note = Description of Artificial Sequence: Synthetic coding sequence
  source 1..4875: mol_type = other DNA
atgtccaaacggagaatgtccgtgggtcaacagacctgggctcttttgtgcaaaaattgtctgaagaagtggagaatgaagagacagacactgctcgaatggctgttctcatttctgctggtgttattcctgtacctgtttttcagcaacctccaccaggtccatgacacaccccagatgagttccatggatctcggcagagtggactcttttaacgacactaactacgtgatcgccttcgcgcctgaatcaaagactacccaagagattatgaataaagtggcctctgctcctttcctcaagggccgaacgattatgggatggcctgatgaaaaatccatggatgagctggatttgaactattcaatcgacgcagttagggtgatttttaccgatacattttcataccacctcaaattctcttgggggcatcgcattcccatgatgaaggagcatcgcgatcactccgcccactgccaggcggtcaatgagaagatgaaatgtgaagggagtgaattttgggagaaggggttcgtggccttccaggcggctattaatgccgctataattgagattgcgactaatcactctgtgatggagcagcttatgtccgttactggcgtgcacatgaaaatcctgccttttgtggcccaagggggtgtcgccacagactttttcatatttttttgtatcatttctttttctacctttatctattatgtgagtgtcaacgtgacacaggagcgacagtatatcaccagtctgatgactatgatggggctgcgggagtctgcattctggctatcatggggcctcatgtacgccggttttattctgattatggcaaccctgatggccctgattgtaaagtccgcacaaattgttgttctgacaggcttcgtaatggtctttacattattcctcctgtacggcttatccctcatcactttagccttcctgatgtccgtgctgatcaagaagccctttctcactggactcgtcgtgttcctcctgatcgtgttttggggaatcctgggctttcccgcactctacacccgcctgcccgcttttcttgaatggactctttgtttgctgtctcctttcgctttcaccgtgggtatggctcaactcattcacttggactacgatgtgaattcaaacgcccacctggattctagccaaaatccctatctgatcatcgctacgctttttatgttagtctttgacactcttctttatctcgttcttaccttgtactttgacaagatactgcccgctgaatatggtcaccgttgtagtcccttattttttctcaagtcatgcttttggtttcaacatggcagagcaaatcacgtagtgcttgaaaacgagacagactctgatcctacaccgaacgactgtttcgaacccgtgtcccctgaattctgtgggaaggaggccatccgcatcaagaacctgaagaaagagtatgccggaaagtgcgaacgagtggaggccctcaaaggcgttgtgtttgatatttacgagggccaaataacagccttactgggccattcgggcgcagggaagacgacactgctgaacatactttcgggccttagcgtgccaactagcgggtccgtcaccgtgtataaccataccttgtcccgcatggccgacattgaaaacattagtaagttcaccggattttgcccccagtctaatgtacagttcggtttcctgacagtaaaggagaaccttcgactttttgcaaagatcaagggcatcctgccgcatgaggttgagaaggaggtgcaacgtgtagtgcaggagttggagatggaaaatattcaggatatcttagctcagaatctcagcggaggtcagaacagaaaactgaccttcggtatcgccattctcggagacccccaagtgctgctgctcgatgaacctaccgctggactggaccctttaagtcgacacagaatatggaacttgctgaaggagggaaaaagtgatagggtgatcctgttttcaacacagtttattgacgaagcagacatcctcgcagacagaaaagtatttatcagcaacggtaagttaaaatgtgctgggtctagtctgtttctgaaaaaaaaatggggcatcggatatcacctgtcattacatctgaatgaaagatgtgaccctgagtcaatcacctctctcgtaaagcaacacatttccgacgccaagctcacagctcagtcagaggagaagcttgtttatatattacccctcgagagaaccaacaagtttcccgagctgtatcgggatctggaccgctgctctaatcaggggatagaggactacggggtgtcaattactactctaaatgaggtcttcctcaagttagaaggaaaaagcaccatagacgagagcgacattgggatctgggggcagttacagaccgacggcgcaaaggatataggctcacttgtcgagctggaacaggtactgtcatccttccacgagactcggaagaccatcagcggagtggccctctggcgacaacaggtctgtgccatcgctaaagtaagattccttaagctcaaaaaagaaagaaagtcactgtggaccatactgctcctctttggtatctcctttattccccagcttctggaacatttgttttatgagagctaccaaaaatcttacccttgggagctttcccccaatacatactttctcagccctggacagcagccccaggatccccttactcacctgctcgtcattaacaagaccggcagcacgatcgacaacttcctgcatagcctccgcaggcagaatatcgctatcgaagtcgatgcatttggcaccaggaatggcaccgatgatccttcttacaatggggctatcattgtttctggcgatgaaaaggaccatcggttcagcatagcttgcaatacgaaacgactgaactgctttcccgtgctgttggacgttattagtaacggtctactggggatcttcaacagcagtgaacatatccaaacagacaggagtactttctttgaagagcacatggattatgagtacggatatcggagcaacacctttttttggatcccaatggccgcttcatttacaccttacatagccatgagtagcattggggactataaaaagaaggcccacagccagctgcgcatcagtggactctaccctagtgcatattggtttggccaggcgctggtggacgttagtttatatttcctgattctactgctgatgcagataatggactatatctttagcccagaggagattatctttatcattcaaaaccttctaatccagatcctctgtagtattggctacgtgagctccctggtcttccttacttacgtgatctccttcatcttcaggaacggccgtaaaaacagcggaatttggagcttcttctttttgattgttgtcatattcagcatcgttgccacagacttaaacgaatatggttttctaggtctgttttttggcaccatgttaatcccaccatttactcttattggatcactgttcatttttagcgaaatcagccctgacagcatggattacctgggagcctcagagtctgagatagtgtacctggcccttctcataccatacctgcattttctaatttttctgttcatcctgcgctgccttgagatgaactgccggaaaaagctgatgaggaaggaccctgtgttccgcattagcccgagatctaacgccatttttccaaatccagaggaaccagaaggcgaggaagaagatattcagatggaacgcatgcgcaccgtcaatgcgatggctgtgcgtgatttcgatgagacaccagtaatcatagctagttgcttgcggaaggagtacgccggtaagaagaagaattgcttctccaaacgcaaaaaaaagattgcaacaagaaacgtatcattctgcgtaaagaagggcgaggtcataggtctgctcggccataacggggcagggaagagtaccaccatcaagatgattaccggtgacacaaagccaactgctggacaggtgattttgaaggggtcaggaggaggagaaccactcgggttcctgggctattgtccacaggaaaatgctctgtggccaaatctgacagtcaggcaacatctggaggtttatgcagcagtgaaaggtctgcggaagggagacgccatgattgccattactcggctggtggatgccctgaagttgcaggaccagttaaaggccccagtcaaaaccctcagtgaaggaattaagcggaagttatgttttgtgttatctatactgggaaacccgtcggttgtgctgctggacgagcccagcaccgggatggacccggaaggtcagcaacaaatgtggcaagtgatacgggctacatttaggaacactgaaagaggggcactgctgactacccattacatggcggaagccgaggccgtgtgtgaccgcgtcgcgataatggtgtctggcagactgaggtgtattggctctattcaacacctgaagagtaaatttggcaaagattatctgcttgagatgaaattgaagaaccttgctcaaatggaacccctgcacgcggagatcctcaggctgtttccccaggccgcacagcaggagcggtttagtagtcttatggtgtacaaactcccagttgaagatgttcggccactgagtcaggcttttttcaagctcgagattgtaaagcagtcttttgatttagaggaatactccctgtcgcagagtacgctggagcaagtgtttttggaattgtcaaaagagcaagaattaggagatctggaggaggatttcgaccctagcgttaagtggaaactgctgcttcaggaagagccttag

SEQ ID NO: 215372 - DNA, 4308 bp, synthetic construct
  misc_feature 1..4308: note = Description of Artificial Sequence: Synthetic coding sequence
  source 1..4308: mol_type = other DNA
atgtctaaaagacgtatgtcagtgggccagcagacgtgggccttgttgtgtaagaattgccttaagaagtggcgcatgaagagacagaccttgctcgagtggctgtttagcttcctccttgtgctttttctgtatctttttttttcaaatttacaccaagttcacgacacaccccaaatgtcatcgatggatctcgggagagtggacagttttaatgacaccaattatgtgatcgcatttgctcccgagagcaagactactcaggagataatgaacaaggtggcctccgccccatttttaaaaggtaggactatcatgggatggcctgacgagaagtccatggacgagcttgatctcaattacagcatcgatgcagtgagagtaattttcactgacaccttttcttaccacttgaagttctcctggggccatcgcatccctatgatgaaagaacaccgggatcattccgctcattgccaagccgtcaacgaaaaaatgaaatgcgaaggatctgagttctgggaaaagggatttgttgcattccaggctgcaatcaatgcagccattatcgaaatcgctactaatcatagcgtcatggagcagttgatgagcgtgaccggggttcatatgaaaatcctacctttcgtggcccaaggtggagttgccaccgatttttttatttttttctgtatcatctctttctctacattcatctattatgtgtcagtgaacgtcactcaagagagacagtacatcaccagcctgatgaccatgatgggcctgagagagtcagctttctggctatcctggggcctgatgtacgctggattcattctgattatggccacgcttatggcacttattgtgaaaagtgcacaaattgttgtcctaactgggtttgttatggtcttcaccctgttcctactttacggtctgagcctgatcaccctcgcttttcttatgtcagtgctaattaagaagccatttttaacaggcctcgtggtctttcttctaattgtattctggggaatcctgggcttccctgcgctatacactcgattgcctgcatttctggaatggaccctgtgcctcctttctcccttcgcgtttaccgtggggatggctcagctaattcacctggattacgatgtgaattccaacgcccatctcgatagtagtcagaacccgtacttgattatagcaactctcttcatgctagttttcgacacgctgttgtatctggtcttgacgttgtatttcgacaaaattctgccggctgagtatggccaccggtgtagccctctattctttctgaaaagttgcttctggtttcagcacggccgtgctaatcatgtggtcctggaaaacgagactgacagtgaccccactcccaacgattgctttgaacccgtttctccagaattctgtggaaaagaggccatcaggataaaaaacctcaagaaagagtacgcgggaaagtgcgaacgggttgaagctctgaaaggagttgtctttgatatttacgaaggccaaattactgcgctactagggcactctggcgctggcaaaaccaccttattgaacatcctttcaggcctgtcagtaccaacaagcggatccgttacggtgtacaaccacaccctgtcacgcatggctgacatcgaaaacatttcgaaattcaccggcttttgtcctcaaagcaatgtgcagttcggctttttgactgtcaaagagaacttgcgcctgtttgcaaaaatcaaaggcatccttccccacgaggttgagaaagaggtacaaagagttgtgcaggagctcgaaatggaaaatatccaagatatcctggcccagaatttaagtggaggtcaaaacaggaaactgacattcggcattgccattcttggagatccacaggtgctccttctggacgagcccacagcgggactcgaccccttatcccgccacagaatctggaaccttctcaaggaggggaagtctgatcgggtgattctcttttcgacccaattcattgatgaggcagatatccttgccgatagaaaagtgttcatcagcaacgggaaactgaaatgtgctggatcatcactgtttctgaaaaaaaagtggggcatcggttaccaccttagccttcacctcaacgaaaggtgtgatcctgaaagcattacctctttggtgaaacaacatatcagcgacgccaaacttacggcccaatcagaagagaagttggtgtatatcctgccattggaaaggaccaacaagtttcctgaactgtatcgcgatcttgatcggtgtagcaatcagggcattgaagattacggcgtctctattactactctgaacgaggtctttttgaagctcgaagggaagtccacgattgacgagtcagacatcggcatctgggggcagcttcagacagatggtgcaaaggacatcggctcccttgtcgagctggagcaggtgctgtcatcctttcatgaaacacggaaaacgattagcggtgtggccctctggaggcagcaggtttgcgccattgctaaagttcggtttctcaaactgaagaaggaaagaaagtcactgtggacaatcttattgctgttcggcatttccttcattccccagctgctggagcatctgttctacgagtcataccaaaaatcctacccctgggagctctccccgaatacatattttctcagtcccggacagcagccccaagacccccttactcatctcctggtcattaataagaccggctccacaattgacaatttcctccactctctgcgacgtcagaatatagccatagaggtggacgcatttggaactaggaatggaacagatgatccctcctacaatggtgctataatagtttccggagacgagaaggatcatagattctcaatcgcgtgcaacacaaagcgcctgaattgcttccctgtcctgctggacgtgatatcgaatggattgttgggtatattcaactctagtgagcatatacagacagacagatcaacctttttcgaagagcacatggattatgaatacggatatcggagtaacacattcttttggatcccaatggccgcaagcttcacaccctacattgccatgtcttctattggtgactataaaaagaaggcccactcccaactaaggatcagcgggctatacccctcggcttactggtttggacaggcactcgtggatgttagcctgtatttccttatccttttactgatgcagatcatggactatatattttcacctgaggaaattatttttatcatccagaatctgttaatccagattttatgtagcatcggttacgtatcatctctggtgttcctgacctacgttatctcatttattttcagaaacggaagaaagaactctggcatttggtcatttttctttctcatagtggtgatcttttccatagttgcaactgatctcaatgagtatgggtttttaggcctgttctttggcactatgctaatccctccctttaccctaattggttctctctttattttctctgaaatctccccagatagcatggattatctgggggcatctgagagtgagatcgtttatttggctctactgataccatatctccatttcctgatatttttgtttatcctgagatgccttgaaatgaactgtaggaaaaagctcatgcgcaaggatcccgtgtttcggatatctcctcggtcaaacgccatttttccaaacccagaggaaccggagggagaggaagaagatattcagatggaaagaatgagaacagtgaacgcgatggccgttcgagactttgatgaaacccccgttattatcgcttcctgcctgcggaaagaatatgcaggcaaaaaaaaaaattgcttcagcaaacgcaagaaaaaaattgctacacggaacgtgtccttttgtgtgaaaaagggcgaggtaatcggactcctcggccacaacggggcaggcaaaagcaccactatcaaaatgataaccggagacacaaagccgacagctggccaggtgatccttaagggctccggcggaggagagcctcttggcttcctcggatactgtcctcaagagaatgctttgtggcctaacctcacagtgcggcagcatctagaggtgtacgctgccgtgaagggcctgcgcaagggcgacgccatgatagcaattacccgccttgtggatgccttgaagttgcaagaccagctgaaggctcctgtaaagacactttccgaaggaatcaaacggaaggctggggacagtggacacctatag

SEQ ID NO: 215373 - DNA, 3423 bp, synthetic construct
  misc_feature 1..3423: note = Description of Artificial Sequence: Synthetic coding sequence
  source 1..3423: mol_type = other DNA
atgagtgtgggacagcagacctgggcactgctctgcaagaactgtctgaagaagtggcgcatgaaacgacaaaccctgctggaatggctgttttcttttttactggtgcttttcctgtatctattctttagcaacctccaccaggttcacgataccccacagatgagctctatggaccttggacgtgtcgactcatttaacgatacgaattatgtaatcgctttcgcccctgagtctaaaaccacgcaggagattatgaataaagtagccagcgccccatttctcaaagggagaacgataatgggatggcccgacgaaaaatcaatggacgagttggatctcaattactccatcgatgcggtgcgagtaatctttacagacaccttctcctatcacctcaagtttagctggggccaccgaatcccaatgatgaaggagcaccgcgaccattctgctcattgtcaggccgtcaacgagaagatgaaatgcgagggaagcgagttttgggaaaaggggttcgtcgcgttccaggcagcaattaacgcagcaataatcgaaatcgccacaaaccactccgtgatggaacagctgatgtctgtgaccggcgtacacatgaaaattttgccttttgtggctcagggtggggttgcgactgacttcttcatcttcttctgcattattagcttttccaccttcatctactacgtcagcgttaatgtgacccaggagcgtcagtatattacctctctgatgaccatgatggggctaagagaatccgccttttggctgtcctgggggctcatgtatgccggattcatcctcataatggccactttgatggccctgattgtaaaaagtgcccaaattgtggtgctgacaggttttgtgatggtgttcacactgtttctgctgtacggtctgagcctcatcaccttagcatttctgatgagtgtgttaatcaaaaaacccttcctgacaggtctggtagtgttcctactcattgtgttctggggcatcctcggctttccagccctgtacactcgactgccggcttttctagagtggaccctttgcctgttgtcaccgttcgcgttcaccgtgggcatggcacagctcattcacctcgattacgatgttaattcaaatgcccacctagactcaagccagaacccctacctgatcatagcgactttgtttatgttggttttcgatactttgctgtacctggttctaaccctctatttcgataaaattcttccggctgagtacgggcaccgctgcagtcctttgttttttctgaagagctgtttctggttccagcacgggagggccaatcacgtagtcttagaaaacgaaacggacagtgatccgacacctaatgactgcttcgagcccgtgagtccagagttttgcggcaaggaggccattcgcattaagaacctcaagaaggagtacgctggtaagtgtgaacgggtggaggctctgaagggcgtggtcttcgacatctatgaagggcaaatcactgccctgctcggccatagcggcgctggtaagaccaccctgctgaacatcctgtccggactttcagtaccaactagcggttccgtcactgtgtataaccatactctgtccagaatggccgatatagagaatatatctaaattcacggggttttgcccccaaagtaacgtccaatttggctttctaacagttaaggaaaatttaagattatttgccaaaatcaaggggatccttcctcacgaggtggaaaaagaggtgcagcgtgttgtacaggaactggaaatggagaacatccaggatatcctggcccagaacctgtccggaggccagaatcggaagctaacctttgggattgctatcctgggagatccccaggtgctgcttttggatgaacctaccgctggcctagacccactttcacgccatcgtatatggaatctgttgaaggaaggaaagagtgatcgcgtaattctgttcagtacacagttcattgacgaggccgacatactagcagacagaaaggtgtttattagtaacgggaagttgaagtgtgccggttcatctttgtttttaaagaagaaatggggcatcggctaccatctttcccttcacctgaacgaacgctgcgatcccgagtctatcacgtcactcgttaaacagcacattagcgatgctaagctgacagcgcagagcgaggaaaagctggtttatatcctgcctctggagcggaccaataagttccctgaactctaccgcgatctagaccgctgttccaatcagggaattgaagattatggagtctctattaccacccttaatgaggtattcctgaagctggagggcaagagcacaattgacgagtctgacatagggatctggggccagttgcagacagatggtgccaaagatattggtagccttgtcgagctcgagcaagtgttaagctccttccatgaaacccggaagaccattagtggagtggcactgtggcggcaacaggtgtgcgccatcgccaaagtgcgtttccttaaactgaaaaaagaacgtaaatctctttggactatcttgttactcttcgggataagtttcatcccacaacttcttgagcatctgttttacgagtcgtatcagaaatcctatccttgggagctgagccccaatacgtactttctatcacccggtcagcagccacaagatcctttgactcatctgctcgttatcaacaagaccggatctaccatcgacaacttcctccacagcctgcggcgacagaatattgccattgaggtagacgctttcggcactcgcaatggaacagacgatccgtcatataatggagccattatcgtctcaggcgacgagaaggatcacagattttctatcgcttgtaatactaagagactgaactgcttccccgtcctccttgacgttatctctaacgggttattaggcatatttaacagttcggagcacatccagacagacaggagcaccttcttcgaggaacatatggattacgagtacgggtacaggagtaacaccttcttttggatccccatggcagcctcctttacaccctatattgcgatgtcatctatcggcgattataagaagaaggctcactctcagctgcgtatttccgggttgtacccgagtgcttattggttcggtcaagccttagttgatgttagtctgtacttcctgatcctgcttttgatgcagatcatggattacatcttttctcctgaggagatcatcttcatcattcaaaacctcctcattcaggtggtcatcttctctatagtagctactgacctgaatgaatacgggttcctcgggctcttctggcaccacgtgaatacctctctgcatattgactggttgagcatccattttttctag

SEQ ID NO: 215374 - DNA, 2217 bp, synthetic construct
  misc_feature 1..2217: note = Description of Artificial Sequence: Synthetic coding sequence
  source 1..2217: mol_type = other DNA
atgcgcggtccccctgcttggcctctacggttgctcgagcctccaagccccgctgagcctggcagactactgcccgtcgcctgcgtgtgggctgcagccagtcgcgttccaggttccctcagtcctttcacgggccttcgcccagctcgcctttggggggctggtcccgctctgctctggggtgttggagccgcaaggcgctggaggagcggctgccgaggtggtgggccaggggcatcgaggggcgtgctggggcttgctaggcttctcgggctctgggcgagaggccctggttcatgtagatgtggtgcgttcgccggaccgggagctccacggctgcctagagcacgattcccagggggacctgcagccgcagcatgggctggcgacgaggcctggcgacggggaccagccgcaccccctggcgacaaagggagactgaggccagccgcagctggccttcccgaggctcgcaaactactcggccttgcataccccgagcgcaggcgtctcgccgcagcagtgggcttcctgaccatgagtagtgttatctctatgtctgctcctttctttctgggtaagatcatcgacgtcatttatactaatcccacggtggattattccgacaacctcacccgtttgtgcctggggctttccgctgtattcttatgcggggcagccgcaaacgcaatccgggtgtacctgatgcagacctccggtcaaagaatcgtaaacaggttacgaactagtttattcagcagcatcctaaggcaggaggtggcctttttcgataagactcggacaggcgagttaatcaaccgcctctccagcgacactgccctgctgggcaggtccgtaaccgagaacttgtctgatggactgagagcaggtgcccaggccagcgtgggaattagtatgatgtttttcgtctctccaaacctggctacatttgtcctttctgttgtccctccagtttctattatcgctgtcatctacgggagataccttcggaagctcactaaagttactcaagatagcctggcgcaggccactcagttagcagaggagcgcatcggtaatgttaggactgtgagggcatttggtaaggagatgactgaaattgaaaagtacgccagtaaagtggaccacgtgatgcagttagctaggaaggaggcctttgcacgggcaggatttttcggcgctaccgggcttagcggaaatctgatcgtgttgagcgtgttgtacaagggtggactgttaatgggctccgcccacatgacagtgggagaactgtctagcttccttatgtacgctttttgggtgggcatttcaattggaggcctatcctcattttatagcgagcttatgaaggggctgggagctggaggcagactgtgggaacttctggagagagaacccaagttaccttttaacgagggtgtgatactcaacgagaaatcttttcagggagcactcgaatttaaaaacgtgcattttgcttacccggctagacccgaagtgccaatcttccaggatttcagcctcagcatcccttccgggtcggtgacagcacttgtaggaccctcaggctccggcaaaagcacggtcctgtctttgctcctaaggctttatgatcccgctagtggaaccatttccttggacggtcatgacattcggcaattgaatccggtctggttgcggagcaaaattggcaccgtgagccaagagcctatccttttcagttgtagcatcgcagaaaatatcgcttacggcgcagacgatccaagcagcgtcaccgccgaggagattcagagagttgctgaagtggccaatgccgtggctttcattcgcaatttcccacaggggttcaacaccgttgttggggagaagggggttttgctctcaggtggacaaaagcaaaggatcgccatcgctagggctttgttgaagaacccaaagatactattgctcgacgaagctacatcggccctcgacgcagaaaatgaatatctggtgcaggaggccctggaccggttgatggacgggaggaccgtcctagtgattgcacacaggctatctaccatcaaaaatgccaacatggtggcagttctggaccaaggaaaaattacagaatacggaaaacacgaggaattactctccaaaccaaacggtatctaccggaaactcatgaacaagcaaagcttcatctccgcttag

SEQ ID NO: 215375 - DNA, 2529 bp, synthetic construct
  misc_feature 1..2529: note = Description of Artificial Sequence: Synthetic coding sequence
  source 1..2529: mol_type = other DNA
atggtgaccgtggggaattactgcgaagccgagggcccagtagggccagcatggatgcaggatggactgagcccctgttttttcttcactttggtcccatcaactaggatggccttaggcaccctggcgctcgtgctggctttgccttgcagacggagagagagaccggcaggcgctgattctctgtcatggggagcaggaccccgaattagtccttatgtattgcaactgcttctcgcaacgttacaggccgctcttccattagcagggctggccggacgcgtggggactgcacggggagctccactgccaagttacctcttactggcaagtgtcctagaatccctcgctggagcctgcgggctgtggctgttggtcgtggagagatctcaggcccgacaacgtctcgccatgggcatctggatcaagtttaggcactcaccgggactgcttctgctatggaccgtagctttcgcagctgaaaacttggcactagtatcgtggaattccccgcagtggtggtgggcgagagcagacttgggccagcaagtgcaatttagcctctgggtcttgaggtatgttgttagcgggggactcttcgtactaggcctgtgggcccctgggctgcgcccacagagctacacattgcaggtgcacgaagaggatcaggatgtcgagcgaagccaagtcagatcagctgcgcagcagtctacttggagagacttcggccgaaagctgcgtttgctgagcggatacctatggcctaggggatccccggcactgcagctggtggtgctgatctgcctgggattgatggggttggagcgtgcactaaacgtgctggtccccatcttttataggaacatagtgaacctgctgaccgagaaggctccgtggaactccctcgcctggactgtgaccagctatgtctttctgaagttcctgcagggaggagggaccggttctaccggttttgtttccaacttgaggacattcttgtggatccgtgtgcagcagttcaccagccggagggtggagctgctgatcttcagccacctgcatgagctttctctgcgctggcacctgggcaggcggaccggcgaagtgctaagaattgctgaccgagggaccagctccgtcaccgggctgctgtcttatctagttttcaatgtcatacctaccttagccgacatcatcattggaataatatatttctctatgttctttaatgcttggttcgggctcatcgtcttcttgtgcatgtctctttatctcaccctgactatcgtggtgacggagtggaggaccaagttcaggcgagcaatgaacacccaggaaaacgccactagagcacgcgctgtggacagcctactgaacttcgagaccgtgaaatattacaatgctgagtcttatgaagtcgaaagatacagagaagccataattaagtatcagggcttagaatggaaaagctcagccagtctggttctgctgaatcagacacagaatctagtcattgggctcggccttctggctggatccctgctctgcgcctatttcgtcacggaacagaaactgcaggtgggcgattacgtactgttcggaacctatatcattcagctatacatgccactgaactggtttgggacatactaccgtatgattcagacaaatttcatcgatatggagaacatgtttgatttgctgaaggaagaaacggaggttaaggatctgcctggagctgggccactgaggtttcaaaaaggtagaatcgaattcgaaaacgtccacttttcttacgctgacggcagagaaactctgcaggatgtctccttcaccgtgatgccgggtcaaaccctggcactggtggggccaagcggagccggtaagagtaccatactgcgcctgctatttcggttctatgacatctcaagtgggtgcattcggatcgacggacaggacatctctcaggtgacccaggccagcctgagatcgcacattggtgtggtgcctcaagataccgttttgtttaatgatactattgccgataatatccggtatggcagagttaccgccggtaatgacgaagtcgaagctgccgctcaagccgctggcattcatgatgccatcatggcattccccgaaggttatcgcacccaggtgggtgaacgcggtctgaagctgagtggcggtgaaaaacaaagagttgccattgccaggacgatcctcaaagcacctggaatcattctgcttgacgaagcgacaagtgccttagatactagcaatgaaagagcaattcaggcaagtctggccaaggtgtgcgctaatcggacgacaattgtagtagcccacagactgagcactgtggttaatgccgaccagatcctggttatcaaggatggatgtatagtagagcggggacgccacgaggccctgctgagccgtgggggagtctacgccgacatgtggcaactccagcagggccaggaggaaacgtcagaggacacgaaaccacagactatggaacgctag

SEQ ID NO: 215376 - DNA, 636 bp, synthetic construct
  misc_feature 1..636: note = Description of Artificial Sequence: Synthetic coding sequence
  source 1..636: mol_type = other DNA
atggtcactgtgggcaactactgtgaggctgaaggaccggtagggccagcatggatgcaagatggcctgagcccatgcttcttttttacacttgtcccctcaactaggatggcactcggaaccttagccttggtcctagctctgccgtgtcgaaggagggaacgcccagcaggtgccgactccttgtcctggggggctggccctagaatttctccttatgcattaccaggaggccctcactgccaggcaatctatttttggcccccatgttggcgggtgtggccggcaccggtagcctgcggctgtctttcatggtcaggcgctagacacggttccgtgtggcagtgggcgagcggttctagttctggcaccgccttggttagctgcagtagcggcctctggcgattacagctgcgcacgtggccgtggtgcctaggtacggcccactcggggggaggtcaggggcagacatgggcgtcaaggttctcgctggcgtgcgggtgctgcggcatgtggtctctcgaagggtgcctgtcctgggtgtccgggccactagactttgtcccttctccgattcattgcaggttcatgaagagaacgaagatgtggaagggtgcttcagaattagcggactag

SEQ ID NO: 215377 - DNA, 2391 bp, synthetic construct
  misc_feature 1..2391: note = Description of Artificial Sequence: Synthetic coding sequence
  source 1..2391: mol_type = other DNA
atggtcacagtggggaactactgtgaagctgaagggccagtgggaccagcttggatgcaggacgggctcagcccctgcttcttcttcaccctggttccttccaccagaatggcccttggcaccctggcactagtcttggctttgccttgccgcaggagagagcggccagctggcgctgacagcctctcctggggcgctggcccacggattagcccatacgttcttcagctcctcctggccaccctgcaggccgctctgcccctggccggattagccggacgagtcgggacggccaggggcgctcctctcccttcttatcttctccttgcatccgtgctggagagcctggctggggcatgcggattatggctgctagtggtcgagaggtctcaggcaaggcagcggctggccatgggcatctggataaaatttaggcatagccccggactcctactgctgtggactgtggccttcgcagccgaaaacctggccctggtgtcctggaactctccacagtggtggtgggccagggccgatctggggcaacaggtgagaagtgctgcacagcaaagtacatggcgagatttcggcagaaaactgaggctgttgtctggttatttatggcctcgtgggtctcccgcacttcaactggttgtgctcatctgcctaggactaatgggcctggaaagggcattgaacgtgcttgttccaattttttatcgcaacatcgttaatctactcaccgagaaggccccatggaattcactcgcctggaccgtgacatcctacgtgttcttgaagttcttacagggcggtggaaccggcagcaccggcttcgtgagcaacctgcggacattcctctggattcgcgtccaacaatttacctcccgcagagtggagctgcttatttttagtcacttgcacgagctgtctctcaggtggcacttaggacgcaggaccggcgaagtcctgagaatagctgaccgcggaacttcaagtgtaactgggcttctgtcgtacttagtcttcaacgtcatccccacactcgcggacatcattattgggattatttattttagcatgttcttcaacgcctggttcggtctgatagttttcctctgcatgagcctgtacttaaccctgactatagtggtaacggaatggcgcacaaagtttcgcagggccatgaatacgcaggagaacgctacccgcgcacgcgctgtggactccctcttaaattttgagaccgtgaaatactacaatgctgagtcctatgaagtcgagagatatagggaagctatcattaagtaccagggactggagtggaaatcttctgcatcactggtgctgctgaatcagacacagaatctcgtcataggactgggcctcttagctggcagtctgttgtgcgcctacttcgtcactgagcaaaaactgcaggtgggtgactacgtcttgttcggtacctacataatccagctgtatatgccgttgaattggttcggaacctactaccggatgattcagaccaattttattgatatggagaatatgtttgacctgctgaaagaagagacagaggtgaaagacttgcctggggctggtcctttgcgcttccaaaaggggagaatagagtttgaaaacgttcacttctcttacgcagacggcagagagactctacaggacgtgtccttcacagtgatgcctggccagactctcgcattggtcggcccatccggcgcaggcaagtccacgatcctgcgactgctctttaggttctacgatatttccagcggatgcatccgcattgatggccaggatattagccaagtgacccaggcgtctttgcgctcacacattggtgtggtaccacaggataccgtactatttaacgacacaatcgcagataacattagatacggcagagtgaccgcaggcaatgacgaggttgaggcagcagcacaggcggctggaatccatgatgctattatggccttccctgaaggatacagaacacaggtgggagaaaggggcctcaagctctcagggggagagaagcagcgcgtcgcaattgccagaacgattctgaaagccccaggtatcatcctgctggatgaagctacaagcgcactggatacatctaatgaacgtgccatccaggcttccctcgcaaaagtgtgcgcgaaccggaccacaatcgtcgtggcccacaggctgagtactgtcgtgaacgccgaccaaattttggtgattaaagacggctgcattgttgagcgcggaaggcatgaagctctcctaagccggggaggggtttatgcagatatgtggcagttacagcagggccaggaggaaacaagcgaagacaccaaacctcagacaatggagcggtag

SEQ ID NO: 215378 - DNA, 2262 bp, synthetic construct
  misc_feature 1..2262: note = Description of Artificial Sequence: Synthetic coding sequence
  source 1..2262: mol_type = other DNA
atggcactgctcgccatgcacagttggaggtgggccgctgcagccgcagcatttgagaaaagaaggcattctgcaatcctgatacggcctctagtgtccgtgtctgggtcagggccacagtggcggcctcaccaactgggtgctttagggacggcccgtgcatatcagcagattccagaatcccttaagtctattacctggcagaggctgggcaaagggaactcgggacaattcttggatgccgctaaggccctacaggtttggcccctgattgagaagagaacatgctggcacggtcatgccggaggagggcttcacacagatcccaaagagggcctcaaagatgtcgacactcgtaagattattaaggcaatgctcagttatgtgtggcctaaagaccggcctgatcttagagctcgagttgccataagcctcggcttcctggggggagccaaggctatgaacattgttgtgccgtttatgttcaagtacgccgttgacagcttgaatcaaatgtctggtaatatgctgaacttgtctgacgctccgaatactgtcgccacgatggctaccgccgtcctcattgggtacggcgtctccagagccggagcagcgtttttcaatgaggttcgaaacgcagtatttggtaaggtagctcagaactcaatccgacggatcgccaagaacgtttttctgcatctgcataacctggatctgggctttcacctctcccggcaaaccggcgcactgtctaaggcaattgatcgagggactaggggcatctcctttgttctgtcagcactggtgttcaatcttcttcctattatgtttgaggtcatgctagtgtccggggtgctgtattataagtgcggagctcagttcgcactggttaccctcggtacccttggaacttatactgcctttacagtcgcagtaactcggtggagaactagattcagaatcgagatgaacaaggccgacaacgatgcgggaaacgccgcaatagacagcctcctcaactacgagacggtgaaatatttcaacaacgagcgctacgaggcgcagcgatacgatggtttcttaaagacctatgagacggcatccttgaagtcaactagcactctggccatgttgaacttcggacagtccgcgattttcagtgtgggcttgacggccatcatggtgctcgcctcacaaggtatcgtggccggaactctcactgtcggcgacctggtgatggtgaacgggctcctcttccagctaagtctgcccttaaattttctaggaacggtgtacagggaaacccggcaggccctgattgatatgaacaccctcttcacgctccttaaggtggacacccaaatcaaggacaaggtgatggccagcccattacagatcactccgcagaccgcaaccgtcgctttcgataacgtccatttcgagtatattgagggccaaaaggtcctatccggaatctcgttcgaggttcctgcaggaaaaaaagttgccatcgtagggggaagcggcagtggcaagagtaccatagtgcggctactgttccggttctatgagccccagaagggttcaatttatctggccggtcagaacatccaggacgtcagccttgagagcttacggagggccgttggggtcgtaccacaggacgcggttctttttcacaacaccatctattataacctcctgtatggtaatatcagcgccagccctgaagaagtgtacgctgttgccaaactggctgggttgcatgacgccattcttaggatgccccacggttatgatactcaggttggtgagaggggattgaagctctccggtggggaaaagcagcgcgtggctattgcacgggctatccttaaggacccacctgtaatcctctacgatgaggctactagtagcctagatagcatcaccgaagaaacaatcctgggagcaatgaaagacgttgtaaaacatcgaacttcaatcttcatcgcgcaccgtctgtccacagtcgtggacgccgacgagatcattgtgctggatcaggggaaagtggccgagaggggcacccatcacgggctcctggccaatccccatagcatttattccgagatgtggcacacccagtcctctcgtgttcagaatcatgacaatccaaagtgggaggctaagaaggagaatatttcgaaagaggaagaaagaaagaagcttcaggaagaaattgtaaacagcgtcaagggctgcggaaactgttcttgttag

SEQ ID NO: 215379 - DNA, 2259 bp, synthetic construct
  misc_feature 1..2259: note = Description of Artificial Sequence: Synthetic coding sequence
  source 1..2259: mol_type = other DNA
atggctctgttagcaatgcactcctggcgctgggccgcagccgcagcagcgttcgaaaagcgtagacattccgccattttaatcaggccattggtgtcagtaagcggctcagggcctcagtggcggccacatcagctcggggctttagggactgctcgggcttatcagatccctgagagcctgaagtccattacttggcaacgccttggcaaaggaaattccggccagtttctggatgctgcaaaagcgctacaagtatggccactgatagagaaacgtacttgctggcacggccacgccggaggcggtcttcacaccgatccaaaagaaggtttaaaagatgtcgacaccagaaaaatcattaaagccatgctaagttatgtgtggcctaaggaccgcccagatctcagggccagggtggctatctcactggggttcttgggtggagcaaaggccatgaatatcgttgtcccctttatgttcaagtatgctgtggactcattgaaccagatgagcgggaatatgctgaacctatccgacgcgccaaacactgtggcaacgatggccaccgccgttctgatcggctatggcgtgtcaagggcaggcgctgccttctttaatgaggttcggaatgccgtgtttggcaaggttgcccaaaactccatcaggcgcattgctaaaaatgtgttcctccatctacacaacctagacttaggttttcatttatcgaggcagactggggctttgagcaaggctatcgaccgcggaacacgcggaatttccttcgtgctgagcgcactcgtgttcaatctgttgcccatcatgttcgaagtcatgctcgttagtggcgtgctctattacaagtgtggcgctcaatttgcgttggtgacgctgggcaccttgggaacctacacagcgttcacagtggctgttactcggtggcggacccgattcaggattgagatgaacaaggctgataatgacgcgggtaacgctgctatagattcgttgttgaattacgagacagttaagtactttaataatgagcggtatgaggcccagcgatatgacgggttcctgaagacctacgaaaccgctagcctgaaaagtacttccacgctcgctatgctgaacttcggccaatcagctatttttagtgttggcctgacagccattatggtgctggcttctcagggcattgtggccggtaccctcaccgttggggatcttgttatggtcaacggcctgctgtttcagctcagcctccccctgaatttcctcggcacagtgtatcgggaaacgagacaggccctaattgacatgaatactctgttcacgctactgaaggtagatacacagataaaagataaagtgatggcctccccactacagatcaccccacagaccgccactgttgcgtttgataacgtccactttgaatacatcgagggtcagaaagtgcttagtggcatttcgttcgaagtccctgccggaaagaaggtcgctatcgtggggggatctggtagcggaaagtctactattgtacgattgctgttcagattttatgagccccagaaggggtctatctaccttgctggacagaatattcaggacgtgagcctagagagcttgagaagagctgtaggggtagtgccccaagacgctgtcctttttcataatacaatctattacaatctgctgtatgggaacatatcagccagtccggaggaggtctacgccgtcgcaaaactcgccggacttcatgatgccatcttgcgcatgccacatggttatgatacgcaagtcggggagcggggtttaaagttatccggaggcgagaagcagcgtgtcgccatagctcgggcaatcttgaaagatccaccagtgatcttgtatgatgaggccacgtccagcctggattccatcacagaagaaaccatactgggcgctatgaaagatgtggttaaacacagaacaagcatcttcatcgctcacaggctgtcaacagtcgtcgatgctgatgaaattattgtgctggatcaaggcaaagtagccgagcgtggaacccaccatgggctgctggccaacccacactcgatctacagcgagatgtggcacacccaatccagcagagttcagaatcatgataatccgaaatgggaggcaaaaaaggaaaatattagcaaggaggaggaacggaaaaaattgcaagaggagattgtgaatagcgtaaagggctgcggcaattgttcatgttag

SEQ ID NO: 215380 - DNA, 2109 bp, synthetic construct
  misc_feature 1..2109: note = Description of Artificial Sequence: Synthetic coding sequence
  source 1..2109: mol_type = other DNA
atggccctattggctatgcacagctggcggtgggcggctgcggcagctgccttcgagaagagacggcattcagcaatcctaatccgccctctcgtttcggtctctggttcaggcccacagtggcgacctcaccagctcggcgcattgggcaccgccagagcctatcaggccctgcaggtctggccactcattgagaaaagaacatgctggcacggtcacgcagggggaggtttgcacactgaccccaaggaaggacttaaggatgtggatacgcggaagatcatcaaagccatgctgagctacgtatggccaaaggaccgaccggacctgagggcaagggtcgccatttcgctcgggttcctggggggtgctaaggccatgaacattgtcgtccccttcatgttcaaatatgcagtggatagtctgaatcagatgtccggcaacatgctgaatctttctgatgcgcctaacactgtggctactatggcaaccgcagtgctcatcggttacggagtcagccgagcaggcgctgcgttcttcaatgaagtgaggaacgctgtgttcgggaaagttgcccagaacagtatcaggaggattgctaagaatgtgttcctccacctgcacaatctagacctgggcttccatctcagtcgacagactggcgcactatctaaggccattgatcgcggaaccagaggaatctcctttgtgcttagcgctctggtgtttaatctgctgccgattatgttcgaggtcatgctggtgtccggcgtgctatactataagtgtggtgcccagtttgccctagtgacactaggaacccttggaacttacaccgccttcactgttgcagtgacaagatggcggaccagattcagaattgagatgaacaaagctgacaatgacgctggcaatgccgctatagactcgctactgaattacgaaacagtgaaatactttaacaacgaacgctacgaggctcagcggtatgatggattccttaagacatacgagaccgcaagtctgaagtccaccagtaccctcgcaatgttaaacttcggccagagcgccatcttctcagtgggcctgaccgcgatcatggtcctggcctcccagggcattgtggccggaacgctcaccgtgggggatctggtcatggtaaacggactgctttttcaactgtcacttccactgaactttcttggcactgtttaccgcgagacgcggcaggcattgatcgatatgaataccctcttcactttgctcaaagtggatacccagattaaggataaagtgatggcgagtcctctccaaattacacctcaaacagcaaccgtcgctttcgataatgtgcacttcgaatatatcgagggacagaaggtgctgtcaggcatttcattcgaggtacccgctggcaagaaggtggctatcgtcggcggttccgggagtgggaagagtacaatcgtgcggctgctctttagattttatgagcctcagaaaggatcaatctacctggctgggcagaatatacaagacgtctccctcgagtcgctgcgacgggctgtcggcgtggtccctcaggacgccgtgttgttccacaacaccatttattataatctgttgtatggcaacataagcgcatcgcccgaggaggtgtacgctgtcgccaaattggccggacttcacgacgctattctgcgaatgccccatggatatgacactcaggtgggagaaagagggctaaaactttcaggcggagaaaagcagagggtggctatcgccagggccatcctgaaagatcctccagtgatcctctacgacgaggcaacctcctcgctcgacagtataactgaggaaacaattctaggagccatgaaagacgtggtgaagcacaggacgagcatcttcattgcacatcgactttccacggtggttgacgctgacgagattatagtgcttgaccagggaaaggtcgctgaacggggtacacaccacgggctgctagcaaaccctcactctatctacagtgagatgtggcacactcaatcgtcaagagtgcagaatcacgataatcctaaatgggaggcaaagaaggagaatatctcttag

SEQ ID NO: 215381 - DNA, 2181 bp, synthetic construct
  misc_feature 1..2181: note = Description of Artificial Sequence: Synthetic coding sequence
  source 1..2181: mol_type = other DNA
atggcactgctcgctatgcatagctggaggtgggcggctgccgctgccgctttcgagaaaaggcgccactctgccatcttgatcaggcccctcgtctcagtgtctggcagcggaccccagtggcgccctcatcagttaggtgccctgggcactgctcgcgcatatcaagcactccaggtctggcctcttatcgagaaacgcacatgctggcatggtcacgcgggagggggactacacactgatcccaaagagggcctgaaggatgtcgatacgaggaagatcataaaggctatgctgtcatacgtgtggccaaaagataggccagacttgcgcgctagggttgccatcagcctggggttcctcggcggagctaaggcaatgaatatcgtggtacccttcatgttcaagtacgccgtggactcattgaatcagatgagcggtaacatgctcaatctgtccgacgcgcctaatacagttgccacaatggccaccgcagttctgattggttacggggtgtctcgagcaggagccgcattctttaatgaggtcaggaacgctgtcttcgggaaggtggcccagaacagtatacgcaggatagcaaagaacgtgttcctgcacctgcacaatctggatcttggctttcacctgtcaaggcaaacaggagccttgtccaaagctattgaccgagggacacgaggtatatcttttgttctatcagctttggtgttcaatcttctgccgattatgtttgaagtgatgctggtctctggcgttttgtactacaaatgcggggcacagtttgctctcgtaaccctcggcaccttaggcacgtacaccgctttcaccgtagctgtgaccaggtggagaacacggttccgtattgagatgaataaggctgacaatgacgccggtaacgctgcaatcgacagtttactgaactacgaaaccgtcaagtactttaataacgagcgatacgaggcacagcgttatgacggctttttgaagacttatgaaaccgccagtctgaaaagcacctccaccttggctatgctcaatttcggccagtctgctattttctcagtgggcctgacagccattatggtgctggcaagtcagggtattgtcgctggcaccttgacggtaggcgacctggtaatggttaatggactgctcttccaactctccttacccttaaactttctggggacggtgtacagggagacccggcaagccctcattgacatgaacactctgtttactttgctgaaagtggatacccagattaaagataaggttatggcctcaccactgcagatcactccacagactgcgaccgtggcctttgataatgttcatttcgagtatatcgaggggcaaaaggtcctgtccggcatctctttcgaagtgccagcagggaaaaaggttgcaatcgtcggcggttcagggtcggggaagagcactatcgtgcgattactctttagattttacgagccgcaaaaaggcagtatttatctcgcaggtcagaatatccaggacgttagcttagaatccttacgccgagctgtgggcgtggttcctcaggatgccgtgctgttccataatactatctattacaatctgctctacggcaacatcagtgcgagcccagaagaggtctacgcagtagctaagttagctggcctgcacgatgccattctgcgcatgccacatggctacgacactcaggtgggagagagagggctcaaactgtctggaggcgaaaaacagagagtggcaatcgccagagcaatcctgaaggacccgccagtcattctgtatgatgaagccacatcaagcctggactccattactgaggagaccatcctgggagctatgaaagacgtggtgaaacaccggacctccattttcattgcccatcgtctttctaccgttgtcgatgcagatgaaataattgtcctggaccagggcaaggtagctgagagggggactcaccacggactcctggcaaatccacactcgatatacagcgaaatgtggcacacccaaagtagtagagtgcagaaccatgataacccaaaatgggaggccaagaaggagaatatatctaaggaagaggagagaaaaaaactgcaggaggagatcgttaactcggtgaaaggatgcggcaactgctcttgctag

SEQ ID NO: 215382 - DNA, 2208 bp, synthetic construct
  misc_feature 1..2208: note = Description of Artificial Sequence: Synthetic coding sequence
  source 1..2208: mol_type = other DNA
atgctggtccatctctttagagtcgggattagaggagggccttttccaggaagactgctgccccctttgcggtttcagacattctcagccgtgagaaacacctggcggaatggaaagaccggtcagcttcataaggccgaaggcgagtatagcgacggatatagatctagcagtctactgcgggcagtcgcccatcttcgcagccagctgtgggcacacctgccgcgtgccccattggcacctcgatggtccccaagcgcctggtgttgggtgggcggtgccctgttagggcctatggtgctgagcaagcatccccatctgtgcctcgtggccctatgcgaggccgaagaggcgccaccagccagttcaaccccacacgttgtaggctcccggttcaactggaaactcttctggcagtttctccatccccaccttctggtgctgggcgtggctgtcgtactcgctcttggagccgctctggtgaacgtgcagattcctctgctcctcgggcaattggtcgaagtcgttgctaagtacaccagggaccacgtcggatcatttatgactgaaagtcagaatctgtctacacatcttctaattctttacggcgtgcagggcctgctgacattcggctacctggtcttgctgtcccacgttggcgaacgtatggctgtcgatatgaggcgagcactcttttccagcctgctgcgccaggatattaccttctttgacgccaacaagactgggcagttagtcagcaggctgaccacagacgtgcaggaatttaagagctcctttaagttggttattagccagggactacgaagctgtactcaggttgctggatgcttggtcagtctgtcaatgctgagcacacgacttacattacttctcatggtggccacacccgcactcatgggggtgggcaccctgatgggaagtggattgcgaaaactcagtaggcaatgtcaggagcagatagcccgagcaatgggcgtcgccgatgaggccctgggtaatgttcgtacagtccgggcatttgccatggaacagagagaagaggaaaggtacggagctgaactggaagcctgcaggtgccgggctgaagagcttggaagaggcattgctctctttcaggggctctcaaatattgctttcaactgcatggtcttagggacactgtttattggaggttcactggttgcaggtcaacagttaaccggcggagatctgatgtccttcttggtggcttctcagacagtgcaaagaagtatggcaaacttgtcagttttgttcgggcaggtggttcggggactcagcgccggagccagggtattcgaatacatggctctcaacccttgcatacccctttcaggaggatgttgtgtgcctaaagaacaactgcgagggagcgtgacattccagaacgtatgtttcagctacccctgtcgccctggtttcgaggtgctgaaagatttcacactgaccctcccgccaggtaaaatcgtggcacttgtaggccagtccggagggggaaagaccacagtagcaagcctgctcgaacggttttatgatccaacggcgggtgtggtgatgcttgatggacgggacctccgtaccttggacccttcttggctgaggggccaggtggtcggcttcatcagtcaggaaccggtcttattcggaaccactattatggaaaacatccgctttggaaagctggaggccagcgatgaggaagtgtataccgccgcacgcgaagctaacgcccacgagtttataacatcctttccagaagggtataacaccgtcgtgggagagcggggaaccacactgagcggtggccaaaaacaacggctcgctattgctcgggctctcatcaagcagccaacagtgttaattttagacgaggctacttccgccctggatgccgagtcagagagagttgtccaggaagccctggaccgggctagtgccggaagaacggtattggtcattgcccaccggctatccaccgtgcggggagcgcactgtatcgtggtcatggcagacggacgggtttgggaagcaggcacacatgaagagttactgaaaaaaggcggtctgtacgctgaactcatacggaggcaggcgctggacgctcccaggaccgccgctccaccgcctaagaagcctgaaggcccaaggtctcaccagcacaaatcttag

SEQ ID NO: 215383 - DNA, 1404 bp, synthetic construct
  misc_feature 1..1404: note = Description of Artificial Sequence: Synthetic coding sequence
  source 1..1404: mol_type = other DNA
atgctcgtgcacctgttccgcgtgggcattagaggcggaccctttcctggtaggctgctccctccactgcggtttcagacattcagcgccgtgaggcgactcttgaggctgcagcccagagtgagccagaaggaaggcactctgggggtgtcagatcatgcacagtccgccctccctaccggcggaccactgagctggccctggcgctactcggatggctacaggagttcttcactcttgcgagcagtggcacatttgcggtcgcagctctgggcacacctaccgagagcgcctttggcaccccgttggtctccatccgcatggtgttgggtgggcggagctttgttgggccctatggtcctcagcaagcacccccatttatgcctagtcgcgctttgtgaagccgaagaggccccaccggctagctctactccgcatgtggtgggcagccgcttcaactggaaactgttctggcagttcctgcacccacacctgttggtgctcggggtcgctgtggtgttggctctaggtgccgctctggtgaatgttcagatccccctcttgctgggacaactggtggaggtagtggccaagtatacgcgcgaccacgtgggcagcttcatgacagagtctcagaacctttccacacacctcttgatactgtacggcgtccaggggctgctgacgttcggatacttggtcttgctgtctcatgttggggaacgaatggcagtggacatgcgccgtgccctgttttcatccctgctcagacaagacattaccttttttgatgctaataagacagggcagctcgtctcccgactgactactgacgttcaggaatttaagtcctccttcaagttagtgatttcacagggactccgttcctgcactcaggttgccggatgtctggtgtcactctcaatgctctctacgagactgacgctcctgctgatggtagccacgccggctcttatgggagtcggcaccttgatggggtctgggttgagaaaactgtctcgccagtgtcaagagcaaattgcaagagcaatgggagtggcagatgaagctttggggaacgttcgtacagtccgcgcattcgcaatggagcagcgggaagaagaaagatatggagcagaactggaggcctgtaggtgcagggccgaggaactggggaggggcatcgcactgttccagggcctctctaatattgcatttaattgcatggtccttggcaccctcttcatcggaggttcgctagttgccggacagcagcttacagggggagatcttatgtctttcctcgtggcaagccaaacagtgcagaggcaggtgcacggtcagcctttatgtccagtttgggcagggggaccaggggcagaatgtagatgtccgggattatag

SEQ ID NO: 215384 - DNA, 2157 bp, synthetic construct
  misc_feature 1..2157: note = Description of Artificial Sequence: Synthetic coding sequence
  source 1..2157: mol_type = other DNA
atgttggtgcatctgttcagggtgggaatcaggggtggtcctttccccggacggctcctgcctcctctgcgattccaaaccttttccgccgttcgctatagcgacggttacagaagctcctctcttcttagggcagtggctcatctccgtagtcagctgtgggcccatctccctagagcccctctagcccctaggtggtcaccctccgcctggtgctgggtggggggtgcgctactggggccaatggttttgtccaaacacccccatttgtgcctggttgctctatgcgaggctgaggaggcccctcctgctagctctacgcctcacgtagtggggagccggtttaattggaagcttttctggcagtttcttcatccccacctgctagtgctgggagtggcagtcgttttggcactgggggcagcactggttaacgtccagattccactgctgctgggacagctggtcgaagtggtggccaaatacactagggaccatgtgggctcttttatgacggagtctcagaacctcagtactcacctgttgattctatacggcgtacagggtctgctcacattcggctatctagtccttctctcacatgtgggcgagcgcatggctgtggacatgcgtagagccctcttctcgagtctgttgcggcaggacatcacctttttcgatgcaaataagacgggacagcttgtgtccagactgaccaccgatgtccaagagtttaagtcaagcttcaagctggttatcagccaagggttgcggagctgcacccaggtagccggatgtctggtgtctttgtcaatgctgagtacaaggctgacattgctgcttatggttgccacacctgctctgatgggcgtgggaacactgatgggatcaggcctccggaaactcagtaggcaatgccaggagcagatcgcacgggctatgggagtggctgatgaggccttggggaacgttcgtacggtgcgggcttttgctatggaacaacgagaggaagagaggtacggggcagaattggaagcttgccgttgccgcgcagaggaactgggaagaggtatcgctctgtttcaggggttgtctaacatagctttcaattgcatggtgctcgggactctcttcattggtggctcattagtggccggtcagcagctcacaggtggtgatctcatgtcattcttggtggcgagtcaaactgttcagcgcagcatggcaaacctctctgtgctctttggccaggttgtgcgagggctgtccgccggtgccagagtatttgagtacatggccttgaatccttgcattcccctcagtgggggatgttgtgtgcccaaagaacagttgagaggatccgtgaccttccagaatgtttgtttttcctacccttgccgaccaggtttcgaggtccttaaggattttaccctgaccttacctcctggcaagatcgtggccctcgttggtcagtcagggggaggaaaaactacagtcgcaagtctccttgaacgattttacgacccaaccgcaggagtggtgatgctggacggccgagacttgcggacactggacccatcttggctgaggggacaggttgtcggattcattagtcaggaacctgtgcttttcggcacaaccattatggagaatatccgatttgggaaactggaagccagcgatgaggaggtgtacactgccgctcgtgaagccaatgctcatgagttcattacttcttttccagagggctacaacactgtcgtgggggagcgaggcaccacactgtctgggggacaaaagcagcgtttagcgatcgcaagagctctaattaagcagccaactgtcctcatcctcgatgaggccactagcgctctggacgccgagtcggaaagagtcgtgcaggaagccctggacagagccagcgccggtcggaccgtgctggtgatcgcacacaggctatccacagtgcgcggtgcacactgcattgttgttatggcagatggcagagtctgggaagcaggcacacacgaggagcttctcaagaagggcggtctatatgcagaactaataagacgacaagctctcgacgcacccagaaccgcagccccacctccaaaaaagcctgaggggcctaggagccaccagcacaaatcctag

SEQ ID NO: 215385 - DNA, 2106 bp, synthetic construct
  misc_feature 1..2106: note = Description of Artificial Sequence: Synthetic coding sequence
  source 1..2106: mol_type = other DNA
atgcttgtccatttgttccgcgtggggatccgaggcggaccgtttcctgggaggctgttgccgccattgcgattccagacattcagtgcggtgcgctattccgacgggtatcggagtagctctctattgagagcggttgcgcacctgcggtctcagctctgggcacatctgcctcgggcactgctcgggcctatggtgctgagcaagcatccccatctctgcctagtcgccctgtgcgaagccgaagaggctcctcccgcttcatcaactccccatgtagttgggtctcgcttcaactggaagctcttttggcagtttctgcacccccatctcctagttctcggagttgctgtggttctagccctgggtgctgccttggtgaacgtacagattccgctgttactgggccagctagtggaagttgtcgcgaaatatacccgagaccacgtaggtagctttatgacggagtctcaaaacctgtcaacccatctgcttattctgtacggggtccaaggattgcttacattcggatacctagttctgctatcccacgtgggcgagagaatggcagtggatatgcgtcgcgctttgttctcgagtctcttaagacaggatattacattcttcgacgccaataagaccggacagctagtgtccagactgactacagatgtgcaggagttcaaaagcagcttcaagttggtgataagtcagggcctgcggtcatgtacacaagtagccggatgcttggtgagtctcagcatgctgtcgacccggctgaccctacttcttatggtcgctacgccagctctgatgggcgtcggtacacttatgggttctggtctccggaagctctctcgccagtgccaggaacagatcgcacgggctatgggcgtggctgatgaggcgctaggaaacgttagaaccgtgcgggcatttgccatggagcaacgggaggaggagcggtacggggctgagttggaggcgtgccgatgcagagcagaagaacttggtcggggtatcgctctgttccagggcctttcaaacatagcctttaactgtatggtgctaggtacgctctttatcggcggatcacttgtcgcaggccaacagctgacaggcggagaccttatgtccttccttgtggcctcacaaacagtccagagatctatggcaaacctgagcgtcctgtttggccaggtggtgcgtggcttgagtgcaggagccagagtgttcgagtacatggccctcaacccgtgtattcctttgagtggcggatgttgtgtgcctaaggaacagctgcgaggtagcgtgacctttcagaacgtttgtttctcatatccatgccggccagggtttgaggtattaaaggacttcacacttactctgcctcctgggaagatcgtggcactggtagggcagtccgggggagggaagaccacagttgctagccttttggagcgattctatgacccaactgcaggcgtggtgatgctcgatgggcgtgacttgcggactctcgatccgagctggcttcggggacaagttgtggggtttataagtcaggaaccagtgctctttggtaccaccattatggagaacattagatttggaaaactggaggcatccgatgaagaagtgtacactgcagctagggaggctaacgctcacgagttcattacctcttttcctgagggctataatactgtggtgggcgaacggggaaccaccctgtccggaggccaaaagcagcggcttgcaattgctcgggctttgataaaacagcccaccgtcctgatactggacgaggccacatctgccctagacgctgagtctgaacgtgtggtccaggaagccttggacagggcgtcagctggtcgaactgttctggtgatcgcccatagactcagcacagtaaggggagcacattgcatcgttgtgatggctgacgggagggtatgggaagccggaacgcatgaggagctcctgaagaagggcggactttatgctgagctcatccgcaggcaggccctagatgcccctcggacggccgctccaccacccaagaagcccgaaggcccaaggagccatcagcacaagtcctag

SEQ ID NO: 215386 - DNA, 1296 bp, synthetic construct
  misc_feature 1..1296: note = Description of Artificial Sequence: Synthetic coding sequence
  source 1..1296: mol_type = other DNA
atgctcgttcatttattcagggtggggattcgcggagggccattccccggacgactgctcccccctctccgctttcagactttttccgctgtgcggtacagcgacggctataggagcagcagtcttctgagagctgtcgcccacctgcggtcacaactttgggcccacctgcccagagcgcctcttgctcctagatggtcccccagcgcttggtgttgggtcggcggagccctgctgggacccatggtgttgagtaaacacccacacctatgtcttgtcgctctgtgcgaagcagaagaagcccctcctgcaagtagcacgccccacgttgtgggatcacggttcaattggaagctcttctggcagtttctccacccacaccttctggtcctaggcgtggccgtggtcctcgctcttggagccgcactggtgaacgtacaaatacctctcttgctgggacagttggtggaggtcgtcgcgaagtataccagggatcacgtcggctcgttcatgacggagtcccagaacctatcaacccacctgctgatactgtacggagtgcagggactgctgacattcggttatttagtgttactatcccacgtgggcgaacgaatggccgtagacatgaggcgcgctctcttctcatcactgctcaggcaggacattacatttttcgacgccaataaaacgggccaactggtttcacggctgactaccgacgtgcaggagttcaaaagtagcttcaaattggtgatcagccagggccttcgctcatgtactcaggtcgccggatgtctcgtttccttatccatgcttagcactcggctgaccctgttgctgatggtggcaactcccgcactgatgggggtgggaactctgatgggttccggcctgcggaagcttagcaggcagtgccaagaacagattgctcgggcaatgggggtggctgatgaagcgttgggcaacgtgagaaccgtgcgcgctttcgccatggaacagcgggaggaggagagatacggtgccgaactggaggcttgccgatgtagagcagaggagttggggcgaggcatcgccctctttcaggggctcagcaacattgctttcaattgtatggtcctgggcacgctttttattgggggatccctcgtcgccggtcagcagctcaccgggggagacctcatgtctttcctagtggctagccagacagtgcagtcattcctgcgggtcgccccatgcccgaactctctcccattgcaggccgtgacctttcacgcatggaaagatcacccttag

SEQ ID NO: 215387 - DNA, 2082 bp, synthetic construct
  misc_feature 1..2082: note = Description of Artificial Sequence: Synthetic coding sequence
  source 1..2082: mol_type = other DNA
atgctggtgcatttattccgcgtggggatccgcggaggccctttccccggtaggctgcttccacctttgcggttccagacattttcggctgtgcgatattccgatggctataggtccagctccctgctacgggctgttgcccacttgcggtcacagctatgggcccaccttcctcgggcacccctggcacctcggtggtccccgagtgcgtggtgttgggtgggaggggctctgctgggccctatggtcctctccaagcacccacatttgtgtctggtagctctctgtgaggcggaggaggcccctccggcatcgtccaccccgcacgtggtgggttcaagatttaattggaagctgttctggcaattccttcatccccatctgcttgtgcttggcgtcgccgtggtcctcgctttaggggctgccctggtcaatgtgcagattccactgctgctcggccagttagtggaggttgtggctaagtatactagagatcatgtgggcagcttcatgaccgagtcgcagaatttgagcacgcacctgctgattttatacggcgtgcagggtctcctcacattcggctaccttgtcctgctgtcacacgtgggagagaggatggccgttgatatgagacgtgcactcttctcttccctgctgagacaggacatcactttcttcgatgccaacaagaccggccagctcgtgtctcgcctgacgacggatgtgcaggaatttaaatcaagcttcaagctagtcatttcccagggcctgcgttcttgtacccaagtcgctggttgcttggtgagcctaagtatgctgagcacacgcctcacgctgctgctgatggtggctactcctgccctgatgggtgttggaactctaatggggtctgggcttcggaagctgtcaaggcagtgccaagagcagatcgcacgggctatgggggttgcagacgaagccctaggcaatgtccgaaccgtaagagccttcgctatggagcagcgggaagaagaaaggtatggtgctgagctggaagcctgtaggtgtagggcagaagagttgggccgaggcatagcattatttcagggactcagcaacatcgccttcaattgcatggtgctcggcacactctttatcggcggaagcttggtggctggtcaacagctcacagggggagacttgatgtccttcctcgtagcatctcaaaccgttcagagaagcatggccaacttaagtgttctgtttggacaggttgtaagggggctgagcgccggtgcgagggtgttcgaatacatggccctaaacccgtgcattcccctctctggtggctgttgtgttccgaaagagcaactccgtggcagcgtgacattccaaaacgtgtgtttcagctacccttgccggccaggcttcgaggtactgaaagatttcacattgaccttgccccctgggaagatagtagcactcgtgggccagtctggcggagggaagacaactgttgcctcgttgttggaacgcttttacgaccctacagcaggggtggtcatgttggacggaagggacctgcggacgctcgatcctagctggctgcgaggacaggtggtggggtttatcagccaggagcccgtgctcttcgggacaacaataatggaaaacatccgtttcggcaagctcgaggcctccgatgaggaggtctatacagccgcaagagaggccaacgcccatgagttcataacaagtttcccagaaggatacaacactgtcgtcggagaaaggggcaccactctgagtggaggtcagaaacaaaggctggcaattgcaagggccctaatcaaacagccaaccgtcctgattctggacgaagccacgtccgccctcgatgccgagagtgagagagtagttcaggaggccctggacagagcctctgctggaaggactgtgctggctggcacccatgaagagctccttaaaaagggaggactctatgctgagcttatccgtagacaggccctcgacgctccaagaactgctgccccacctcccaagaagcctgaaggcccaaggagccaccaacacaagtcatag

SEQ ID NO: 215388 - DNA, 1893 bp, synthetic construct
  misc_feature 1..1893: note = Description of Artificial Sequence: Synthetic coding sequence
  source 1..1893: mol_type = other DNA
atgcgcgtgaagcttctgctgcctgccgctcctgttctgcccagacaacacgccggtgccttcatttctggacgcgatagtggctggccgattcccaggcaggccgctacggcgcctccgctccccgatatcctgagttgtcaattagccctcggagcagcactggtcaatgttcagatccctctgctgctgggacaactcgtggaagtcgtggccaaatacacccgcgatcatgttgggtccttcatgacagagtcccagaatctcagcacacacctccttattctgtacggagtacaggggttgttgactttcgggtatctggtactgttaagccatgtgggcgaaagaatggccgtggacatgcggagggccctgttcagttctctactgcgtcaagacataaccttctttgacgctaacaaaactggacagctagtctccagactgacaactgatgtccaagaattcaaaagtagcttcaagctcgtcatcagtcaaggactgcggagctgcacacaggtagcaggatgtttggtgtccttgtcgatgctttccacacgcctgaccctgctgctaatggtagccacacccgcactaatgggggtcggaaccttgatgggctcgggcctgcgaaaactttcgcgccagtgccaggaacagatcgctagggctatgggagttgccgatgaggccctcgggaacgtccgcaccgtgcgtgcatttgctatggaacagcgggaggaggagcgctacggcgcagaactagaagcgtgccgatgtagagctgaggaattgggtagagggattgccctttttcagggtttatctaacattgctttcaactgtatggtgctgggcaccctgttcattgggggaagtttggtggcgggtcagcagttgactgggggagacctcatgagttttttggtcgctagtcagacagtgcagcggagcatggcgaatctttcagtgttgtttgggcaagtggttaggggactttcagctggtgctcgagttttcgagtatatggccctgaacccctgcattccactgtctggtggttgttgtgtgccgaaggaacaactgcggggttccgtgacgtttcagaatgtatgtttctcttatccatgccggcctggcttcgaagtgctgaaggactttacactaacactcccacccggtaaaatcgtggctctggtggggcagagtgggggaggtaaaaccacagtggcctcattactcgagaggttttatgaccccacagctggcgtcgtgatgttagacgggcgagacttgcgaacccttgatccatcctggctccggggacaggtggtagggttcattagccaagagcccgtcttgttcgggacaacaatcatggaaaatattcgcttcggcaaattggaagcatccgatgaagaggtttatacagctgctcgggaggccaatgcacatgagttcattaccagcttccccgaagggtataacacagtggtgggagagaggggaaccactctgtcaggtggacagaagcagcgactggccatcgcccgtgccctgattaagcagccaaccgtgctcattctggatgaggccacttcagcgctggacgccgaaagcgagcgtgtggttcaagaggcgctggatcgtgctagcgctggcaggaccgtccttgtgattgctcacagattgagcactgtgcggggagcccattgtattgtggtgatggccgatggccgtgtctgggaggccggaacgcacgaggagctgctcaaaaaggggggattgtatgccgaactcatccggagacaggctctggatgctccccgtaccgcagcccctcccccaaagaaacccgaggggcctaggtcccaccagcacaagagttag

SEQ ID NO: 215389 - DNA, 2301 bp, synthetic construct
  misc_feature 1..2301: note = Description of Artificial Sequence: Synthetic coding sequence
  source 1..2301: mol_type = other DNA
atgcgcctctggaaagcagttgtggtaactctcgcctttatgagcgtggacatctgcgtaacaacagccatctacgttttctcacatcttgaccggagtctgctcgaggacatccgccatttcaatatcttcgatagcgttctcgacctctgggcagcttgtctgtatcgtagctgcctattattgggtgcgactattggggttgctaaaaacagtgctttaggccctcgccgtctgagagccagctggctggtgataaccctggtctgcctgtttgtgggaatctatgccatggtgaagttgctgctatttagtgaagttagacgacctatccgggatccgtggttttgggcactgtttgtgtggacttacatttccttaggggctagctttctcctatggtggctgctgagcacagtccgaccaggtacccaggctctggaacctggggctgcaacagaggccgaagggttccccggatcaggcagacctcccccagaacaagccagtggcgcaacactgcagaaactattatcttacactaagccagatgtggccttccttgtagcagcctccttttttctgattgttgccgctctgggcgaaaccttcttgccttactacaccggcagggcgatcgacgggatcgtcatccagaaatctatggatcagttttccactgccgtcgtgattgtgtgtctgctcgccatcggttcttcatttgccgcaggtattagagggggtatttttactttgatcttcgccagattaaacattagactacggaactgcttgttcaggtcgctggtgtcccaagaaacttcattttttgacgagaacaggacaggcgatctgatcagccggctgacttccgatacaacaatggtcagcgacctggtgtcacagaatatcaatgtcttcttacgcaacactgtgaaagtgactggtgtcgtggtgtttatgttctctctgagctggcagctgagcctggtaacatttatgggctttcctatcatcatgatggtctctaacatttatgggaaatactataaacgattatctaaggaagtgcagaatgccctcgcgagagctagcaatacggccgaggagacaatttccgcgatgaaaaccgtacgcagcttcgccaacgaggaagaagaggcggaggtctatttacgaaagctccagcaggtatataaattgaacaggaaggaggccgcagcctatatgtactacgtttgggggtctggcctcacgttacttgtggtgcaggtgtctatcttgtactatgggggacatctggtaatttctgggcagatgacttcaggcaatctgatagcctttatcatctacgagtttgtcctgggcgattgcatggagagcgttggctctgtctactccgggctcatgcagggggtcggtgccgctgagaaagtattcgagttcatcgatcggcagccaactatggtgcacgatggcagcttggcccctgaccaccttgaggggagagttgattttgaaaatgtcaccttcacttaccgcacacggcctcacacgcaggttttgcagaatgtatcattcagcctttccccaggaaaagtgacggcactggtgggacccagtggctcaggcaaatctagttgcgtgaatatcctggaaaatttttaccccctcgagggcggtagagttctgctggacgggaagccaatatctgcatatgatcataagtacctccacagagtgatctctttggtcagtcaggagcctgttttattcgctcgaagcatcacagacaacatcagttacggactgcccacagtgccctttgagatggttgtagaagcagcccagaaggctaatgcacatggtttcattatggaactacaggacgggtatagtactgagacaggagaaaaaggcgcacagttgtctggaggccagaaacaacgcgttgccatggcacgcgcattggtgcggaatcccccagttctgatactcgatgaggccacatccgcattggacgccgaatctgagtatctgattcaacaggccatacacggcaatctacagaaacatactgtacttatcattgcacatcgcttatcaacggtggagcatgcacatctgatcgtcgttcttgacaagggaagagttgtccagcaaggcacccatcagcagttacttgctcaaggcggtctctacgctaagctggtgcagaggcagatgcttggactgcagccagccgctgatttcactgcagggcacaatgaaccagtcgcaaatggctcccataaggcatag

SEQ ID NO: 215390 - DNA, 2172 bp, synthetic construct
  misc_feature 1..2172: note = Description of Artificial Sequence: Synthetic coding sequence
  source 1..2172: mol_type = other DNA
atgcgcttatggaaagccgtggttgtcacgctggcttttatgagtgttgatatctgcgtgaccacggctatttacgttttttctcacctcgatcgcagcctgctggaggatatacgacattttaatatttttgactccgtgctggatctctgggctgcctgcctgtatcggtcctgtcttctgcttggcgctacaattggcgtcgccaaaaactccgctttgggaccccgtcgccttcgtgcatcctggctggtgattaccctggtgtgtctgttcgtaggcatttatgctatggtgaagctcctgttgtttagcgaggttcgcaggccaattagagatccatggttctgggccttgttcgtgtggacatatattagcctcggggcttccttccttctgtggtggttgttatctaccgtcaggcccggaacccaagcactcgaacccggagccgctactgaggcggagggcttccctggaagtgggcgacctccccctgaacaggcctctggggcaaccctacaaaagttattaagctacaccaaacctgatgtagctttcctggtggctgcctcattttttttaatcgtggccgctctcggcgagactttcctgccctactacaccggaagggctattgatgggatcgtaattcagaagagcatggaccaattctcaaccgcagtggtgatcgtgtgccttctggctatcggctcatccttcgccgctggcattcggggaggcattttcaccctaatatttgctaggcttaacatacggcttcgtaattgtctatttagatctctggtttctcaagaaacatcatttttcgacgaaaatcggaccggcgacttaatcagtaggttgacctcagacacaacaatggtgagtgatttggtctcgcagaacatcaacgtgttcctccggaacacagtcaaagtcaccggggtggtggtgtttatgttctccctgtcctggcaacttagcctggtgacatttatgggcttccccatcatcatgatggtgtctaacatttatggcaagtactacaagcgcctatccaaggaagtgcaaaatgctttggccagagcttccaacacggccgaggaaactatttccgccatgaagactgtgcgcagttttgctaacgaggaggaggaggctgaggtgtatcttcggaaactccagcaggtctataagctcaaccggaaggaggctgcggcttacatgtactacgtatgggggtctggctctgttggtagcgtatatagcggacttatgcagggggtcggcgcagccgagaaggttttcgagtttatcgaccgacaaccaaccatggtacacgacggatccttggcgcctgatcatctagaaggaagggtggacttcgagaatgtgacttttacttatcggacacgaccccatacacaagtgttgcaaaatgtatcattcagcctgagtcctggcaaggtgacagccttggtgggaccaagtggcagcggcaagagttcttgcgtaaatatcctcgagaacttttaccctctagaaggaggtcgtgttctcttggatggtaagcctatttccgcatacgaccacaagtacctccatagggtgatctcactggtcagtcaggagcctgtgcttttcgctaggtcaatcaccgataacatttcatatgggctcccgaccgtgccgtttgagatggtggtcgaggcggcacaaaaagctaacgctcatggttttatcatggagctccaggacggttattccactgaaacaggcgaaaaaggggctcagctgtccgggggacagaagcaacgagtggctatggcacgtgcattggtgagaaatccacccgttttgatcttggatgaagccacttctgcgctagatgcagaaagtgagtacttgatacagcaagcaattcacggcaatttacagaagcatacagtattgattatcgcgcataggctgtctactgttgagcacgcccatctgatcgttgttctggataagggccgagtggtacagcaaggtacccatcagcagttactggcccaaggtggtctgtatgccaagcttgttcaacgtcagatgctgggcttgcagcccgctgccgacttcactgcaggtcacaacgaacccgtcgctaacgggagccacaaggcctag

SEQ ID NO: 215391 - DNA, 2301 bp, synthetic construct
  misc_feature 1..2301: note = Description of Artificial Sequence: Synthetic coding sequence
  source 1..2301: mol_type = other DNA
atgagactctggaaagctgtcgtcgtcacactggcttttatgagcgttgatatctgtgttactaccgctatctacgtgttctctcacctggaccggtcactgctggaggatattagacatttcaacatctttgacagcgtgctggacctctgggccgcttgtctgtatcgttcctgcctcctccttggagcgaccatcggagtagcgaagaatagtgctctcgggccaaggcggctgcgtgcctcctggctagtgatcactttggtgtgtctgttcgtggggatctacgcgatggtcaagcttctgctattcagtgaggtcaggaggcccatcagagacccatggttctgggcacttttcgtatggacctatatcagcctgggcgctagcttcctcctgtggtggctgctgtctaccgtgcggcctggcacccaggccttagagcccggagcagcaaccgaagctgagggctttcctggcagcgggagacctcccccagagcaggcctcgggagcaaccttacagaaactgctgtcgtacacaaagcctgatgtcgctttcctcgtggctgcgagcttctttctaatcgtggcggcactgggcgaaacctttctgccctactacaccggccgagccatcgatgggatcgtcatacagaaatccatggatcaattttctaccgctgtggtgattgtgtgtctgctggcaatcgggagctcatttgcagccggtatacggggagggatctttaccctgattttcgctagactcaatatccggcttaggaattgcctgttccgcagtctcgtgtcccaggagacatcgttttttgacgagaaccgaaccggcgacctgatttcccgactaactagtgacaccacaatggttagcgatctagtcagtcagaacattaatgtgttcttgagaaacactgtgaaggttacaggtgtggttgtatttatgttttccttgtcatggcaattaagccttgtgaccttcatgggattccctattatcatgatggtttccaacatctatggcaagtactacaagcggctctcaaaggaagtgcaaaacgccctggcgagagcctctaataccgcggaagagactataagcgcaatgaagactgttcggtcatttgccaatgaggaagaggaggccgaggtgtacctgaggaagctgcagcaggtttacaagttgaaccgcaaagaagctgcagcttatatgtactacgtctggggctccggactgacactcctcgttgtccaggtctcgatcctgtattacggagggcatctagtgatttccgggcagatgacttccggaaatcttattgccttcattatttacgagtttgtcctgggggattgcatggagtctgtcggcagcgtgtattctgggcttatgcagggcgtaggtgccgcagaaaaagtgttcgagtttattgacagacagcccacaatggtccatgacgggtccctagcccctgaccacctagaaggcagggtcgatttcgagaatgtgacattcacttatcggactcggccacacacccaggtcctgcagaacgtgtccttcagtctatcccccggtaaggtcaccgccctggtcggcccaagcggttctggcaaatcatcatgtgtgaatattctggagaatttttatcctctggaaggtggcagagtccttttggatggcaagcccatatctgcctacgatcataagtacctccacagggttattagtcttgtgtctcaggaacccgtactgtttgcacggtcgatcaccgataacatttcttacggacttccaactgtgcctttcgaaatggtggtagaggccgcacagaaagcaaacgctcacggtttcattatggagctacaggatgggtactccacggaaaccggcgagaaaggcgctcaattgtctggtggccagaaacagagggtggcgatggcgagagctctggtgagaaatcctcccgtcctgattctcgacgaggcgacaagtgctctggatgccgagagtgaatatctcatccagcaagctattcatggtaacctgcaaaaacatacagttcttattatagcccataggctgtccacagtggaacatgcgcacctcatcgtagtacttgataaaggacgcgtcgtgcagcaggggacgcatcagcaattgctcgcacaaggtggcctttacgctaaattagtgcagcgccaaatgctcgggctgcagcctgctgcagatttcacagcaggccacaacgagccagtggccaatgggagccacaaggcatag

SEQ ID NO: 215392 - DNA, 2310 bp, synthetic construct
  misc_feature 1..2310: note = Description of Artificial Sequence: Synthetic coding sequence
  source 1..2310: mol_type = other DNA
atgcggctgtggaaggcggtggttgtcacgttagcattcatgagtgtcgatatctgtgtgaccacagccatatacgtgttctcacacctagatcgtagcttgctagaggatatccgacattttaatatatttgattcggtccttgatctgtgggcagcctgtctgtacaggtcttgtcttctgctgggggctaccatcggcgtcgccaagaactcagccctgggcccaagacgcctgcgcgctagctggctcgtcataactctcgtctgcttgtttgtgggcatctacgccatggttaagctcttactcttctctgaggtgcggagacccattagagacccctggttttgggctctgtttgtgtggacgtatatttctctcggcgctagctttctcctctggtggcttttgtcaaccgttcgaccgggaacgcaggctctggagccgggtgccgctacagaggcagagggttttcccggaagcggcaggcctcccccagagcaagcatccggggcaacgctgcagaagctactgagttatacgaagcccgatgttgcgtttttagtagccgcttcattttttctcatcgtggcagcccttggagaaactttcctaccatattataccggtcgagccatcgacggcattgtaatccagaaaagcatggatcagtttagcaccgcagtcgtgatcgtgtgcctcctggccattggctccagttttgccgctggtatcagagggggaatctttacacttatttttgcacgccttaatatccgcctgagaaactgcctttttcgaagcctggtctctcaggaaactagtttctttgacgagaacagaacgggggatctcattagccggctgacctcagacaccaccatggtgtcagatcttgtgtcccaaaacatcaatgtgtttcttcgcaacactgtgaaagtcaccggggtggtcgtcttcatgttctcgttgtcatggcagctgtctttagtcacattcatgggctttcccatcataatgatggtgtcaaatatatatggtaagtattacaaaaggctgagcaaagaggtgcagaacgcactcgctcgtgccagcaacaccgccgaagaaacgatttcagcaatgaaaacggttcgtagcttcgctaatgaagaggaggaagcggaagtttacctgcggaaactgcagcaggtgtataaactgaatagaaaagaagcagcagcatacatgtactacgtctggggtagcgggctgacgttgctagtcgtgcaggtctctatcctgtactatggagggcatctggtcatcagcgggcagatgaccagtgggaatctaattgcttttatcatctacgagtttgtgctcggcgactgcatggagtcggtgggctcggtatacagcggactgatgcaaggcgtcggagctgctgagaaagtgtttgaatttatcgatcggcagcccacaatggtgcacgacgggtccttagcccctgaccacctcgaaggacgcgtagattttgaaaatgtgacttttacctatagaacaagaccgcatacccaagtgctccagaatgtgagttttagcctcagccctgggaaagtcacagcactagtgggtccatcagggtcagggaagagctcatgcgttaatatcttggaaaatttttacccactagagggcggtcgtgtgctcctggacgggaagcctatctccgcctatgaccacaaatacctgcatcgggttatctccctggtaagccaagagccagtcctctttgcccgtagcatcactgataatatctcctatggcctgcctaccgttccattcgagatggtggtcgaggctgcccagaaagctaatgcccatggcttcattatggagctgcaggacggttattctaccgagaccggtgagaagggagcccagctgagcggaggccagaagcagcgggtcgcaatggcgagggccctggtgcgtaaccccccagttctcatactcgacgaagccacatcggccttggacgctgagtcagaatacctgagtccacagatccagcaggcaattcacgggaatttgcagaaacacaccgtgttgattattgctcataggctctctaccgtggaacatgcacacctgatcgtggtcctagataaaggtcgggtcgtgcagcaaggaacacatcagcaactattagcccagggcggtctctacgctaagctcgtacagagacagatgctgggcttgcagcccgcagctgactttacagccggacataatgagccagtggcaaacggaagtcataaggcatag

SEQ ID NO: 215393 - DNA, 2112 bp, synthetic construct
  misc_feature 1..2112: note = Description of Artificial Sequence: Synthetic coding sequence
  source 1..2112: mol_type = other DNA
atgcgactgtggaaggctgtggtagtcaccctggccttcatgagtgtggacatctgtgtgacaactgccatttacgtctttagtcaccttgatagatcgcttttggaagatatcagacactttaacatcttcgactcagtgctcgacctgtgggctgcgtgcctctatcgatcttgtctgcttctcggagccactattggagtggccaagaatagtgcgctgggccctaggcggctgagagcctcctggctggtgattacacttgtctgtctgtttgtaggcatatatgccatggttaagctcctgttgttttcagaagtacggagaccgattcgagacccatggttctgggcgctgttcgtttggacatacatctctctaggggcatcgttcttactatggtggttgctgtccactgttcggccaggaactcaggccctagagcccggagctgccactgaggcggagggttttcctggctccggcagacctccaccagagcaggcttctggggctacacttcagaagctactgtcctatacgaagcccgacgtggccttcttggtcgctgcttctttcttccttatagtggccgctctaggcgagacctttctcccttactacacggggagggcgatcgatgggatcgtcattcagaagagtatggaccaatttagcacagcggtggtgatcgtttgcctcctggccatcgggagctcctttgctgctggtatccgcggaggtatctttacacttatttttgcacgtcttaacattagactgaggaattgtctgttcagaagccttgtgagtcaagagacctctttttttgacgagaacagaaccggtgatctgataagccgacttactagtgataccacgatggtgagcgatcttgtaagtcagaacattaatgtcttcctacgaaatacagtcaaggtcacaggagtagtcgtgtttatgttttctctgtcctggcaactatcactcgtgacattcatgggctttccgatcataatgatggtgagcaatatttatggaaagtattacaagagactctccaaggaagtccaaaacgccctggcccgagccagtaataccgcagaagagaccatctctgccatgaaaaccgtgcgatcgttcgccaacgaggaggaggaagctgaggtatacctgagaaagctgcagcaggtctataagctaaataggaaggaggcggctgcctatatgtattacgtatggggttctggtctcactcttctagtagtccaggtaagcattctgtactacggaggccacctggtgattagtggacagatgacaagcgggaatctgattgcctttattatctatgagtttgtcctcggcgattgcatggaaaacgtatccttttccctgtccccaggcaaagtgactgccctggtagggccttcaggcagcggcaagtctagctgtgttaacattcttgagaatttctacccactggagggcggtagggtgttactcgatggcaaacctattagtgcttatgatcataaatacctccatcgtgtgatctcgctggtttcccaggaacccgtgctcttcgctcggtccataacagacaatatctcttatggcctgcctacagtcccgtttgagatggtggttgaggccgcacagaaggcaaatgctcacggcttcattatggagttgcaagatggatacagcaccgaaactggcgagaaaggggctcagctctcagggggtcagaagcagcgggtggcaatggcgagggccctggtccgcaacccacccgtattaatcctggacgaggccacatcggccctggacgccgaaagcgagtaccttattcagcaggccatccacggaaacctgcaaaaacacaccgtgctgattattgcccatcgattgtccacagttgagcatgcccatctcatcgtggtgcttgacaaggggagagttgtgcagcaaggaactcaccagcaactgcttgcacagggaggactgtacgccaaactggtgcagcgacagatgctcggcctgcagcccgcagccgattttacagcaggccacaatgaacccgtcgcaaacggtagccataaggcttag

SEQ ID NO: 215394 - DNA, 2301 bp, synthetic construct
  misc_feature 1..2301: note = Description of Artificial Sequence: Synthetic coding sequence
  source 1..2301: mol_type = other DNA
atgcggctgtggaaagccgtcgttgtcaccctggcctttatgtccgtggacatctgtgttacgaccgcaatttacgtgttctcacaccttgatcgctctctgctggaggacattcggcacttcaatatatttgatagcgtgctcgatctgtgggccgcttgtttatacagaagctgtttgttgttaggagccaccatcggggtcgcaaagaatagcgcgcttggcccaagacgtctgcgagctagctggcttgtgattacattggtatgccttttcgtcggaatttacgccatggtgaaactcctcctattctccgaggtgagaagacccatccgcgacccttggttttgggccctgttcgtgtggacctatatcagcctgggagccagttttctgctttggtggttactgtccactgtgcgcccaggaacccaggcattggaaccaggcgcagcaaccgaagctgaaggctttcctggcagtggcagaccgccacctgagcaggcctctggcgcaacacttcagaagctgttgagttacactaaacccgacgtggcctttttggtggccgcatcttttttccttattgtggccgcattaggcgaaaccttcttaccttattacaccggaagagctatcgatggaatagtgatccagaaatcaatggaccagttttcgacagctgtcgtgattgtctgtctgctcgcaataggctcgtccttcgccgctggtattagaggcggtatattcacgctgattttcgcaagactcaatatcaggctgcgcaactgcctgtttagatcgctggtgtcacaggaaacgtctttcttcgatgagaatagaaccggtgatctaattagtagactgactagtgatacgacgatggtaagtgatcttgtttcacagaacattaatgtcttcctgcgtaataccgtaaaggtcaccggggtggtggtgtttatgttttccctttcctggcaactctcactggttacctttatgggattcccgataataatgatggtcagcaacatctacggcaagtattataagcgcctctctaaagaagtacagaatgcgctggcaagggcctccaacacggcagaggagaccataagtgcgatgaagacagtaagatctttcgccaacgaagaagaagaagcagaggtttatcttcgaaaactacaacaggtttacaaacttaatagaaaggaggcggcagcttatatgtactatgtttggggcagcggattaacattgctagtggtccaggtgagtatactgtattatggcggacatctggtgatcagcggacagatgacgagcgggaacctgattgccttcattatttatgagtttgtgttgggtgactgcatggagagtgttggtagtgtttattccgggctgatgcaaggtgtaggcgctgcggagaaggtgtttgagttcatcgatcggcagccaactatggtgcacgatggttctttggcccctgatcacttggagggacgagtcgacttcgagaacgtgacctttacctaccggactcgccctcatactcaggtgctgcaaaatgtgtccttctcgctgagtcctggaaaggtgaccgccctggtgggtcccagcggttccggtaaaagcagctgcgtcaacattctggaaaacttctacccgctggaggggggaagagtactgctagacggcaagcccatatctgcatacgatcacaagtatctgcacagagtcatctccctggtcagccaggagcctgtccttttcgcgaggtctataacagacaatatttcatacggactgccgacagtgccttttgagatggtggtggaggctgcccagaaggccaacgcacacggattcattatggaactgcaagatggatactcaactgaaaccggcgagaagggagcccagctgtctggcggacagaagcagcgtgttgccatggcaagggccctggttaggaatccgcctgtactcattctggacgaagccacttcagccctggacgccgagtcagaatatctcatacagcaggccatccacggcaacctgcagaagcatacagtgctgatcatagcgcaccgactgtcgaccgtggagcacgcccatcttatcgttgttctggataaggggagggtcgtgcagcaaggaactcaccagcaactcctcgctcagggaggcctttacgccaagttagtccagcgacagatgctgggcctacagcctgctgcggatttcactgctggtcacaatgagccagtcgccaatggcagccataaggcttag

SEQ ID NO: 215395 - DNA, 4395 bp, synthetic construct
  misc_feature 1..4395: note = Description of Artificial Sequence: Synthetic coding sequence
  source 1..4395: mol_type = other DNA
atgtgccttctggtcttccctcttgtaccgaggagccccgactatatcttgccttgctcccccggatggcgcctgagactggccgctagctttttgctctctgttttccctcttctggatctactgcccgtagccttgcccccaggggctggtcctggtcctattggcttggaggtgcttgcagggtgcgtggctgccgtggcttggattagtcactcactggctttgtgggtgttggcacatagcccacacggccatagccgcggacctctggctctagcccttgtggcactcctgcccgctcctgccctggtcctgacagttctttggcactgtcagcggggaaccctgttgccccctcttctccctggtccaatggcaaggctgtgcctgttaatccttcagctggcagcgttgctcgcttacgctctgggatgggctgcacccggaggaccacgtgagccctgggctcaggagcctcttttgcccgaggaccaggaacccgaagtagctgaggacggcgaatcatggctgtcccggtttagctatgcttggttagcccctctactggccaggggggcatgtggtgaacttcggcaaccacaggacatctgtcgcctgccacataggttacagcctacctatcttgcaagagtgtttcaagctcactggcaggaaggtgccaggctctggagggccctctacggggcttttggccgttgctatctggctcttgggctgctgaagctagttggaacaatgcttggcttcagcggacccctgctgctcagcctcctggtcggcttcctggaggaaggacaggagcccctgagtcacgggctcttgtacgcactaggtctggccggaggggctgttctgggcgcagtgcttcaaaatcagtatggctacgaggtgtacaaagttacccttcaagccagaggagctgtactcaacattctgtattgcaaggcactgcagctcggcccatcgagaccacccacaggggaagctcttaatttgctaggtacagattccgagcgcttgctgaatttcgctggttcttttcatgaggcctggggtctcccacttcaactcgcgatcaccttgtatctgctgtaccagcaggtgggggtggcattcgtcgggggactcatcctggcgctgctgctggtgcccgtcaataaggtgattgcaacgaggattatggcttccaaccaggaaatgttacagcataaagatgctcgcgtaaagctcgtgacagagctgctaagcggcatccgggtcataaaattctgtggatgggagcaggccctgggcgctcgtgtcgaggcgtgtagggccagggagctcggccgactccgagtgatcaagtaccttgacgcagcgtgtgtgtatttgtgggcagctctcccagtggtgatttctatagtcatctttattacttacgttcttatgggacaccagctcacagctaccaaagttttcaccgcactggcactggtaagaatgctgatactgcccctaaataacttcccatgggttatcaacggcctgctggaagccaaggtgagcctcgatcgtatccagctcttcctggacctgccaaaccacaaccctcaggcttactatagccctgactgtggccgtctgggagcccaaatcaagtggctcctctgttccgatcctccggcagagccatccacagtcctggaactgcatggcgctctgttctcttgggaccccgtggggaccagcttggagacgttcatcagtcaccttgaggttaaaaaaggcatgctggttggcattgtgggcaaggtcgggtgcgggaaaagttctttgctggcggcaatcgcgggtgaattgcacagactcagaggccatgtggccgttcggggattgtcaaaagggttcggactggcaacacaggagccttggatacagttcgccaccatacgggataatatcctctttggaaaaacatttgatgcccagctgtacaaagaggttctggaggcatgtgcgctgaatgatgatctgtcgatcctccctgctggtgatcagacagaggtcggtgaaaaaggagtgacacttagtgggggtcagcgtgcaagaatcgcactcgctagggcagtgtaccaggaaaaggagctgtatctgttggacgacccactggctgccgtcgatgcagatgtagcaaatcacctgctgcacagatgcatcctgggaatgctcagttacacgacaaggcttctgtgcacccataggacagaatacctagaacgagccgacgccgtccttttaatggaagcaggcaggctgattcgggcaggccctccgtcagaaattctcccattagtgcaggcggtgcctaaggcatgggccgagaacgggcaggagtcagactcggcaaccgcacagagtgtccagaaccctgaaaaaaccaaagaggggctggaagaagagcagagtactagtggacgcttactacaagaagagagcaagaaggagggcgcagtggcattacacgtctaccaggcctattggaaagccgtcggccagggcctcgccctggcaatcctcttcagcctattgttgatgcaggctacaaggaatgccgcagactggtggctgagccattggattagccagttgaaggcggagaattctagccaggaggcgcagccaagtacctctccagcatccatggggctattcagcccgcagttgttactattctcccctgggaatttgtatatccctgtgttccccctgccgaaggccgcacccaatggatcttctgacattcgcttttacctgaccgtctacgctacaatcgcgggtgtgaactcactatgtaccctactcagggccgtgctgtttgccgctggaaccttgcaggccgctgcaaccttacatcgtcgcctgctgcaccgtgtcttgatggcccctgtgaccttttttaacgctacaccaacaggcaggattctgaacagattttctagtgatgtggcctgcgctgacgactctctgccatttatccttaatatactgctggccaacgcggcagggctgctggggctcctggctgtgctgggatcgggcctcccctggctgctgctgctgcttccccctctgagtattatgtattaccatgtccagaggcattatagggcctcttctcgggaattacgtcgactggggagtctgactctgagcccactctactcccacctggccgacaccctggcgggactgtctgtgttacgggcaacaggagcgacctatcggtttgaggaggaaaatttacgactcttggaactgaatcaacggtgtcagttcgccaccagcgctaccatgcagtggcttgacattcgcctgcagttgatgggagcagctgtagtcagtgctatagcgggaatcgccctagttcagcatcaacagggtttagctaaccccggtctggttggactctcgcttagttacgcgctgtccctcactggtctcctgtccgggctggtttctagtttcacccaaactgaagctatgctcgtgagtgtggagagactcgaggagtacacatgtgatctcccgcaggagcctcagggccagccacttcaactgggcacagggtggctcacacagggtggggtggagtttcaggatgtggtcctggcctatcgccctggtcttcccaacgccttggacggcgtgaccttttgtgtgcaaccgggtgagaaattgggcatcgtcgggagaacaggatctggcaagagttccctcctcttggtcctgtttcggctcctggagccttcctccggacgcgtactgctcgacggcgtggacacaagccagctggagctggcacagctgagaagccaactggcaatcatccctcaagagcccttcctatttagtggaaccgtccgcgagaacttggacccacaaggcctacacaaagatcgggcactttggcaggctctgaaacaatgccatctatcagaagtgattacaagtatggggggtctcgacggagagctcggtgaaggcggtcggagtctctcactgggacagcggcagctcctttgcctggcccgagcgctgctgacggatgctaagattctctgtattgacgaggccactgcctctgtagatcagaaaaccgaccaattactgcaacagaccatctgcaagcgctttgccaataaaaccgtccttactatagcccacaggcttaacaccatcctgaactcagaccgggtgctggtgctgcaggcagggagagtcgtggagttggatagcccagctaccctacggaaccagcctcatagcctgtttcagcagctgctccagagctcgcagcaaggcgtccccgcatcccttggcggtccctag

SEQ ID NO: 215396 - DNA, 4479 bp, synthetic construct
  misc_feature 1..4479: note = Description of Artificial Sequence: Synthetic coding sequence
  source 1..4479: mol_type = other DNA
atggagcgactgctcgctcagctgtgtggctccagcgccgcttggcccctccctctgtgggaaggggacacgacgggccattgctttacccagcttgtcttaagcgccttgccgcatgctttactggccgtcctttctgcttgttacctggggacccccaggtcacccgattacattctgccctgcagcccaggatggcggctgagacttgctgccagctttttactgagcgtgtttccactccttgatttgctgcccgtggcactgcctcctggcgctggacctgggcctattggactagaggtgctggcagggtgtgtggctgccgtcgcctggatctcacatagcctggcactgtgggttctagcccatagcccccacggtcacagtaggggccctttagctcttgctcttgtggcactactgccagcacctgccctggttctcacagtattgtggcactgtcagagaggaacactgttaccccctctccttcctgggcctatggccagactgtgcttgctgatactccagctagctgcgctgcttgcttacgctctcgggtgggctgcaccaggagggccacgggagccatgggctcaggaaccgctgttgcctgaagatcaggagcccgaagtggccgaagacggcgaatcgtggctgtccagattctcctacgcgtggctagccccattgctggcacgcggagcatgcggagaattgaggcagccacaggacatatgcagactgccccaccggttgcagcctacatacctggcaagggtgttccaagcccactggcaggagggagctcgtctttggagagcactgtatggggctttcggcaggtgttacctagccctgggcctgctcaagctcgtcggtacaatgctgggcttcagtggaccgctgcttctctccctgctggttgggtttctcgaggagggacaagaaccgctttctcacggcctgttatatgctctgggcctggcaggaggcgcagtgcttggggctgtccttcagaaccagtatggatatgaggtctacaaagtgacccttcaggccaggggagccgtacttaacattctgtattgtaaggccttacagctaggaccaagtcggccacctactggagaagctctgaatctcttaggcacagactccgagcgattactgaatttcgctggatcatttcacgaggcatggggacttcctctacagctggccattactctgtacctgttgtaccagcaggtgggggtggcatttgtcggaggactcatactcgcgctactgttggtgccagtgaacaaggtgatcgcgaccagaattatggcttccaatcaagagatgctccagcacaaagacgctagggtgaagctggtcacagaattactctccggcattcgagttataaagttctgcgggtgggagcaggctcttggtgctcgggtggaggcctgcagggcgagggaattaggcaggctgcgggtgattaagtacttagacgccgcatgcgtgtacttgtgggccgctcttccagtggtgatctccatcgtgatcttcatcacctacgtcctgatgggacatcagctcacggctaccaaggtgttcacagcactagcactcgtccgcatgctcatactacccctcaacaattttccgtgggtcattaatggtcttctggaagccaaggtgagtctagatcggatacaactgttcttggatctgccaaaccataatccacaggcttactatagccccgatcctcctgcagaacccagcacagtgttggagttgcacggagcgctgttctcttgggatcccgtggggacttccctcgaaacattcatcagccatttggaggtgaagaaaggcatgctggtgggcattgtagggaaggttggttgtggcaagagtagcctccttgccgctattgctggcgagttgcacaggctgcgagggcatgtggcggttcgaggccttagcaaaggctttggcttggcgacccaggaaccttggatacaattcgcgacaatcagggacaacattctgtttgggaaaacctttgacgcccagctgtacaaggaagtgctggaggcctgtgcacttaatgatgacttgtcaatcctgcccgcaggtgatcaaacggaggttggcgaaaagggcgttacactctcaggcggacaaagagcaagaattgctctggcaagggctgtctatcaggaaaaggaactgtacctgctggatgatccactggcagctgtggacgctgacgtcgcgaatcacctgcttcatcggtgcatccttggcatgctgtcctacaccacccgcttgctctgtacacaccggactgagtacctggagcgcgctgacgccgtgctgctgatggaggccggaaggctcattcgggctggaccaccgtccgaaatactcccattagtgcaggccgttcccaaagcttgggccgagaatgggcaggaatccgatagtgccaccgcacagagcgtccaaaatcctgagaagaccaaggagggcctggaggaggaacagagcacttcgggacggctactgcaagaggagtctaaaaaagagggtgcagtagcgctacacgtgtatcaggcttactggaaagcagtggggcaaggtctggccctcgccatcctcttctccctgcttctcatgcaggctacaagaaatgctgccgattggtggctgtcacactggatcagccagcttaaggccgaaaacagtagccaggaggcacaaccctctacctcgcccgctagcatgggtttatttagcccccagctgcttctttttagtccaggtaatctgtacattcccgtattcccactgccaaaggccgctcccaatgggagtagcgacatcagattttaccttacggtttacgcgactatcgcaggcgtcaattccttgtgtacactgcttagggcggtccttttcgcagccggaactctgcaagcagccgctacgctgcatcggaggctgcttcatagggtgctgatggcccctgttacattttttaacgccactcccacaggcaggattttaaatcggttcagtagcgatgtggcctgcgctgacgattccctgccattcatcctgaatatcctgctcgctaatgcggctgggcttcttggtttactcgcagtgctgggtagtgggctgccatggcttttgttgctgctaccaccactctccatcatgtactaccatgttcagcgccactatcgggcttcctcacgggagctgaggcgcctcggtagtctgactctgagccccctgtattctcatctggccgacactttagcgggactgtctgtgcttagagccaccggcgcaacctaccgtttcgaagaagagaatctaagattgttagaactgaatcagcgctgtcaatttgcaacgtccgccacaatgcagtggttggacatcagactgcaactgatgggcgcagctgtggtcagcgctattgccggtattgctctcgtccaacatcaacagggacttgccaacccaggactagttggactgtctttgagctacgcattgtctcttactggtctgctctctggactcgtgtccagttttacacaaacggaggcgatgctagtgagtgtggagcgcctggaggagtacacctgcgatctgcctcaggagccgcaggggcaacccctccagctaggaacaggatggctgacgcagggtggtgtagaattccaggacgtggttctagcgtacagacccggattgcccaatgccttggatggagtgacgttttgcgtgcaacctggcgagaaactggggatcgtggggagaactgggtctggtaaaagctctctcctcttggtgctgttccgcctgctggagccctcctccggcagagtactgctggacggagtagatacttcgcaactggaactggctcagctgcgatcgcagcttgcaataatccctcaggagcctttcctgttctctgggactgtgagagaaaaccttgatccccaggggttgcacaaggaccgcgcactatggcaggctctcaagcagtgccacctgagcgaggtcatcacctccatgggaggtctcgatggagagctgggtgagggcggaagatctctaagtttgggacagcgccaactgctctgtctggccagagctctgctcacagatgccaagattctgtgtatcgacgaggcaaccgcatccgtcgaccagaagactgatcagctcctccaacagacaatttgtaaacgattcgccaataagaccgtgctgactatagcacaccggttaaataccatcttaaacagcgacagggtcctggtgctgcaggcaggcagggtcgttgagttggactcacccgctaccctcagaaaccagcctcactccttgttccagcaactcctccagagctcccaacaaggcgtgcctgctagcctcggtggaccatag

SEQ ID NO: 215397 - DNA, 4035 bp, synthetic construct
  misc_feature 1..4035: note = Description of Artificial Sequence: Synthetic coding sequence
  source 1..4035: mol_type = other DNA
atgaccaggaagagaacatactgggtgccaaatagttcgggtggactggtaaatagggggatagacatcggggatgatatggtctcagggcttatctacaagacttatacgctccaggatggcccttggtctcaacaggagagaaacccagaggcacctggaagagctgctgtgcctccttggggaaagtacgacgctgccctgcgcacgatgataccttttagaccaaagccgaggttcccagcccctcagccccttgataatgcaggcctgttcagctatctcaccgtctcctggcttaccccgctaatgattcaaagtttgcgctcaaggctggatgaaaatactataccccctctttccgtgcacgacgcaagcgacaagaacgtgcagaggttgcacaggctgtgggaggaggaggtgtcacgacgcggtatcgagaaggcttccgttctgctagtcatgctgaggttccaacgaacacggttgatcttcgatgctctcctgggtatttgtttttgtattgcgagcgtactgggcccaatcctcattataccaaagatcctcgaatactccgaggagcagctcggaaatgtggtccacggcgtgggactatgcttcgcattgtttcttagcgagtgtgtcaaaagcctttccttcagttcaagttggatcattaaccaacggaccgcaattagatttagagcagcggtgagcagttttgcatttgagaaacttattcaattcaagtcggtgatccatattacctcaggcgaggccatcagcttcttcacaggcgacgtgaattatttgttcgagggcgtttgttatggtccactcgtgcttattacatgtgcttcactcgtaatctgcagcatttcttcttacttcattattggctacacagctttcatcgccattttatgctacctgcttgtttttccactcgctgtgttcatgaccagaatggctgtgaaggcccagcaccacacatctgaggtctcagatcagcggattagggtgactagtgaggtgttaacatgtattaagctgatcaaaatgtacacctgggaaaagccatttgctaagatcatcgaagacctcaggcggaaagaaaggaaactgttagaaaaatgtggactcgtgcagagtctgacctctattacattgtttataattcccaccgtggcgacagctgtgtgggttttgatccatacttccctgaaactgaagctgactgcctcgatggcattttctatgctcgcgagcttaaatctgctacgcctgtcagtgttcttcgttcccatagccgtgaaggggctcacaaattccaagagcgccgtcatgagattcaagaagtttttcctccaggaatcgcccgtgttctatgtgcagaccctccaggatccatccaaggcgttagtgttcgaggaggcaactttgagctggcaacagacctgtccaggcatcgtcaatggagccctggagcttgagcgaaacggacatgcttccgagggcatgacaaggccacgagacgcactgggcccagaggaagaaggcaactcccttggtccggagttgcacaaaatcaacttggtggtcagtaagggcatgatgttaggggtgtgcgggaataccggctcagggaaatcatcgcttttaagcgctatactggaggaaatgcatctccttgagggttccgtgggagtgcagggaagcctggcatacgttcctcaacaggcatggatcgtcagtggcaatataagggaaaacatccttatggggggtgcttatgataaagctaggtatctccaggtcttacattgctgtagccttaacagagacctcgaattgctgccttttggcgatatgacagagatcggagagcggggtctcaatctctctggcggtcaaaagcaaaggatctctctagcgagggccgtctacagtgatcgacagatttatctacttgatgatcccctttccgctgttgacgctcacgtcggcaaacatatctttgaagaatgcatcaaaaagacattacgaggcaagacagtggtgctggtcacgcaccagctgcagtatctggaattttgtgggcagatcatcctgctggaaaacggtaagatctgtgagaacggcacacactcagaactcatgcagaagaaaggcaagtacgcacaactcatccagaaaatgcataaggaggccacaagtgatatgttacaagatacggcaaaaatcgccgagaagcctaaggtagagagccaggccttagccacgtcccttgaagaaagccttaacggcaatgctgttcctgaacatcagctgacccaggaggaggagatggaggaaggttctttaagctggcgtgtctatcaccattacatccaggcagccggaggctacatggtgtcctgcatcatcttctttttcgtggtgctcatagttttccttactatcttctctttctggtggctttcctactggctggagcaagggtctggaacgaattctagtcgtgagtccaatggaacaatggctgatttggggaacattgccgataacccacagctcagcttttatcagctcgtgtacgggctcaacgcgttactcttgatttgtgtcggagtctgttcttccgggatattcacaaaggtgactagaaaagcttcgaccgcactgcataataagttgtttaataaggtattccgttgtcctatgtctttcttcgacactatcccaatcggtcggttgctgaattgcttcgcgggagacctcgagcagttagaccagctgcttcctatctttagtgaacagttcctggttctgagtctgatggtcattgcagttctgctcatagtatccgtgctctcaccttatatactgttaatgggagccataatcatggtcatttgcttcatttactacatgatgttcaagaaagccattggggtgttcaaaagactggagaactactcacgctccccgctctttagccacatcctcaactcactccaaggcctcagctcaattcatgtatatgggaagactgaggacttcataagccaatttaaaaggctgactgacgcacagaacaattatctcctgctgtttctttcctcaaccaggtggatggccctccgcctggagataatgaccaacctcgtgacactggcagtagcattattcgttgccttcggtatcagctccaccccctatagctttaaagtgatggcagtaaacattgttctccaactggcatcctcatttcaggccaccgctaggatcggactggaaacggaagctcagtttacggctgtagagcggatactgcaatatatgaaaatgtgtgtgagcgaggcccctttacatatggaaggcacatcttgtccccagggctggccgcaacatggggagataattttccaggactaccatatgaagtatcgcgacaacactccaaccgtcttgcacggaatcaatctaaccattcgcggtcatgaggtcgtggggatcgtcggaagaacaggctctggaaaatcaagtttagggatggccttgtttcgcctggtagagcccatggctggaagaatcttgatcgatggggtggatatctgtagtatcggcctggaggatctcagatcaaagttgtcagttatacctcaggatcctgtgttgttgagtggcaccatcagattcaatcttgacccattcgacagacacacagaccagcagatttgggatgccctggagcgcacctttctgaccaaggccattattctcattgacgaagcaaccgcctctatagatatggagaccgacacccttatccaacgaactatcagagaggcgttccagggctgtaccgtgctggttatcgctcatagggtcaccactgtgttaaactgtgatcacattctagtgatgggtaacggcaaagttgtggaatttgataggcccgaagttctgcggaagaagcccggttctctgttcgcagccttgatggccacggccaccagctctctccggtag

SEQ ID NO: 215398 - DNA, 4149 bp, synthetic construct
  misc_feature 1..4149: note = Description of Artificial Sequence: Synthetic coding sequence
  source 1..4149: mol_type = other DNA
atgacccgcaagaggacttactgggtgcccaattcatccggcggattagtgaacagaggtatcgacatcggagatgatatggtctctgggctgatctataaaacatatactctacaggacgggccttggtcacaacaagagcgcaaccctgaggcccctggtcgagcggctgtgcctccctggggcaagtacgacgctgcactcaggaccatgatcccctttcgcccaaagcccaggttccccgcaccccaacccctcgacaacgctggactttttagctacctgactgtgtcgtggctgaccccactaatgatccagtcactgcgctcccgactggacgaaaacacaattccaccactcagtgtgcacgacgcatccgataaaaatgtgcagagattgcacagactatgggaggaggaagtctccaggcgtggcattgagaaagcgagcgtgttactggttatgcttcggtttcagcggacaagactcatcttcgacgctttgctcgggatctgtttctgcatagcaagtgtcctgggacccatattgatcattcctaaaatattggagtacagtgaagagcagctcgggaacgtcgtgcatggcgttgggttatgcttcgcactatttctcagtgagtgtgtgaaatccttgtcgttttccagttcatggattattaatcaacggaccgcaatcagattccgggctgccgtaagttcttttgccttcgagaaactcatacagtttaagagcgtcatccacattacttcaggcgaggccatttcgtttttcaccggagacgtgaattacttattcgaaggagtatgctatggacctctggtcctgatcacctgcgcctcgttggtcatttgtagtatatcctcctatttcataataggatacacagccttcattgcaattctctgttacctgttagtgtttcctctagccgttttcatgacccgtatggccgttaaggctcagcaccatactagcgaggtatcagatcagagaattagagtcacaagtgaggtgctgacctgtatcaagctgatcaaaatgtacacctgggagaagcctttcgcaaagataatagaggacctgcggcgaaaggagcgcaaactgctagagaagtgcggccttgtgcagtccttgacttctatcactctgtttattatcccaacagttgccactgccgtgtgggtgctgattcacacctcgttgaagctgaagctcactgcctccatggcgttctccatgctagcatcactgaacctgcttcgactcagcgtattttttgtgccgattgcggtgaaaggcctcaccaattctaaatccgccgttatgcgcttcaagaagttcttcctccaggagagtccagtcttttatgtgcagactcttcaagacccgagtaaggcgctcgtgtttgaggaagctactctgtcctggcagcagacatgcccaggcatcgtcaatggtgctctcgaactggaaaggaacggccacgcctcagaaggaatgactcggcctcgggacgcgctgggtcccgaagaggaagggaatagtttggggcctgagttgcacaagataaacctagtcgtgtctaaagggatgatgctgggcgtatgtggcaacaccgggagcggaaagagcagcctacttagtgcaatcctcgaggagatgcatttgctggaaggatccgtaggagtccaaggctcacttgcctatgtgccccagcaggcctggatcgtctcaggaaatattagagagaatatccttatgggaggagcttatgacaaggcacgctatctccaggtgctccactgctgttcgttaaatcgagatcttgagcttctgcctttcggggatatgacagagattggcgagaggggcctcaacctgtccggcggacagaagcagagaataagcctcgcacgtgcagtctactctgatcgtcagatctacttactggacgatccgctctccgcagtggatgcacacgtggggaaacacatttttgaggaatgcattaaaaaaactcttagaggcaagaccgttgtgctggtgacacaccagctgcagtacctcgagttttgcggccaaattatattactcgaaaatggcaagatttgtgagaacggcacacattctgaactgatgcagaagaaaggaaagtatgcccagctcatacagaaaatgcataaggaggccacgagtgacatgcttcaagataccgctaagatcgcagagaaacctaaggtcgagtcacaggctcttgctacttctctggaagagagtcttaacgggaatgctgtgcccgagcaccagttgactcaggaagaggaaatggaggaaggcagcctatcttggcgcgtgtaccaccattacatccaagccgctggcggatatatggtcagctgtattatattttttttcgtggtcctgattgtgttcctgaccattttcagtttctggtggttgagctactggctggagcaaggctccgggacaaactcttctcgagagtccaatggcacaatggccgacctggggaatatcgccgacaatcctcagctcagcttttatcaacttgtgtatgggctcaacgctctgctcttgatttgtgtgggggtgtgctcgtccggtattttcaccaaggtaacccgtaaagcttccacagccctgcacaataagctatttaataaagtgtttagatgcccgatgtcgttcttcgataccatccctatcgggagactgctgaattgttttgccggagaccttgagcaactagatcagttactgcccatcttttcggaacagttcctggtgttatcacttatggttatcgccgtccttttaattgtgtctgttctctcaccttatatcctgcttatgggagccatcatcatggttatttgcttcatttactacatgatgtttaaaaaggcaataggtgtttttaaacggttggagaactattcccgatcaccactgttttcgcacatactgaattccttacaaggactcagtagcattcatgtatatggcaaaaccgaggatttcatttcacagttcaaacgcctgacagacgctcagaacaattatctgctactcttcctatcatccacaaggtggatggctcttcgtctagagatcatgacaaacctggtgaccttggccgtagccctcttcgtggcattcggcatcagctcaacaccatactcttttaaggtcatggccgtgaacatcgtactccaactcgcatcgtcattccaggccacagctaggattggcctggaaaccgaggcccagtttacagccgtcgagaggatcctccagtatatgaagatgtgtgtcagtgaggccccactacatatggaggggacatcatgtcctcaaggatggccccagcacggtgaaatcatcttccaagattaccacatgaaatatcgggataatacccctactgtgctgcatggtattaacttaacaattcggggacacgaagttgttgggattgtggggcgtaccggtagtggtaagtccagcctgggaatggctctgttcaggctcgttgagccaatggccggacgaatcttgatcgacggcgtcgacatttgttcaataggcctggaggatcttcgctctaaactgtcagttatcccacaggatcctgttctgctgagcgggaccatacgcttcaatcttgatccttttgacagacacacagatcagcagatatgggacgcgctggagcgaacctttcttacaaaggcaatttctaagttccccaagaagttgcataccgatgtcgtggaaaacggcggaaactttagtgtcggcgagagacaattactatgcatcgctagagccgtcttgagaaactcgaagattatcttgatcgacgaggcaactgcttccattgatatggagaccgacactctgatccaacgcacaattagggaagcgtttcagggctgtaccgtgctggtgatagcccaccgtgtcacaactgtcctcaattgtgaccacatcctggtgatgggtaacggtaaggtcgtcgaattcgataggccagaggttcttcgcaagaagccaggaagcctgttcgccgctctgatggccacagccacctcctccctcagatag

SEQ ID NO: 215399 - DNA, 4149 bp, synthetic construct
  misc_feature 1..4149: note = Description of Artificial Sequence: Synthetic coding sequence
  source 1..4149: mol_type = other DNA
atgaccagaaagcgcacttactgggttccaaactctagcggtggcctcgttaatagaggaatcgacattggtgatgacatggtttccgggttaatatacaaaacctatacattacaggatgggccttggagtcaacaggagagaaatcctgaagcccctgggagagcagccgttccaccatggggaaaatatgacgcagctcttcgcaccatgattccatttaggccaaagcctaggtttcctgccccacagccgctggacaatgctggcctcttttcatacctgaccgtcagctggctgactcccctcatgatccagtccctgaggtcccgcttagatgagaacacgataccacctctctcggtgcacgacgcgtctgataagaatgttcagcggctgcacagactctgggaggaagaggtctcacgccgtgggattgagaaggccagcgtgctgttagtgatgttgcggttccagcggacccgtctgatttttgacgccctgctgggtatttgcttttgcatcgcctcagtgctcggacctatcctaataatccccaaaatccttgaatattcggaagaacagctaggcaacgtagtgcacggcgtggggctatgtttcgccctctttctgtcagagtgtgtcaagagtcttagtttctcttcctcctggataataaaccagagaaccgccatacgatttagggccgctgttagctcttttgcttttgagaagctgatacaattcaagagcgttattcatatcacatcgggagaagcaatttcattcttcaccggcgacgtcaattacctgtttgaaggagtctgttacgggcctctagtgctaatcacgtgcgcaagccttgtgatctgctctattagctcctactttatcatcgggtacacagcctttattgctattttatgctacttgctcgtcttcccactggcagttttcatgactaggatggctgtgaaggctcagcatcacacttccgaggtgtctgaccagcgaatccgagttactagtgaagtgctgacatgtatcaaactgatcaagatgtacacctgggaaaagccttttgccaagataatcgaggatcttcgacggaaggagagaaaattgctggagaaatgcggcctggtacagtccctgactagcattaccctcttcatcatccctaccgttgctactgcagtttgggttctgattcacaccagcctcaagctaaagctgacggcttcaatggcatttagtatgctggcttcattaaatcttctgcgcttgtccgtcttctttgtgccgattgcagtgaaggggttgacaaatagtaagagtgccgtgatgaggttcaagaaattttttctccaggagagcccggtcttctatgttcaaaccctgcaggaccctagcaaggctctggtgtttgaggaggccacgctgagttggcaacagacctgtcctggaatcgttaacggagccctggagctcgagagaaacggccacgcctccgaagggatgacacgccctcgggatgcgctcggtccggaggaagagggaaattccctgggcccagagctacacaaaatcaacctcgtagtttctaagggcatgatgctaggcgtctgcgggaatactggatcagggaagagctcacttctgagcgcaatactcgaggaaatgcatttgttagagggttccgtcggggtgcagggttccctcgcttacgtgccacaacaggcctggattgtttctgggaatattcgcgaaaatattctgatgggcggagcttatgacaaagcacgatatctccaggtcctgcattgttgctccctgaaccgcgatcttgagttgctgccctttggtgacatgactgagatcggagaaaggggtttgaatctctccggcggacaaaagcagcgaatcagcctagccagggccgtatactcagatcgccaaatctacctcctggatgaccccctgtccgcagtagatgcccacgttggcaagcatatctttgaagaatgcattaagaagactctgcgcggtaagaccgtggttctggtgacacatcagctgcagtaccttgagttctgtggccaaatcatcctcttggaaaatggtaagatttgcgagaacggaacacattcagaactgatgcagaagaagggcaaatacgctcagttaatccagaaaatgcacaaggaggcaactagtgacatgctacaggataccgccaaaatcgcggagaagccaaaagtggagtctcaagccttggccacctctctggaagagagtttaaatgggaatgctgttcccgagcatcagctgacacaggaggaagagatggaggaaggctcgctgtcatggcgcgtgtaccatcattatattcaggccgctggaggatatatggtctcatgtattatttttttcttcgtagttctgatcgttttcctgaccattttttcattctggtggctgagctattggctcgagcagggctctggaacaaactcttccagggaatctaacggaactatggccgatctgggaaacattgctgacaatccccaacttagcttctatcagctggtttacggcctcaacgcccttctgctcatctgtgtgggagtctgtagctctggaatcttcaccaaggtaaccaggaaagcttcgaccgccctgcataataaactgtttaacaaggttttcagatgccccatgagcttctttgacaccatcccaattggccgattactgaattgctttgccggagacttggaacagctagaccaactgctaccaatttttagcgaacagtttctcgtccttagcctaatggtcatcgctgtgctgttgatcgtgtcggtgctctctccctatatactacttatgggagcgatcattatggtcatctgtttcatttactatatgatgttcaaaaaagctataggggtgtttaagcgcctggagaattacagccgctcaccccttttcagtcacattctgaatagcctgcagggactgagcagcattcacgtctacggaaaaaccgaagattttatttcccagtttaagcgtcttaccgatgcgcagaacaactatcttttactatttctcagcagcacccgctggatggcactgagattggagataatgacaaacctcgtgactcttgccgtggccctgttcgtagccttcggtatctcttctaccccttatagctttaaagtcatggcagtgaatattgttctccagcttgcatccagcttccaggcaactgcgaggatcggccttgaaacagaggcacagtttactgctgtcgaacgcatactgcaatatatgaaaatgtgcgtatccgaggcccctctacatatggaggggacatcatgccctcaagggtggccccagcacggcgagataatcttccaggactaccacatgaaataccgcgacaacacccctaccgtgctgcacggcattaatctgaccatcaggggtcacgaggtggttgggattgttggccgaacaggaagcggaaaatcaagtctaggaatggcgttgttccgcttagtcgaacctatggcgggacgaattctgatagacggcgtggacatttgttctatcgggctcgaggacctgaggtccaagctgtctgtgatcccacaagacccagtacttctttcaggcaccatccgcttcaatctcgacccatttgaccgacacactgatcagcagatttgggacgcactagagagaaccttcctgactaaggctatctctaaattccctaagaaactgcacaccgatgtcgtggagaacgggggaaacttttccgttggtgaaaggcaactgctgtgtatcgctcgagcggtactccgaaacagcaaaattattctcattgacgaagccacagccagcatcgacatggagactgacaccctgattcagaggacaatccgagaggcttttcagggatgcacagttcttgtgattgcccatcgcgtgactaccgtgctaaactgtgatcatatacttgtgatgggcaatggaaaggtggttgagtttgatcgcccagaagtcctgaggaagaaaccgggaagtctctttgctgctctgatggccaccgccacgtcctctttacgttag

SEQ ID NO: 215400 - DNA, 4149 bp, synthetic construct
  misc_feature 1..4149: note = Description of Artificial Sequence: Synthetic coding sequence
  source 1..4149: mol_type = other DNA
atgacgaggaaaaggacctattgggtgcctaattcttcaggaggcctcgtgaaccgcggaatcgatattggagacgacatggtcagcggactgatctacaagacctatacactccaggacggcccttggagccagcaggagcggaacccagaagccccaggcagggctgctgtccccccttgggggaagtatgacgccgcactaagaacaatgatcccattcagacccaaaccaagattccctgccccacagcctctggataacgcaggactgttctcttatttgaccgtttcttggctaacgcccctgatgattcaaagcctgaggtccaggctggatgagaacaccatcccaccactttccgtgcacgacgctagcgataaaaatgtccaaaggttgcatagactgtgggaggaagaagtaagccggagaggtattgaaaaagctagtgtcctgctggtgatgctgaggtttcagcggactagactcatatttgacgccttgcttggtatttgcttttgtatcgccagtgtgctaggcccaatcctgatcataccaaagatccttgagtacagcgaggagcaactcggtaacgtggtgcacggagtgggcctctgtttcgctctgttcttgagcgagtgcgtgaaatcgttgagtttctcatcctcatggatcataaaccagaggaccgctatacggtttagggccgctgtgtcaagtttcgcattcgaaaagctgattcaattcaagtcagtaatacatatcacaagcggagaagctatctcttttttcacaggggatgtcaactatctttttgagggtgtatgctacggcccactggttctgataacctgcgccagcctcgtcatatgcagtatatccagctactttatcattggctatacagcgttcatagccatattatgttatctgctggtcttccctcttgcggtatttatgacgcgcatggcagtgaaggctcagcatcacaccagcgaagtgtcggatcagcgcatccgagtcacttccgaggttttgacatgcatcaagttgattaaaatgtacacctgggagaaaccgtttgcaaagattatagaggacttacggagaaaagagagaaagctcctggagaagtgcgggctcgttcagtccctcacctccatcacccttttcattattccaacagtggccacagcagtatgggtactgattcacactagccttaagctaaaactgactgcatcaatggcatttagcatgctggcctctctgaacttgctgaggctgtcggtgtttttcgtgcccattgctgttaagggcctcaccaattcaaagtctgcagttatgagattcaagaagtttttcctgcaagaaagtcccgtgttctatgtgcagacccttcaagacccgtctaaggcactcgtttttgaggaggccacattgtcctggcaacaaacgtgtccaggcatagtaaatggtgctctggaactggaaagaaatggacatgcctccgagggaatgacgcgccctagagatgccctggggcctgaggaggaagggaattccctcggcccagagctccataaaatcaacctggtagtctctaaagggatgatgttgggcgtatgcggaaacacaggctcaggcaagtccagcctcctttccgcaattctggaggaaatgcacctcctggagggaagtgtgggggtccagggcagtctcgcttatgtgccccagcaagcgtggattgtgtctggaaacatccgtgaaaacatcctaatggggggagcgtatgataaggccaggtacctgcaggtgctccactgctgttctctcaaccgagacctggagctcttgccctttggggatatgacagaaatcggtgagaggggcctgaatctgtctggagggcagaaacagaggatctccctcgcaagagcagtgtactcagacagacagatctacttactagacgacccactgtctgccgttgatgcgcatgttggaaaacatatctttgaggagtgcatcaaaaaaaccctgcgtggaaagaccgtagtcctcgtgacacaccagctgcagtatctggagttctgtggacagatcatattattggagaatggcaagatctgcgagaacggtacacatagtgagctcatgcaaaagaaaggaaaatacgctcaactgatccaaaagatgcacaaagaggctaccagcgacatgctccaggacacggcaaagatcgccgagaagcctaaagttgaatcacaagccctagcaacctctttggaggaaagtttgaacggaaacgcagttcctgaacaccagctcacccaggaggaggaaatggaggaaggctctctgtcctggagagtgtaccaccactatatccaagccgcaggtgggtacatggtatcttgtatcatcttttttttcgtcgtgctgattgtctttctgacaatcttcagcttctggtggttgtcatactggctagaacagggatctgggaccaatagttctcgcgagtccaacggaacgatggctgacctcggaaacattgcagacaatccccaactttctttttaccagttagtgtatggacttaatgctctgctgctgatctgtgtcggcgtgtgctccagcggaatttttacgaaagtgacccgcaaagcatccaccgccctccacaacaagctgttcaataaggtctttcgctgcccaatgtcttttttcgacactatccctatcggacggttgcttaactgtttcgcaggcgacttggagcagttagaccaactcctgcccatatttagtgaacaatttctggtgctgtccttaatggtgattgcagtgcttttgatcgtgtctgtcctgagcccctacatcctcctcatgggcgctataattatggtgatatgcttcatttattatatgatgtttaaaaaggcaatcggagtatttaaacgcctggagaactattctagatcaccactcttttctcacatccttaattctctccagggcctttccagcatccatgtgtatgggaagactgaggacttcatctctcagttcaagaggctgactgacgcccagaataactacctccttctttttctatcgtccactcgctggatggctctgcggctggagattatgactaacctcgtgaccttagccgtggccctattcgttgccttcggtatcagctcaactccctacagttttaaggttatggctgtcaacatagtgcttcagctcgcatccagtttccaagctacggcaagaatcggcttggagacagaggcacagtttaccgcggtagagcgcattttacagtatatgaagatgtgcgtgagcgaagcccctctacacatggagggtactagttgtcctcagggatggccacaacacggcgagatcatcttccaggattatcacatgaagtacagggataacacaccaaccgtgctgcatggcattaaccttacaattcgcggacacgaagtggtgggcatcgtgggtcggaccggctctggtaaatcttcactgggtatggctctttttaggttggtcgagcccatggccggtaggatcctgatcgatggcgtcgatatctgcagtatcgggttggaagacctgagaagcaaactctcggtgataccccaggatcctgtgttactctcggggactatcaggttcaatctggatcccttcgatagacacacagaccagcaaatctgggatgccctggaacgcactttcctcacaaaggccatttccaagttcccaaagaaactgcatactgacgtagtggaaaacggcggaaatttttctgtaggcgagcgacagttattatgcatcgctcgggcagtcctgagaaattctaaaataatcctgatcgacgaggcaaccgccagcattgacatggaaactgacacgctgattcagaggactattcgcgaggcttttcaaggctgcacggtgctggtgatagcacaccgcgtgacgactgtcttaaactgcgaccatattctcgtgatgggcaacggaaaggtggtggaatttgacagacccgaagtcctgagaaagaaacctggatcccttttcgctgccctgatggcgacagccaccagcagcttgagatag

SEQ ID NO: 215401 - DNA, 2268 bp, synthetic construct
  misc_feature 1..2268: note = Description of Artificial Sequence: Synthetic coding sequence
  source 1..2268: mol_type = other DNA
atgacaaggaaacggacatactgggtcccgaactccagcggcggattagtgaatcgcggaattgacataggagatgacatggtgtcaggcctgatatacaagacgtataccctgcaggacgggccatggagtcagcaggagagaaatcctgaagccccaggaagggccgctgtgccaccatggggaaagtacgatgctgctttacgaacaatgatccccttcagacccaagccacgcttccctgccccacagccgctagataatgcaggcttgttttcctacctgactgtgtcatggctcacccctctcatgatccaatctttgcgatcccgactggacgaaaacaccattccgccactcagtgtgcacgatgcctctgacaagaatgtgcaaaggctgcaccggctgtgggaagaagaagtgtctcggagaggaatcgagaaggccagtgtgctcctggtgatgttgagatttcagcgaacacggctcattttcgatgcgctgttaggcatatgtttttgtatcgcatccgtacttgggcctattctcatcatccctaagatcctggagtatagcgaagaacagctcggaaacgtcgtgcacggagtcggcttgtgcttcgccttgttcttgagtgaatgtgtgaaatctctgagttttagctcctcgtggataatcaatcaacgaacagctatacgatttcgtgcagcggttagcagctttgcgttcgagaaacttattcagtttaaaagtgtgatccatatcacatccggggaagctatatctttcttcactggagacgtgaattatttattcgagggtgtttgctacggacccctggtattgatcacgtgcgcttccctcgtcatctgctcaatctccagctatttcatcataggctacacagcctttatcgccatactttgctatctgctggttttcccactggccgtgttcatgacacggatggccgtgaaggcgcagcaccatacttccgaggtctctgaccagcggattcgggtgacctcagaagttctcacctgcatcaagttgatcaagatgtacacctgggagaaaccttttgccaagatcattgaggaccttcggagaaaggaacgcaaactgctggaaaagtgcggccttgtccaatctctgacgtctatcaccctgttcatcatccctactgtggctactgcagtctgggtgctcatccacactagcctgaaactcaagctgacagcttccatggcattctccatgctggcttccctaaatctgctgaggctttctgtgttctttgtcccgatagctgtcaaaggcctgactaactctaaatctgctgttatgcgatttaagaaatttttcctccaggagtcacccgtattttatgtgcagacactgcaggaccccagtaaagctttggtgttcgaagaagccacgttatcttggcagcagacttgccctggcattgtgaatggtgccctggagttggaacgcaatgggcatgcttccgaaggaatgactaggccaagggatgcactgggtccagaagaggagggaaactccctgggtcccgaacttcataaaatcaacctcgtagtatctaaggggatgatgttgggggtctgcgggaatacaggttctggaaagagctctctgttgtccgctatacttgaggagatgcacttgctggaagggtctgttggtgtgcaagggagtctggcgtacgtccctcagcaggcctggattgtgtccggcaacatccgggaaaacattctgatggggggtgcctacgacaaggcacgatatctccaggtgctgcattgctgtagtttgaaccgggatttagagctgctcccatttggcgacatgaccgaaatcggcgagcgtggccttaatctgtccggtggtcagaagcagcgaatcagcttggcacgggctgtttattctgatcgacaaatatatcttctggacgaccctctgtcggcagttgacgctcatgttggaaagcatattttcgaagaatgtatcaaaaagacccttcgcggaaagaccgtggttctcgtgacccaccagcttcagtacctggagttctgtgggcagatcattttgttggagaacgggaaaatatgtgaaaatgggacccattccgagctcatgcaaaaaaaaggtaaatacgcccagctgattcagaaaatgcataaggaagctaccagctgccgatctatttccagccatcgtaggaggcggtggaagaaggccccatag

SEQ ID NO: 215402 - DNA, 4080 bp, synthetic construct
  misc_feature 1..4080: note = Description of Artificial Sequence: Synthetic coding sequence
  source 1..4080: mol_type = other DNA
atggttggtgaaggaccctaccttatttcagatctcgatcagagagggcgaagaaggagcttcgcagaacgttatgatccgtcgttaaagaccatgatccccgtgaggccatgtgctaggctagcccctaaccccgtcgacgacgccggattgctctcttttgccacattttcctggctaacacctgttatggtcaagggttacagacagcgcttaaccgtagatacactgccaccactgagcacttatgactcctcagacactaatgccaagaggtttcgggtgctctgggacgaggaagtggcgagagtgggtccagagaaggcatccctgtctcatgtagtgtggaaatttcaaaggactcgcgtgcttatggatatagtggccaacatactgtgcattataatggccgctatcggcccagttatattaatccatcagattttacaacagacagaaaggacatctggaaaggtgtgggtaggaatcggcctttgtattgctctgtttgcgactgagtttaccaaggtctttttctgggccctggcctgggcaattaactacagaaccgcaatccgactgaaggtggcattgtctacacttgtgttcgagaacctggtcagtttcaagacactcacccacattagcgtgggggaggtgctgaacatcttaagcagtgactcatattcgctatttgaggcagccctcttctgccctctgccagctacaattcccatacttatggtattttgcgccgcatatgcctttttcattctcggacctactgccttgattggcatcagcgtatacgttatttttataccagtgcaaatgtttatggcgaagctaaacagcgccttcagacggagcgcaatcctggtgacagacaagcgggtacagacaatgaatgaattcctcacctgcatccgactgattaaaatgtatgcctgggaaaaaagcttcaccaacacaatccaggacattagaagaagagagagaaagctccttgagaaggccggattcgttcagtctggtaactccgcactggctccgatcgtttcaacaatagctatagtccttactttgtcatgccatatcctccttcgcaggaagcttacagcaccagtggccttttctgtcattgccatgtttaacgtaatgaagttttccatagcgatcctgccattctctattaaagcgatggcggaggccaacgtgagcctgcggaggatgaaaaagatcttgattgataaatcaccaccttcgtacattacccaaccggaggatccggataccgttctgctgctcgccaatgcaaccttgacgtgggagcacgaggcatcccggaaaagtacacccaaaaaactccaaaaccaaaagcggcacctctgcaaaaaacagagaagtgaagcttattcagagcgaagccctccagccaagggagccactggcccagaggagcaatccgattcactgaagagtgtgcttcacagcatctctttcgtggttaggaaaggaaagatcctgggaatttgtgggaatgttggctctggaaagagctccttgctggccgctcttttaggccagatgcagcttcagaagggagtggtggctgtgaacggcacactggcatatgttagtcagcaggcttggatattccacgggaatgtgagggaaaacattctgtttggcgagaaatatgatcaccagcggtaccagcacacggtccgggtatgcggtcttcagaaagaccttagcaacctcccatacggtgatctgacggagatcggtgaacgcggactaaacctgagtgggggtcagaggcagaggattagcctagcaagagctgtttacagcgatagacagttgtacctgctggatgatcccctgagtgccgtagacgcacacgtgggcaagcatgtctttgaagagtgcataaagaagaccttgagggggaagaccgtggtactggtaactcatcagttgcagttcttagaatcatgtgacgaggtgatactcctggaggacggtgagatatgtgagaaaggcactcataaggaactgatggaggagcgaggacggtacgcgaagttgatccataacctgcggggactgcagtttaaggatcccgaacacctgtataatgccgcaatggtcgaagcattcaaagagagccctgctgagcgcgaggaagacgctggaatcattgtgttggctcccggaaacgaaaaagacgagggtaaggaatctgaaactgggagtgagtttgtcgacacgaaagtccctgagcaccagctgatacagaccgaaagcccccaggagggcacagtcacctggaaaacttaccatacgtacatcaaagctagtggaggctatctgctctcattgttcaccgtgttcttgtttttactcatgatcggaagcgctgcattctcaaattggtggctgggcctgtggctggacaaaggaagccggatgacatgcggacctcaaggcaatcgtaccatgtgtgaagtgggtgccgtgttggcagacattggccagcatgtctaccagtgggtctacactgcatctatggtgttcatgctcgtctttggggtcacaaaagggtttgtatttacaaaaaccaccctgatggctagcagcagccttcatgatacggtcttcgataaaatactgaagagtccgatgtcattcttcgacactacccctaccggtcgactcatgaaccggttcagtaaagatatggatgagctcgatgtaagattgccctttcatgcggagaacttcctgcagcagttttttatggtggtgttcattctggtaatccttgctgctgtgttcccggctgttctgttagtggtggcatcgcttgctgtaggcttcttcatcctgttgcgaatctttcataggggtgttcaggagttaaagaaggtggaaaacgtgtccagatccccgtggttcacgcatattacttccagtatgcaggggctgggaattattcacgcctacggtaaaaaggagtcctgtattacatatcacctgctctattttaactgcgccctgcgctggttcgcactgcgaatggacgttctcatgaatatcctgaccttcaccgtggctttactggttacactgtcattcagcagcatttccacaagctccaagggattatcactgagttatatcattcagctgtccggcctcctgcaggtatgtgtcagaaccggcacagaaactcaagctaagtttacgagtgtggaactgttgagagagtacatttctacatgtgtaccagagtgtactcaccccctcaaagttggaacatgccccaaagattggccgagtcgtggtgaaataacatttcgggactaccaaatgagatacagggataatacccccctcgttctggattctctgaacctgaacattcaatccgggcagacagttgggattgtaggtaggactgggagcggcaagagcagcctcggcatggcactgtttcgactcgttgaaccagctagcggcaccatctttattgacgaggtcgatatctgcatactcagtctagaggatctgcgcaccaaactgacagtgattccgcaggaccccgtgttgtttgtgggcacggtccgttataacttggacccattcgagtcccacacggatgaaatgctctggcaagtcttagaacgcacattcatgcgcgacacgatcatgaagctcccagaaaaattgcaggcggaggttacggagaacggtgagaattttagcgtgggtgagagacagttgctctgtgtggctagggcactgctgcgcaactccaagataatactactggacgaggctacagcgtccatggacagcaagacggatacactcgtgcaaaacacaatcaaggacgcattcaaagggtgcaccgtgctgactattgcccatagactaaacacagtgcttaattgcgatcatgtcctggttatggaaaatgggaaagttatcgagtttgataagccagaagttttggctgagaaaccagacagcgctttcgccatgctcctcgccgctgaagtgcggctttag

SEQ ID NO: 215403 - DNA, 1902 bp, synthetic construct
  misc_feature 1..1902: note = Description of Artificial Sequence: Synthetic coding sequence
  source 1..1902: mol_type = other DNA
atggtgggtgaggggccttatctgatttccgatctcgaccagaggggtcgcaggaggtcctttgccgaacggtacgaccccagcctgaagactatgatccctgttagaccctgcgccaggctggccccaaatccggtggatgacgccggactgctatcctttgccaccttctcatggctgaccccggtcatggtcaaaggataccggcagagattgacggtggacaccctgccgcctcttagtacctacgacagctccgacacgaacgctaagcgatttagagtactttgggatgaagaggttgccagagtgggacccgaaaaagcctcactgtcacacgtggtctggaagttccagagaacccgcgtactgatggatattgtggccaatattctgtgtatcatcatggccgctataggccctaccgtgctgatccatcagattctacagcagacagaacggacgtctggaaaggtgtgggtgggtattgggctctgtatagctctatttgcaacagagttcaccaaggttttcttttgggccctcgcatgggcgattaactaccgaacagcaattcgattaaaggttgccctatctacactcgtgtttgagaaccttgtatctttcaagactctgacacacatcagtgtcggagaagtcttaaatattttaagctcagattcctattcactttttgaggctgcactgttctgcccattgccagcgacaattccaatactgatggtgttttgcgcagcctacgctttctttatcctgggtccgactgccctaatcgggatctccgtgtacgtcatctttatcccagtgcagatgtttatggccaaactgaatagcgcgtttcggcgatcagctatactggtgactgataaaagggtccagactatgaacgagttcctgacttgtattcggctgatcaaaatgtatgcatgggagaaaagctttactaacaccatccaagatataagacggagagaaaggaagctgctggagaaggccggattcgttcagagtggaaacagcgctctcgcccctatcgttagcactatagccatcgtgctgaccctgtcctgccacattctactcagacgcaaactgacagcccctgtggctttcagcgtgatagcaatgttcaacgtgatgaaattttctatcgcaattctaccattcagcattaaagccatggcagaggccaacgttagtctccgtcgcatgaagaaaatcctgatcgacaaaagccctccatcttacatcactcagccggaagacccagatactgtcctgctcctagctaacgcaaccttgacctgggaacacgaagcatcacggaaatcaacaccgaaaaaactgcagaatcaaaagaggcacctctgcaagaagcagcggagcgaggcatatagcgagcgatcccctccggctaagggagcaacaggcccagaagaacagtctgatagcctgaagagcgtgctgcactctatctcttttgtggtgagaaaaggaaaaatcttggggatatgtggaaatgtaggaagtgggaagtcatctcttctagccgctctgctcggccagatgcagctccaaaaaggcgtggtcgctgtcaacggcacactggcctatgtgagccaacaggcatggatcttccatggcaacgtgcgagaaaatatcctctttggagaaaaatacgatcaccagcggctgggctcaggcgcttctacgtccctcggcggaaggggtcggggactggcgtggcccgcactatctacccccactgtttcgtcaacgtgttggactaccccatgtagaccttggactccaacttggggctccacaagcctccgctccgcgttaaggaggagaagtggagagcggcagagcagctggtag

SEQ ID NO: 215404 - DNA, 2808 bp, synthetic construct
  misc_feature 1..2808: note = Description of Artificial Sequence: Synthetic coding sequence
  source 1..2808: mol_type = other DNA
atggtcggcgaggggccttatcttatctctgatttagaccaacggggtcggagacgcagctttgccgaacgctatgaccccagcctgaaaaccatgataccagtgaggccttgcgctcgcttggccccaaaccctgtagatgatgccggtttgctgtcatttgctacattctcctggttaacgccggtgatggtaaagggctaccgtcagaggctgaccgttgacacgctgccccctctatccacatacgactcttcagatacaaatgctaaaagattccgagttttgtgggatgaagaggtggcaagagtcgggccagagaaagcctccctgtcccacgtcgtttggaagtttcagcggacaagggttcttatggacatagtcgccaatatcctctgcatcatcatggctgcaattggaccaaccgtattgatccaccaaatactccaacaaaccgagagaaccagcggaaaggtgtgggtaggaatcggcctgtgcatagccctatttgccaccgagttcaccaaggtgtttttttgggcactggcctgggcaattaattacaggaccgcaattcggcttaaggtggccttatctacactcgtcttcgagaacctggtcagcttcaagaccctgactcatatctccgtgggcgaggtgctgaacatcctgagttccgactcttacagtctcttcgaagccgctctgttttgccctttgccggctacaataccaattctcatggtgttctgcgccgcttatgcgtttttcatccttggacctacggcacttatcggtatttctgtctacgtgattttcatccccgttcagatgttcatggctaagctcaacagcgctttcaggcggtcagccattcttgtgactgacaaaagagttcagactatgaacgagttcttgacctgtattcgactcatcaaaatgtacgcgtgggagaagagcttcacgaatactatccaggacatccggagacgtgagcgcaagctgcttgaaaaagctggatttgtgcagtccggtaactcagcgctcgcccctattgtgtctaccatcgccatcgtccttaccctctcatgtcatatactacttcgaaggaagttgaccgccccagttgcattctccgtcatagcaatgtttaatgtaatgaaattctccattgccattctacccttctctattaaagccatggccgaggctaacgtgtctctgcgtcgaatgaagaagatcctgattgacaaaagcccccctagctacatcactcagccagaggatcctgatacagtcctgttgctggccaatgcaaccctgacatgggagcacgaggccagccggaagtctacccccaagaagcttcagaatcagaagcgacatctgtgtaagaagcagcgatccgaggcctactctgaacggagccctcctgctaagggagcgactggcccagaagaacaatccgattctcttaagagcgtcctgcatagcatctcgtttgtggtcagaaaaggcaaaatcctgggcatctgtggcaacgttggcagtggcaaaagctcgttgctcgccgctctcctggggcagatgcagttgcaaaagggcgtcgtagctgtgaatggtaccctggcatatgtgtcccagcaagcttggatattccatggaaatgtacgagaaaacattctgttcggggaaaagtatgatcaccagcgctatcagcacacagtgagagtttgcggtctgcagaaggacctgagcaatcttccatacggcgatctcactgagattggcgaacgcggactcaatctgagtggaggacaacgccaacgcatcagtctggccagggctgtgtattccgatcgtcagctatatcttttagatgacccacttagcgcagttgatgcacatgtcggaaaacacgtgtttgaagagtgcattaagaaaaccctgcgaggaaaaaccgtggtgctggtgacacatcaattgcaattcttggaaagttgtgatgaagtgatactactcgaagatggtgaaatctgtgaaaagggaacccacaaggagttaatggaggaaagagggagatatgccaagctcattcataatctgcggggacttcagttcaaggatcccgagcacttgtacaacgcagctatggttgaggcttttaaagaatcaccggctgaaagggaggaggacgctgtactggcccctggaaacgagaaggatgaagggaaggaatctgaaacaggctccgaattcgttgacactaaggtccctgaacaccagttaatccagacggagagtcctcaagagggaaccgtcacctggaaaacttaccacacatacattaaagccagcggtggatacctcctgtccttgttcacagtgttcctatttctcctgatgataggtagcgcagccttctccaattggtggctgggactctggctggataaagggtcacgcatgacctgcggtcctcaggggaatcggactatgtgcgaagtgggcgcagtgcttgccgatattggacagcacgtgtaccagtgggtgtatactgcatccatggtattcatgcttgtgttcggcgtgacaaaggggttcgtgtttacaaagaccaccctgatggcatcctcctcgttgcatgatactgtctttgacaaacactttccacagaggagtcctggcgcacaggaaggaggagagtgtcagcctgtaactctggtgcatcctcaccacctgctgcacgccggaccgggacatcactccaggctatggcaggagggggaactgcatcacctcgtatag

SEQ ID NO: 215405 - DNA, 2793 bp, synthetic construct
  misc_feature 1..2793: note = Description of Artificial Sequence: Synthetic coding sequence
  source 1..2793: mol_type = other DNA
atggtgggcgaaggcccatatctgatcagcgacctggaccagcgcggacggagacgctcctttgctgagcgctatgatcccagcctgaagacgatgattcccgtcaggccatgtgccaggttggcaccaaaccctgtggatgacgctggactgctctcctttgccaccttctcctggctgacccctgtaatggtcaagggatacagacagcgcctcactgtggataccctgccaccactcagcacatatgattcgagcgataccaacgccaagaggttccgagtcctatgggatgaagaggtcgctagggtgggacctgagaaggcttccctgagccatgtggtgtggaagtttcagcgtacacgagtcctgatggacatcgtggccaatatactgtgcataatcatggcggctatcggacccaccgttctgattcaccaaatcctgcagcagacagagaggactagcggcaaggtatgggtcgggattgggctatgcatcgccctgttcgcaaccgagtttactaaagtcttcttctgggcccttgcgtgggctattaactatcgaactgcaattagattgaaagttgcactcagtacactggtttttgagaacttggtgtcattcaagacactcactcacatttctgtgggagaaatgttcatggccaaactcaacagcgcttttcgaagatccgcgatcctcgtgacagataagcgcgttcaaacaatgaatgagtttctcacttgcatcaggctgattaaaatgtacgcctgggaaaagagctttacaaacaccatccaggatattcgcaggagagaaagaaagttgttagagaaggccggatttgttcagagtggcaattctgcactggctcctattgtgtccactatcgctatcgtgctgacactcagttgccacattctactgcggcgtaaactgaccgctccagtcgctttcagcgtcatcgcaatgtttaacgtcatgaaattttccatcgctattctccccttctcaatcaaggccatggctgaggccaatgtctctctccgcaggatgaagaagatactgatagataaaagcccaccttcgtacatcactcagccagaggatcctgacaccgttctgctgctggccaacgccacacttacatgggagcatgaagcaagtaggaaaagcaccccgaaaaagctgcagaaccagaagaggcacctctgtaaaaaacagcgttcagaagcatacagcgaaaggtcccccccagcaaaaggagctactgggcctgaggaacagagcgactcactgaagagcgtcctgcacagcatctcattcgtggtaaggaagggtaaaatactggggatttgcggaaatgtcggaagcggcaagagcagcctgctggccgctcttttgggccagatgcaactacaaaaaggagtcgtagcagttaacggtacactcgcttatgtctcacagcaggcctggatctttcacggcaacgttcgcgaaaatatcctctttggcgaaaagtacgatcaccagagataccagcacacagttcgagtgtgtgggttgcagaaggacctttccaacctgccctatggcgaccttacggaaatcggagaaaggggcctgaacttgtcaggtgggcaaagacagcgaatatcgctggctcgcgctgtctactcagatagacagctttatctgctggacgatccattaagcgcagtagatgctcacgttggcaaacacgtatttgaggaatgtatcaagaagaccctgcggggaaagacggtagtactggttacacaccagttacagtttctcgagtcatgcgacgaggtgatcttattggaagatggcgaaatctgcgaaaagggaacccacaaggagctaatggaggagcgaggcaggtacgctaagctgattcataacctcagggggctacagttcaaagatcccgaacacctgtacaatgctgccatggttgaagctttcaaagaatcaccggctgagcgcgaagaagacgctgggatcattgtgccagagcatcagctcattcagacggagtccccccaagaggggaccgtgacttggaaaacctaccacacctatatcaaagcgagtggcggatatctgctgtccctgtttacggtgttcctgttccttctgatgattgggtccgccgcattttctaactggtggttggggctctggctcgacaaggggtccaggatgacctgcggcccacaaggcaatcgaactatgtgtgaagtgggagctgtacttgccgatattggacaacatgtttaccaatgggtgtacacggcttcgatggtgttcatgttagtctttggagtgactaaaggcttcgtttttaccaaaaccacgttaatggcgtcctcttcactgcatgacaccgttttcgacaagatcctgaagtccccaatgagcttctttgataccaccccaacgggcagactgatgaatagattctctaaagacatggacgagttggatgtgcgcttaccattccacgccgaaaactttctgcagcagttcttcatggtggtttttatcctggtgattctggcagcggtcttccctgctgtgttactggtggtcgccagtctcgctgtggggttctttatacttctgaggatttttcaccgtggagtgcaggagcttaaaaaagtcgaaaatgtcagccgatctccctggtttacccacatcacttcaagcatgcagggccttggtattatacacgcctatggtaaaaaggagtcttgcatcacctag

SEQ ID NO: 215406 - DNA, 321 bp, synthetic construct
  misc_feature 1..321: note = Description of Artificial Sequence: Synthetic coding sequence
  source 1..321: mol_type = other DNA
atggtgggggaggggccttacctcatcagcgacttagaccagaggggcagaagacgatcgtttgccgagagatatgatccgagcctgaagactatgatcccagtgaggccatgcgcacgcttggcccctaatcccgtggacgatgcagggttacttagctttgccaccttttcttggctgactcccgtcatggtcaaaggatataggcaaaggctcaccgtggataccttaccgccactctctacatatgactcttccgatacgaacgccaagaggttcagagtgctttgggatgaggaggtggcacgggtgggtccctag

SEQ ID NO: 215407 - DNA, 858 bp, synthetic construct
  misc_feature 1..858: note = Description of Artificial Sequence: Synthetic coding sequence
  source 1..858: mol_type = other DNA
atggtgggggagggaccttacctcatttcagacctggatcagagaggaagaaggagaagttttgcagagcgctacgatccatcattgaaaaccatgattcccgttcgcccatgtgctcgtctggcccctaatcccgtcgacgatgctggtctgctgagtttcgccacatttagctggcttaccccagtgatggtcaaggggtaccgacagagactgaccgtggataccttaccacccctttcgacatatgattcctcagacacaaatgccaaaagatttcgggttctctgggatgaagaggtcgcccgagtcgggcctgagaaggcttcactttctcacgtggtctggaaattccagaggactagagtgttgatggatatcgtggccaacattctttgtatcattatggctgcgatcgggcctactgttttaatccaccagatcctacaacaaaccgaaagaacatcaggcaaggtttgggtgggaatcggcctctgcatagctttatttgcaaccgagttcacaaaggtcttcttctgggctttggcctgggctatcaactacagaaccgccatccgcctcaaggtagctctgtctaccttagtgttcgagaatctcgtctccttcaaaactctcacccatatctctgtgggtgaagtgttgaatatactgtcgtcagattcttattctctcttcgaggcagccctgttctgcccgctgccggctacgatccccatactgatggtcttctgtgccgcatacgccttcttcattcttggacctaccgctctgattgggatcagtgtgtgtttgtggccaagcagcatacagttaagtgaggggcagcagttttggtag

SEQ ID NO: 215408 - DNA, 882 bp, synthetic construct
  misc_feature 1..882: note = Description of Artificial Sequence: Synthetic coding sequence
  source 1..882: mol_type = other DNA
atgctggagaagttttgcaatagtaccttttggaacagctcatttttagattcccctgaggctgatctgcccttgtgcttcgaacagactgtgctggtgtggattcccctgggatacttatggctgctcgctccctggcagctgctgcatgtgtacaaatcccgaaccaaaaggtctagtaccaccaaactataccttgctaagcaggtgtttgtgggattcctactgattctggcagccattgagctggctctggtcctgacagaggacagcggtcaggccacggtccctgcagtcagatatacaaatccttccctctatcttgggacctggctgttggtacttctgatccaatattcaaggcagtggtgtgtgcagaaaaacagctggtttctgtcattattctggatcctgagcattctgtgtgggacattccagtttcagacgctgattcgcacattgctccagggtgataactccaatctggcgtactcctgtctgtttttcatctcctatggcttccaaatcttgattctgatattttccgccttcagtgagaataatgagagtagcaataacccctcctctatcgcctcttttctgtcctcaattacctatagctggtacgattctattatcctgaagggatataaacgtccgcttacacttgaggatgtctgggaggtggatgaggagatgaagaccaaaactctggtttcaaagttcgagacgcatatgaaaagagagttgcaaaaggcaaggcgtgccctgcagagaaggcaggaaaaatcatctcagcagaatagcggagctcgcttaccaggactgaacaaaaatcagtcccaatctcaggacgcgctagtgctggtgaccttcccgtag

SEQ ID NO: 215409 - DNA, 4638 bp, synthetic construct
  misc_feature 1..4638: note = Description of Artificial Sequence: Synthetic coding sequence
  source 1..4638: mol_type = other DNA
atgttggagaaattttgcaactcaactttttggaattcctctttccttgacagtccagaagctgacttaccactctgctttgagcagaccgtcctggtctggattcctctcggttacctctggctgctcgcaccatggcagctcctccatgtgtataaatcacgcactaagcgctccagtactaccaagctatacttagcaaaacaggtctttgtggggtttctgctgatcctggcagcaattgagctggctctggtgcttactgaggactccggtcaagcaaccgtgcccgcagttcgttacaccaatccctcattgtatctcgggacatggctccttgtgctgctcattcagtacagccgccagtggtgcgtccaaaagaacagctggttcctcagtctgttttggatcctgtccatcctgtgtggtacatttcagttccagaccctgatccgcacactgctacagggtgataactctaacctggcatactcttgcctcttttttatttcctacggattccagatcttaattttgatcttctccgccttctctgaaaacaacgagtcctcgaacaacccctcttccattgctagttttctgagttctattacctacagctggtatgactccatcatccttaagggatacaaacgacctcttactttggaagatgtgtgggaggtggacgaagagatgaagacaaaaacattagtctccaagttcgagactcacatgaagagagagctccagaaggccaggcgcgcactccagcgaaggcaggaaaagagctctcagcagaattcaggagccagactgccaggccttaacaagaatcaaagccagagccaggacgccctggtcctggaagatgtggaaaagaagaaaaagaaaagtggcaccaaaaaagacgttcctaaatcttggctgatgaaggcattgttcaaaacattttatatggtacttctgaaatcatttttgcttaaattagtaaacgacatattcactttcgtgtcccctcagttgctgaaactcctgattagtttcgcgtccgaccgggacacatacctttggatcggctacctatgcgcaatcctgttattcaccgctgctctcatacagtccttttgtttgcaatgttatttccaactttgtttcaagctcggcgttaaggtgagaacagccattatggcctccgtatacaaaaaagcattgaccctttccaacctggccagaaaggaatacacagtaggggaaactgtgaatctgatgagtgttgatgcccagaagctaatggatgttaccaacttcatgcatatgttatggtctagcgttttacagatagtactgagtattttttttctctggagggagctcggtccctcagtgttagcaggtgtcggtgtgatggttttggttatccctattaacgcaatactgagcaccaagtcgaagaccattcaggtgaagaatatgaaaaacaaggataagaggctgaagatcatgaatgaaatactgagtgggattaagatcttgaagtatttcgcatgggaaccatcatttcgagatcaagtccagaacctacgcaagaaagaactaaaaaacctcctggctttctcacaactacagtgtgtggtaatatttgtgttccaactaactcccgtgcttgttagcgtagttacattctctgtctatgtcttggtggactccaacaacatccttgatgcccagaaagcattcacctctattacattgttcaatatcctcagattcccgttgtccatgttacctatgatgatttcttcaatgctgcaggccagcgtttctaccgaaaggctggaaaagtatctggggggagatgatcttgatactagtgccattagacatgattgcaactttgacaaggctatgcaattctccgaggcgagcttcacctgggaacatgactctgaagccacagtcagagatgttaacttggacattatggccggtcagctggttgctgttatcggcccagttggatccgggaagtcatcactgatcagcgctatgctgggcgaaatggagaacgttcacgggcacatcacaattaaggggacaaccgcctacgttccccagcagtcatggatccagaacggtaccattaaggataacattttatttggtacggagttcaatgaaaagcgatatcagcaggtgctggaagcgtgtgctctgctgccggacctagagatgcttccaggcggagatctggctgagatcggtgagaaaggcatcaacctgagtggcggtcaaaagcagaggattagcctcgctcgcgctacataccaaaacctagacatttatctactggacgacccgctgtctgccgttgacgcccatgtcggaaagcacatcttcaataaggtcctcggccctaacgggctgcttaagggcaaaactaggctgctggttactcactctatgcactttttgccacaggtggatgaaatcgtggtgcttggcaacggcacaatcgtcgaaaaagggtcttattccgcacttcttgcaaagaagggagaatttgcgaaaaatctgaaaacgttcctgcgacacactggccctgaggaagaagctactgtccatgacggatcagaagaggaggatgatgattacgggctgatcagctcagtggaagaaatcccagaagatgcggctagtattacaatgcggagagaaaattctttcagacggacattgtctcgctcctcccgcagcaatggcagacacctcaaatccttacggaatagccttaagacgcgcaacgtgaatagtctaaaggaagatgaggaactcgtaaaggggcaaaagctaataaagaaagaatttatcgagacagggaaagtgaaattttctatctacctggagtaccttcaggccataggactgttctcaattttcttcatcattttagccttcgtgatgaattctgtggcgtttattggctctaatctgtggttaagcgcctggacttctgacagtaaaatattcaatagcaccgactaccccgcatcacaaagagatatgagagttggagtttatggagccctaggcctcgctcagggaatattcgtcttcatcgcccacttctggtcagccttcgggtttgtccacgcctccaatattctccacaagcagctgctgaataatatcctgagagcgcctatgcgattttttgataccacaccaacaggacggattgtcaacaggtttgcaggagacatatcaacggtagatgacacgctgccacagtcgcttagatcttggattacatgcttccttggcattataagcacactggtgatgatatgcatggccacccctgtgtttacaattattgttattccgttgggcatcatctacgtgtcagtacagatgttctacgtctcaaccagccgtcagttgagacgacttgattctgtcaccagatcacctatatacagccacttctctgagacagtgtcaggcctgccagtgattagagccttcgagcatcagcaacggttcctaaaacataatgaggtccggatagacactaatcagaaatgtgtgttttcatggattacctcaaacagatggctggccatccggctggaactggttggcaatctgaccgtgttctttagcgcactgatgatggtgatttaccgggacacccttagtggggacacagtgggtttcgttttatctaacgcgctgaatataacacaaacactcaattggctggttagaatgacatcggaaatcgagaccaatattgtggctgtggagagaattacagaatacacaaaagttgagaacgaggctccttgggtaacagacaaaaggccccctcccgattggcccagtaagggcaaaatccagtttaataactatcaggtgaggtataggcccgaactagacttggttctgaggggcatcacatgcgatattgggtccatggagaagatcggcgtcgttggcaggaccggtgccggtaaatctagccttaccaactgcctatttcgcatacttgaagcggctgggggtcagattatcatcgacggagtcgacatcgccagtattgggctacacgacctgcgagaaaagctgaccatcatcccacaggacccaattttgttcagcgggtccctgcgcatgaatttggacccgtttaacaactactcagacgaagagatctggaaggcgctagagctcgctcacttaaagagctttgtcgcctcacttcaattgggactctcccatgaggtaacggaggcgggtggaaacttgtctatcggacagaggcagttgctgtgcctagggagggcacttctgaggaagtctaagattctcgtgcttgacgaggctacagccgctgtggacctggagaccgataacctcatccagaccactatccagaatgagttcgcccattgcacagtgataactatcgctcataggttgcacaccatcatggattccgacaaggtgatggtgctggacaacggaaagattatagagtgcggtagtccagaagaactgctgcagatccctggccctttctactttatggccaaagaggcgggtattgagaatgtgaactccacaaagttctag

SEQ ID NO: 215410 - DNA, 4584 bp, synthetic construct
  misc_feature 1..4584: note = Description of Artificial Sequence: Synthetic coding sequence
  source 1..4584: mol_type = other DNA
atggatgctctttgtggttctggggagctcgggtccaagttctgggattccaacctctccgtgcatacggagaatccagacttgaccccttgttttcagaactcgttactggcgtgggtcccatgcatttacctctgggtcgcgctcccctgctatctcctgtacttaaggcaccactgtcggggttacattattctctctcacctcagtaaactaaaaatggtccttggagtattgttgtggtgcgtaagttgggctgatttattctacagtttccacggactggttcacggcagagcacccgctcccgtgttctttgttactcccctggtggtcggcgtcaccatgttactggccaccctccttatccaatatgagcggcttcagggtgtgcagtcatcaggcgtgcttataatcttctggttcttgtgcgtcgtctgtgctatcgtgcctttcagaagcaagatcctgttagccaaggccgagggggagattagcgacccattcagattcactacattttacatccatttcgcgctcgttctctcagcgctgattctggcctgtttccgcgaaaagccacccttcttcagtgctaagaacgtcgatcccaatccttacccagaaacttcagcaggattcttgtcgcggctttttttctggtggtttacgaagatggccatctatggctatcggcatccgcttgaggaaaaggatctgtggtcccttaaggaagaagacaggtcgcaaatggtcgtccaacagctcttagaggcttggcgcaagcaggaaaagcaaaccgcacgccacaaagctagcgccgctccaggaaaaaacgctagtggagaggatgaagtgctgcttggcgcacgcccacgaccccgaaagccaagtttcctgaaggctctacttgcaacgttcggaagctccttcctcatatctgcctgctttaaattaatccaggaccttttatcgtttattaatcctcagctgttaagcatactgatcagatttatcagcaatcccatggcgccttcgtggtggggattcctggtggcgggactgatgttcctgtgttcaatgatgcaatctcttatcctccagcactactatcattacatatttgtgactggcgtgaaatttcggacaggtattatgggtgttatctatcggaaggcactggtgataactaacagcgtgaaacgtgccagcaccgttggggagattgtcaacctgatgtccgtggatgcccagcggtttatggacctggcaccctttctgaacctgctatggagcgcaccactacagatcattctagcaatctactttctgtggcagaatctgggaccatctgtcctcgctggggtggcatttatggtgttgctgattccactcaacggggcagtggcggtcaagatgagagcatttcaggttaagcagatgaaactgaaggatagccgcattaagctcatgtccgaaatccttaacggcatcaaagtcctgaaactatacgcatgggagccctcctttctgaaacaagtagagggaatccggcagggagagctccagctgctgagaacagctgcctacctgcataccacaaccacgtttacatggatgtgtagccctttcttagtcacccttataactttatgggtgtacgtctatgtggatcccaacaatgtcttggatgctgaaaaagcatttgtgtcggtgtctttgtttaacatcttgcgactccccctgaatatgctgcctcagctgataagtaaccttactcaagcctccgtcagcctcaaacggatacaacagttcctgagccaagaagagctggacccacaaagtgtggaacgcaaaaccatcagtcctggatatgccatcaccatccactctgggaccttcacatgggctcaggacctcccaccaacactgcatagcctcgatatccaggtgccaaaaggcgcacttgttgcagtagtcgggccagtggggtgcgggaaatcaagtctggtgtcagctcttctgggggagatggagaaactcgagggcaaggtgcacatgaaaggttctgtagcctatgtgccccagcaggcatggatacagaattgtacattgcaggagaatgtgctttttggcaaggccctcaacccaaagcgataccagcagactcttgaggcctgtgcactgctggccgatctcgaaatgctgccaggcggagatcagactgagattggtgagaaaggtattaatttatctggcggtcagagacagagagtcagtctcgcgagagccgtgtattcagacgctgatatatttctccttgatgatccgttatcggcagtggattcccacgtcgccaaacatatctttgaccacgttatcggaccggaaggcgtgctggccggaaaaacccgagtcttggtaacgcatggaatctcctttcttccacagactgacttcatcattgtcctcgcagatggacaggtttccgaaatggggccatatccggctctgctgcagagaaatggatccttcgctaacttcctgtgtaactatgcacctgatgaggatcagggccatctagaggatagctggactgctttagagggcgcagaggacaaagaagcactgttgatcgaagatacccttagtaaccatacagacctcactgataacgatcctgtgacatatgtcgttcaaaaacagtttatgcgtcagctcagcgcactgtcatccgacggcgaaggccaaggcagaccagtccccagaaggcatctgggccctagcgagaaagttcaggtgactgaggcaaaggccgacggagctctgacccaggaagagaaagctgctatcggtactgtggagctttcagtgttttgggactacgccaaggcagtggggctttgcacaaccctggccatctgtttgctgtacgtcggacagtctgcagcagccatcggcgcaaatgtgtggctaagtgcctggactaatgacgccatggccgatagccgacagaacaatacaagcctgaggctgggcgtgtacgctgctctaggcattctgcaaggatttcttgtgatgctcgctgccatggccatggccgcaggaggtattcaggcagcccgtgtgctacatcaggccctgctgcataataagattcgttctccccagtcatttttcgataccactccatcagggaggattctaaattgtttctctaaggatatatatgtggttgacgaagtcctcgcgcctgtgattctgatgctgctaaatagcttttttaatgctatctcaaccctggtcgtgattatggcctcaacccctctgtttacggttgtaattctgcccttagcggtcctgtatacccttgtccaaagattttatgcagcaaccagtaggcaattaaagcgcctggagtccgtcagtcgctcccccatatattcccacttctctgagactgtgacaggggcaagcgtgatcagggcttataaccggagtcgggactttgagatcatctccgacacaaaggtggacgctaatcaacgctcctgctacccctatattatcagcaatcgatggcttagtatcggcgtggaattcgtcgggaactgtgtggtgctctttgcagccttgttcgctgtgataggaaggtcctcccttaatccaggcctggttggactgagcgtcagctattccctgcaggtgactttcgccctaaattggatgataagaatgatgagcgatctcgagagtaacattgttgctgtcgagagagtcaaagaatattccaaaactgaaacggaggccccttgggtagtggagggctccaggcctcctgagggctggcctccccgtggggaagtagagtttagaaattattccgtcagataccgccctggactggacctcgtgctacgcgatttatctctgcatgtgcacgggggagaaaaggttggaatagttggtagaactggggctggaaagtccagcatgacactgtgtctgtttcgaatattggaggccgctaagggggaaattcggatagatggactgaatgtcgcagacatcggccttcacgacctgaggtcccaactgactattatcccccaagatcccatactcttttctggcacgttgagaatgaatctcgacccatttgggtcgtactccgaggaggacatctggtgggccctggagttatcacacctgcatacatttgtctcaagtcaacctgcaggattggatttccaatgcagcgaagggggagaaaatctgagtgtcggacagaggcagctggtttgcctggctcgcgcactgttgcgaaagtcccgtattttggtgctggacgaggctaccgcagcgattgatctggagactgacaatttaattcaggctacaattagaacccagttcgacacatgtaccgtcctaaccatcgcccaccgcctcaatacaatcatggattatacaagagttcttgtcctggataagggagttgtggcagagtttgacagccccgcaaaccttatcgccgcaaggggtattttctatggaatggctcgagacgcgggactggcatag

SEQ ID NO: 215411 - DNA, 1719 bp, synthetic construct
  misc_feature 1..1719: note = Description of Artificial Sequence: Synthetic coding sequence
  source 1..1719: mol_type = other DNA
atggacgcactttgtgggagtggcgaattaggctcaaagttctgggatagcaatctttcagtccatactgagaacccagatctcacaccctgtttccaaaattctctccttgcctgggttccttgtatatacctttgggtggctctgccatgctatttgctttaccttcgtcatcactgtcggggttacatcatcctcagtcacctgagcaagcttaagatggtgctgggcgtgctgctctggtgcgtgagctgggctgatctgttttactccttccatgggttggttcacggtagggcccctgcgcctgtcttctttgtgaccccactagtcgtgggagtgacaatgcttctcgccaccctgctgattcagtatgagcgtctgcagggtgtgcagagcagtggagtcttgatcattttctggttcctgtgtgtggtttgtgcaatcgtaccattccggagcaagatcctgttagctaaagctgaaggagaaatttcagatcctttccgctttactaccttctatatacatttcgcactcgtactcagtgctctgattttagcatgctttagggagaagcccccattcttttctgcaaagaacgtcgaccctaacccataccctgaaacaagtgcaggatttctctctcgcttgtttttctggtggttcacaaaaatggcaatctatggatacaggcatccactggaagagaaagacctgtggtcgctgaaagaagaggacaggagccagatggtggtacagcaactgttggaagcatggcggaagcaagagaagcagaccgcccgacacaaggcttccgcagccccagggaagaacgcaagcggagaggacgaagtcctcctgggggctaggccacggcctcgcaagccttccttccttaaggccctgctggcaacctttggcagctccttcctaatctcagcatgcttcaagctcattcaggatctcctgagtttcataaacccccagcttttaagcatattgatccggttcatttcgaatcccatggccccttcctggtggggttttcttgtcgcaggactcatgtttctttgctcaatgatgcagagcctgatcctccagcactactaccactatatttttgtcactggggtgaagttccgcacgggcattatgggtgttatttaccgcaaggccctggtcatcaccaactctgtgaaaagggccagcaccgtcggagagatcgtcaaccttatgtcagtcgacgcccaacgcttcatggacttagccccattcttaaacctattatggagtgctcccttacagatcatactggcaatatacttcctgtggcagaatctagggcctagcgtcctggccggagtcgcattcatggtgttgctgattccattgaatggagctgttgcagtgaaaatgcgggcatttcaggtcaaacagatgaaactgaaagacagtcggatcaaactgatgtcagaaatcctgaacgggatcaaggttctcaaactgtacgcatgggagccgagcttcctgaagcaggtagagggcattcggcagggtgagctgcagcttctgagaaccgccgcttacctccacaccaccactaccttcacttggatgtgttcacccttcctcgttcgattggggacgggactcggtccatgcttgcagggatccggctgtcccggtatggcgagggcccattggaccctgccatag

SEQ ID NO: 215412 - DNA, 3717 bp, synthetic construct
  misc_feature 1..3717: note = Description of Artificial Sequence: Synthetic coding sequence
  source 1..3717: mol_type = other DNA
atggacgcactctgcggatctggagagctcggctccaagttctgggactctaacctttctgttcataccgaaaatcccgatctgactccgtgctttcaaaacagcctgctggcctgggtgccatgtatctatctctgggtcgcactaccctgttatttgctgtacctacgacaccattgccgaggctacattattctgtctcatctgagcaaacttaaaatggtgttgggtgtactcctgtggtgtgtgagttgggccgacctgttctactcttttcatgggcttgtgcacgggcgagcaccagcacccgtattttttgttacccctctggtcgtcggtgtgacaatgctcttagcgaccctgttaattcagtatgagagactacagggcgtgcaatcttcgggcgtgcttattatcttttggtttctctgcgtcgtgtgtgcaatagtcccgtttcgctcaaaaattctcctcgccaaggcagagggggagatttcggacccctttcggttcacaacattttacatccattttgcactggtgctcagtgctctcatactggcgtgttttcgggagaagccaccttttttttcggccaaaaacgtggacccaaatccctatcctgagactagtgcaggcttcctgtctcggctgtttttttggtggtttaccaaaatggcgatatacggctatcggcaccctctggaagagaaggatttgtggagtctgaaagaagaggatcggtcccaaatggtcgtacagcagctccttgaagcatggaggaaacaggaaaaacagacggccaggcataaggcctcagctgccccagggaaaaacgcttctggagaggatgaagtccttctgggagcaagaccaagacccagaaagccctccttcctcaaggctctccttgcaacttttgggagctctttcttaatatccgcctgcttcaaactaatccaggatttgctgtcctttatcaacccacaactgttgtccattttgatcagatttatcagcaaccctatggctccttcttggtggggcttcctggtggccggtctgatgttcctctgttccatgatgcaaagcctgatcctgcagcattattatcattatattttcgttacaggggttaaattccgaacaggcataatgggggttatctataggaaagcgctcgtgatcacaaatagcgtgaagcgggcatcaaccgtgggcgaaatcgttaatttaatgagcgtggatgcccagcggtttatggacctggcccctttcctgaatctgctgtggagcgcacccctccagataatcctcgccatctacttcctgtggcagaacctggggccatccgtgctagccggtgtcgcttttatggttttgctgattccactgaacggtgctgtggctgttaagatgcgtgcttttcaagtaaaacaaatgaagttgaaggatagccgaattaaactgatgtccgagattctcaatggcataaaggtcttgaagctatatgcatgggagccctcattcctgaagcaggtcgagggcattcgccaaggggagctgcagctcctgagaactgcagcctacctgcacacaactaccaccttcacctggatgtgtagcccctttctggtaacattaattacgctatgggtgtacgtgtacgtggatcctaataacgtcctggacgcggagaaagcattcgtcagcgtgtccctgttcaacatcctccggctgcctctgaatatgctgccccagttgatttcaaatctcacccaggcgtccgtgagccttaagcggatccaacaattcctgagccaagaggagctcgacccccagtcagttgagcggaagacaatcagccccggttacgcaataactattcattccggcacatttacttgggcgcaggatctcccccctactctgcacagcctggatatccaggtgccaaaaggggctttggtcgctgtcgttggccctgtgggctgtgggaaatcctctttggtctctgcactcttgggcgaaatggaaaagcttgagggaaaggtccatatgaaagggtctgtagcatatgtccctcagcaggcctggatccaaaattgcaccctccaggaaaacgtcctgttcgggaaggctttgaatccaaagcgatatcagcagacactagaagcttgtgctctgttggcagacctggagatgctgcccggaggagaccagactgagattggcgaaaagggaataaacctgagtggaggacagcggcagcgtgtctccttggctcgcgctgtttacagcgacgccgatatcttcctcctggatgatccattgtctgccgtcgactcccatgttgccaaacatatctttgaccacgtcataggccctgagggtgtactggccggaaaaacacgcgtcttagttacacacggcattagcttcctgcctcagactgacttcatcatagtcctagccgatggacaggtaagcgaaatgggtccttatcccgctcttttgcagagaaatgggagcttcgccaatttcctctgtaactacgctcccgatgaagaccaaggccacctggaagactcttggacggcactcgagggtgcagaggataaggaagcactcttgatcgaagataccttaagcaatcacacagatctcacagacaacgacccggtgacatacgtcgtgcagaagcagtttatgaggcagttgtccgctctttctagcgacggggagggtcagggcaggccagtgcctcgcagacacctgggcccaagtgagaaggtgcaggtgacagaagctaaagcggatggggctctgacccaggaagagaaggcagctatcggaactgtggaactgagcgttttctgggactacgcaaaggctgtagggctgtgcactaccctcgcaatctgtctgctctatgttggccagtccgcagcagccatcggggctaacgtgtggctcagtgcttggacgaacgacgcaatggctgacagccgacaaaataatactagcctaagattgggagtatatgccgcactggggattctgcagggattcctggtcatgctggctgctatggctatggccgcaggcggtatccaggctgccagggttctgcaccaggccctcctgcacaataagatcaggagcccgcagagcttttttgatactactccctcgggacgcatattaaactgtttcagtaaagacatatacgttgttgacgaggtgcttgcacctgtaatcttgatgttactcaacagtttttttaatgccatctccaccctcgtcgtcatcatggctagcactcctttgtttactgtggttattctgcctttggctgttctttatacactcgttcagaggttttatgcagctacatctaggcaactgaagcggctggaaagtgtgagccgttcccccatttatagtcacttttccgaaaccgtcaccggcgcttccgtgatccgagcttacaatcgttcccgggatttcgagataatctcagataccaaggtggatgccaaccagcgctcatgctatccttatattattagcaatcggagcgaagctgccagtctcgccccttgtagttcccgaaactcccaacaggccctctggtgttctggctcactatcattactgagtcccaagcagaaaacaggacccgctctgcccctccctcacttccttctgatctag

SEQ ID NO: 215413 - DNA, 3978 bp, synthetic construct
  misc_feature 1..3978: note = Description of Artificial Sequence: Synthetic coding sequence
  source 1..3978: mol_type = other DNA
atgcttcccgtgtatcaggaagtcaagccaaaccccttacaggacgccaatctgtgtagcagggtcttcttttggtggcttaatcctctgtttaaaataggtcacaagagaagactcgaggaggatgatatgtactcggtcctcccggaggatcgtagtcaacatctcggggaggaactccaggggttttgggataaggaggtgctgagagctgagaatgacgcgcagaagccttccctgacccgagcaattatcaaatgctactggaagagctacctcgtgctgggcatcttcaccctgattgaggaatctgctaaggtgatccaacctatcttcctgggaaaaatcattaactattttgagaattacgacccaatggactctgtggccttgaacactgcgtacgcctatgctaccgtcctgactttctgtactttgattctagccattctccaccacctctacttttaccacgtgcagtgtgctggcatgcgacttcgggtggcaatgtgccacatgatctaccgcaaagctctacgcctgtcaaacatggctatggggaagacaactactgggcagatagtgaacctgctgagcaatgacgttaacaaatttgaccaggttacagtgttcctccatttcctatgggcaggcccacttcaggcaattgcagtgacagcattgctctggatggagattggtatctcttgcctggctggaatggcagtgctaatcatcttgcttcccctacagtcatgttttggcaagctcttctcatctctgaggtcaaagactgctacttttaccgacgcacgaatacgcaccatgaacgaggtcattacgggcatccgcatcattaaaatgtatgcatgggaaaagtccttctctaacttaatcaccaacctccggaaaaaagagatcagcaaaatcctgagatcctcctgtcttcgcggtatgaaccttgcatcctttttcagcgcaagcaagataattgtgttcgtcacttttacaacttacgtactcctaggttcagtgatcacagcgtccagagtgttcgtcgctgtgaccctgtatggggcagtgcgcctgacagtaaccttattcttccctagtgccattgagcgagtttccgaggctatcgtgtcaatacggcgaatacagacattccttctgctagacgagatcagtcagcgcaatcgccaactaccgagtgatggtaagaaaatggtgcacgtgcaggatttcactgcgttttgggataaagcttccgagacaccaactttgcaaggactgagctttacggtcagaccaggagaactactagccgtggtcggacctgtaggggctggaaagtccagtctactgagcgccgtgctcggcgagctggccccaagtcacgggttggtatcagttcatggccgaattgcttacgtcagccagcagccttgggttttttccgggacattgcgttcaaatattctttttggcaaaaaatacgagaaagagaggtacgagaaagtaataaaagcatgtgccctgaagaaggacctgcaactgctggaagacggagacttgacggtgatcggcgaccgcggtactacgctctcaggcggacagaaagcacgggttaacctggctcgtgctgtttaccaggacgctgacatctatctgttggatgaccccttgtccgctgtcgatgcggaggtgtccagacacctgttcgagttgtgcatctgccagatattgcacgaaaaaattacgatcctggtaacacaccagttgcaatacttaaaggcagcttcgcagatcctaatcctaaaagacggaaagatggtgcagaagggaacatacactgagttccttaaaagtgggatcgatttcggctctcttctgaaaaaagataacgaggagtctgagcagccgccagtgcccggtacgcccaccctgcgcaatcggacattcagcgagagtagtgtgtggtcccagcagtcttctagacccagcctcaaagatggcgctctcgaatcgcaggacaccgaaaacgttccggtgacactgtccgaagaaaataggtccgagggcaaggttggatttcaggcttacaagaattattttagagcaggagctcactggattgttttcatattcctgatcttgctaaacactgcggctcaggtggcctatgtgcttcaggactggtggctatcctactgggccaacaagcagtctatgttgaatgtgaccgtgaacggaggcggaaacgtaaccgagaagctggatctgaattggtacctggggatatattccggacttactgtagcaacagtgctcttcggtatcgcacgcagcttgctggtgttttatgtgctagtgaattcctcccaaactctccataacaagatgttcgagtccatcctgaaagctcctgtcttgtttttcgaccgtaaccctatcggcaggatcctgaaccgtttttccaaagacattggccacttggatgacctgttacccctgacatttctagacttcatccagaccctgcttcaagtggtgggggttgtgtcagtcgctgtagccgttatcccttggatagccatacccctggtgcctcttgggattatttttattttcctgagaaggtacttcctcgaaacttcgcgcgacgtgaaacgtttggagtctactacccggagtccggtcttcagtcacctgagcagtagcctccagggcctgtggaccattagagcatacaaggccgaggaacgatgtcaggaactcttcgatgcccaccaggaccttcactctgaggcgtggttcctcttcctgaccacttctcgatggtttgctgtgaggttggatgccatttgcgcaatgttcgtgatcattgtcgcattcggctccctgattctggcaaagaccctcgatgcaggccaagtcggactcgctttgagctacgccctcacccttatgggtatgtttcagtggtgtgtgaggcagagcgcagaggtagaaaatatgatgatttctgtggagagggtcattgagtacaccgatctggaaaaggaggctccttgggagtaccagaaacgcccacccccagcgtggccccatgagggggtgattatctttgacaatgtcaattttatgtattcgccaggtgggcctctggtgcttaagcatctcacagctttgattaagagtcaggagaaagtcggtattgtggggcgaaccggcgcaggtaagtccagtcttatttccgccctgttcaggctgtcagagccggaggggaaaatctggattgataagattctgacaaccgagataggtctgcacgatttgcggaaaaaaatgagcattattccccaagagcctgtgctcttcactggcactatgaggaagaatctggaccctttcaacgagcatacagacgaagagctgtggaatgcgctccaagaggtgcagcttaaggaaactatagaggatctgccaggtaaaatggataccgagttagcagagagcgggtctaacttcagcgtgggacagagacagctggtttgcctggccagggccatcctccgtaaaaatcagatcctgatcattgacgaggccacagcgaatgtagatccacgcaccgacgagttgatacagaaaaagattcgagagaaattcgcccattgcactgtgctgacaatcgcccaccggctgaatacaatcatcgattcagataaaatcatggtcctggattctgggagactgaaagagtatgatgaaccatacgtgcttttgcagaataaagaaagcctcttctataaaatggtccaacagctaggcaaagccgaggctgcagccttaaccgagaccgcaaagcaggtgtacttcaagcgcaattatccccacataggccacaccgatcacatggttaccaatacatccaatgggcaaccctcaactctcacaatttttgagacagctctatag

SEQ ID NO: 215414 - DNA, 3837 bp, synthetic construct
  misc_feature 1..3837: note = Description of Artificial Sequence: Synthetic coding sequence
  source 1..3837: mol_type = other DNA
atgctgcctgtgtaccaggaggttaagccaaatcccctgcaagacgctaacctgtgcagtagggtattcttctggtggcttaatccccttttcaagattggccacaaaagaagactcgaggaggatgatatgtattccgtgcttcctgaagacaggtcccagcacctgggagaagaactgcagggattctgggataaggaagtgttacgtgcggaaaatgacgctcagaagcccagtctcactcgtgcaattattaagtgctattggaagtcttacttagtcctcggaatctttaccctgatcgaggagtctgcaaaagtcattcagcccatcttcctgggtaagatcattaactattttgaaaactacgatccaatggacagtgtcgcactgaacactgcatacgcatacgcaacggtattgactttttgtacgctgatcctagccattcttcatcatctgtatttttaccacgtgcaatgcgcaggcatgaggctcagagttgctatgtgtcacatgatctaccgcaaggccttaaggctttcgaatatggctatgggcaaaacaactacgggccagatcgtgaacctcctctcgaacgacgtcaacaagtttgaccaggttacagtgtttctgcacttcctgtgggccggtcctcttcaagcaatcgccgtcaccgccttgctgtggatggagataggtatcagctgcttagccggtatggcagtgctgatcatactgctacctctccagagctgtttcgggaagctgttctcgtctttgaggagtaagactgccacttttacagatgcgcgaatacgcaccatgaacgaagtgatcacggggattagaattattaagatgtacgcatgggaaaaaagctttagcaacctgatcaccaatctgagaaagaaggagatttccaaaatcctgcgctcaagctgcctgcggggaatgaacctggcctcgtttttttccgcttcgaaaatcatcgtattcgtgacattcacaacctacgtcctcctcgggtcggtaatcacggcctccagagtgtttgtggctgtcacgctttacggtgctgtcagacttacggtgactttgttcttcccatctgccatcgaacgagtgagcgaagccatcgtgagcattagaaggatacagacatttctcttgttggacgagatatctcagcggaaccggcagctgccttcagacgggaagaagatggtacatgtgcaagattttaccgctttttgggataaagccagcgaaactcctactctacaaggcttgtcttttaccgtgaggccaggagagttattagccgttgttggacccgtcggggctggtaagtcttcgctcctgtcagcggtgctgggagaactcgcccctagccacggccttgttagcgtgcacgggagaattgcctacgtcagtcagcagccctgggttttctctgggactctgagaagcaacatactgtttggtaagaagtacgaaaaagaaagatatgagaaggtaataaaggcttgtgccctgaagaaagatcttcagctcctagaggacggagacctgaccgtgattggagatcgaggaactacactaagcgggggtcagaaagctagggtgaatttggctcgtgcggtatatcaggacgctgacatttatctattggacgaccccctgtctgctgtagatgccgaggtctcccggcatctctttgagctgtgcatatgccagatcctccatgagaagatcaccatcttggtgacccaccaactccaatatttgaaagccgcaagtcaaatcttgatactgaaggacgggaagatggttcagaagggcacctacaccgagttcttaaagtctgggatagacttcggcagcttgttaaaaaaagacaacgaagagtccgagcagccccctgttccaggtacccccacactccggaaccggacattctccgagtccagtgtgtggagtcagcagtcaagtcgcccaagccttaaagacggagcccttgagtctcaggatgtggcctacgtgctgcaagactggtggctgtcatattgggcgaacaagcaatcaatgttgaacgtcactgtcaatggcggaggcaatgtaacggaaaagttagatctgaattggtatctgggtatttattctggacttactgtcgccacggtgttgtttggaatcgcgaggtctctcctcgttttctacgtgctggtgaactcctcccaaacacttcataataaaatgttcgaaagtatcctgaaagctccagttctgttctttgacagaaacccaattggcaggattcttaacaggttttcaaaagatatcggacacctggacgacctgttaccgcttacttttcttgattttatacagaccctccttcaggtggtcggcgtggtgagcgtcgcagtggctgtgatcccttggatcgctatccccttggttccattaggcataattttcatctttctccggcgatattttctggaaaccagtagagacgtcaagaggctggaatctaccacgcgttcccccgtgttcagccacctgtctagttccttgcagggactgtggacgataagggcctataaagcagaagagcgctgtcaggagctgttcgacgcccaccaggacctgcactccgaggcatggttcctcttcttaaccacctcgaggtggtttgcagtgagactggatgctatatgtgccatgtttgtgatcattgtggcctttggatccttgattctggccaaaactctggatgccggacaggttggactcgccctatcttacgcccttacccttatggggatgttccagtggtgtgtgcggcaatctgcggaggtcgaaaatatgatgatctctgtggagagagttattgagtacacagaccttgaaaaagaggccccttgggagtaccagaagagaccacctcctgcctggccccatgaaggtgttataattttcgataacgtcaacttcatgtacagccctggcggtcctctggtcctgaagcaccttactgcacttattaagtcccaggagaaagttgggatcgtcggtcggaccggggcagggaaatcctcattgataagtgctcttttcaggctgtctgagccagagggtaaaatctggatagacaagatcttgactacggagattggcctgcatgacctgagaaagaagatgtctattatcccccaggagcccgtactattcactgggacaatgagaaaaaatctagatcccttcaatgagcatacagatgaggaactgtggaatgccttacaggaggtccagttgaaagagaccatcgaagacctacctggcaaaatggatactgagctggctgagtccgggtccaactttagcgttggacagaggcaacttgtgtgtctggccagagccatactgaggaagaaccagatcctcattattgatgaagccaccgcaaacgtagatcccagaacggacgagttaattcagaagaaaatacgtgaaaaatttgcgcactgcacggtcctcaccattgctcacagactgaacaccataatcgacagcgacaaaattatggtgctcgatagcggaaggctcaaggaatatgacgaaccatacgtgctgctgcagaacaaggagtcattattttataagatggtgcagcaactgggtaaggccgaggctgccgcactgaccgaaacggccaagcaagtgtacttcaaacgtaactacccacacattggccacactgaccatatggtaaccaatacaagtaacggacagcccagtacgctgacaatcttcgagacagccctctag

SEQ ID NO: 215415 - DNA, 2580 bp, synthetic construct
  misc_feature 1..2580: note = Description of Artificial Sequence: Synthetic coding sequence
  source 1..2580: mol_type = other DNA
atgctgcccgtgtaccaggaagtcaagcccaaccctctgcaagacgctaatttgtgctcccgggtattcttttggtggctaaatccactctttaagatcgggcacaagagacgcctcgaagaagacgatatgtactcagttctgccagaggaccggagccaacatttgggcgaggaactccaaggattctgggataaggaagtgctgcgcgcagaaaatgacgctcagaaaccaagtctgaccagagctataattaagtgttactggaaatcatacctggtgctcggaatttttaccctgatagaggagtccgctaaggttatccaacctatttttctgggcaagattatcaactattttgaaaactatgatccaatggattcagtggctctgaatacggcttacgcgtatgccaccgtcctcactttctgcaccctgattctcgccatcctgcaccacctctacttttatcacgttcagtgcgcaggtatgcgtttacgcgtcgcaatgtgccacatgatctatcgcaaggcactgaggctgtcaaatatggccatgggtaagacaaccaccggtcaaatcgtcaacttactgagcaacgacgtgaacaagttcgatcaggtgaccgtgtttctccactttctgtgggccggaccattgcaagccatcgccgtgacagcactgctgtggatggagatcgggatcagttgccttgccggaatggctgtgctgatcatcctactgcccctgcagtcctgctttggtaagctattttcctcacttagatcaaaaactgcaacctttaccgacgcgagaattcggacaatgaacgaagtgatcacgggcatccggatcattaagatgtacgcctgggagaagtcattctcaaaccttatcaccaacctgcggaaaaaggagattagtaaaatcctcaggtcctcttgcctgcgagggatgaacttagcttcctttttttcagccagtaaaatcatcgtttttgtgactttcaccacatatgtgctgctgggtagcgtcatcactgcaagtagagtattcgtggccgtgaccctctacggagcggtgcgattaacagtgactcttttctttccctcagcaatagaaagggtgagcgaggccattgtgagcatccgacgcatccagactttcctgctgcttgacgaaatctcccagcgcaaccggcagttgccttcagacggtaaaaagatggtgcatgttcaggacttcacagctttctgggataaggcaagcgagacgccaactctgcagggactcagttttaccgtgaggccgggtgagctcttagcagtggtaggcccagtgggggctggaaaatcctctctgctgtcagctgtgctgggggagttggccccttcccatggattggttagtgtacacggccgaattgcctatgtatctcagcagccttgggtcttttctgggacgctcagatccaacattctgtttggaaagaagtatgagaaggaacggtacgagaaggtgattaaagcttgtgcattaaaaaaagatctacagctgttggaggacggggatttgacagtgatcggggatcgcggtaccactttgagtggcggacaaaaggcccgtgtaaatctggctagggccgtgtatcaggacgccgatatatatctcttggatgacccccttagcgccgtcgatgcagaggtgtccagacatctgtttgagctgtgcatctgccagattctgcatgagaagatcactatccttgtaacccatcagctacaatatttgaaggccgcttcacagatcctgatcctgaaggacggaaaaatggtacagaagggcacctacactgagttccttaaaagcggtattgactttggaagtcttctgaaaaaggataatgaggagagcgagcagccccctgtccccggaactcccacactgcggaataggaccttcagcgagagcagcgtttggtcacagcagtcctcacgcccaagcttaaaagatggggctctggaatctcaggacaccgaaaacgttccagtgactctgtcagaggaaaacaggtcagaaggtaaagttggattccaggcttacaagaattactttcgggctggggctcactggattgtcttcattttcctcatactcctcaataccgcagcccaggtcgcctacgtgctccaagactggtggctctcctattgggccaataagcagagtatgctcaacgtgacagtgaacggaggaggcaatgtcacagaaaaactcgacctgaactggtatttgggaatctacagtggactgacagtggccacagttctattcgggatagctcggtctttactcgtcttttacgtactcgtaaatagcagccagacactgcacaataagatgtttgagtctattttaaaagcccctgtgcttttcttcgaccgcaatccgattggtcgtatacttaatcggtttagcaaagatataggtcacctggacgatctcctgcctttaacctttctggatttcatccagcgatgggacttagctgtgctctcttggttggtgtctaactcttag

SEQ ID NO: 215416 - DNA, 2355 bp, synthetic construct
  misc_feature 1..2355: note = Description of Artificial Sequence: Synthetic coding sequence
  source 1..2355: mol_type = other DNA
atgctgccggtgtatcaggaggtgaaaccaaaccctttgcaggatgccaacctctgttcccgtgttttcttctggtggctaaaccctctgttcaagatcggtcacaagcgtcgactcgaggaggacgacatgtacagcgtgttgccagaagatagaagccagcatctgggcgaggagcttcagggcttctgggacaaagaagtgcttcgggctgaaaacgacgcacagaagcccagcttaaccagggccatcatcaaatgttactggaagtcatatctggtgcttggaattttcaccctgatcgaggcactacgattgtcgaatatggctatgggaaaaacaaccactggtcagatcgttaacctgctaagcaacgacgtcaacaagttcgaccaggtcaccgtttttttgcatttcctatgggccggacccctgcaagcaatcgcagtcactgcacttctgtggatggagattggtatatcgtgccttgcgggaatggccgtgctaataatccttctacccttgcagtcatgtttcgggaagcttttcagttctctccgctccaagaccgcgacttttaccgatgctcggattcgcaccatgaatgaagtcatcaccggaatccgcattatcaaaatgtatgcctgggaaaaatctttctctaatctgatcactaacctccggaagaaggagatcagcaaaattcttaggagttcctgtttaagagggatgaatcttgccagctttttcagcgcttctaaaattatagtgttcgtgacttttactacttacgtacttctcgggtctgtgatcaccgcttcccgagtctttgtagccgtaacactgtacggggcagtcaggctcacggttacactgttcttcccttcagccatagaacgtgtatctgaagcgattgtgtccattcgcagaatccagacctttctgttgctggatgagattagtcagcgtaaccggcagctccccagtgacggaaaaaagatggtacacgtccaggacttcactgccttttgggataaagcctccgaaactccaacactgcagggcctgtctttcaccgtgaggcccggtgagctgttagctgtggtagggcctgtgggcgcaggtaaatcaagcctcctttcggccgtcctgggtgaactggccccatcacacggcctagtgagcgtccacgggcgaatcgcctatgtgtctcagcaaccttgggtcttctcaggcactttacgaagtaacatcctgtttggcaagaagtacgaaaaggaacgttatgaaaaagtgatcaaagcttgcgctctgaagaaggaccttcagctcctggaggatggtgatttgactgttataggtgaccgtggcaccaccctgagcggaggacagaaggcaagggtgaatctagccagagctgtgtaccaggatgctgatatttatctgctggacgaccccctatctgccgttgatgccgaagtgtcccgacacctatttgagctatgcatatgccaaatcctccacgagaagattactatactggtaacccatcagctacagtacctcaaagctgcctcccaaatactgatcctgaaagatgggaaaatggttcaaaagggcacctacaccgaattcctgaagtccgggatcgactttggctcgttgctgaagaaagacaacgaagagtccgagcagcctcccgtccccggaactccaacgctaagaaatagaaccttctctgaatcctcggtgtggagccaacagagcagccgcccttccctcaaggatggcgcactagagtctcaggataccgaaaatgtgcccgtgacattgtctgaagagaaccggagcgaaggaaaggtgggctttcaggcatacaagaattactttagggcgggagcacattggatcgtttttattttcctgattctactgaacacagccgctcaagtggcctacgtgctgcaggactggtggctatcttactgggctaataagcagagcatgctaaacgtgacggttaacggtggcggaaacgtgactgaaaaattagatttaaattggtacctcggtatctatagcggtctgaccgtagcgactgtgcttttcgggatagcacggagcctcctggtgttctatgtgctagttaactcgagtcaaaccctccataataaaatgtttgagtccatactcaaggcccctgttctcttcttcgaccgcaacccaatcggcaggattttaaatcgtttttcgaaggatatcggtcatttggacgatctgctgccattaaccttcctggacttcatccaacgatgggatctggccgtgctctcatggctggtgagtaactcatag

SEQ ID NO: 215417 - DNA, 75 bp, synthetic construct
  misc_feature 1..75: note = Description of Artificial Sequence: Synthetic coding sequence
  source 1..75: mol_type = other DNA
atgcttccagtctatcaggaagtaaaaccaaatcccctgcaagatgctaacttgtgttcgagagtattcttctag

SEQ ID NO: 215418 - DNA, 4185 bp, synthetic construct
  misc_feature 1..4185: note = Description of Artificial Sequence: Synthetic coding sequence
  source 1..4185: mol_type = other DNA
atgaaggacattgatatagggaaggaatatatcattccatctcctggttatcggagtgtcagggagcgtacttctacgtcagggacccatagagaccgggaagatagtaagtttcggagaacccgcccactggagtgccaggatgcgttggaaaccgcggctagagctgagggacttagcctagacgcgtccatgcattcacagcttaggatcctggacgaagaacatcccaaaggtaagtaccaccatggactgagtgcactgaagcccatccgaaccactagtaagcaccagcatccggtagataatgcaggcctcttctcatgtatgacattttcctggctgtcatccttggccagagtggcccataagaaaggcgagctgagtatggaggacgtctggagtctgagcaagcatgagagctccgatgtaaattgtaggcgcctggaacgcctctggcaagaagagttgaatgaagtaggtccagatgctgccagcttaaggcgtgttgtctggatcttttgtaggactcgcctcatcctcagtattgtctgccttatgattacacagctagcaggctttagcggaccagcatttatggtgaagcatctgttagagtatactcaggcaacagaatccaatctacagtattcattgctgttggtcctgggtcttctcctgactgaaatcgttagatcttggagtttggccttaacttgggctcttaactatcggaccggtgttaggttacggggtgccatcctgactatggcgtttaagaaaatcttgaaacttaaaaatatcaaggagaagagcctcggcgagctcatcaacatctgctcaaatgatggccaacgcatgttcgaagccgcagctgttggctctctcttggcgggtggcccagtggtagccatactagggatgatatacaacgtcatcattcttggcccaactggcttcttgggatccgccgtctttattttattttaccccgctatgatgttcgcgagcaggttaacagcatactttcggcgaaagtgtgtcgcagccacagatgaacgggtacagaagatgaatgaggtgctaacttatattaaattcatcaagatgtacgcctgggtcaaggcattcagccaatctgtgcagaaaatccgagaggaagaaaggcgcatcctggagaaggctggctattttcagtccatcactgtaggcgtggccccaattgttgtggtgatcgccagcgtggtgacattctccgtacacatgacactgggcttcgacctaactgcggctcaggcctttacggtcgtgacggtgtttaatagtatgacattcgctttgaaggttacccccttcagtgtcaaatctttatccgaagccagcgtcgcggtggacagatttaagtccctctttctgatggaggaagttcacatgatcaaaaataaacctgctagtcctcacatcaaaattgagatgaaaaatgccaccctggcctgggacagtagccattctagtatccaaaactcccctaagttaacgccaaaaatgaagaaagacaaaagagccagtcggggaaagaaggagaaggtcaggcagctacagcgcactgagcatcaggccgtgctggctgagcaaaagggacatctcctcctggattccgatgagaggccttctcccgaagaagaagagggtaagcacatacatctcggccacctgagactccaaaggaccctgcacagtatcgatctggaaattcaggagggcaagctagtgggtatttgtggcagcgtgggtagtggcaaaacctctctcatcagcgcaatactgggccaaatgacgctgctcgagggtagcatcgctatttccggcacgtttgcttacgtggctcaacaagcatggatcttgaacgcaactctacgggacaacatcctcttcggaaaggaatatgatgaagagaggtataactctgttctgaacagctgctgtctccgacctgacctggctattctgccatcatctgatttgactgaaattggagagaggggagcgaacttgagcggaggccagcggcagcgtatttccttagccagagccctgtattccgatagatccatttacatacttgatgaccccctttctgccctagacgctcatgtgggtaaccatatcttcaattccgccatccgcaagcacttgaagtcaaaaactgtgttgttcgttactcaccaattacagtacctcgtggactgcgatgaggtaattttcatgaaggaaggctgtatcacagagagaggcactcatgaggaactaatgaatctcaacggagactatgccacaattttcaataaccttctgcttggagagaccccgccagtagagataaattccaagaaggaaacttccggcagtcagaaaaaatcccaggataagggcccaaaaacgggaagcgtcaagaaagagaaggctgttaaaccagaggagggccagctggtgcagcttgaagagaaaggccaaggttccgtgccatggtccgtatacggcgtgtacatacaggcggcaggaggacccttggccttcctcgttataatggccctgtttatgttaaatgttggctccaccgctttttcgacttggtggctgagttattggatcaagcagggatcaggaaatactaccgtaacccggggaaacgaaacatctgtttctgacagtatgaaggacaacccgcacatgcagtattacgcgagtatctatgcactcagcatggctgtgatgctgattttgaaagccataaggggcgtcgtcttcgtcaaaggcacccttcgggcttcttcccgactgcacgatgagctcttcagacgaatactgcggagcccaatgaagttcttcgacactactccgaccggacgtatactgaacaggttctcaaaagatatggacgaagtcgatgtgaggcttcccttccaggccgagatgttcatccagaacgtgatcttggtcttcttctgtgttggtatgatagccggtgtgtttccctggtttttagtggcggtagggccacttgtgattcttttctcagtcctgcacatcgtgagcagatatcaggaactgcttgacgataaccaggcccctttcttcctgtttacctgcgcaatgcgctggttggccgtgagactcgatcttatttcgattgcactcattacaacgacaggcctgatgattgtactcatgcacgggcaaatccctcccgcttatgcaggcctggccatctcttatgcagtgcagctcactggtctctttcaattcactgtccggctcgcatcggaaacagaggcaagatttacaagtgtagaaaggattaaccactatattaaaaccctgagcctcgaagcccctgcacgtataaagaacaaggccccatctcccgactggcctcaggagggcgaagttactttcgaaaatgccgagatgagataccgggagaatcttccgctggtcctgaagaaggtcagcttcacaattaaaccaaaggaaaagattggcatcgtggggagaacaggatcagggaagtcctctttgggaatggcactttttagattggtagaactgagcggtggatgtattaagatagatggcgtgaggatctctgatatcggactggctgacctcaggtcaaaactgtcaatcatcccccaggaaccagtcctctttagcggtactgttagatctaatctcgaccctttcaaccaatacaccgaagatcagatctgggacgccctggaacgcactcacatgaaggagtgcattgcacagttgccccttaagttagagagcgaggtgatggaaaacggagacaacttcagtgtcggcgagcgtcaactcctctgtatcgctcgcgcattactacgccactgtaagatcttaatcctggacgaagcaaccgccgctatggatactgagaccgatcttctaattcaggaaacaattcgggaggcctttgccgactgtacaatgttgaccattgcccatcggttgcacaccgtgctaggctcagatcgtatcatggttctcgcccagggacaagtggtggagttcgatacaccaagcgtgttgctttccaatgatagctcgcgattttacgcaatgttcgcagctgcagagaacaaggtggctgtcaagggttag

SEQ ID NO: 215419 - DNA, 4314 bp, synthetic construct
  misc_feature 1..4314: note = Description of Artificial Sequence: Synthetic coding sequence
  source 1..4314: mol_type = other DNA
atgaaggatatcgacatcggaaaagagtatatcataccttcgccgggataccggtccgtgagagaaagaacatcaacaagtgggacacatcgagatcgggaggattccaagttcaggcgtaccagaccgctcgagtgccaggatgccttagagacagcagcaagagctgaaggtctatcacttgatgcctcaatgcatagccagctgcggatactggatgaggaacaccctaaggggaaataccatcatgggctctcggccctcaaacctatccggaccaccagcaagcaccagcatcccgtggataacgccggactcttctcctgcatgactttcagctggctcagctccctggcacgcgtcgcacacaagaagggagaactgtccatggaggacgtgtggtcacttagcaagcacgagtcgagcgacgttaactgcaggcggctcgagcgcttgtggcaggaagagttgaatgaagttggacctgatgctgcctccctgaggcgtgtggtgtggattttctgccgcacccgactgattctgagtattgtatgcctgatgatcacccagctggcaggatttagcggccctgccttcatggtcaagcacctgcttgagtacacccaggccaccgaatctaacctccagtacagcctgctccttgttctggggctgttgttgaccgaaattgtgaggagttggagcctggccctgacatgggcccttaattataggaccggcgtgcggctccgaggtgcaattctgactatggcatttaagaagatcctgaagcttaagaatatcaaggagaaatctctgggcgaattgatcaacatatgtagcaacgatggtcagcggatgttcgaggcagctgccgtgggttcactgctagctggagggccagtagtggccatacttggcatgatctacaatgtgatcattctagggccaaccggctttctcggaagcgctgtgttcattttgttttacccggctatgatgtttgcttcccggctgactgcgtatttcagaaggaaatgtgtcgccgcaacggacgaacgtgtgcagaagatgaacgaggtgttaacctatatcaagttcatcaaaatgtacgcatgggtgaaggctttctcccagagcgtgcaaaagattcgggaagaggagcgacgtattcttgagaaggcagggtacttccagagcataacagtgggggtagcacccatcgtggttgtcatcgctagcgtagtaactttttccgtccacatgaccctgggattcgacctcaccgccgcacaggccttcaccgtggtgactgtatttaatagcatgacctttgcccttaaggtgacacccttcagcgtgaaaagcctgagtgaagcatctgtcgccgtggatagatttaagtccctattccttatggaggaggtacacatgatcaaaaacaagcccgcaagcccgcacatcaaaattgagatgaagaatgcaacattggcctgggatagcagtcacagttccatacagaatagcccaaagctcactcctaagatgaagaaggataaacgtgcctcacggggtaagaaagagaaggtccgtcaactccaacggaccgagcatcaagcagtcttggcggagcagaagggccatctcctgctcgattccgacgaacggccaagtccagaggaggaggagggcaagcacattcatctcggacaccttagactgcagcggacactgcattctattgacctcgaaatccaggaggggaagcttgtcggtatctgtggatccgttgggtcagggaaaacaagcctgatttccgctattctgggacaaatgacgctactggagggctcaatcgctatttctggaactttcgcctacgtcgctcagcaggcctggattctgaatgcaacacttcgggataatatactgtttggaaaggaatacgacgaagagcggtacaacagtgtattgaactcctgctgcctaagacccgatctcgcgattctccccagttcagacctcacagaaatcggagagaggggggcaaacttgtccgggggtcagaggcagcgcatttctcttgctcgcgcactttactcagacaggagtatctatatattggacgatccgctatcagctttggacgcgcatgtggggaaccacatctttaattccgccatcagaaagcacctgaagtcaaagacagtccttttcgtgactcaccagctgcagtacctagtggactgcgacgaggtgatctttatgaaggaggggtgtatcacggaaagaggaacacacgaagagctcatgaatctcaacggggattacgcaaccatcttcaacaatctgctactcggggagacacccccagttgagatcaattcaaagaaggagacaagcggatcacagaaaaagtcccaggacaaggggcctaagacgggatctgtcaagaaggagaaggctgtgaagcccgaggagggacagctcgttcagctggaagagaagggacagggaagcgtgccttggtcagtatatggcgtgtacattcaggccgcaggtggacctctcgcttttctggtgatcatggcgctgttcatgcttaacgtcggctctacggcctttagcacctggtggctgtcctattggatcaaacaggggtcagggaataccaccgtaaccaggggcaacgagacatccgttagcgacagtatgaaggacaacccccacatgcagtactatgcttcaatatacgcgctgagtatggctgttatgctgattctcaaagccatcagaggcgtggttttcgtgaagggcacattacgcgcatcgtcaaggctccacgacgaactgttcagacgaatcctgaggtcgcccatgaaattctttgacacaacgcccactgggagaatcctgaaccggttctcaaaggatatggatgaagtcgacgtgcgactcccattccaggcagaaatgttcattcagaacgttatcttggtattcttctgcgtgggcatgatcgcaggagtgtttccatggttcttagtagccgtgggcccattggtgattctcttttccgttctgcacattgtctcacgcgtgttgattcgcgagctgaaaaggctcgacaacattactcagagcccctttctgtctcacataacctcgtcaatccaagggctagccaccatccatgcatacaacaaaggacaagaattcctgcatagataccaggagctcttggacgacaatcaggcgccattttttctcttcacctgtgcgatgcggtggctcgctgtgcggctggatctgatctcaatagcactcattactacaacgggcttgatgatcgtgctcatgcacggtcagatacctccagcctatgcgggattggctatctcctacgccgtgcagctgaccggactgtttcagttcacagtgcggctcgcctctgagaccgaagcaaggtttacatccgttgagcgcataaaccattacatcaagaccttgtcactcgaggcgcctgcccgaattaagaacaaggcaccctcccctgattggccccaggaaggcgaagtgacattcgagaacgccgaaatgcgctatcgggagaatttgcccctcgtccttaaaaaagtgagcttcaccatcaaaccaaaagagaaaatcggcatagttggccgaaccggatccggtaagagttccctgggcatggccttgttccggcttgtggagctgtccggcggatgtattaaaatcgacggcgtgcgcatctccgacatcggtctggctgacctcaggtcgaagctcagtatcattccacaagaaccagttctattctccggcacagttaggagcaatctggaccccttcaatcaatacaccgaggatcaaatctgggatgccctcgaacgtacccacatgaaggaatgtatcgcacaattacctctaaagctcgaatctgaggttatggaaaacggcgacaatttttctgtcggcgagcgacagctcctttgtattgcccgagccttgcttaggcattgtaaaattttaattctggatgaggcaaccgcggcaatggacacagagaccgacctgctcatccaagaaacgatccgcgaagctttcgccgactgtacaatgttgacaatcgctcatagactacatactgtgctagggtcagatcgtattatggtcctcgcccagggccaagtggtggagtttgataccccatctgtgctgctctcaaacgatagtagcaggttctacgctatgtttgccgcagccgagaataaagtcgcggtcaagggctag

SEQ ID NO: 215420 - DNA, 627 bp, synthetic construct
  misc_feature 1..627: note = Description of Artificial Sequence: Synthetic coding sequence
  source 1..627: mol_type = other DNA
atgaaggatatagatatagggaaggaatacattatcccctcccccggttacagaagcgtgcgcgagcgtaccagcacatctggcactcacagggatcgggaagactctaaattccgcaggactcggcctctggaatgccaagatgcgctggagacagccgctagggcggaggggctgtccctggatgccagtatgcattcccaactgcgcattctggacgaagaacaccctaaagggaagtatcaccacggtttgagtgcccttaagcccatcagaacgacaagcaagcatcaacatcctgtggacaacgctggactcttttcctgcatgacattcagttggctgagcagtttggccagagtggcacacaagaagggcgaactcagtatggaggacgtttggtcattatctaaacacgagagcagtgacgtgaactgcagaagacttgagcgcctttggcaggaggagctcaacgaagtgggacccgacgcagcatcactccgccgagtggtatggatattctgcagaactcggttaatcctttccatcgtgtgcttgatgatcacacaactggcaggcttttcaggacccaactttcaggacggatgcatactgcgaagcgagtag

SEQ ID NO: 215421 - DNA, 2511 bp, synthetic construct
  misc_feature 1..2511: note = Description of Artificial Sequence: Synthetic coding sequence
  source 1..2511: mol_type = other DNA
atgcacagccagctgagaatacttgacgaggaacatcctaaaggcaaatatcatcacggattatctgccctgaaacccatccgcaccacaagtaaacaccagcaccccgtggataatgctggactcttcagctgcatgacctttagctggctgagctcactggcccgagtggcacacaagaaaggagagttgagtatggaggatgtatggtcccttagcaaacacgagagtagtgatgtcaactgtaggaggctcgagcgactgtggcaggaagagttgaacgaggtcggacccgatgcagctagtctgcgaagggtggtctggatcttttgtagaactcgactcattctgagtattgtgtgtttaatgattacccaactggcgggattttccggacctgcttttatggtgaagcatctcctggaatatacccaggccactgagtcgaacctgcagtattcccttctcctcgttcttgggctgttactcacagagatcgtcaggtcctggagtctagccctgacatgggctcttaattatcggaccggcgttagactgcgcggagccattctaaccatggctttcaaaaagatcctcaagctcaagaatattaaggagaaatcactcggagagctgatcaacatttgtagtaacgatggccaacgcatgttcgaagcagctgcagtgggcagccttctggccggaggacccgtggtcgcaattctggggatgatctacaatgtcatcatcctgggtcctaccggctttctcggctcagcagtgttcatcctattttatcccgcaatgatgtttgctagcagactgacagcctacttcaggcggaagtgcgttgccgctacagatgagcgggtgcagaagatgaacgaggttctgacatatatcaagttcattaaaatgtacgcctgggtcaaagctttttcgcagtccgtacagaaaatccgcgaggaagagagaaggatcctggaaaaagcagggtacttccaatccattacagtcggcgtagcacccatcgtagtcgtgatcgcctccgtcgtgacttttagtgtacatatgacgttgggttttgatttaacagcggctcaggctttcactgtggtgacggtattcaattcaatgaccttcgcattaaaggttaccccgttttcagtgaaatctttatccgaggcctcagtggcggtggacagatttaagtccttgttcctaatggaggaggtgcacatgattaaaaacaagccggcaagccctcacattaaaatagagatgaagaacgctaccttggcctgggacagcagtcactctagcatccagaatagtcctaagctgacgccaaagatgaagaaggacaaacgggcttcccgcggtaaaaaggagaaggttagacagctgcaaaggacagagcatcaagccgtgttggctgagcagaaaggacatctgttgttagattccgacgagcgcccaagccctgaagaagaagaggggaagcatattcatctgggccaccttaggttgcagagaaccctccactcaattgacttggaaatccaggaaggaaaactggtggggatttgcggaagcgttggttctggcaagacatctttgatcagtgcaatcctgggacagatgaccctcctggagggaagtatcgccatttcagggacttttgcttacgtcgcccagcaggcgtggattctcaatgctacacttagagacaatatcttgtttggaaaagagtatgacgaggagcgctataactctgttctgaacagttgttgcctgcgccctgacttagcaatactgccttccagtgacctgaccgaaataggcgagaggggggcaaatctgtccggcggacaacggcagcgcatatctctggcacgggctctgtattcagatcgatccatctatattctggatgaccctctgtctgcactggatgcccatgtgggtaaccatatttttaatagtgccatcaggaagcacttgaagtcaaagacagtgttattcgtgactcaccagttgcagtacctggtggactgcgacgaggtaatctttatgaaggaagggtgcattaccgagagaggtactcacgaagaactcatgaacctgaatggggattatgcaaccattttcaacaatctgttgcttggcgaaactcctccagtagagataaacagcaagaaggagacaagtgggtcacaaaaaaagagtcaagacaagggcccaaaaactggctccgtaaagaaagagaaggctgtaaagcctgaagaaggccagttggtccagctggaggaaaaggggcagggttcagtaccatggtccgtatacggccatcccggttgctggggaccgctcggaatccctggatactacgggcctttccacgccgagtgccgacagcaccgactccagcatctggtggtggagcttctggaccaagcacgcaaacgcgagcatcattgcgattctagggaacgcgatctgggtgagtag

SEQ ID NO: 215422 - DNA, 678 bp, synthetic construct
  misc_feature 1..678: note = Description of Artificial Sequence: Synthetic coding sequence
  source 1..678: mol_type = other DNA
atgaaagatatcgacatcggaaaggaatacataatccctagcccaggctatcggtccgtgagggaaagaacaagtacttctggcacccaccgcgatcgagaagactccaagtttcgcaggacacggcctctggaatgtcaggacgcccttgaaacggcagctcgggcagaagggctgagcctcgacgcctcaatgcattcccagctgcgcatactcgacgaggaacatccaaaggggaaatatcaccacggtctgtctgcactcaaaccaataaggactacatcaaaacaccagcatcccgtggataatgccggattattttcatgtatgacctttagctggctgtctagccttgcccgtgttgcgcacaaaaagggagaactgagcatggaggacgtctggtccctgtccaagcatgagtcctcggatgtcaattgtcgcaggcttgaacgtctgtggcaagaggagctgaacgaggttggtccagatgccgcttccttacgcagggtggtgtggattttttgtaggactcggctcattctttccattgtgtgcctgatgattacccagctggctgggttcagtggcccacccagtttcggggactgtagcatctctgccgaagtgtgcggaaatcgcctccactgcaccgccatcctgttgtcctgtttcacctag

SEQ ID NO: 215423 - DNA, 696 bp, synthetic construct
  misc_feature 1..696: note = Description of Artificial Sequence: Synthetic coding sequence
  source 1..696: mol_type = other DNA
atgaaggacatcgacatcggcaaagagtacatcataccatcccctgggtacagaagtgtgcgggagaggaccagtaccagcggcacccaccgggatagggaagactctaagttccgcaggacacgtcctctggagtgccaagatgcactagagactgcggctagagccgaagggctgagcttagacgcttccatgcacagccaattacgcattttagatgaggaacatcctaaaggcaaatatcaccacggtctgtccgctttgaaaccaataagaaccacctccaagcaccagcaccccgttgataacgctggcctgtttagctgtatgacatttagctggctgagctcactcgcaagggtcgctcacaagaagggcgagttatctatggaagatgtttggtctctcagtaagcatgaaagttctgatgtgaattgccgcaggttggagcgcttgtggcaggaggaactgaatgaggtggggcctgatgcagcaagtctgcgcagagtcgtctggatattttgtaggactagactgatcctgtccatcgtgtgcctcatgattacccagctggctggcttctcagggccagtgagtagcaatcaccccttccgtcagtcacctggcgctcgaccccgtccagccttgacactgttgttttgctgcaggggctgcgcccagctatgggccaggtag

SEQ ID NO: 215424 - DNA, 444 bp, synthetic construct
  misc_feature 1..444: note = Description of Artificial Sequence: Synthetic coding sequence
  source 1..444: mol_type = other DNA
atgaaagacatcgacatcgggaaagaatacatcataccttccccaggctacaggtctgtgcgcgagaggaccagcacatctggaactcaccgcgacagagaagactcaaaattcaggcgcacacggccacttgagtgtcaagatgctctcgaaaccgcagcgagggccgagggtttaagcctggacgcaagcatgcattctcaacttcgaattctagatgaggaacatcctaagggcaagtaccaccatggcctctccgccctgaagcctatcaggaccaccagcaagcatcagcacccagttgacaatgctggcctattttcgtgcatgactttttcctggctttcttctctcgccagagtggcccataagaaaggggaattaagtatggaggacgtctggagtctgagtaagcacgagagctctgatgtcaactgccgttag

SEQ ID NO: 215425 - DNA, 639 bp, synthetic construct
  misc_feature 1..639: note = Description of Artificial Sequence: Synthetic coding sequence
  source 1..639: mol_type = other DNA
atgaaagatatcgacatcggtaaggaatatataataccctcccccggatataggtcagtgagggaaagaacgagcacctccggcacccatagagatagggaggatagcaagtttcggaggacacgaccattagaatgtcaagacgctctcgaaacagctgcacgagcggagggtctctctctggatgctagtatgcattcccagctgagaatcttggatgaagaacaccctaagggaaaataccatcacggtctaagcgcactgaaacccattcgaacaacttcaaagcatcagcatcccgtggacaatgctggtcttttttcatgcatgacgttcagctggctatccagcctggctcgtgtggcacacaagaagggagagctgtccatggaggacgtttggagcctatctaagcacgagagctctgacgtgaattgcagacgtttggaacgcctgtggcaggaggagctaaatgaggtgggaccagacgctgcttcactccgccgagtcgtctggatcttctgcagaacaaggctcatcttaagcatagtctgcctaatgatcacgcagctggccggattctctggcccactagcctggtgctgtcaggatttggacctcggcggtgtgtctctgtag

SEQ ID NO: 215426 - DNA, 1530 bp, synthetic construct
  misc_feature 1..1530: note = Description of Artificial Sequence: Synthetic coding sequence
  source 1..1530: mol_type = other DNA
atgcagtcctggagcagggtgtactgctcgttggccaagaggggccacttcaacagaatttctcatggcctccagggcttgagtgccgtgcctttacggacgtacgccgatcaacccattgatgccgacgtaactgtgattggctccgggcctggtgggtacgtcgctgccatcaaggctgctcagctaggttttaagaccgtgtgcatcgagaagaacgagacccttggcggaacatgcctgaatgttggctgcatcccctctaaagccctgctgaacaactcacactattatcacatggcccatggcaaagattttgccagtcgtggcatcgagatgagtgaggtaagactcaacctggataaaatgatggagcaaaaatctacagccgtgaaggccctgacaggaggaatcgcacacttgttcaaacagaacaaagtggttcatgtgaacggttatggaaaaattacagggaagaatcaggtgactgctaccaaggcggacgggggtacccaagttatagatacaaagaatatcctgatcgccacagggagcgaagtcacaccttttcccggtattacaattgacgaagataccatagtcagctccactggcgcacttagcctgaaaaaagttcctgagaagatggtggtgataggagccggagtgattggcgtggaactggggtctgtttggcaacgcctgggtgccgacgtcaccgccgtggagttcctcggtcatgtcgggggagtgggtatcgacatggaaatctctaagaacttccagaggatcctgcagaagcagggctttaaatttaagctaaacaccaaagttacgggtgcaaccaagaaatctgacggaaaaattgatgtaagtattgaggccgcttctggaggcaaagccgaagttataacctgtgacgtgctactcgtttgcatcggtcgacgcccttttacgaagaatctggggctcgaggagttaggcattgaacttgatcctcggggtcgcattccagtaaacacgaggttccaaacaaagataccgaacatttatgcaataggagatgtggtggctggaccaatgcttgcccacaaggccgaggacgagggcatcatttgtgtcgagggaatggcagggggtgctgtccacatcgactacaactgcgtccctagcgtgatctacacgcacccagaggtcgcttgggttggcaagtctgaagaacaactgaaggaggaaggcattgagtacaaggtcggtaagttcccttttgccgcaaattctcgagccaaaaccaacgctgacactgacgggatggttaaaatcttgggccagaagtcgacagatagggtcctcggcgctcacatcctgggtccaggagccggagagatggtgaatgaggctgctctggctttagaatatggagcatcatgtgaggatatcgccagggtgtgccatgctcacccaacactgagcgaggctttccgggaggcgaatctggctgcatctttcgggaaatccatcaatttctag

SEQ ID NO: 215427 - DNA, 4512 bp, synthetic construct
  misc_feature 1..4512: note = Description of Artificial Sequence: Synthetic coding sequence
  source 1..4512: mol_type = other DNA
atggccgctcccgctgagccctgcgctggccagggagtctggaaccagacagaaccggaacccgctgccacatccttgctgtctctatgctttctgcgcacagctggcgtgtgggttccaccaatgtacctttgggtactcggcccaatctacctgctgtttattcatcatcatgggcgaggctacctgcgcatgagtcccctgttcaaggccaaaatggttctgggattcgctctgatcgtgctgtgtacctcttcggtggccgtagccctatggaaaattcaacagggaaccccagaggcccctgaattcctcatacaccctacagtgtggctgacaaccatgagctttgcagtttttctgatccatactgaacgtaaaaagggggtacagtccagcggggtgctctttgggtattggctgctgtgttttgtcctgcctgctacaaatgccgcacaacaagcaagtggagcaggattccagtctgatcccgtcagacatctctctacctacctatgcctgagtcttgtcgtagcacagttcgtgctcagttgcctggccgatcagccacctttcttccccgaagacccccaacaaagtaacccatgtccggaaacaggggcagcatttccgtcgaaggccactttctggtgggtgagtgggttggtctggcgcggttacaggcggcctctgagacccaaggacctgtggagtttggggcgagagaatagcagtgaagagctggtgagtcgcctcgagaaagaatggatgcggaatcgcagtgccgctcgcagacacaacaaggccatcgcattcaagcggaaggggggatctgggatgaaagcccctgaaacggaaccttttctgcgacaggaagggagccagtggaggcccctcctaaaggccatctggcaagtgtttcactctacctttcttctcggaactctgagcctcatcatcagcgatgtctttcggttcacggtgcccaaactcctctcactctttctcgaatttatcggcgatcctaaacccccagcatggaagggatacttattggctgtactaatgttcctgtctgcttgcctgcagaccctattcgagcagcagaacatgtatcgactgaaggttctgcagatgcggctccgaagcgccataaccggattggtgtaccgcaaagtcttagccctctcttccggctcacgaaaagcctcagccgtaggagatgtggtcaatctggtcagtgtggacgtgcagaggctgaccgagagcgtgctgtacctgaacggactgtggctgccactggtctggatagtcgtgtgcttcgtgtacttatggcagctgcttgggccatctgcactgacagctatcgccgtgttcctgtccctcctcccgctgaatttctttatcagtaagaagcggaaccaccatcaagaggaacagatgcggcaaaaagactccagagcgcgtcttaccagttctatcctgcgcaatagtaagaccatcaagttccatggctgggagggcgctttcctggatcgggtcttaggcatcagaggacaggagctgggagcgctgcgcacctcaggtctgctcttttctgtcagtctggtaagcttccaggtgagcacattccttgtggccctggtcgtgttcgcggttcacaccttagtggctgaaaatgccatgaatgccgagaaggctttcgtgacgctgaccgtgctcaatatattgaacaaggcccaagcctttcttcctttctctattcactctcttgttcaggccagagtgtcattcgataggctggttacattcctctgcttggaggaagtcgatccaggtgtggtggattcatcctcaagtggcagtgctgccggaaaggattgcattaccatccacagcgccaccttcgcgtggtctcaggagtctcccccttgcctgcacagaataaacttaactgttccgcagggctgcctgctggctgtggtggggcctgtgggagcagggaagagttccctgctatctgccctgctcggcgagctgtccaaagtcgaaggcttcgttagcatagaaggggcagtggcttacgtgccacaggaagcctgggtgcagaacaccagtgtggtggagaacgtttgttttggtcaggagctggatcccccatggcttgagcgcgtgcttgaggcatgcgctctccagccagacgtggattccttccctgagggaattcacacttcgatcggtgagcaggggatgaatctgagcggcggtcaaaagcaaagattgtccctggctcgggcagtgtacagaaaggctgcggtgtacctactcgacgaccccctggcagctcttgacgctcacgttggtcaacatgtttttaaccaggttattggacccggtgggctgctgcaaggcacgacgcggattctggtcacacatgcattgcatatcttaccccaggccgactggattatcgtcctggccaacggagcgattgctgagatggggtcctaccaggaattactccaacgaaagggagcgctaatgtgcctgctggaccaggcccgtcaacctggggatcggggagaaggcgaaaccgaaccaggcactagtacaaaagatccccgaggcacatctgcaggcagaaggcctgagctgcgaagagagagatcaatcaaatcggtgcccgagaaggaccggacaacgtcagaggctcagaccgaggtgccattagacgaccctgatagggccggttggcctgctggaaaggactcaatccagtacggaagggtgaaagcaacagtgcatcttgcttatcttcgcgcagtggggacgccattatgtctttatgccctcttcctatttttatgtcagcaagtggcgtctttctgcagaggctactggctctctttatgggctgatgatccagcagtgggtggccagcagacccaggcagccttgagggggggaatatttgggctcttgggctgtctgcaggcaattggcttatttgcctcgatggctgctgtgctcctgggcggagccagggcttctcggttattgtttcagcgattgctttgggacgtggttcgctcccctataagttttttcgagaggaccccaattggccacttactgaatagattctcgaaggaaacagacacagttgacgttgatatccccgataaactgagatcccttctgatgtatgcctttggactgcttgaggtctcactcgtggtagctgtcgctacgccactggccaccgtcgcaattcttccactgtttctcctatatgctggcttccagtccctctatgtagtgtcgagctgtcagcttcgcagactggagtcagccagctatagctccgtctgcagccacatggcggaaaccttccaggggagcacagtcgttagggctttccgaacccaggccccatttgtggcccagaacaacgccagggtagatgaatctcagcggatatctttcccccgactggtggcggatcgctggctcgccgcaaatgttgaacttttgggaaacggattggtgtttgccgcagctacctgtgcagtgctaagcaaggcgcacctgagtgcaggactcgtcgggttctctgttagtgccgctctccaggtgactcagacccttcagtgggtggtgaggaattggacagaccttgaaaactccatcgtgtcagtagaacgaatgcaagactacgcttggaccccaaaggaggctccctggcgcctgccgacgtgcgcagcacagcctccctggccccagggaggccaaatagagttccgggactttgggttgagatatcgcccagagctgccgctggctgtgcagggggtgtctttcaagatccacgctggggagaaagttggcatcgtcgggagaacaggtgcaggtaagagctctcttgccagtggactgctacgattacaggaggctgccgaggggggtatttggattgacggggtgccaattgcacacgtgggccttcacactctcaggagccggatttcaataattccacaggaccctatcctcttccctggctcacttagaatgaacctcgatctgctacaggagcacagcgatgaggccatttgggctgctttggaaacagtgcagctgaaagcgctggttgcgtctctgcctgggcagctgcagtataaatgtgccgataggggagaagacttgagcgtaggccagaaacagctgctgtgcctggcaagggccctgttaaggaagacacagatcttaattctggacgaagccactgctgctgtagatccgggaactgaactccagatgcaggccatgttggggagctggtttgcccagtgcacggtcctgttgattgcacacagactcagaagtgtaatggattgtgccagggtgctggtaatggacaaggggcaggtcgccgaatctggaagtccagcacagcttctcgcacagaagggactattttatcgattggcacaagaatctggcctggtctag

SEQ ID NO: 215428 - DNA, 2616 bp, synthetic construct
  misc_feature 1..2616: note = Description of Artificial Sequence: Synthetic coding sequence
  source 1..2616: mol_type = other DNA
atggctgcccctgcagaaccttgcgctggacagggggtgtggaaccagactgagccagagcctgctgcaacctccctactgtctctgtgtttcctgaggaccgctggcgtttgggtgccgccaatgtatctatgggtcctggggcctatatatttactgtttatccatcatcacgggcgtgggtatctccgcatgagcccactcttcaaggcaaaaatggtactggggttcgcgctgatagtgctgtgtacaagcagcgtcgccgtggccctgtggaagattcagcagggaacccccgaggcccctgagtttttaatccatcctaccgtatggctgaccacgatgtcctttgcggtctttctaatccacaccgagaggaagaagggggtccagtcctcaggggtgctgtttgggtactggctgctgtgcttcgtgctcccggcaaccaatgctgcccagcaggcctccggagctggtttccagtccgacccagtgagacacctctccacctacctctgtctatccttagtagttgctcagttcgtccttagctgcctggctgaccagcccccattctttcctgaagaccctcaacagtcgaatccctgccccgaaactggcgctgcttttccttcaaaagccaccttttggtgggtgagcgggctggtatggcgagggtatcgccgtccgctgcgcccaaaagatttgtggtcactgggaagagagaattcctcagaggaactggtctcaagacttgagaaagagtggatgcgaaacaggagtgccgcacgccgtcacaataaggctatagcctttaaaaggaaggggggttccggaatgaaagccccagagacagagccctttttacggcaggagggaagtcagtggcgtccactcctgaaggccatctggcaggtcttccattccacattccttctgggtactctaagtctcatcatttctgacgtgtttagattcactgtacccaagttgctctctctcttcctggagtttatcggagatcccaaaccccctgcatggaaggggtacctgctggccgtgctcatgttcttgtccgcttgcttacagacattgtttgaacagcagaacatgtatcggctgaaggtgctacagatgagacttaggtccgccatcacaggcctggtttaccgcaaggtgctcgcactgagcagcggaagcagaaaggcttcggccgtcggagatgttgtgaacctggtctccgtggacgtccaaagattgactgagtccgtcctctatctgaatggcctctggctcccactcgtgtggatcgtcgtgtgttttgtctacctctggcagttattaggcccatctgcattgaccgcaatagcggtttttctctcactgcttccactgaatttcttcatatcaaagaagcggaatcaccaccaggaggagcaaatgcggcagaaggacagtcgcgctagactcacaagttcaattctcaggaattcaaaaacaataaagttccacgggtgggaaggcgcattccttgatcgtgtgctggggattcgcggacaagagcttggcgctttaaggacatccggtctgctcttttccgtttcacttgtcagcttccaagtctcgacttttctcgtggctcttgtggtcttcgctgttcacacgctggtagcagagaacgccatgaacgccgagaaggcattcgtgactctcactgtgctcaatatcttaaataaagcacaggcttttttgccgttctctattcacagtctcgtacaggctcgcgtgagcttcgatcgcctagtcaccttcctctgcctcgaagaggtggatccgggtgtagtggattcttctagcagtggctctgccgctggtaaggactgcataaccattcacagtgccacctttgcctggagtcaggagtcacccccttgtcttcacagaatcaatctgaccgtgccccagggttgtttgttagccgtggtcggccctgtgggcgctgggaagtcgtctctcctttccgcactgcttggggagctctcaaaggttgagggctttgtctcgattgagggggctgtggcttacgtgccccaggaagcatgggtccaaaacacgtctgtggtggaaaatgtgtgcttcggacaggagcttgacccaccctggctcgaacgggtgctcgaggcgtgcgctctgcagcccgacgtggatagctttcctgagggtatccacacctccattggcgaacagggcatgaatctgtcagggggtcagaagcaacggctgtccctggccagagcagtctatcgaaaagcggcagtgtatctcctcgacgatccccttgccgcacttgatgcccatgtgggacagcacgtgttcaatcaagtgataggccctggcggactgttgcagggcacaaagcagaacctgggccctgctccacggactcccgaggcaccactgcaggccggagggccttcattggacgcacgcggaccgtcttctcaatcacttagacggaccgtccccttgcagaaacccaggcaacggtttctgtggatgacgctcaccgggcaggacgggcagcaggagcgaacggcttcaaataccgccggatag

SEQ ID NO: 215429 - DNA, 2019 bp, synthetic construct
  misc_feature 1..2019: note = Description of Artificial Sequence: Synthetic coding sequence
  source 1..2019: mol_type = other DNA
atggctgccccagcagaaccatgtgcagggcagggggtatggaaccagacggaacctgagcctgccgctacctctctgttatcactctgtttcctccggacagccggtgtctgggtcccacccatgtacctgtgggtactggggcctatctacttgctgttcatccatcatcatggacgcggatacctgcgaatgtctccgctctttaaggccaagatggtcgcggcaattccaggaagcctcgagcccggaaacgttttaggatttgccctgatagtgttgtgcacctcgtcagtggccgtggccctctggaagatccagcaaggaaccccagaggctcccgagtttctgatccacccgactgtttggctgactacaatgagtttcgcagtcttcctcattcatacagagcgcaagaaaggagttcagtcctccggggtgctctttgggtactggctgttgtgtttcgtgcttccagcaacaaatgccgcacagcaggccagcggagcaggtttccagtccgatccagttagacatttgtctacgtatctctgcctatcattggtggtagcccaattcgtgctgagctgcctggccgaccagccccctttcttcccggaggacccacagcagtctaacccctgccccgaaaccggagccgctttccccagtaaggcgaccttttggtgggtgtccggactggtttggagggggtataggagacccctccggcctaaagacttatggtccctcggtcgggaaaactcatccgaagagcttgtgagtagacttgagaaagagtggatgcgcaatcggagtgctgctcgccgacacaacaaggccattgcatttaaacgcaagggagggagcggaatgaaagcccctgagacagaaccattcctgcgccaagaggggagccagtggcgaccactgttgaaggcgatttggcaagtgttccactcaacctttctgttgggcactctctcccttatcatctcagatgtgtttcgcttcacagtgcccaagctcttgtctttgtttttggaatttatcggcgaccctaagccccctgcttggaagggttacctgctggctgtgttgatgttcttaagtgcctgtctccagacgctgtttgagcagcagaatatgtaccgacttaaagtgttgcaaatgcggttaaggagtgccatcaccgggttggtgtatcgaaaagtgctggctctgtccagtggctctaggaaggcttccgccgtgggggatgtagtgaatctcgtgtccgtggatgtgcagcgattaactgagagcgttctgtatcttaatggtctctggttgcctctggtgtggattgtggtttgctttgtgtatctgtggcagctgttaggacctagcgcgctgacggctatagctgtcttcctctcactgctgccactgaatttttttatctctaaaaagcggaaccaccatcaggaggagcagatgcgccagaaggattccagggccagactcacatcctccatactccgtaactctaaaaccattaaatttcacggatgggagggcgcatttctggaccgtgtgttagggatccggggacaagaactgggagcactgaggacctcgggcctgctgttttcagtaagtctcgtttcatttcaggtgagcactttcttagttgcgctggttgtcttcgccgtgcatactctggttgcagagaacgccatgaatgccgaaaaagcatttgttactcttaccgtgctgaacatcctcaataaggctcaggcatttttgcctttttccatccacagtctggttcaggccagggtatcttttgataggctggttaccttcctgtgtttagaagaagtcgatcctggggtagtcgactcttccagctctggaagtgccgcaggcaaggactgtataactattcactcagctacttttgcttggagtcaagagtcccccccatgcctgcacagagtgctcttgtaccacgcaggctggagtgccatggcctag

SEQ ID NO: 215430 - DNA, 4650 bp, synthetic construct
  misc_feature 1..4650: note = Description of Artificial Sequence: Synthetic coding sequence
  source 1..4650: mol_type = other DNA
atgtcgctgagtttttgcggcaataacatctcctcttacaacattaatgatggtgtgttacagaactcatgcttcgtcgacgcgttgaacctagttcctcacgtcttcctattatttattacatttcccattctgttcatcggatggggttcccaatctagtaaagttcagattcaccataacacatggctgcattttcccggacataacctccgctggattctcactttcgcccttcttttcgtccatgtgtgtgagatagctgagggcatcgtctctgattccaggcgggagtctcgccacctccacctgttcatgcccgctgtaatggggttcgtcgccactactacctcgatcgtttattaccacaatattgagacatctaacttcccgaagctgctccttgcgttgtttctttattgggtcatggctttcataactaaaaccatcaagctggtgaagtattgtcagagcggattggatatcagtaatctccgcttttgtatcaccgggatgatggtgattttaaatggtcttctgatggcagtcgagattaatgtgattcgcgtgcggaggtacgtgttttttatgaacccacagaaagttaagccacctgaagaccttcaggatttaggcgtgcggtttctgcaacccttcgttaacttgctgagtaaggccacctactggtggatgaacacactcatcatctccgcccacaagaagccgatcgacctgaaagcaataggcaagctgcctatagcgatgagggcagtgactaattacgtgtgtcttaaggacgcatatgaggagcagaaaaagaaggttgccgaccacccaaaccgcactccttcaatctggctggcaatgtacagggccttcggtcgccctatactgctttcgagcacgtttcggtacctggcagacttattaggattcgccggtccactttgcattagtgggatagtgcagagggtgaatgagacccagaatggtacaaataacaccacaggtatcagcgagacgctatcttcaaaagaattccttgaaaatgcatacgtcctcgctgtcctgctattcctcgcactgattctgcagcgaacatttctgcaggcatcttactacgtgacaattgaaacaggcatcaatcttcgtggcgcacttttggccatgatttataacaagatactccgcctcagtacatctaacctcagcatgggagagatgacactcggacagatcaacaacctggtggctatagaaaccaaccaactgatgtggttcttattcctatgcccaaacctctgggcaatgccagtgcagattatcatgggtgtcatcctgttatataatttgctgggtagcagcgccctggtgggggcagctgtcattgtgcttttggctccaattcagtacttcatcgccaccaagctcgccgaggcgcagaaatcaactctggattacagcacagagcgactcaaaaagacaaacgaaattttaaagggtataaagttgctgaaactctatgcctgggagcacatcttctgcaagtccgtcgaagagacaaggatgaaagagctgtcctctctcaagaccttcgcactctatacttccctgtccatcttcatgaatgccgctatcccaatcgcagctgtgctcgccacttttgtgacgcacgcgtacgcctccggaaataacctgaagcccgcagaggcctttgcctcattgagcctgtttcacattctcgtaacccctctgtttctcctgagtacagtggttagatttgctgtcaaagctattatttccgtacagaagttaaacgagttcctgctctccgatgagatcggcgacgacagttggagaactggagaaagctcactgcctttcgagtcctgcaagaaacacacaggcgtgcagccgaagaccattaatagaaagcaacctggccgttatcacttggatagctacgagcagtctactcgccgtttgcgcccagccgagacagaagacattgctatcaaggtgactaatggctatttctcatggggcagcggacttgcaactctgagcaacatcgatatacggatacccacaggtcagctgaccatgattgtcggtcaggtgggttgcggaaaatcgtctctgttattagcgatcctcggcgaaatgcaaaccctggaggggaaggtgcactggagcaacgtcaacgagtcagaaccttcattcgaagccacccgctccagaaatcgatacagtgttgcttatgcagcccagaaaccttggctcttaaacgctaccgtggaggagaatatcacatttgggtccccatttaataagcaaaggtataaagccgttacagatgcatgtagtttgcagcctgacatcgatttgcttccatttggcgatcagaccgaaattggggagcggggaataaatctgtcgggagggcagcgacaacgcatctgtgtagccagagcgttgtaccaaaacactaacattgtatttttagatgatccttttagtgccttggacattcatctgagtgaccatttgatgcaggagggaatactaaagtttctccaggatgataagcgcacgctggtgctggtgacccacaagcttcaatacctgacacatgccgactggataatcgcgatgaaggatggcagcgtgctccgggaaggcacactgaaggacattcaaaccaaagatgttgaactgtacgaacattggaagactctgatgaacagacaagatcaggaactggaaaaagatatggaggcagaccaaaccaccctcgaacggaagaccctgcggagggccatgtattcccgggaagccaaggctcagatggaagatgaagacgaagaagaggaggaggaggaggatgaggatgataatatgtccactgtgatgcgtttacgcaccaagatgccgtggaaaacttgctggcgttacctgacgagtggcggttttttccttctgatactaatgatcttttctaagttgctcaagcattccgtcatagttgcgattgattattggctggctacctggacatcggaatatagtataaataatactggcaaggctgaccagacttactacgtggccggattttctatcttgtgcggcgcaggcattttcctgtgcctcgtgacctccctgacagtggagtggatgggactgacggctgccaagaatctgcatcacaacctgctaaataagataatcctaggtccgattaggtttttcgacaccacgcccctcggacttatcctcaacaggttcagtgcggacacaaatatcatcgaccaacatataccccctactttggagtctttgactaggagcacgcttctttgtctgagtgcgatcggcatgattagctatgctacccctgtattcctcgttgctctcctcccgttaggtgttgcattctacttcatccagaaatactttagagtagctagtaaagatctgcaggaactggacgatagtacacagctgcctctcttgtgccacttcagcgagactgctgaaggactgacaacaatccgagcctttagacacgagacaaggttcaaacaacggatgctggaactgaccgatacaaacaatattgcttacctctttctttcagccgctaaccggtggttggaagtgagaacagactatctgggggcatgcatagtgctcaccgcttctatcgcctctatttccggctccagcaacagcggtctggtgggactgggtctactgtacgctctgactatcacaaattacttgaattgggtggttcgcaatttggcagacttggaggtccagatgggtgcggtgaagaaagtgaacagttttttaaccatggagtcagagaattacgaaggcacaatggatccatctcaagtccccgaacactggccacaggagggtgagattaagatacatgacctgtgcgtgcgttacgaaaacaatctgaagcccgtcctgaaacacgtaaaggcatatatcaaacccggacagaaggtcggtatctgcggtaggaccgggtccggcaaaagtagcctttcgttggccttttttcgtatggtcgatatttttgatggaaagatagtcattgatggaatcgatatcagtaagctgccattgcacactctgcgctcgagattaagtattatactgcaggacccgatcctgttctctgggtcaataagattcaatctggatcccgagtgcaagtgcaccgatgatcgtctgtgggaggccctcgagatcgcccagctaaaaaatatggtgaagagcctgcctggcggactggacgcagtggttacagagggaggtgagaatttctctgtcgggcagaggcaattgttttgcttggcccgtgcttttgtgcggaaatcaagcatactgatcatggacgaggccacagcatcaatcgatatggctaccgaaaatatactgcaaaaggtagtgatgaccgcttttgcggatcgcacagtggttactattgctcaccgggtgcataccatcctgacagctgacttagtcattgtgatgaagcgcggtaatatccttgagtatgatacaccggagtcattgttggctcaggagaacggagtgttcgcaagtttcgttagagcggatatgtag

SEQ ID NO: 215431 - DNA, 4650 bp, synthetic construct
  misc_feature 1..4650: note = Description of Artificial Sequence: Synthetic coding sequence
  source 1..4650: mol_type = other DNA
atgagcctctccttttgcggtaataacatatcttcctataacatcaacgacggggtgctccagaactcttgcttcgtcgatgctttgaacctggttccacacgtgtttctcctgttcataacctttcccatactgtttattgggtggggatcccagagttccaaggtgcaaatccaccacaatacctggcttcactttcctggacataatctgaggtggatcctcacatttgcactgctgtttgtgcacgtttgcgagattgccgagggaattgtatccgatagccgccgagagtcaaggcacctgcatctcttcatgcctgctgtgatgggtttcgtcgctacgacgacatccatcgtgtattatcacaatatcgaaacgtccaacttccctaagctgctgctggctctctttctgtattgggtcatggcctttatcacaaagacgatcaagctagttaaatactgtcagtcggggttggacatatcaaacctgcgcttctgcatcactggcatgatggtgattctgaatggattgttgatggccgtcgagatcaacgttatccgggttcgccgatatgtgtttttcatgaatcctcaaaaggtaaaaccgccagaggatcttcaggatctcggggttagatttctgcagccttttgtaaatctcctatctaaagccacttattggtggatgaacaccctaatcattagtgctcacaagaagcccattgatctgaaagccatagggaagcttcccatagctatgcgagctgtgaccaactacgtttgcctcaaggatgcctatgaagagcagaaaaagaaagttgcagatcacccaaaccggaccccctcaatctggctggctatgtatagggcatttggccgtccgatcttgttaagtagtaccttccgttatttagcagatctgcttggtttcgccggtcccctctgcattagcggcatcgtccagcgcgtgaatgagacccagaatggcactaataatacgactggcatttcagaaactctatcttctaaggaattcctggaaaacgcttacgtactggccgtgcttctcttcttggccttaatcttgcagcgcacgtttctgcaagctagttattacgtgacgatcgagaccggcatcaacttgcgcggagccctgctagcaatgatctataataaaatactgagactgtccacctctaacttgtcgatgggagagatgaccctgggacagattaataacctggtggctatcgaaacaaatcaactgatgtggtttctgtttctctgtccaaatctgtgggccatgcccgttcagatcatcatgggagtgatattactgtacaacctcctcgggtccagcgccctggtcggtgcggctgttattgtgctcctcgcccctatacagtactttatcgccacaaaattagcagaggcacagaagtcaacacttgactacagtaccgagcggcttaaaaaaaccaatgagatcttgaaaggaattaagctgttaaagctctacgcatgggaacatatattttgcaagtccgtggaagaaacccgaatgaaagagttaagttccctgaagacctttgctttatatacctccctcagcatcttcatgaacgccgctattccgatcgccgcagtcctggccacctttgtaactcacgcctatgctagtggcaataaccttaaaccagccgaggccttcgctagtctgtccctgttccacattcttgttaccccgctctttctcctatcaactgttgtgcgcttcgccgtgaaggccattatttccgttcaaaagttgaacgagttcctattgagtgatgagattggagatgatagttggcgcactggggaaagcagccttccgttcgagagctgtaagaaacacaccggcgtgcaaccaaagacgattaaccgcaaacagcctggacggtatcatctcgacagttacgagcaaagcacaaggcgcctccggccagctgagacagaggacattgccattaaggtgacaaatggctattttagttggggctccggcctcgccaccctttctaatatagatattagaatccccactggtcagctgacgatgatcgtaggacaggtggggtgtggaaagtcctccttacttctcgcaatacttggcgagatgcaaaccttagaagggaaggtacattggagcaatgttaatgagtccgagccaagctttgaagcaacacggagcaggaatagatactcagtggcatacgcggctcagaaaccgtggcttctcaatgcaacggtggaggagaatattacctttggctccccatttaataagcagagatataaggccgtaacggatgcttgctccttacaaccagacatcgacttgcttccattcggggaccagacggagattggagagcgcggtattaaccttagtgggggacagagacagagaatctgtgtggcaagagccctttatcagaatacaaatattgtgtttctggacgaccctttttcagctctcgacatccatctctctgaccatctgatgcaggagggaatccttaagtttctccaggatgataagagaacactggttcttgtaacacataagttacaatacctcacccacgcagactggatcattgccatgaaagacgggtccgtgctgcgagaaggtactctgaaagacattcaaaccaaagacgtggaattgtacgagcattggaagacgctgatgaataggcaggaccaagagctggagaaggacatggaagccgaccagactacactagagaggaaaacacttaggcgggctatgtattcccgggaggctaaggctcaaatggaggatgaagacgaggaggaggaagaggaagaggatgaggatgataatatgtcaactgtgatgaggctgagaacaaaaatgccttggaagacttgttggcgataccttaccagtggcggttttttcctcctgattctgatgattttttccaaactgctgaagcatagtgtgatcgtggccatagattattggctggccacctggacaagtgagtactcgattaacaacactgggaaggccgaccagacgtattatgtggctggattctcaattctttgcggtgcaggtatcttcttgtgcctggtcacaagccttacagtggaatggatgggactcaccgccgctaaaaatctgcatcacaatctcttgaacaagatcattctgggccctatcaggttttttgacactactcctctcggacttatcttaaaccgcttctcagccgatacgaacatcatcgatcagcacatcccccctacactggaatcactgacgagaagcactcttctctgtctctcagctatcggaatgatttcttatgcaactcccgtgtttctcgtagccttactacctttaggcgtggccttttactttatccagaagtatttccgggtagcttcaaaggacctccaggagcttgacgactctacccagctccctctgctgtgccacttcagcgagacagccgagggactgacgaccattagagcattcaggcacgaaactcgctttaagcagcggatgctcgagctgacagatacgaacaacattgcttacttgtttctcagcgcagccaacagatggctcgaagtgcggaccgattatttaggcgcatgcatagtattgacggcctcaatcgcgagtatctctgggagttcaaattcaggtctcgtgggcttggggttactctacgccttaacgattaccaattacctgaattgggtcgtgaggaacctggccgacttggaggttcagatgggggctgtgaaaaaggtgaacagttttctcacaatggagagcgaaaattacgaggggaccatggatccaagccaggttcccgaacactggccacaggaaggagagatcaaaatacacgacttatgtgtccgatatgaaaataacctcaagccagtgctgaagcacgttaaggcctatataaaaccaggccagaaggttggaatttgtggtcggactgggagcggcaagtcctcgctgagcttggcctttttcagaatggtagacatctttgacgggaaaattgtgatcgatgggatcgatatttcaaaactgccactacatacactacggtcacgattgtctattatacttcaggatccaattttgttctcaggctcaataaggttcaacctcgatcccgaatgcaaatgcaccgacgacagactgtgggaggctctggagatcgctcagctgaagaacatggtaaagtcattgccagggggtttggacgcagttgttactgaagggggagagaatttctcggtcgggcaaagacagctcttttgtttggcgcgagcctttgttcgaaagtcctcaattttaatcatggatgaagccacggcatcaatcgacatggcgacagagaacattctgcagaaagtggtcatgaccgcgtttgccgacagaaccgtcgtcaccatcgcgcacagggtcagcagcatcatggacgccggtttagttctggtgttctcagaagggatcctcgttgagtgcgacacggtgcccaacctccttgcccataaaaacggactgttttctaccctcgttatgacgaacaagtag

SEQ ID NO: 215432 - DNA, 450 bp, synthetic construct
  misc_feature 1..450: note = Description of Artificial Sequence: Synthetic coding sequence
  source 1..450: mol_type = other DNA
atgagcttgtctttttgtgggaataatatttcaagttacaacatcaatgacggggtgttgcagaactcttgcttcgtcgatgccctcaatctcgtgccccacgtctttcttctctttatcacttttcctatcctatttattgggtggggctctcaaagctctaaggtgcaaatccatcacaacacttggctgcatttccccggacacaacctgcgttggattttaacgttcgctctgcttttcgtccacgtctgcgaaatcgccgaaggtatcgtgtccgacagccgacgcgagagtagacatcttcatttgttcatgccagccgtgatgggttttgtcgctacaaccacttccattgtgtattatcataatatcgagacctcaaatttccccaagctcttattgggattcagccatcacgagtcaaagtcttgctatcagcatagttag

SEQ ID NO: 215433 - DNA, 4542 bp, synthetic construct
  misc_feature 1..4542: note = Description of Artificial Sequence: Synthetic coding sequence
  source 1..4542: mol_type = other DNA
atgtccctgtcattctgcggcaataacataagttcttataatatcaacgatggagtgcttcagaactcctgcttcgttgacgctttaaatttggtgcctcatgtgtttttgttattcattaccttcccgattctttttattgggtgggggtcccagagctctaaagtgcagatccaccacaatacgtggctccacttccccggacacaatctcaggtggatactgacttttgccctactatttgtccacgtgtgcgaaatagctgaggggatcgtgtccgattctaggagggagtcgcgacatttacatcttttcatgccagcggtaatgggatttgtagcaactaccacctcaatcgtgtactaccataacattgaaacttctaattttcctaagctccttttggccttgttcctgtactgggtcatggcatttatcacgaagacgatcaaactcgtgaagtactgccagtccggacttgatatctctaaccttcgtttctgcataaccggcatgatggtgatcttgaacgggctgcttatggcagtggagatcaatgtcatccgtgtgcggaggtacgtcttcttcatgaacccccagaaggttaaacccccagaggacctgcaggacctcggggttcggtttttgcaaccgttcgtgaacctgctctctaaggcaacgtattggtggatgaatacactgataatttccgcacataaaaagcccatagatctgaaggcaatcggcaaactgccaatagctatgcgggctgttacgaattatgtttgccttaaggatgcctacgaagaacagaaaaagaaagttgctgatcatcctaaccggacccctagtatctggctggctatgtatcgagcctttgggaggcctatcctcttgagctccacctttagatatcttgctgatctcctgggattcgctggccctttgtgcatcagcgggatcgtacagcgggtgaatgaaacacaaaacgggaccaacaatactaccgggatcagtgaaacccttagtagcaaggagttccttgagaatgcttatgtgctggctgtactcctctttctggcattgatccttcagcggacatttctgcaggcaagttactacgtgactattgagacgggcatcaacctcagaggtgcattactggcgatgatttacaataaaatcttacgactgtctacatccaacctgagtatgggggaaatgacacttggccagatcaataatctggttgctatcgaaacgaaccagcttatgtggtttcttttcttgtgccctaacctgtgggccatgccagtgcagattatcatgggcgtaatcctcctttacaatctgctggggtcctccgctctggtgggagccgctgtgatcgtgctgctggcccctatccagtactttattgcaaccaagttggcagaagcccaaaaaagcaccctggattactccaccgaacgcctaaagaaaactaatgagatcctgaaaggaatcaagctccttaagctgtacgcttgggaacatatcttctgcaagtccgttgaggaaacacggatgaaagagctgagttccctgaaaacttttgcgctgtatacatcactcagcattttcatgaatgcggcaattcctatagccgcagtcctggctaccttcgtgacacacgcctatgcatccggcaacaatcttaagcccgcagaggccttcgcttcgctgtctttgtttcacatccttgtcactcccctgttcctcctcagtaccgtggtgcgttttgctgttaaggcgatcatatccgtgcaaaagctgaacgagtttctcttgtctgacgagatcggggacgactcctggcgaaccggagaaagcagtctcccttttgaatcctgcaaaaagcatactggtgtagtcaccaatggttacttttcttggggttcaggtctggccaccctttccaacatcgatatcaggattcccactggccagttaactatgattgtgggacaggtcggatgtggaaaaagctctctgcttcttgccatactcggggagatgcagacactggagggtaaggttcactggtccaatgtgaatgaatctgagcccagctttgaggcaacgagatctcgcaacagatatagcgtagcttacgccgctcagaagccatggcttctcaatgcgaccgtagaggaaaacattactttcggttcccccttcaataaacagcgctataaggcagtgactgatgcctgtagccttcaacctgacattgatctgttgcccttcggagaccagaccgagatcggcgaaagaggaataaatctttccggtggacaacggcagaggatctgcgtggcaagagccctctaccagaatacaaacatcgtgtttctggacgacccgttcagcgccctggatatacacttaagcgaccacctcatgcaggaggggattctgaaattccttcaggacgacaagcggaccctggtgctggtgacccacaagctgcaatacctcacccatgccgattggatcatagcaatgaaggacgggagtgtgctgcgtgaaggcaccctgaaggacatccagaccaaggacgtggaactgtatgagcattggaaaacacttatgaacaggcaggatcaggaacttgaaaaggatatggaagcagaccagacgacgctggagagaaaaacactgcggcgagctatgtactctagggaggccaaggcacagatggaggatgaggatgaggaagaggaagaagaggaggatgaagatgataacatgtcgaccgtgatgcggcttagaactaaaatgccctggaaaacctgctggcggtatctgactagtggaggattctttctgctgattttaatgattttttcgaagctgctaaagcattccgtgatcgtggctattgactactggttagcgacctggacctctgagtattcaataaacaatacaggcaaggccgaccagacctattacgtggcaggcttttctatactctgcggcgcagggatcttcctttgtctcgtcacatctctgaccgtcgagtggatgggtctgactgcagcaaaaaaccttcatcataacctgcttaataagatcatcttgggtccaattcggttttttgacacaaccccgctcgggttaattttgaatcgattttccgccgataccaatatcatcgatcagcacattcccccaaccctggagtcattaacccgatccacattgttatgtctttcagccatcggcatgatatcttatgccacgcctgtctttttggtcgcactgttgccactgggtgttgccttctacttcatccaaaagtacttccgggtcgcatctaaggacttacaagagctggacgactcgacgcagctgccacttctgtgccacttctctgaaaccgctgaagggctgacgactatccgcgcttttcggcacgagacacggtttaagcagagaatgcttgagctgacggacaccaacaacatcgcgtatttattcctgtccgccgctaataggtggctcgaagtgcgaaccgattacctgggcgcatgtatcgtactgaccgcgagcattgcatcaattagcggatcttccaattcaggtttagtcggattggggctgctgtatgcgctaaccattaccaactacctcaactgggtggtgcggaatctggccgacctggaggtacagatgggggcagtgaaaaaggttaactctttcctcacaatggagtcagaaaattacgagggaactatggacccttctcaggtgcctgagcactggccacaagagggggagatcaaaattcatgacctgtgcgtgcggtatgaaaataacctcaagcccgtcctaaaacatgtgaaagcctatatcaagccaggacagaaggtgggcatctgtgggagaaccggaagtggcaagtcttcactgagcctggcctttttcagaatggtggatatattcgatggtaagatagtgattgatggcatcgatatttccaaactgcccctgcatactttgcgctcccgattatccattatcctccaggatccgattctgttctctggatccatccggtttaatcttgacccggagtgcaagtgcaccgatgaccgcctgtgggaggctttggaaatagcacagcttaaaaacatggtgaaatccctgccaggtggcctggacgccgtggttacggagggtggggagaatttctctgtgggacagcgccaactgttttgcttggcacgcgcttttgtgcggaagagcagtatcctgattatggacgaggctaccgcctctatcgacatggccaccgagaacatcctacagaaagtggtcatgactgcattcgccgacagaaccgtcgtgacaatcgcccacagagtgtcctccatcatggacgctggcctcgttctggtcttctctgaagggatcctggttgagtgcgatactgtgcccaacctgcttgcacacaaaaacggcctcttcagtactctggtcatgaccaataaatag

SEQ ID NO: 215434 - DNA, 1386 bp, synthetic construct
  misc_feature 1..1386: note = Description of Artificial Sequence: Synthetic coding sequence
  source 1..1386: mol_type = other DNA
atgcagagggttaatatgatcatggctgagagtcccggactaattacgatctgtttattggggtatttattgtcagcagagtgtacggttttcctggatcatgaaaatgctaacaaaattctaaatagaccgaagcggtataattctggtaaactggaggagtttgtgcagggaaatctggagcgggaatgcatggaagagaagtgcagctttgaggaagctcgggaggtgtttgaaaatacagaacggactacggagttctggaaacagtatgtagacggggatcagtgcgaatctaatccgtgccttaatgggggttcctgtaaggatgatatcaattcatatgagtgttggtgccctttcgggttcgagggcaagaattgtgagctcgacgtaacttgcaacattaaaaatggtcgctgtgagcaattttgcaagaatagcgccgataataaagtcgtctgtagctgtacagagggatacagactggctgagaatcagaagagctgcgaacccgcagtgccgttcccctgtgggagggtgtctgtttcccaaacatctaagctaacccgcgctgagacagtgttcccagacgtcgattatgtcaatagcacggaagccgaaactatcctcgataacataacacagtccacacagagtttcaatgactttactcgtgttgttgggggagaggacgccaaacccggacagtttccctggcaggttgtcctgaatggaaaagtagacgccttctgcggcggatctatagtcaacgaaaagtggatcgttaccgctgcacattgtgtggagacgggggtcaaaataactgttgtggccggagaacacaacatcgaggaaaccgaacacacagagcagaagcgaaatgtgatcaggataatcccgcatcacaactacaacgctgcaattaataagtacaaccatgacatagccctgttagagctagatgaaccactcgttctgaactcctacgttaccccaatctgcattgctgataaagagtatacaaacatattcctaaagtttgggtccgggtacgtatcaggttgggggagagtgttccacaaggggagatctgctctggtgctccagtacttaagagttccactggtggaccgggcaacctgtctgcgaagcaccaagttcacaatctacaacaacatgttttgtgcagggttccacgaagggggtcgagactcatgccagggcgactctggcggacctcatgtgacagaggtggagggcacatccttcctgaccggaattatttcatggggcgaggaatgcgctatgaaggggaagtacggaatatacacgaaagtgtcccgttatgtaaattggataaaggaaaagaccaaactgacttag

SEQ ID NO: 215435 - DNA, 684 bp, synthetic construct
  misc_feature 1..684: note = Description of Artificial Sequence: Synthetic coding sequence
  source 1..684: mol_type = other DNA
atggatggcaggctgcgtaatcctgaccaaagcctgacggaggacgtcgtggccttcgccgcatctgtcgcgcacctgtactccaaccttacaaagcccttgcttgatgtggccgttaccagctacacactactgagggcggctcgaagccgtggagccggtacagcctggccaagtgccatcgccggattagtggtctttcttaccgccaatgtgctcagagctttttcaccaaagttcggggagttggttgccgaagaagcgaggagaaagggtgaactcaggtatatgcatagtagagtcgtcgcaaattcggaagagatagcattttatggaggccatgaagtagagcttgctctgttgcagcggagctatcaggacctggctagtcagattaatctcattctgttagaacgactgtggtatgtgatgctggaacaattcctgatgaaatatgtatggtcagcgtcaggactgctcatggtggcagtgccgatcattaccgccaccggttatagcgagagcggtgaaactcaggggtccaagcgcattcaggccagaggactgtctcccattcccctcggagccgaattaacacgtgcacagctctcacagccggcagcgcacttctgttgtcgcggtcaccgtggccctgccgcaagcctagatgcgtttaggggctag

SEQ ID NO: 215436 - DNA, 672 bp, synthetic construct
  misc_feature 1..672: note = Description of Artificial Sequence: Synthetic coding sequence
  source 1..672: mol_type = other DNA
taactgttctccaccgtcgctgcccctttttatctgcctgcttccagcgtgggagggttccacctcttcatcgtggcatctaccgatgctgaggctgtgaaaaaggccgcactagaaaagaaagaggaggaactggtctccgagagaaccgaggcattcaccattgctagaaacctcttgactgctgcagccgatgctatcgaaagaatcatgtcttcttacaaagaggtgaccgagctggcaggttacacggcgagagtgcacgaaatgttccaggtgtttgaggacgtgcagcgctgtcacttcaaacgaccccgagaacttgaggacgctcaggcaggttcagggacgatagggcgatccggcgtacgcgtcgagggcccattgaagattcgaggccaggttgtcgacgtggaacaggggatcatctgtgagaatatccccatcgttacaccgtcaggagaggtggtcgtcgctagcctgaatattcgggtcgaggagggaatgcacctattgataaccgggcctaatgggtgtggcaaaagttcacttttccggattcttggtggtctttggcctacatacggaggggttctctacaagccaccgcctcagagaatgttttacatccctcaacgaccttatatgtcagtggggagtctaagggattag

SEQ ID NO: 215437 - DNA, 2223 bp, synthetic construct
  misc_feature 1..2223: note = Description of Artificial Sequence: Synthetic coding sequence
  source 1..2223: mol_type = other DNA
atgacccacatgctgaacgccgctgcagaccgtgtcaaatggacacgcagttctgctgctaagcgggcagcttgcctagtcgcggcagcctatgcgctgaaaacactctaccccatcattggcaagcggctgaaacagtccggtcacgggaaaaagaaggctgccgcttatccggctgctgagaatactgagattctccattgtacagaaacaatctgcgagaaaccctcccccggtgttaacgctgacttttttaaacaactcctcgagctgcgcaaaattctgttccctaagttggtgaccacggaaacagggtggctgtgtctgcacagcgtggctttgatatcgcgtaccttcctgtcaatctatgtcgccggacttgacggaaaaattgtgaagtcaatcgtggaaaagaagccaagaaccttcatcattaaactgatcaagtggcttatgatcgcgataccagctaccttcgtgaacagcgcaatcagatatctggagtgcaagttggcactggcttttcgaactcgcctcgttgatcacgcctacgagacctattttaccaaccagacctattataaggtcataaatatggacgggagactggcgaatcctgatcagagtctgaccgaggatattatgatgtttagccaatcagtggcccatctttatagtaatctcaccaaacctatactggatgtcatgctgacctcatataccctgatacaaacggccacctcgaggggggcttcccccattgggccaaccctgcttgcaggcttagtggtatatgctacggcaaaggtcctgaaggcctgttctcccaagttcggcaagctggttgccgaggaagcacatcgcaaaggctatctgcggtacgtacactccaggataatcgccaacgtggaggagatagctttctatagaggtcacaaagtagaaatgaagcagcttcagaagtcatataaagcactagctgaccagatgaacctgatcctctccaagcgtttgtggtacatcatgatcgaacagtttcttatgaaatacgtttggtcctcaagtggactcatcatggtggcaattcctataataacggctaccgggttcgccgatggtgaggatggacagaaacaggtgatggtctctgaacgtacggaagcatttactactgcaaggaatctgttggccagcggcgcagacgccatagagcgaattatgagctcctataaggaagtcacagaacttgcgggatacactgctcgagtttataatatgttctgggtcttcgatgaagtgaagcggggaatctacaaaaggacagcagtcatccaggagtccgagtcacactccaagaacggggctaaagtggaattgccattgagtgataccctcgcaatcaagggcaaggtgatcgatgtggatcacggtataatctgtgagaatgtcccaattataactccagctggggaggtcgtggcttcccgcttgaattttaaggtcgaggaggggatgcatctgctcataactggccctaatgggtgtggcaagtcctccctcttcaggatcctttccgggctttggcctgtgtacgagggcgttctgtataagccacctcctcagcatatgttttacatccctcaacgtccctatatgagtctcgggtctctcagagaccaggtgatctatcccgatagcgtcgacgatatgcacgacaaagggtatacagaccaggacttagaacgtatactacataacgtccatctgtaccatatcgtccagagggaggggggttgggatgctgtcatggattggaaagacgtcctgtctggcggtgagaagcagcgcatgggcatggcacgcatgttctaccataagcctaagtacgccctacttgacgagtgtactagcgcagtctccatcgatgtagaaggtaaaatttttcaagctgcaaaaggagccggtatctcccttctaagcattacgcaccgaccgtccctttggaagtaccacacccacctcttacagtttgacggcgagggcggttggcggtttgagcagcttgacacagccattcgactgaccttgtccgaggaaaagcagaagttagaaagtcagctcgccggaattcctaaaatgcaacagcggctcaatgaactgtgcaagatactgggcgaagactccgtattgaagacaataaagaacgaggatgagacaagttag

SEQ ID NO: 215438 - DNA, 711 bp, synthetic construct
  misc_feature 1..711: note = Description of Artificial Sequence: Synthetic coding sequence
  source 1..711: mol_type = other DNA
atggcagcatttagcaaatacctcactgctaggaatagttctttagccggagccgcattcctgttgttatgtctgctgcataaaagacggagggccctgggtctgcatggaaaaaagtccgggaagcctccacttcagaataacgaaaaagaaggaaagaaagaaagagccgtggtggataaagtcttcttctccaggctcattcagatattaaaaataatggtccccaggacattctgtaaggagactggttaccttgtgctgatcgcagttatgctggttagtcgaacctattgcgatgtctggatgattcaaaatgggacactcatcgaaagcggaatcatcgggaggtcaaggaaggattttaagagatacctgttgaatttcatcgccgcaatgccgctgatttcgctcgtgaacaattttctcaaatacggcttaaatgagctcaaactgtgtttcagagtccgattgactaagtatttgtacgaggaatatctccaggcctttacctattataaaatgggtaatctcgacaatcgcatcgcaaatcctgatcagttactgacacaggacgttgaaaagttctgcaacagcgtggtggacctatactccaacctgtccaagcctttccttgatatagtgctgtatatttttaagttaaccagcgccatcggggcacaggtactcgggaaaatcctctggcattag

SEQ ID NO: 215439 - DNA, 1980 bp, synthetic construct
  misc_feature 1..1980: note = Description of Artificial Sequence: Synthetic coding sequence
  source 1..1980: mol_type = other DNA
atggcggcattttccaaatacctaaccgctaggaatagcagcctcgctggtgcagcctttctcctactctgtctgctccataaaaggagaagagcgctcggtctccacggtaagaaatctggcaagcccccactgcagaataatgagaaggagggcaagaaggaaagagccgttgtagacaaggtattcttcagccggctaattcaaattctgaagatcatggtccccagaaccttttgcaaggagactggctacttggtcttgattgccgtcatgctggtatccagaacatactgtgacgtttggatgatccaaaatggaactctcatcgaatctggcattatcggaaggtcccggaaggattttaagcggtacttactgaacttcatcgctgctatgcctctgatcagtcttgtcaataacttccttaagtacggcttgaacgagctcaagttgtgctttcgggtgcgtctgacgaagtatttgtatgaggaataccttcaggcctttacttattacaaaatgggcaacctggacaaccggatcgcgaatcccgaccagctgttaacccaagatgtggagaaattttgtaactcagtggtggacctctacagcaacctgagtaaaccatttttggacatcgtcctgtacattttcaagctaacttcagctataggagcacagggccctgcttcaatgatggcttatctcgtcgtctctggactcttcctaaccaggctgagacgacccataggaaaaatgacaatcacggagcagaagtacgaaggagagtacaggtacgtgaattctcgcctcataaccaatagcgaagagatcgcgttctacaatggaaacaagagagaaaagcaaacggtgcactctgttttccgcaagctggtggaacatctgcacaattttattctgttcagattttctatgggcttcattgactccattatcgctaagtacctggcaacggtagtgggctatctggtcgtctctagaccctttctagacttgtctcacccaagacacctcaagagcactcattcagagctgttggaagactactatcaatcaggacgaatgcttttgcggatgtctcaggctctaggccgaatcgtgcttgcaggcagggaaatgacccgcttggctggatttaccgccaggatcactgagctaatgcaggtgctcaaggatctgaatcatggaaagtatgaaaggaccatggtttcccaacaggagaaagggatcgagggggttcaagtgataccccttatccctggggcaggggagataatcatcgccgataatatcattaagttcgaccacgtacccctggctacgcctaatggcgatgtacttatacgagatctgaatttcgaggtccgctctggcgctaatgtactcatctgtgggcctaatgggtgcggtaagtcctcgctgttcagggtgctgggcgaactgtggccactctttggcggacgcttaaccaagccggagcggggaaaactgttctatgttccccagcgcccttacatgaccctcggcactctgcgagatcaggtcatctacccagatggacgggaggatcagaagagaaaaggcatctctgacttggtcttgaaggaatacctcgataatgtacagttgggacatattcttgagcgggagggaggttgggactctgttcaggactggatggatgtgctcagtggaggcgaaaagcagcggatggcaatggccaggcttttctaccataagccccagtttgctattctcgacgaatgtacctcagccgtgagtgtagacgtcgagggttacatatactcccactgccgaaaagtcggcattacactatttactgtctcacatcgtaaaagtctgtggaagcatcacgagtactacctccacatggacggcaggggcaattatgaattcaagcagatcaccgaggacacggttgaattcggttcttag

SEQ ID NO: 215440 - DNA, 1650 bp, synthetic construct
  misc_feature 1..1650: note = Description of Artificial Sequence: Synthetic coding sequence
  source 1..1650: mol_type = other DNA
atggccgcattttccaaatatctgaccgcccgtaatagctctttagccggagctgccttcctgctactctgtcttctccacaaacggaggcgggctttgggactccatggaaaaaagagcggaaagcctcctctgcagaacaatgagaaggagggtaaaaaggagcgggcagtggtcgacaaagtgttcttttctcgcttgatccagatcctgaagataatggttccgagaacattttgtaaagagacggggtacctggttcttattgctgtgatgctcgtgagtcggacatattgtgatgtgtggatgattcagaacgggacattgattgaaagcggcatcattggacgcagcagaaaggactttaagcgctatctgctgaatttcattgccgcaatgcccctgatctctctggtgaacaattttctcaagtacggacttaatgagcttaaattatgtttcagagtgagactaactaagtatctgtatgaggagtaccttcaggcattcacttactataagatgggtaatctcgataacagaatcgccaaccctgaccagttgctcacccaagacgtggaaaaattctgtaattctgtggttgatttgtactccaacctgtctaagccgttcctcgatatcgtactctacattttcaaactgacctccgccattggagctcaaggccctgcgtcaatgatggcttatctggtcgtgtcaggcctcttcctgacgagactcaggagacccatcggcaagatgactattacggaacagaaatacgagggcgagtaccgatatgtaaatagtaggcttattaccaactcctttactgcacggattacagaattgatgcaggtactgaaagacctgaatcacgggaaatatgaaaggaccatggtctctcagcaggaaaaggggattgaaggagtccaagttattcccctaatcccaggcgctggggagataattattgccgataacatcataaagtttgatcatgtgccgttggctactcctaacggagatgtgctcattagagacctgaacttcgaggtcagaagtggggctaacgtgctcatttgcgggcctaacggatgcggaaagtcaagtctgttcagggtactcggggaactctggccgctgttcggcggtcgattaacgaaaccagagagaggcaaactcttttacgtaccccagcgaccatacatgacactgggaaccctcagagaccaggtgatataccccgacggacgcgaagaccaaaagaggaaaggaattagcgatctcgtgctcaaggaatacttggataatgtacagcttggccacatactggagcgcgaagggggatgggacagcgttcaagattggatggacgtgctgagcgggggagagaagcagagaatggccatggcacgtcttttttaccacaaaccacagtttgctatactcgacgagtgcacttctgctgtgtccgtagatgtagagggctacatatatagtcactgtaggaaagtggggattaccttatttactgtgtcacaccggaagtccctgtggaagcaccacgagtactacctgcacatggacggcagaggcaattatgaatttaagcaaatcacggaagacaccgtcgagtttgggtcctag

SEQ ID NO: 215441 - DNA, 2052 bp, synthetic construct
  misc_feature 1..2052: note = Description of Artificial Sequence: Synthetic coding sequence
  source 1..2052: mol_type = other DNA
atggcagccttcagcaaatatctcactgcaagaaattcttcactggctggagccgcttttcttctgctgtgtctcctacacaagaggcgaagagcgctgggattgcacgggtattttatggaaacctggagagaaaaatctgatgaggtgatgggcgagttaaccgaccacgttactcactgtaagaagagcggtaagccccctctgcaaaacaatgaaaaggaaggaaagaaggagcgggctgttgtcgacaaggttttcttttctcgacttatacagattctcaaaattatggtccctaggacgttttgtaaagaaacggggtacctggtgctaattgctgtaatgttggtctcccgcacatattgtgacgtctggatgattcaaaacggtaccctaattgaatcagggatcattggtaggtctagaaaggattttaaaaggtacctgctgaatttcattgcagctatgcctctgatctccctggttaataatttcctgaaatacgggctgaacgagctcaaactatgctttcgagtgagactgacgaagtacttgtatgaagaatacctgcaggcgttcacctattataaaatgggcaacctagacaaccggatcgctaacccggatcaattgctaacccaggacgtggaaaagttttgtaattcagtagttgatttgtacagtaacttatctaagccatttctggatattgtgctgtatatcttcaagctgacttccgccataggggctcagggacccgctagtatgatggcctacttggtggtgagcggtctgtttctcactagattacgcagaccgatcggaaaaatgactatcacagaacaaaagtatgagggagagtaccgctacgttaatagcagactgataacaaattcagaagagatcgctttttataacggaaacaaaagggagaagcaaacagtgcactcggttttccgcaagctcgtcgagcacctccacaattttattctttttaggttcagcatgggattcatcgatagcatcattgcgaaatatctggccaccgtagtggggtacctggtggtgagccgaccatttctggatctctcacatccccgacatctgaaaagcactcatagtgaattgctggaggactactaccagtccggaagaatgttgctaagaatgagccaggctctgggaaggatcgtcctggctggcagagagatgacccgattagccggtttcacagcccgtatcacagagctgatgcaggttctgaaagatctgaatcacgggaaatacgagagaaccatggtgagccagcaggagaaaggaatcgagggagtgcaggtcattccacttatccccggagcgggagagataataattgccgacaatatcatcaagttcgaccatgtgccgttagctactcctaacggagacgtgcttattagagatttgaacttcgaggtacgtagcggagcaaatgtgctcatttgtggtccaaacgggtgtggtaaaagctcactgtttagagtgctgggcgagctgtggcccctgtttgggggaagactgactaaacccgagcgcggaaagttgttttatgtcccacagcgcccatacatgaccttgggcacgttgcgggaccaggttatctatcccgatggcagggaggatcaaaagcgtaagggcatctcagacctggtcctgaaagaatatttggacaatgtgcagctcggccacattttggaaagagaagggggttgggactcagtgcaggactggatggatgtactatcaggaggcgagaagcagagaatggcaatggccaggctcttctaccacaagccccaattcgcaattctggatgaatgcacctcagcggtttccgtggatgtcgaggggtacatctatagtcactgccggaaggtgggaattacgctttttacagtctcgcatcgtaaaagcttgtggaaacaccacgagtattacctccacatggatggtcggggaaattacgagtttaaacaaattaccgaagacacagtcgaattcggcagctag

SEQ ID NO: 215442 - DNA, 1761 bp, synthetic construct
  misc_feature 1..1761: note = Description of Artificial Sequence: Synthetic coding sequence
  source 1..1761: mol_type = other DNA
atggtgcctcggaccttttgcaaagagacagggtaccttgtgttgatcgccgttatgctggtcagccgcacgtactgcgacgtgtggatgatccagaatggcaccctgattgaatccggaattatcgggaggagccgcaaggacttcaaaaggtatcttctgaatttcattgccgcaatgcccctcatctccttggtgaacaacttcctcaaatatggcctaaacgagcttaaattatgtttcagagtgagactgactaagtatctgtatgaagaatacctccaggcatttacctactataagatgggcaaccttgacaacagaattgctaacccggatcagctcctgactcaagatgtagagaagttttgtaatagcgttgtcgatctctatagcaatcttagcaagccgttcttggacattgtgttatacatattcaagctgactagtgccataggcgcacaggggcctgcaagcatgatggcttacctcgttgtttccggactcttcctaactcgcttacggcgacccattggcaagatgactataaccgagcagaaatatgagggcgaataccgatacgttaacagccgtctgattacaaactcagaagagatcgcattctataacggcaataaacgtgaaaagcaaaccgtacacagtgtgtttaggaagctcgtggagcatctgcacaatttcattctgtttaggttctctatggggtttattgattcaatcatcgcgaaatatctggctacagtcgtaggatacctcgtggtgagcagaccttttctcgacctgtcccacccgcgtcacttaaaatccacccatagcgaacttctcgaagattactaccagtcggggagaatgctgcttcggatgtctcaggccctgggccgaattgtgctcgccggtcgcgagatgacccgattagcaggtttcacagccagaatcaccgaactcatgcaggttctgaaggacctgaaccatggtaagtacgagcgcactatggtttctcagcaagagaagggcattgagggtgtgcaggtgattcctttaatacccggagcgggagagatcattattgcggacaacattattaaatttgaccatgtaccactggccacaccgaacggggatgtcctgatccgagatttaaacttcgaagtgagaagtggggcaaacgtgctgatttgcggcccaaacggctgtggcaaatcatccttatttcgcgtgctgggggaactctggcccctgtttggcggaagacttacgaaacctgagagaggtaaactgttctacgtgcctcagagaccatacatgacattggggactttgagagatcaggtgatctatccagacggtagggaagaccaaaagcgcaaaggaattagtgatcttgtcctgaaggaatacctggacaacgtccaacttggccatattctcgaacgcgaagggggatgggactccgtccaggactggatggatgtgctcagcggaggagaaaaacagcggatggctatggccagacttttttaccacaagccccaatttgctatcctcgatgaatgtaccagcgccgtctctgtcgatgtggaggggtatatctatagccattgtaggaaggtagggattacactcttcacagtcagccatagaaagagtctttggaagcatcatgagtactacctccacatggatggtcggggaaactatgagtttaaacaaatcactgaagacacagtggaatttgggtcatag

SEQ ID NO: 215443 - DNA, 1467 bp, synthetic construct
  misc_feature 1..1467: note = Description of Artificial Sequence: Synthetic coding sequence
  source 1..1467: mol_type = other DNA
atgctgatcgtcttgaactctactctgaagtcttttgaccagtttacctgtaatctgctgtacgtatcttggaggaaggatttaactgagcatcttcaccgcctgtacttccgcggacgtgcgtactacaccctgaacgtgcttagagatgacattgacaaccccgatcagcgcatctcccaagacgtggaacgcttctgcagacagttgtcatcaatggcctccaagctgattatttcgccctttacactcgtttattatacataccagtgtttccagagcaccggctggctgggacctgtgtctatctttgggtactttatactcgggactgtagtgaacaagaccctgatgggcccaatcgtaatgaaacttgtgcatcaggagaagctcgagggagattttcgagccggtcatgttgaacacatgcggaccgatcggagactccagcggcttctgcagactcagcgtgaacttatgtcaaaggagctgtggctgtacattggaataaatactttcgactacctgggtagtattctttcttatgtggtgatcgccataccaatcttttccggcgtgtatggggacctgagccccgcagaattgtccacccttgtcagcaaaaacgcctttgtctgcatctaccttattagctgctttacacagctaattgatctctctaccacactgtctgatgtggcagggtacacacacagaatcgggcagctccgggagaccctactggacatgagcctgaagtctcaagactgcgagatcctgggagaatcagagtggggtcttgacacccctcccggatggcccgcagcagagccagctgacactgccttcctcctagagcgggtaagcataagcgccccttctagtgataagcccctgatcaaggacctaagcctgaagatatcagagggacaatctctgttgatcaccggtaacacaggcacaggcaagacttctttgctgcgtgttttgggcggactctggacctcgaccaggggtagcgtccagatgctgaccgacttcggcccacatggagtgttatttttgccccagaaaccctttttcactgatggaacacttcgcgaacaggtcatctatcctctcaaggaggtgtaccctgatagcggaagcgctgatgatgagaggattctgcgatttctggagcttgctggcttatcaaatttagtggctcggacagaagggttggatcaacaggtggactggaattggtacgatgtgttgtctccaggagagatgcagagactgagctttgcaaggctgttctatctgcagccaaagtatgctgttctcgatgaagctacctccgccctgactgaagaagtagagtctgaactttatcggatcggccaacagttgggcatgacattcatttcagtcggacataggcagtctctggagaaggtgcccgtgctgacaaggatggcctag

SEQ ID NO: 215444 - DNA, 1821 bp, synthetic construct
  misc_feature 1..1821: note = Description of Artificial Sequence: Synthetic coding sequence
  source 1..1821: mol_type = other DNA
atggcagtcgcaggaccagccccaggggctggggctaggccaaggctggacttgcagttcctgcagaggttcctccagatcctgaaggttttgtttccatcgtggagctcccagaatgccttaatgttcttaacacttctgtgtctgacactgttggagcagtttgttatataccaggtgggacttattccgtcccagtattacggggttctcgggaacaaagacctagagggatttaagacgttaacattcctggccgtcatgctgattgtgcttaatagtactctgaagagctttgaccagttcacatgcaacctgctgtacgtgagctggcgaaaagatcttaccgaacacttgcaccgactctatttcagaggcagggcgtattataccctgaatgtgttgagagatgacatcgataaccctgatcagcgcatctcacaggatgtggagagattttgccgccagctatcctccatggcttccaaacttatcatatctcccttcaccctggtttactatacttatcagtgcttccagagtaccggttggctcgggcctgtgagcattttcggatattttattctcggcacagtcgtgaacaaaaccttaatggggccaatcgtgatgaaactcgtgcaccaggagaagttggaaggcgatttcagattcaagcatatgcaaattcgagtgaacgcggagcccgctgcattttaccgcgctggccatgttgagcatatgcggacagatcgcagactgcagaggcttctgcagacacaacgcgaactcatgtccaaggaactgtggctctacatcggtatcaacaccttcgactatctgggatccatcctctcttatgtggtcatcgccattcctatctttagcggcgtctatggcgacctgagcccagccgagttgtctacgctagtgtctaagaatgcctttgtctgtatttatctcatctcctgctttactcagctgatcgatctttcaaccacccttagcgatgtcgccggttatactcatcgtattggccagcttagagaaacgttgctcgacatgtccctaaagtcccaggattgcgaaattctgggagaatcagaatggggccttgacaccccacccggttggccagccgctgaaccagccgacacagcattcctcctcgaaagagtatcaatttcagccccatcctccgacaagccactgatcaaagatctctcccttaaaatctcagagggtcagagtctgctgattactggcaacactggcactggtaagaccagcctgctgagggtgttgggaggcctctggacatccactcgagggtccgtgcagatgttgaccgattttgggccacacggtgtgctattcctgccacagaaacctttcttcaccgacggtactctgcgcgaacaggtgatctaccctctgaaggaggtataccctgacagcgggtctgcagacgacgaaaggatcttgaggtttctagaacttgccggtttgtccaatttagtggcacggaccgagggactggatcagcaagtcgactggaactggtacgatgtgcttagtcccggagagatgcagagactgtcatttgccagactgttttatctgcagccaaaatacgctgttctggatgaggccacctctgcgttaactgaggaagtcgaatctgagctttatagaataggacagcagttgggaatgaccttcatatccgtaggtcaccggcaatctctggagaaatttcatagcttggtcctgaagctctgcggaggcggtagatgggagctcatgcgtatcaaggtggaatag

SEQ ID NO: 215445 - DNA, 297 bp, synthetic construct
  misc_feature 1..297: note = Description of Artificial Sequence: Synthetic coding sequence
  source 1..297: mol_type = other DNA
atgcgctctttgctcctcagtactgtgggcatcaacactttcgattacctgggttccatcctctcatacgttgtgatcgcgatcccaatcttttctggcgtttatggtgacctcagccctgcggaactttccaccctggttagtaagaacgcgttcgtctgcatttatttgatcagttgctttacccaactgattgatctgtcaactacgctgagcgacgtggccggttacacacatagaatcggacagctgagggagactctcctcgatatgagtctgaaaagccaggattgctag

SEQ ID NO: 215446 - DNA, 1800 bp, synthetic construct
  misc_feature 1..1800: note = Description of Artificial Sequence: Synthetic coding sequence
  source 1..1800: mol_type = other DNA
atggccgataaactaactcgcattgccattgtaaaccacgacaagtgtaaacctaagaaatgccggcaggagtgcaagaagagttgccctgttgtgcgtatgggaaagttgtgcatcgaagtgactccccagtctaaaatcgcttggatcagcgagaccctctgcatcggatgtgggatttgcattaaaaaatgcccattcggtgctctgtcgattgtgaatctgccttcaaatctggaaaaggagaccacacaccgctattgcgcgaatgcatttaaactgcaccgactccctatcccgaggccgggagaagtgttggggctcgtcggcacgaatggtatcggcaagagcaccgccctcaagattttagcagggaaacagaaaccaaatctgggtaagtacgacgatccacctgactggcaagaaattcttacttactttcgcggttctgaactccagaattattttacgaagattctcgaggacgatttgaaagctatcattaaacctcagtacgtcgaccaaatccctaaggccgctaaggggacagtggggtccatcctggatcgaaaggacgaaaccaagacacaagccattgtatgccaacagctggatctgacgcatctgaaagaacgcaacgttgaggacctgtctggaggagaactacagcggtttgcatgcgcagtcgtgtgtatccagaaggccgacatctttatgtttgatgagccctccagttatttagacgtaaaacagcggctgaaggctgctatcacaattcgttcactgatcaaccctgatcgctacatcatcgtggtggaacacgacctgtcagttctcgattatctgagtgattttatctgttgcctgtatggcgtgccttcggcttacggcgtggtcacaatgcccttttctgtgagggaaggcattaatatattcctggatggctatgtgccaacagagaatctgcgatttcgtgacgccagcttagtgtttaaagtcgctgagacagcaaacgaggaggaggtgaagaagatgtgtatgtacaagtatcccggtatgaagaaaaagatgggcgagtttgagctcgctatcgtcgctggggagtttactgactccgaaatcatggtcatgctgggtgagaatggcactggaaaaacaacattcataagaatgctggcaggccgtctgaagcccgatgaggggggagaggtgccagtgctgaatgtctcctataagccccagaagatctctccgaaatctacgggatctgtccgccagctgttgcacgagaaaatacgagacgcttacacccatcctcagttcgtgacagacgtgatgaagccgttgcaaattgaaaacattattgatcaggaggtgcagacattaagcggtggagaactccaaagagtggcattagccctttgtctgggcaagccggctgacgtttacctcatcgacgagcccagtgcctacctggacagcgaacagaggctcatggcagccagagtagtgaaacgtttcattctgcacgctaagaagacagcatttgtggtagagcacgacttcataatggcaacctatctcgctgacagggttatcgtttttgatggggtcccttctaagaacacagtggcgaactccccacagacactgctcgcaggaatgaataagtttctaagtcagctcgaaatcactttcaggagggaccctaacaactatagacccagaattaacaaactgaactccattaaagatgtcgagcagaaaaagagcggtaattacttctttctggacgattag

SEQ ID NO: 215447 - DNA, 633 bp, synthetic construct
  misc_feature 1..633: note = Description of Artificial Sequence: Synthetic coding sequence
  source 1..633: mol_type = other DNA
atggctgataaactaacccggattgcaatcgtaaaccacgacaaatgcaaaccaaagaagtgcagacaagaatgcaagaaatcctgcccagtggtccggatgggaaaactgtgtatcgaggtaacgcctcagagcaagatcgcctggataagcgaaacgctctgcataggatgtggcatatgcattaaaaaatgcccgtttggggctctgtcaattgtgaatctaccgtcaaatctcgagaaagaaaccactcaccggtattgcgctaacgcttttaaactgcatcgtctgcctatcccacgacctggagaagtcctcggcctggtcgggaccaacggaattggtaaatcaacagccctgaaaatcctcgctggcaagcagaagccaaatctgggcaagtatgatgatccccctgattggcaggagatactgacttatttccgaggcagtgaattgcagaattatttcaccaagatacttgaagatgacctgaaggctattatcaaaccgcaatacgtcgaccaaattcctaaagctgctaaaggcaccgttggatccatcctcgataggaaagatgagaccaagactcaggccattgtgtgccagcagctggacctcacccatctaaagtag

SEQ ID NO: 215448 - DNA, 2538 bp, synthetic construct
  misc_feature 1..2538: note = Description of Artificial Sequence: Synthetic coding sequence
  source 1..2538: mol_type = other DNA
atgcccaaagcgcctaagcagcagccacctgaacccgaatggattggtgatggagagtccaccagccctagtgataaagttgtaaaaaagggtaagaaagacaaaaagattaagaagactttctttgaagagctggccgttgaagataaacaggcaggcgaagaagaaaaagtgttgaaggagaaagagcagcagcagcagcagcagcagcagcagcagaagaagaaaagagacactcgcaaaggtcggagaaagaaagacgtggatgacgatggggaggagaaggaattaatggagcgcctcaaaaagttgagtgttcccactagcgatgaggaagatgaagtgccagcgccaaaacccaggggaggcaaaaaaaccaaaggaggaaacgttttcgctgctcttatccaggatcagagtgaggaagaagaagaggaggaaaagcaccctccaaaacctgctaagcctgagaaaaaccgcattaacaaggcagtctccgaagagcagcaaccagcgctcaaaggcaaaaaaggcaaggaggaaaagagcaagggcaaagccaagccacaaaacaaattcgccgcactcgataatgaggaggaagataaggaagaggaaattatcaaagaaaaagaacctcccaagcaggggaaagaaaaggccaagaaggccgagcaggggtccgaggaagagggtgaaggcgaggaagaggaagaggaagggggtgagagtaaggctgacgacccatacgcccatctctcaaaaaaggagaaaaaaaagctgaaaaaacagatggagtacgagcgacaggtcgcatctctaaaggctgcaaacgcagctgaaaatgacttctccgtcagtcaagccgagatgagcagtcgacaagctatgctggagaatgcatccgacattaaactcgagaagttcagcatcagtgcccatggcaaggagctattcgttaacgccgacctgtacatcgtcgcagggagacgttacgggctggtgggacctaacggaaaaggcaaaaccacacttctgaaacatatcgcgaacagagcgctgtccataccacctaacatagatgttctactgtgcgagcaggaggtggttgcagatgagactccagctgttcaggctgtgttaagggccgacaccaagaggctgaagttgctagaagaggaacggagactgcaaggccagttagagcaaggagacgacaccgctgctgagaggttggaaaaggtgtacgaggaactgcgcgcaaccggggcagccgctgcagaggctaaagcgaggaggatactggctggtctgggttttgatccagagatgcaaaatagacctacccagaaattttctggtggttggcggatgagggtgagtctcgccagggccctattcatggagccaaccctcctcatgctggacgagcctactaaccatctggaccttaacgcagtaatttggctgaacaattatctgcagggctggcgtaagaccctcctaatcgtcagccatgatcaaggttttctagacgacgtctgtacggatattatacacctcgatgcacagcgcctgcactattacagagggaattacatgacttttaagaagatgtatcaacagaaacaaaaggagcttctcaaacagtacgagaagcaggagaagaaactgaaagagctgaaggcagggggaaaaagcaccaagcaggccgagaaacagactaaggaggcccttaccaggaaacagcagaagtgccggcgaaagaaccaggacgaggaaagtcaggaagcccctgagctcttaaagagacccaaggagtacacggttcgcttcactttccctgatccaccacccctaagcccccctgtcctcgggctgcatggagtgacctttggctaccagggacaaaagccactattcaaaaaccttgattttggcatcgatatggactcacggatttgcattgttggcccaaatggcgttggaaaaagcactctgctcctcctgctgactggaaaactcacccctacccacggggagatgcgtaagaaccaccggcttaaaataggcttcttcaaccaacagtacgctgagcagcttagaatggaagagacgcccacagaatacctgcagaggggctttaatctgccatatcaggatgctaggaagtgcctgggacgattcggcctggagtcacacgcacataccatccaaatctgcaaactgagtggcggacagaaagctagggtggtgttcgctgagttggcctgtcgcgaacccgatgttctgattctggatgagccaactaacaacctcgacattgagagcatcgacgcgctgggcgaagccataaatgagtacaagggagcggttatcgtggtgagtcacgatgctcggctgataacagagaccaactgccagctgtgggtggtggaggagcagagcgtctcacagatagatggggactttgaagactataaaagagaggtgttggaggcgctgggcgaggttatggtgtctaggcccagagagtag

SEQ ID NO: 215449 - DNA, 2424 bp, synthetic construct
  misc_feature 1..2424: note = Description of Artificial Sequence: Synthetic coding sequence
  source 1..2424: mol_type = other DNA
atgcccaaggctcctaagcaacagcctcccgagcccgagtggatcggagacggcgaaagtactagcccatcggataaagtggtaaagaaaggaaagaaggataagaaaatcaaaaaaactttcttcgaagaactggccgtagaggacaagcaagcgggagaagaagagaaagtcttgaaggagaaggagcagcaacaacaacagcaacaacagcaacagaagaaaaagcgggatacccgtaaaggcaggcgtaaaaaggacgtcgatgatgacggagaggaaaaggagctgatggagcgcctcaaaaagcttagcgtcccaacctcggacgaagaggatgaggtgccagctcccaagcccagaggcggaaaaaaaaccaagggtggtaatgtgttcgcggcactgattcaggaccagtctgaggaggaggaggaggaggaaaagcacccccctaaaccagccaaacccgaaaagaataggattaacaaggctgtcagtgaagaacagcagcccgctctgaaggggaaaaaagggaaagaggaaaaatctaagggaaaggcgaagccccagaataaatttgcagcgctcgataatgaggaggaagataaagaggaggagatcatcaaggagaaagaaccaccgaaacagggtaaggagaaagccaaaaaggccgaacagatggagtatgaaaggcaggtggcctcccttaaagctgctaatgctgctgaaaacgatttctctgtttctcaggcagaaatgtcctcccgtcaggcgatgttggagaacgccagcgacataaagcttgagaagttcagcatcagcgcacacggcaaggagctgtttgtgaatgccgacctttatatagtagccggaaggcggtacggcttagtgggtccgaatggcaaaggcaaaacgacattgctgaaacacatcgctaatcgggcactatctattcctccgaatatcgacgtgctactgtgcgaacaggaggtcgtagccgatgaaactccagccgttcaggccgtcttgcgggcagataccaaacgccttaagctacttgaggaggaacgtaggctgcaaggtcagctagaacagggagacgacactgcggctgagcgcctggagaaagtgtatgaagagctccgcgcaaccggagcggctgccgctgaggcaaaggctcggcgtattcttgcgggactcggctttgatcctgaaatgcagaaccgccctactcagaagttcagcggcggttggcgcatgcgcgtgtccctggcacgagcgctgttcatggaaccaacactgctaatgctggatgaaccaactaatcatttggaccttaacgctgtgatctggcttaataattatctgcaagggtggcgcaagactcttctgattgtgagtcacgaccagggcttcctggacgacgtttgtaccgacatcatacatctagacgcccagcggctgcattactataggggaaattatatgactttcaaaaagatgtaccagcagaaacagaaggagctgctcaagcagtatgagaagcaggagaaaaagctgaaagagctaaaggctggcggaaagagcacaaagcaagccgaaaaacaaacaaaggaggccctcacccgcaagcagcagaaatgtcgtagaaaaaaccaagatgaggaatcgcaggaggcgcctgaactcctcaagcgcccaaaagaatacactgttcgattcacattcccggacccaccacctctgtctccacctgtgctaggtctgcacggagtgacattcgggtatcaagggcagaagccactgtttaaaaatctggacttcggaattgatatggatagccgtatatgtatagtgggccctaacggtgtgggcaagtcaacactgttgctgctcctgacaggcaagctgacccctactcatggagagatgcgtaagaatcataggctaaagattggcttttttaaccaacagtatgccgaacaactgagaatggaagagacgcccactgagtacctacaacggggtttcaacctgccctatcaggatgcccgtaagtgcctgggtagattcggcctggagagccatgctcatactattcagatttgcaagctttccggtgggcagaaagcccgagtggtctttgccgagcttgcttgtcgagaacctgatgtactaattctggacgaaccaactaataacctggatatcgaatctatagacgctctcggcgaggccatcaacgagtacaaaggtgccgtgatcgtggtgtctcatgacgcccgactgatcaccgagactaactgtcagttgtgggtggtcgaggagcagagcgtatcgcagatcgacggagatttcgaggactataaaagagaggtgttggaagcactgggcgaggtcatggtgagtagacctagggagtag

SEQ ID NO: 215450 - DNA, 2424 bp, synthetic construct
  misc_feature 1..2424: note = Description of Artificial Sequence: Synthetic coding sequence
  source 1..2424: mol_type = other DNA
atgcccaaagccccaaagcagcagcctccggaaccagagtggattggggatggagagtccacctccccttccgataaagtagttaagaagggcaaaaaagataaaaagatcaagaagactttctttgaggaactcgctgtcgaagataaacaggccggagaggaagaaaaggtcctgaaagagaaggaacagcagcagcagcaacagcagcagcagcagaagaaaaagagagatacgcgaaagggacgcagaaagaaagacgtagacgatgatggagaggagaaggaactcatggagcggcttaaaaaactcagcgtgccaacatcggacgaggaagatgaggtgcccgctcccaagcccagaggaggcaaaaagaccaaagggggaaacgtctttgctgctcttatacaggaccagagcgaagaagaagaggaagaggagaagcacccccctaaaccagccaagcccgagaagaacagaattaacaaagccgtgtctgaggaacaacaacccgcactcaagggaaaaaaaggtaaagaagagaagtccaagggtaaggcaaagccccagaataagttcgctgccttggataacgaggaagaggataaagaggaagaaattattaaggagaaggaacctcctaaacagggtaaagaaaaggccaaaaaagccgagcaaatggaatacgagagacaggtggcatctttaaaggcagctaacgccgcagagaacgatttttccgttagccaggccgagatgagctctagacaagctatgctcgagaatgcatccgacatcaaactggaaaagttctctatctctgcccatgggaaggaacttttcgttaatgcagacctgtacattgtggcaggacgacggtatggcttggtaggccctaatggtaagggtaaaactacattgctgaagcacatcgcgaatagagctctctccattccacccaacattgatgtattgctttgtgaacaggaagtggtggcagacgaaacgcctgcggtgcaggccgttcttcgggcagacactaagcggctgaaacttctggaggaagagagaagactgcagggccaactcgagcagggcgacgatacagctgccgagagactagagaaagtgtatgaagagctaagggctaccggtgctgctgccgcagaagcaaaggccaggcgaattctggctggactcgggttcgatcccgaaatgcagaatcgacccacccaaaaatttagcggcggatggagaatgagggtcagcctggcacgggctctctttatggaacccactcttttaatgcttgacgagcccacaaatcacctcgatctcaacgccgtgatctggttgaataattatctgcagggttggagaaagaccctgctcattgtttcacatgatcagggatttttagatgacgtatgtactgacatcattcacttggacgctcagaggctgcactactatcgtggaaattatatgactttcaaaaaaatgtaccagcaaaaacagaaagagttgttaaagcagtatgagaagcaggagaagaaactcaaggagttgaaggccggagggaaatcaacaaagcaggccgagaagcagacaaaggaagcattgacccggaagcagcagaaatgtagacgaaagaaccaagatgaagagtcccaggaagccccagagctgctcaagcgtcccaaagaatacactgtgcggtttaccttccccgacccgcctcccctgagccccccagtgttgggtcttcatggcgtcactttcggctatcaggggcagaaacccctgttcaagaacctcgacttcggaatcgatatggattctcggatttgcatcgtcggcccaaacggggttggcaaatctaccctcctactccttttgactggtaaattgactcccactcatggagagatgagaaagaatcatcgtctgaagattggattttttaatcagcagtatgcagaacagcttcggatggaggagacaccaactgagtatctgcaacgaggattcaatctgccatatcaggacgctcggaagtgcttagggcgatttggactagaatctcatgcccacactatacaaatatgcaagctctcaggaggccagaaagctcgggttgttttcgctgaactagcctgtagagagcccgacgtgctgattctagacgaaccgaccaacaacctggatatcgagtcaatcgatgcactcggggaggcaataaacgagtacaaaggagcagtgatcgttgtcagccacgacgcgcgactgattaccgagactaattgccaactgtgggtggtcgaagaacagtcagtttcccagatcgacggtgacttcgaggactacaaaagggaggttttagaagcactgggcgaggtgatggtgagccgtcctagggaatag

SEQ ID NO: 215451 - DNA, 2538 bp, synthetic construct
  misc_feature 1..2538: note = Description of Artificial Sequence: Synthetic coding sequence
  source 1..2538: mol_type = other DNA
atgccaaaggccccaaagcagcaaccacctgagccggaatggatcggggatggcgaatccacatctccaagcgataaagtcgtgaaaaaaggcaagaaggacaaaaagattaaaaagacttttttcgaggagcttgctgtcgaagacaagcaggctggagaggaagaaaaggttcttaaggagaaagaacagcagcagcagcagcaacagcagcaacagaaaaagaagcgggataccaggaaagggaggcgcaaaaaagatgtggacgatgacggggaagaaaaagagctgatggaaaggctgaaaaagttaagcgttcctacaagcgatgaagaggacgaggtgccagctccaaagcccagaggcggtaaaaaaactaaagggggtaacgtgtttgcagcattgatacaggatcagagcgaagaggaagaagaggaagagaaacatccaccgaaaccggctaagccagagaaaaatagaatcaataaggcagtgagtgaggagcagcagccggcactcaaggggaagaaggggaaggaggagaagagtaaaggaaaagccaagcctcagaataaattcgccgctctcgacaatgaggaggaagacaaggaggaagagatcatcaaggagaaggagcctccgaagcaggggaaagaaaaggcgaaaaaggctgaacagggttccgaggaggagggggagggcgaggaagaggaggaggaaggcggagagagtaaagccgacgacccttacgctcacctatccaagaaagaaaaaaaaaagctgaaaaagcagatggaatatgagcgccaggtcgcatctctgaaggccgcaaacgctgccgagaatgattttagtgtgagtcaggccgagatgtcctcacgacaggctatgctggaaaacgcttccgacattaagctggagaagttctcgatctctgcccatggaaaagagctctttgtcaatgcagacctgtacattgtggccggaaggcggtacgggctcgtagggccaaacggaaaagggaagacgactctgttaaaacatatcgccaatagagccctgtctattcctccaaatattgatgttctgttatgcgagcaggaagtagttgcagacgagacacccgctgttcaggccgtgctgagggccgacaccaaacgcctaaagctgttggaggaagaaagacgtctgcaagggcagcttgagcagggggacgacactgcagcagaacggcttgaaaaagtgtatgaagagctaagggccacgggggctgctgcggctgaagctaaagcacggcgtatactcgctggcctgggtttcgatccagagatgcagaaccgtcccacccagaaattcagcggtggttggcggatgagggtgagcctcgccagagcgctgtttatggaacctacattgctcatgctggatgagcccacaaaccatttggacctaaatgcagtgatctggctgaacaattacctgcagggatggcgcaaaaccctgttgatcgtgagtcacgatcagggatttctcgatgacgtttgcaccgacatcatccacttggacgcacaacggctgcattactatcgtgggaactatatgactttcaagaagatgtaccagcagaaacagaaggagcttttaaaacagtacgagaagcaggagaagaagctgaaggaactgaaagcgggaggaaagtcaacaaaacaggccgagaagcaaactaaagaggccctaacgaggaagcagcaaaagtgtaggaggaagaaccaagacgaggaatctcaggaggcccctgagctgcttaagagacccaaggaatacactgttagatttaccttccctgaccctcccccactgtcgccccctgtgctcggtctgcacggcgtcaccttcggctaccagggtcagaagcctttgttcaaaaaccttgactttgggattgacatggacagcagaatttgcattgtcgggccaaacggggtcggaaaatcaacactcttgcttctgctcactggtaaactgactccaactcatggggaaatgagaaagaaccatcggctgaaaatcgggttttttaaccaacagtacgccgaacagctgcgaatggaggagaccccgactgaatatcttcagagggggtttaacctgccctatcaagacgcaagaaaatgcttgggccgattcggcctggaaagccacgcacacacaatccaaatctgtaaactctctggcggtcaaaaggctagggtcgtcttcgctgaactcgcttgtcgggagccagacgtgctgatactcgatgagcccactaacaatcttgacattgagagtatcgacgccctgggagaggcaatcaatgagtacaagggtgccgtaatcgtcgtgtcacacgacgccaggctcattactgagacgaattgccagctgtgggtggtcgaagagcaaagcgtaagccagatcgatggcgactttgaagactataagcgggaagtgctggaggctctgggcgaagtaatggtgtctcgccctcgggagtag

SEQ ID NO: 215452 - DNA, 717 bp, synthetic construct
  misc_feature 1..717: note = Description of Artificial Sequence: Synthetic coding sequence
  source 1..717: mol_type = other DNA
atgcctaaggctcccaaacagcagcctcctgagcctgaatggatcggggacggcgagagcacttcaccgtccgacaaggtggtaaagaaaggtaaaaaggacaaaaagattaagaaaacctttttcgaggagctagccgtcgaagataagcaggcaggggaggaggagaaagtgttgaaggagaaagagcagcagcagcagcaacagcagcaacagcagaagaagaaacgggacacgaggaagggtcggaggaaaaaggatgtggacgatgatggcgaggagaaagaactcatggagcgtctcaagaagctgagtcggggatttaatctgccctaccaggatgcaagaaagtgtctcggacgctttggcctggaatctcatgcccacacgatccagatttgcaagcttagtggcggacagaaggcccgtgtggtctttgcagagctggcctgtcgtgagcctgacgtgctcatcttggatgagccaactaataacctcgatattgaatctattgatgcgctaggggaggccattaatgagtacaagggtgcagtcatcgtcgtaagccacgacgccaggctgattactgaaacgaactgccagttgtgggtggtggaggaacagagtgtgtcacagattgatggtgatttcgaggactacaagcgcgaagttcttgaggcactgggagaagtgatggtgagccgacctagggaatag

SEQ ID NO: 215453 - DNA, 2424 bp, synthetic construct
  misc_feature 1..2424: note = Description of Artificial Sequence: Synthetic coding sequence
  source 1..2424: mol_type = other DNA
atgccaaaagcaccgaaacagcagcctcctgagccagagtggatcggtgacggagagtccacatctccaagcgacaaggtggtcaagaaaggcaaaaaggataaaaagattaagaagaccttcttcgaggaactggccgtggaagacaaacaggctggagaagaggaaaaagtgttaaaagaaaaagagcagcaacagcagcagcaacagcagcagcaaaagaagaaaagggacacacgtaaaggccgacgtaagaaagatgtggacgacgacggggaggaaaaggagctcatggagaggctgaaaaagctcagcgtccctaccagcgacgaagaggatgaggtgccggcacccaaacctagaggtggcaaaaagactaaggggggaaatgtgttcgctgcgctgatccaagatcaatcggaggaggaggaagaggaagagaaacacccgccaaaacccgctaagcccgagaagaaccgtatcaataaagccgtgtctgaggaacagcagccagccttgaaaggtaaaaaaggtaaggaagaaaaatccaaagggaaggccaagcctcaaaataaattcgcagctttagacaacgaggaggaagacaaagaggaggagatcatcaaggaaaaagagcccccaaaacagggtaaggagaaagctaagaaagcggagcagatggagtacgagcggcaggtcgcgagtctgaaggcagcaaacgccgcagaaaatgatttttcagtttcacaagctgagatgtcctctcgccaggccatgttggaaaatgcttcagatatcaagctagagaaattctcaattagcgcccacggaaaggaactgtttgtcaacgcggatttgtacatcgtggctggaaggcggtacggcctagtgggtccaaatggcaagggcaagaccacgctgttgaagcacatagcaaatcgggcactcagtattccacctaatatcgatgtgctgttatgtgaacaggaggttgtcgccgatgagacccccgctgttcaggctgttcttagggccgacacgaaaaggctgaagttgctggaggaggaaaggaggctgcaaggacagctggaacagggcgacgacacggccgctgagcgcctcgagaaagtctatgaagaactgcgtgcaaccggtgccgcagcagccgaggcgaaagcaaggagaattttagcgggtttaggctttgacccggagatgcagaaccgcccaacccagaaattcagcgggggttggaggatgcgagtttcactagccagggccctgttcatggagccgacactgttgatgctggacgagccgactaatcatctcgacctgaacgcagtaatttggctcaataactacctgcaagggtggcgaaagaccctgcttatagtttcccacgaccaggggtttctggacgatgtgtgtacagatattattcatctagacgcacagagactgcattactacagagggaattatatgacatttaaaaagatgtatcagcagaagcagaaggaactcctgaaacaatacgagaaacaggaaaagaaactgaaggaactcaaagcaggcggaaaatcgaccaaacaggccgaaaagcagacaaaggaggccctgacgagaaagcagcagaagtgccgccgtaaaaaccaagatgaggaaagccaagaagcccctgaactgctgaagaggccgaaggaatataccgttcggttcaccttccccgatccccctcctctgagtccccctgtgctcggtctacacggagtgaccttcggctaccagggacaaaaaccgctgttcaaaaatctagacttcggaatcgacatggactcgcggatctgcattgtagggccaaatggcgttggaaaaagtacactgctgctgttacttactgggaagctaactcccacacacggtgaaatgcgcaaaaaccacagattaaaaatcggcttcttcaatcaacagtatgctgagcaacttagaatggaggagactcctacagagtacctgcagagaggcttcaatctcccatatcaagacgccaggaagtgtttggggagattcggattggagagccacgctcatacaatccagatctgtaagctctctggaggtcagaaagctagggtcgttttcgccgagctggcctgtagagagcccgacgtcctgatcctagacgagccaacgaacaacttagatattgagagtatcgacgccctgggagaagccattaatgagtacaagggcgctgttatagtggtgagtcatgacgcgcgactaataacggagactaattgccagctttgggtggtagaggaacagtctgtttcccagatagacggagattttgaagattacaaacgcgaggtcctcgaagctctgggcgaggtgatggtaagtaggcctcgagagtag

SEQ ID NO: 215454 - DNA, 717 bp, synthetic construct
  misc_feature 1..717: note = Description of Artificial Sequence: Synthetic coding sequence
  source 1..717: mol_type = other DNA
atgccaaaagcccctaagcaacagcctccagaacctgaatggatcggagacggggaatcgacaagcccatctgataaggttgtgaagaagggtaagaaggataaaaagattaagaagacattcttcgaggaactcgccgttgaagacaaacaggcgggagaggaggaaaaagtgttgaaggagaaggaacaacagcaacagcagcagcaacagcagcaaaaaaagaagagagacacacgcaaaggcaggcggaagaaagatgtggacgacgacggggaagaaaaagaactgatggagaggctgaaaaagctttctagaggcttcaacctgccgtatcaggacgcccgtaagtgtctcggaaggtttggtttagagagtcacgcacacacgatccagatatgcaaattatctggtggccaaaaagcgagggttgtgtttgcagagctagcttgtcgggaacccgacgtcttgattctcgacgagcctactaacaacctggatattgaatcaattgatgcactgggggaagcaattaacgagtataaaggggctgttatcgttgtgtctcatgatgcacgcctcatcactgagacaaattgccaactctgggtggttgaggagcagtccgtctcccagatagatggagatttcgaggattataagcgggaggtgttagaggcccttggggaggtgatggtgagccgcccacgcgagtag

SEQ ID NO: 215455 - DNA, 1023 bp, synthetic construct
  misc_feature 1..1023: note = Description of Artificial Sequence: Synthetic coding sequence
  source 1..1023: mol_type = other DNA
atgcccaaggcccctaagcaacagccccctgaacctgagtggattggggatggcgaatcaacgagccccagtgacaaggtggttaagaaggggaagaaggataaaaagatcaagaagaccttctttgaagaattagcggtggaggacaagcaggcaggcgaggaggagaaagtgctcaaggagaaagaacagcagcagcaacaacagcagcagcagcagcagaaaaaaaagcgagacaccaggaaaggcagacgtaaaaaggacgtggatgacgatggcgaagagaaggagctgatggaaaggctgaaaaaactctcagtaccgacctcagacgaggaggatgaggtgcccgcacccaagcccagaggcggaaagaagaccaaggggggaaatgttttcgctgctctgatccaggatcagtcggaagaggaggaggaggaggagaagcacccgccaaaaccagcaaagcccgagaaaaataggatcaacaaggctgtatctgaggagcaacagcctgccctgaaggggaaaaaaggcaaggaagaaaaatccaaggggaaggcgaaaccacaaaataaattcgccgcacttgataacgaggaggaggacaaagaagaagagattatcaaagaaaaagaacccccaaagcagggtaaggaaaaagcaaagaaagcagagcaaggctcagaggaagagggggaaggcgaggaggaggaagaggaaggcggagagtcaaaagccgacgacccatatgcccacttgagcaagaaggagaagaagaaacttaagaagcaaatggagtatgagcggcaggtggcgtcgctgaaagcagccaacgccgcagaaaacgatttttctgtttctcaggccgaaatgagctctcggcaggccatgctggagaacgcgagtgatattaagctggagaagttctccataagtgctcacggcaaggaactctttgtcaacgccgatctgtatatcgtggccggtaggcgttacggcctggttggccctaacggatag

SEQ ID NO: 215456 - DNA, 2538 bp, synthetic construct
  misc_feature 1..2538: note = Description of Artificial Sequence: Synthetic coding sequence
  source 1..2538: mol_type = other DNA
atgcccaaggcgcctaaacaacagccgcctgagccagagtggattggagacggcgaaagtacctcaccctcggacaaggtggtgaaaaaaggaaagaaggacaagaagattaaaaagacttttttcgaagaactggctgttgaagataagcaggccggtgaagaagagaaggtacttaaggaaaaagaacagcagcagcagcaacagcagcagcaacaaaagaagaaacgcgatacccgtaagggtcgcagaaaaaaggatgtcgacgacgacggtgaagaaaaagagttaatggaacgacttaagaagctcagtgtaccaacctcagacgaagaggatgaagtgcctgcccctaagccaagaggcggtaaaaaaaccaagggcggtaacgtcttcgccgcattgatccaagaccagtctgaggaggaagaggaggaagagaagcacccccctaaaccagctaagcctgaaaagaacaggataaataaggccgtgtcagaagaacaacagcccgcactaaagggcaagaagggcaaggaagagaaatctaaaggaaaggccaagccccagaataaatttgcagcccttgacaacgaggaggaggacaaagaggaggaaatcatcaaagagaaggaacccccaaagcagggcaaggagaaagctaaaaaagcagaacaaggttccgaggaagaaggggagggcgaggaggaggaagaggagggcggtgagagcaaggccgacgacccatatgctcacctctcgaagaaggagaagaagaagcttaagaagcaaatggaatatgagagacaggttgctagcctcaaggctgccaacgcagccgaaaacgacttttctgtcagtcaagctgagatgagtagccgacaagctatgctcgagaatgcttcagatataaagttggaaaagttctctattagcgcccacgggaaagagctttttgtcaacgcagatctgtacatcgtggctggacggcgttacgggctagtcggtcctaacgggaagggcaaaaccactcttctaaagcacattgccaatagggccctgtcgattcctcccaatatcgacgtgctgctctgcgagcaggaggttgtcgctgacgagactccagcagtgcaggccgtcctgcgtgctgacacaaagcggttgaagctcctggaggaagagaggcgcctgcaagggcagctggaacagggcgacgatacggctgctgagagactcgagaaggtatatgaagagctgcgcgctaccggcgctgctgcggcagaggcaaaagcacggaggatcctggccggtctgggtttcgatcctgagatgcaaaaccgtcccacgcagaaattctctggaggctggagaatgagggtgtccctggccagagccttgttcatggaacctactctccttatgctggatgagccaacgaatcacctggatttaaacgctgttatttggttaaacaattacttacaagggtggaggaagaccctgttaattgtgtcacatgatcagggctttttagatgatgtgtgcaccgacatcatccaccttgatgcccagagattgcactattataggggcaactacatgacctttaaaaagatgtaccagcagaagcagaaagagctcctgaaacagtacgagaagcaggagaaaaaactgaaggagttaaaagccggaggaaagagcacaaagcaagcggaaaaacagacaaaggaggcactcactcggaaacagcagaagtgcagacggaaaaaccaggacgaggaatcccaagaagcccctgaactcctgaaacgccctaaggagtacactgtgagattcactttccctgatcctcccccactatctccccctgtgctcgggctccacggcgtgacattcggctaccagggccagaaacctttgtttaaaaatctggactttggaatcgacatggactcccgaatttgcatcgttggaccaaatggtgtcgggaagtctactctgttactgttgctcacagggaaattaacacccacgcacggcgagatgcgcaagaaccatcgactcaaaataggattctttaaccaacaatacgcagaacagcttaggatggaggaaactcccacggagtacctccagcgcggattcaacctgccctaccaggatgctcggaaatgtctcggacggttcggcctcgaatcccatgctcatacaattcagatatgtaaactcagcggcggtcagaaagctcgtgtggtctttgctgagcttgcgtgcagggaacccgacgtgttaatattggatgaaccgacaaacaatctggacattgaatccatcgacgccctgggagaagcaatcaatgaatataagggggctgtgattgtggtcagccatgatgctaggctgatcaccgaaaccaattgtcagctctgggtagtcgaagaacagagcgtgagccaaattgacggagatttcgaagactataagagggaagtgctcgaagccctcggcgaagtcatggtatctcggcctcgtgagtag

SEQ ID NO: 215457 - DNA, 2424 bp, synthetic construct
  misc_feature 1..2424: note = Description of Artificial Sequence: Synthetic coding sequence
  source 1..2424: mol_type = other DNA
atgcctaaggccccaaaacagcagccccctgagccagaatggatcggggacggagagtctacctccccatcagataaggtggtgaagaagggcaagaaagataagaagattaaaaagaccttcttcgaagaactcgccgtggaagataagcaggcaggcgaggaggagaaggtgcttaaggagaaggaacaacagcagcagcagcaacagcagcagcaaaaaaaaaaacgcgatacaagaaaaggtcggcgaaaaaaagatgtggatgacgacggagaagagaaggagctgatggagcgactgaagaaactgagtgtgccaacgtccgacgaagaagatgaggtccctgctcccaagccaagagggggtaagaaaaccaagggagggaatgtgtttgcggctcttatccaggaccagagtgaagaggaggaggaggaagagaagcacccgcctaagcctgcaaagccagaaaagaaccgaattaacaaggctgtttccgaagaacaacagccagccctgaagggaaaaaaagggaaggaagagaaatcaaaagggaaagcaaaaccccagaacaagtttgcagccctggacaatgaagaggaggataaagaagaagaaataatcaaagagaaggagccccctaagcagggtaaggagaaagcgaagaaggccgaacaaatggaatacgaacgacaggtggccagtctgaaggccgcaaatgctgcagagaatgatttttcagtctcccaagcggaaatgagctctcgtcaagcaatgctagagaatgcttcagatattaagctcgaaaagttttccatctcagcacacggcaaggaactgttcgtcaacgccgacctgtacatcgtggccggtagacgttacggcctcgtgggccctaacggaaaaggcaagaccaccctcctgaaacatattgcgaacagagccctgtccattccaccaaatattgatgtgctgctgtgcgaacaggaggttgtggccgacgagacccctgccgtgcaagccgttctgcgcgctgatacgaagcgtctgaagctccttgaggaggaacggaggcttcaggggcagcttgaacagggtgatgataccgcagcggaacgattggagaaggtgtacgaggagctgagagcaactggggctgccgctgccgaggccaaagccaggaggattcttgccggtcttggatttgacccagaaatgcagaatagacccacacaaaagttttccggcggatggcgcatgcgagtgtcactggcacgtgctcttttcatggaaccaacactcttgatgttagatgagcctaccaaccatctcgatcttaatgctgtgatctggctgaataactatctgcagggatggcggaaaactctgctgattgtctcacacgaccaaggtttcttggatgacgtctgtacggacataatccacctggacgcacagcggcttcactactaccgcggaaactacatgacttttaagaagatgtaccagcagaagcaaaaagaactgctcaagcagtacgaaaaacaggaaaagaagctcaaggagttgaaggcaggcggaaagtccaccaagcaggccgaaaaacagacgaaggaagcattgacccggaaacagcagaaatgccggaggaagaaccaggacgaagaatctcaggaagcacccgaactcttgaagcgccctaaggagtacactgtccgattcacattcccagacccccctcccctgagtccacctgtccttggcctgcacggagtgacttttggataccaaggccagaagccactcttcaagaatcttgactttggtattgatatggatagcaggatctgcattgtaggcccaaacggtgttggaaagtccaccctgctgctgttgctgacaggaaagctaacgccaactcacggtgagatgcggaagaatcatcgcttgaagataggcttcttcaaccaacaatacgccgagcagttacgtatggaggagacacccacagagtatctgcagcgcggatttaatctgccgtatcaagatgctcggaaatgtctggggagatttgggctggaatcgcatgcccatactatacaaatctgcaagttaagtggcggacagaaagccagggtagtcttcgcagagctcgcctgccgggagcccgacgtgctcattctcgatgagccgaccaataacctcgacattgaatcaatagacgcgctcggggaggccattaacgagtacaaaggagccgtgattgtggtgtcccacgatgcaagactcattaccgagacaaattgccagctttgggttgtggaggaacagtcagtctcccaaatagacggggattttgaggactacaagcgtgaggttttggaagcactcggagaagtcatggttagtcggccaagagaatag

SEQ ID NO: 215458 - DNA, 2424 bp, synthetic construct
  misc_feature 1..2424: note = Description of Artificial Sequence: Synthetic coding sequence
  source 1..2424: mol_type = other DNA
atgcctaaggccccaaaacaacaaccgccagaacccgagtggataggggacggtgaatctacctctccaagcgataaggtcgttaagaaggggaaaaaagacaaaaagatcaaaaaaacgttcttcgaggagctggccgtggaggacaaacaggctggagaagaagagaaggtgctgaaggagaaagagcaacagcagcaacaacaacaacagcaacagaagaaaaagagggacacacggaagggcagacggaagaaggatgtggacgacgatggagaggaaaaggaactgatggaaagactaaagaagctctctgtccccactagcgacgaagaggatgaagtaccggctcctaaacccagaggcggaaagaagactaaggggggaaacgtgtttgccgctttgatacaggatcagtctgaggaggaggaggaagaggagaagcacccccctaagcccgcaaagccagaaaagaatagaattaacaaggccgtgtccgaggagcaacaaccagctctgaagggcaaaaaaggcaaagaagaaaagtccaaaggtaaagcaaaaccacagaacaagtttgcagccctcgataatgaggaggaagataaggaagaggagattatcaaggaaaaagagccccctaagcaggggaaagaaaaagctaaaaaagcggagcagatggagtacgagcgtcaggtggcatcacttaaggcagctaacgcagcagagaatgacttcagtgtgtcccaggctgaaatgtccagcaggcaagctatgctcgagaatgcatccgacattaagttggaaaaattcagtataagtgcccatggtaaggagctctttgtgaatgccgatctctacatagtcgccggacgcagatatggtcttgtggggccaaatgggaaggggaaaaccaccctgctcaagcacatcgcgaatagggccttgtcgattccccctaatatcgatgtgcttctgtgcgaacaggaagttgtggcagatgaaacacccgcagtgcaggcagtcctccgcgctgacaccaagcgcctcaaactcctagaagaagagaggaggttgcaggggcaactggaacagggcgacgatactgctgctgagcggctggagaaggtgtacgaggagctgagagcaacaggagcggctgccgctgaggcaaaggcccgacggatactggccggattaggattcgacccagaaatgcagaatcgtccaacacaaaaattttctggtggttggagaatgagagtcagcctggcacgtgccctgtttatggaaccgacacttctgatgctcgatgagcccaccaaccatctggacctcaatgccgtcatctggctcaataattacctgcaggggtggagaaagacactcctgatagttagtcatgatcagggtttcctcgacgatgtgtgcacagatataatccatttggacgcccagaggctccactactaccgaggaaactacatgacgtttaaaaaaatgtaccagcagaaacaaaaggagttgcttaaacagtatgagaagcaggagaagaagttgaaagagctgaaagcgggtggaaagtctaccaagcaggcagagaaacagacgaaggaggccttaactcgtaagcagcaaaaatgtaggcggaaaaatcaagacgaagagtcccaagaggctccggagctgttgaagcgccctaaagaatataccgttagatttacattccccgatccacctcctctttcccctccagtgctcggcctgcatggggtgaccttcggataccaggggcagaaaccccttttcaagaatctggatttcggcatagacatggacagccgcatttgcatagtcggacctaatggagtgggcaagtcaacactgctgctgctcctgactggtaaactaacaccaacccatggagaaatgaggaagaaccacaggctgaagattggtttctttaatcagcaatacgcggagcagctgaggatggaggaaactcccactgagtacctgcagcggggattcaatttgccgtatcaagatgccagaaagtgcctgggaagattcggtctcgaaagccacgcccatactatacagatctgtaaactgagtggtggacagaaggcccgtgttgtgttcgctgaattagcctgtcgcgagccagatgtcttgattctggatgagcccacaaacaatctcgacatcgaatctattgacgctctgggcgaagccattaatgaatataagggcgctgtgattgttgtgagccacgacgccagactgattaccgagacgaattgccagttatgggtagttgaagagcagtccgtctcccagatagacggcgatttcgaggattacaagcgagaggtgctcgaagcactgggggaagtgatggtcagcagacctcgggaatag

SEQ ID NO: 215459 - DNA, 717 bp, synthetic construct
  misc_feature 1..717: note = Description of Artificial Sequence: Synthetic coding sequence
  source 1..717: mol_type = other DNA
atgcccaaggctcctaaacagcagccacccgagccggagtggatcggggacggtgagagcacatcaccctcagataaggtcgtcaaaaagggcaagaaggacaaaaagattaaaaagacattcttcgaggaactcgcagtcgaggacaagcaggccggagaagaagaaaaggtattgaaggaaaaggagcagcaacagcagcagcagcagcagcagcagaaaaagaagcgagataccaggaaagggaggaggaagaaggacgtggacgacgatggggaagaaaaagagctgatggaacgcctcaagaagctttcccgagggtttaatctgccctatcaggatgcccgaaaatgtcttggccgtttcgggctggagtcacacgcgcataccatacagatttgcaaactcagcggaggccagaaggctcgagtggtgttcgccgaactggcctgtagggagccagacgtgctgattcttgacgagcctaccaataatctcgacatcgagtccattgacgctctgggagaggccattaacgagtataaaggcgctgtaatcgtagttagccacgacgcaaggctcattacggagactaattgtcagttgtgggtggtggaagagcagagcgtgtcacagatagatggtgattttgaggattacaagcgagaggtgctcgaggcgctgggggaagtgatggtgagtcggcctcgggaatag

SEQ ID NO: 215460 - DNA, 1023 bp, synthetic construct
  misc_feature 1..1023: note = Description of Artificial Sequence: Synthetic coding sequence
  source 1..1023: mol_type = other DNA
atgcccaaggccccaaagcagcaaccgccagagcccgagtggatcggggatggggaatccacaagcccatccgataaagtcgtgaagaagggaaaaaaagacaaaaaaattaagaagacattttttgaggagctggctgtagaggacaagcaggcgggagaagaagagaaggtgctcaaggaaaaggaacaacagcagcagcagcaacagcaacaacagcagaagaaaaaaagggatactcgcaaaggacggaggaaaaaggacgtggacgacgacggtgaggaaaaggagttaatggagaggctgaagaaattatctgtccctacctccgacgaagaagatgaggtgcccgcaccaaaacctaggggtgggaagaaaaccaaaggcggaaacgtattcgccgctctgattcaggatcagagcgaggaagaagaagaagaagaaaagcaccctcccaagccggctaaacctgagaaaaatcgaatcaacaaggccgtaagtgaagagcagcagcccgcactcaaagggaagaaggggaaggaagagaagagcaagggcaaggccaaaccccagaataagtttgctgcgctcgataacgaagaggaagataaggaggaggagatcattaaggaaaaagaacccccaaaacaggggaaggaaaaggctaagaaggctgaacagggaagcgaagaggagggtgagggcgaagaggaggaggaggaggggggagaatctaaagccgacgatccatacgcccatctctccaagaaggagaagaagaaacttaagaaacagatggagtacgaaaggcaagtcgctagcctgaaggccgctaatgccgctgaaaacgacttttcagtaagtcaggccgagatgagctcgcgtcaggccatgcttgagaatgcgagcgacatcaagttggaaaaatttagtattagtgcgcacgggaaagaactatttgtgaatgctgatctctatatcgtcgccggtcgacgatatggattggttggcccaaatgggtag

SEQ ID NO: 215461 - DNA, 2538 bp, synthetic construct
  misc_feature 1..2538: note = Description of Artificial Sequence: Synthetic coding sequence
  source 1..2538: mol_type = other DNA
atgcctaaggcaccgaagcaacagcccccagagcctgagtggatcggcgatggagagtcgactagtccctcagacaaagttgtgaagaagggcaagaaggacaaaaaaatcaaaaaaaccttttttgaagagctcgcggtggaagataagcaggcaggagaggaggagaaagtgctgaaagagaaggagcagcagcaacagcagcagcaacagcagcagaagaaaaaaagagacacccgtaaggggaggcgtaaaaaggacgtcgacgacgacggcgaagagaaagagctaatggagaggttgaaaaagctgagtgtaccgacctcagacgaggaggatgaagtgccggcaccgaaacccagagggggaaagaaaactaaggggggtaacgtttttgccgctctgattcaagaccaaagcgaagaggaggaggaagaagaaaagcatcctccgaaacccgctaagcctgaaaagaacaggataaataaggccgtctccgaggagcagcagccagcgctgaagggcaaaaaagggaaagaggagaaaagcaaagggaaggcaaagcctcagaacaagttcgcagcactcgataatgaagaagaagataaggaggaggagatcatcaaggaaaaggaaccccctaagcaagggaaggagaaagccaaaaaggccgagcaggggtccgaggaggaaggggagggcgaagaggaggaggaggagggtggcgaaagcaaggctgacgatccttacgcacacctgagtaagaaggaaaagaagaagctcaagaagcagatggagtacgaaaggcaggttgcctctttgaaggcagccaatgccgctgagaatgacttctccgtgtcacaggccgagatgtcatcgaggcaggccatgcttgaaaatgccagcgatatcaagcttgagaaattctccattagcgcgcatggaaaggagttatttgtaaatgccgatctgtacattgtcgctggaagacgatatggcctggtgggacctaatggcaaggggaaaaccactttgctgaagcatattgccaatcgcgcactctcaatcccaccaaacatagatgtactgttatgcgagcaagaagtagtggctgacgagactcccgcagtgcaggccgttctgagagcggacacaaaaagactcaaactgttggaggaggagcggcgacttcaggggcaactggagcagggtgatgacacggctgctgaacgactggaaaaagtctatgaggagcttcgggctactggggcagctgccgcagaggccaaagcaagacgcatcctcgctgggctgggattcgacccggaaatgcagaataggcccacccaaaaattctctggcggttggcgaatgcgcgtctcgctcgcgagggccttatttatggaaccgaccctcttaatgcttgacgagcccactaatcaccttgacctcaacgctgtcatttggttgaataactacctgcagggctggcgcaagactctgttaatcgtcagccatgatcaggggtttctggatgacgtctgcacagacataattcacctggacgcacaaagactgcactattatcggggaaattatatgacgttcaagaaaatgtaccaacagaaacagaaggagctactaaagcagtacgaaaaacaggagaaaaagctcaaggaacttaaagctggaggcaagtctacaaagcaagctgaaaagcagacaaaggaagcactgacccgaaagcagcaaaaatgccgcaggaaaaaccaggatgaggaaagtcaggaggccccagagcttctgaagcgcccaaaggaatatacagtgcgcttcactttcccggaccccccacccctgtcaccaccagtccttgggctccacggtgtgacctttggctatcaggggcagaagcccctgttcaaaaaccttgattttgggatagacatggattcaagaatatgtatcgtgggcccaaatggggtgggtaaatcgacactactattgctcctgactggaaaactgaccccgacacatggtgaaatgcggaaaaatcacagattgaagatcggtttcttcaatcagcagtacgcagagcagctccggatggaggaaacacccacggagtatctgcaaagagggttcaatctcccttatcaggacgccaggaagtgcttaggtcgcttcggactggaaagtcatgcacacactattcagatctgtaaactttctgggggacagaaggctcgcgttgtgttcgccgaactcgcttgccgagagcccgacgtgctgatccttgacgagccaactaataacctggacattgaaagtattgacgctttgggagaagctatcaacgaatacaagggagctgtgatcgtggtgagtcacgatgctagactgatcaccgaaaccaactgccagctgtgggtggtcgaggaacaatccgtgtcccaaattgacggcgatttcgaggactataagagagaagtgctggaggcgctcggagaggttatggtgtcaaggccgagagaatag

SEQ ID NO: 215462 - DNA, 1023 bp, synthetic construct
  misc_feature 1..1023: note = Description of Artificial Sequence: Synthetic coding sequence
  source 1..1023: mol_type = other DNA
atgcctaaggctcctaagcagcagccgccagaaccagaatggatcggagacggggagtccacttcaccatctgataaggtggttaagaagggtaagaaggacaagaagattaaaaaaacgttttttgaggagttggctgtggaagataaacaggctggcgaagaggaaaaggtactcaaggaaaaagaacagcagcagcagcagcagcaacagcagcaacagaaaaagaaacgggacaccaggaagggtcgacgcaaaaaagatgttgacgacgatggggaggaaaaagaattgatggagcgattgaaaaaactgagtgttccaacgtcagatgaagaagacgaggtacctgccccaaagcctcgcggaggcaaaaaaactaaaggagggaatgtctttgcagcccttatccaagatcagagcgaggaggaagaggaggaggagaaacaccctccaaaaccagcaaagcccgagaagaatagaatcaacaaagctgtctcggaggaacagcaaccggctctgaaggggaaaaagggaaaagaggagaaatctaagggcaaggcaaaaccacagaacaaattcgcggcactcgacaacgaggaggaagataaggaggaagagatcatcaaggagaaagaacccccaaaacagggcaaggagaaggcaaaaaaggcggagcagggtagcgaggaggagggcgagggcgaagaagaggaagaagaaggcggtgaaagtaaggctgacgatccttacgcacatctgtcaaaaaaggaaaagaagaagctgaagaaacaaatggaatatgagcgccaggtggctagcttgaaagctgccaacgcagctgagaacgacttctccgtttcccaagccgaaatgtcaagcaggcaggccatgctggagaacgcctccgatatcaagcttgaaaagttttccatttccgcgcacggtaaagagctattcgttaacgctgacctgtacattgtggctggtcgtagatacggcctggtgggtcccaatggatag

SEQ ID NO: 215463 - DNA, 2538 bp, synthetic construct
  misc_feature 1..2538: note = Description of Artificial Sequence: Synthetic coding sequence
  source 1..2538: mol_type = other DNA
atgccgaaggcgccaaaacaacaaccccctgaaccagagtggatcggtgatggcgagtctactagcccaagcgacaaagttgtgaagaagggtaaaaaagataagaagattaaaaaaacattttttgaggaactagccgtggaggataaacaagcaggcgaggaagagaaagttttaaaagaaaaggagcagcagcagcagcaacagcagcaacaacagaagaagaagagagacacccgcaaagggagacgcaaaaaggatgtggatgacgacggtgaggagaaagagctgatggagaggctcaagaagctgtccgttccaacctctgatgaggaggacgaagtgcctgcgccaaagccccgtggcggaaaaaaaacaaaaggaggaaatgttttcgcagccctgatccaggatcagtccgaagaagaggaggaggaggaaaagcatccaccaaagccagccaaacctgagaagaacaggatcaacaaagccgtgtcagaggagcagcaaccggctcttaaaggaaaaaaaggtaaagaagagaaaagcaagggcaaagccaagccccaaaataaattcgccgctcttgataatgaagaggaggataaggaagaggaaattattaaagaaaaagaaccgccaaagcagggaaaagaaaaggccaaaaaagccgagcaaggctctgaagaagagggcgagggtgaggaggaggaagaagagggaggagagtccaaagcggatgatccctatgcccatctttctaagaaggaaaagaagaagctgaagaagcagatggagtatgagaggcaggtggcttctttaaaggctgcaaatgctgcggagaacgacttcagcgtgtcacaggctgagatgagtagtcgacaagctatgttagaaaacgcaagtgacattaagctggagaagttctctatctccgcacacggcaaagaacttttcgtgaacgctgatctttatatcgtggccggtcggaggtacggcctggtcggcccaaacggaaaagggaaaacgacgctcctcaagcacatcgcaaatagagcactgtcaattcctcctaatatcgacgtactgctgtgtgagcaagaggtagtggcagacgaaacgcctgccgtgcaggccgtgttgcgggctgataccaagcggttaaagctgctagaagaagaacgaaggctgcagggacaattggagcagggggacgacaccgccgctgaacggttagagaaggtgtatgaggaactgcgggcaaccggagctgccgcagccgaagccaaagcgaggcgaatcctggcgggactaggttttgatcccgaaatgcagaaccggcctacacaaaagttttctggagggtggaggatgagggtgtctttagctcgggctcttttcatggaacccaccctgttgatgctggacgaacctaccaatcatctcgacttgaatgctgtcatatggctaaacaactatttgcagggctggcggaagacgctgcttatagtgtcgcatgaccagggatttttagatgacgtctgtacagatattattcacctcgacgctcaacgtctgcactactatagaggcaactatatgacgtttaaaaaaatgtatcagcaaaagcagaaggaattgctgaagcagtacgagaaacaggagaaaaaactcaaagagctgaaagctggcggtaaatctacaaagcaggctgaaaagcagaccaaagaggccctgacccgaaagcagcaaaagtgtcgcaggaagaatcaggatgaagagagccaggaggcacccgagttgctgaaacgccctaaggaatacacagtgcgttttacttttcccgatccccctccattaagtccccctgtgttggggctgcacggtgtgacattcggctaccagggtcaaaagcctctattcaagaatttggattttggaattgacatggactccagaatctgcattgtcggtccgaatggcgtggggaaatcgactctcctgctcctgctgactggaaagcttactccaacccatggtgagatgaggaagaaccaccgcctgaagatcgggttttttaaccagcaatacgcggaacaactccgaatggaggaaactcctaccgaatatttacagcgagggtttaacctgccgtaccaggacgcccgaaagtgtctgggcaggttcgggctggagtcccatgctcacaccatccaaatctgcaagctctccggtggacaaaaagctcgagtcgtgtttgctgaacttgcatgccgcgagccggatgtgctgatcttggacgagccaactaataatctggacatagaaagtattgatgctttgggggaagccattaacgagtataaaggggctgttatagttgtgtcccatgacgccagactcatcaccgagacaaactgccagttgtgggtcgtggaagaacagtctgtgtctcagattgatggtgactttgaagattataagagggaggtcctggaggctctgggggaggtaatggtgtctagacctcgagaatag

SEQ ID NO: 215464 - DNA, 1023 bp, synthetic construct
  misc_feature 1..1023: note = Description of Artificial Sequence: Synthetic coding sequence
  source 1..1023: mol_type = other DNA
atgcctaaggccccaaaacagcagcctcccgagcctgaatggataggtgatggagaatctacttctcccagtgacaaggttgtcaagaagggcaaaaaggataagaagatcaaaaagacatttttcgaagagctggcggtcgaggataaacaggccggagaggaagaaaaggtgctgaaggagaaagaacagcaacagcagcagcaacagcagcaacaacagaagaaaaagcgcgacacacgtaagggcaggagaaagaaagacgtcgatgatgatggagaagagaaagagctgatggagcgcctgaaaaaattgtccgtgcctacaagcgatgaggaggacgaagtaccagcccctaaaccacgcggaggtaagaaaacgaagggcggaaatgtgtttgcggctctcatccaggatcagagtgaagaggaggaagaggaagagaaacacccccctaagccggctaagccagagaagaacagaatcaataaagcggtgagcgaagagcagcagcccgctcttaagggcaagaaaggcaaagaagagaagtccaaaggaaaagctaagccccagaacaaattcgccgctctggataacgaagaagaagacaaggaagaggaaattatcaaggaaaaggagccgccaaagcagggaaaagaaaaggctaagaaagccgagcaggggtctgaggaggagggggagggtgaggaggaggaggaagaagggggagaatccaaagcagacgacccctacgctcatttatccaaaaaggaaaaaaagaagctgaaaaagcagatggaatatgaaagacaggtcgcgtctctcaaggcagccaacgctgcagaaaatgacttctccgtgagccaagccgaaatgtccagccgtcaggctatgctggaaaacgccagcgacattaagctcgagaagtttagtatctctgctcacggaaaagaactattcgtcaatgcggacctctatattgtcgctggacggagatacggactcgttggccctaacggctag

SEQ ID NO: 215465 - DNA, 1023 bp, synthetic construct
  misc_feature 1..1023: note = Description of Artificial Sequence: Synthetic coding sequence
  source 1..1023: mol_type = other DNA
atgcctaaagctccaaaacaacagccacctgaacccgagtggattggggatggtgagagcacctcaccatccgacaaggtcgtgaaaaagggcaaaaaagataaaaagattaaaaagacgttttttgaggagttggccgttgaggacaaacaggctggagaggaagaaaaggtccttaaagagaaggagcagcagcagcagcagcagcaacagcaacagcagaagaagaagcgcgacacacggaagggtagacgaaagaaggacgtagatgacgatggggaggaaaaggaactcatggagaggttgaaaaagctgtcagtgcctaccagcgacgaggaggacgaggtcccagccccaaagcccagggggggaaaaaagaccaagggcggtaatgtatttgcggcattgatccaggaccagtctgaggaggaggaagaagaagagaaacaccccccaaagccagcaaagcctgagaagaaccggataaacaaagccgtaagcgaagaacagcagccagccttgaagggaaaaaagggcaaggaagagaaatcaaaaggtaaagcgaagccccaaaataagtttgcagcccttgacaacgaggaggaagataaggaagaggagataattaaggagaaggaaccacccaagcagggaaaggagaaagccaagaaggctgagcaaggttccgaggaggagggtgagggcgaggaggaggaggaggaaggaggcgagagcaaagctgatgatccgtatgcacacctgagcaaaaaggaaaagaagaaactgaagaagcaaatggagtatgagagacaggtcgcctcactgaaagccgcaaacgccgctgagaacgatttcagtgttagccaggccgaaatgtctagtagacaggctatgctggagaacgcatctgacattaaactcgaaaagttttcaatctctgcccacggtaaagagctattcgtgaatgccgatctttacatcgtggctggccgaagatacggactggtagggccaaatggatag

SEQ ID NO: 215466 - DNA, 1023 bp, synthetic construct
  misc_feature 1..1023: note = Description of Artificial Sequence: Synthetic coding sequence
  source 1..1023: mol_type = other DNA
atgccaaaggcccctaaacagcagccccctgagccggaatggattggcgacggcgagtcgacttcccctagcgacaaagtcgtgaaaaaaggcaagaaagacaaaaagattaaaaagacctttttcgaagaactggcagtggaggataagcaggcaggcgaagaagagaaggtactgaaagagaaagaacagcagcagcagcagcagcaacaacagcagcagaagaagaaaagagatacgagaaaagggaggcgcaaaaaggacgtagatgatgacggggaggagaaagaattgatggagcgactgaagaaactgtcagtaccgacctccgacgaggaagacgaagtaccagcccctaagccgagaggaggaaagaaaacgaaaggcggtaacgttttcgctgccttgattcaggatcaatccgaagaggaggaggaggaggaaaagcaccccccaaaacctgctaagcccgaaaagaaccggattaacaaggccgtgtctgaggagcagcagcccgcattgaaaggtaaaaagggaaaagaggagaagagtaaaggaaaggccaagcctcagaacaagttcgccgcactggacaacgaggaggaagataaagaagaagagatcattaaggagaaggagccacctaagcagggcaaagaaaaggcgaagaaggcagagcaggggtccgaggaagagggtgaaggagaggaagaggaggaggagggcggagaatcaaaggctgatgacccctacgcacacttgtcaaagaaggaaaagaagaagctgaaaaagcagatggaatacgaacggcaggtggccagtctcaaggctgccaatgcagccgaaaacgactttagtgtgagccaagccgaaatgagtagtaggcaggcgatgctggagaatgcctcagatattaagctcgagaagttcagcataagcgcccatggaaaggagttattcgtgaatgccgacctctatattgtcgctggaagacgttacggtctggtcgggcctaatggctag

SEQ ID NO: 215467 - DNA, 1023 bp, synthetic construct
  misc_feature 1..1023: note = Description of Artificial Sequence: Synthetic coding sequence
  source 1..1023: mol_type = other DNA
atgccgaaagctcctaaacagcagccgccagagcccgagtggataggggacggggaatccacatctccaagtgataaggtggtaaagaaggggaagaaagacaaaaagatcaaaaagacctttttcgaagagctggctgtcgaggacaaacaggcgggtgaggaagagaaagttctgaaggagaaggaacagcagcagcagcagcagcagcaacagcaacagaaaaagaagcgggacacaagaaaaggccgtagaaaaaaagacgtggatgacgacggcgaggaaaaagagttaatggagagacttaagaaactgtctgtgcctacaagtgacgaggaggacgaggttcccgcacccaagcctcggggtggcaagaaaactaagggagggaatgtgttcgccgcattgatccaagatcagtccgaggaagaagaagaagaggaaaagcatccacctaagcctgctaaacctgaaaagaatagaattaacaaggcagtgtctgaagagcaacaacctgccttaaaggggaagaagggaaaggaggaaaagagtaagggaaaggctaagcctcagaacaaattcgcagctctcgataatgaggaggaggataaggaggaagaaatcattaaggagaaggaacccccaaaacagggaaaggagaaagctaagaaggccgagcagggcagcgaggaggaaggggaaggcgaagaagaggaagaggagggcggagagtctaaagcagatgacccctacgcccaccttagcaagaaggaaaaaaaaaagctcaaaaagcaaatggagtacgaaagacaggtggcctcgctgaaggctgctaatgcagcggaaaatgacttctccgtctcccaggccgagatgagctcacggcaggcaatgctggagaatgcaagtgatatcaagctagagaaattcagcatctcagctcatggaaaggagctgttcgtgaatgcagatctgtacatcgtcgctggaaggcgctatgggctcgttggacccaacggttag

SEQ ID NO: 215468 - DNA, 2424 bp, synthetic construct
  misc_feature 1..2424: note = Description of Artificial Sequence: Synthetic coding sequence
  source 1..2424: mol_type = other DNA
atgcctaaagctccaaagcaacaacctcctgaacctgaatggatcggagatggtgaatctacatctccctccgataaggttgtgaagaaaggaaaaaaagacaaaaaaatcaaaaaaacattttttgaggagctcgcagtggaagacaaacaagctggcgaagaggaaaaagtactgaaggaaaaagaacagcagcagcagcaacagcagcagcagcagaagaagaaacgggacacccggaaaggcaggagaaaaaaagacgtggacgacgacggagaagaaaaagaattaatggaaaggttaaaaaagctgtcagtgcctaccagcgatgaggaagatgaggtgcccgctccaaagccgcgtgggggaaagaagactaagggcggtaatgtattcgccgcactgatccaggaccagagcgaagaggaggaagaagaagagaagcatcccccaaagccagcaaagcctgaaaagaaccggatcaataaggctgtgtctgaggaacagcagccagcactgaagggcaaaaagggtaaagaagagaagagcaagggcaaggccaagccacagaacaaatttgccgctttggataatgaggaagaggacaaagaagaagaaatcattaaggagaaagaacctccgaagcagggaaaagaaaaagccaagaaagccgaacagatggaatatgagcggcaggttgcctcccttaaagccgctaacgccgctgagaatgacttcagcgtctcccaggccgaaatgagctccagacaagctatgctggagaacgctagcgacattaaactggaaaagttctcaattagcgcacacggcaaggaactgtttgtgaatgccgacctctacatagttgctggccgaagatacgggcttgtaggacctaacggcaaaggaaagacgacactcctcaagcacattgccaatagagcgctgagtatcccccctaatattgatgtactcctgtgcgaacaggaggttgttgcggatgagacccctgccgttcaggctgtccttcgagctgacactaaacgcttaaagctgctcgaggaggagaggcggttgcaggggcaattagaacaaggcgatgataccgccgctgagcggctggagaaggtatatgaggagttaagagctaccggagctgccgctgcggaagccaaggccaggagaatcctggccggacttggctttgacccggaaatgcagaaccgaccaacacagaaattcagtggcggttggaggatgcgcgtgagcctcgcccgagccttgttcatggagccgactcttctaatgcttgatgaacccaccaaccatttagatcttaacgcagtgatctggctgaacaattatttgcaaggttggcggaagaccctccttattgtttcgcacgatcagggctttctggacgacgtatgcactgatatcatccatctggacgctcagaggttacattactacagagggaactacatgacattcaagaaaatgtaccaacaaaagcagaaagagctgctcaagcagtatgagaaacaggagaaaaaattgaaggaactgaaggcaggagggaagagcacaaaacaggcggagaaacagacaaaagaggcactgacccgcaaacagcagaagtgtcgtcggaaaaaccaggacgaggagagtcaggaggcgccagagttactcaagcgccctaaggaatacaccgttcgattcacatttccagatcccccaccgctgagcccaccggttctgggcttacacggcgtcacatttgggtaccagggccagaagcccctgttcaagaatcttgacttcgggatcgatatggactcacgtatctgcattgtcggaccaaacggggtgggtaagagcaccctgttgttgctattgaccggaaagctgacccccacacatggagagatgaggaagaatcataggctgaagataggtttcttcaaccagcagtatgccgaacagctccgaatggaagaaacaccgactgagtatcttcagcgcggttttaacctcccctatcaggatgccaggaagtgtctgggcagattcggattggagtcccacgctcatactatacagatttgtaagctctcaggtggccagaaagctagagtcgtttttgcagagctggcttgccgggagccggacgttctgattctggacgagccgacgaataatctggatatcgaatccattgacgcattgggcgaggccatcaatgaatataaaggggcagttatagtagtgtcacatgatgcccgactgatcaccgagactaactgtcagttatgggtggtcgaagagcagtctgtcagccagattgatggcgatttcgaagattacaaacgggaagtgctcgaagccctcggggaagtaatggtgagtcggcctagggaatag

SEQ ID NO: 215469 - DNA, 2424 bp, synthetic construct
  misc_feature 1..2424: note = Description of Artificial Sequence: Synthetic coding sequence
  source 1..2424: mol_type = other DNA
atgcctaaagccccaaaacaacagcctcccgagcccgaatggatcggagatggagagtccacctccccatccgacaaagtcgtgaagaagggaaagaaggacaagaaaattaaaaaaactttctttgaagaactcgctgtggaggacaaacaggcaggggaggaagagaaagtcttgaaggagaaggagcagcaacagcagcaacagcaacagcaacaaaagaagaaacgtgacacgcgaaagggacggcgaaaaaaggatgtagacgacgatggagaagaaaaggagctgatggaacggcttaaaaagctgagcgttccaaccagcgatgaggaagatgaggttccagcacccaaacctaggggagggaagaagacaaaaggcggaaatgtgttcgcagcactcatccaggaccaatcagaggaagaagaagaggaagaaaagcaccctcctaagcctgcgaagcccgaaaaaaaccgcataaacaaagccgtgagcgaggagcagcagcctgctctgaaaggtaagaagggcaaggaggaaaaaagtaaaggcaaagccaagccccagaataaattcgcggctcttgacaacgaagaagaggacaaagaggaggaaatcatcaaggagaaggaaccacccaagcagggtaaagaaaaagccaaaaaggcagaacagatggagtacgaacggcaagtggctagtctgaaagccgcaaacgccgcagaaaacgatttctctgtctcccaggccgagatgtcatcacggcaggctatgctggagaatgcgtccgatataaagctcgaaaagtttagcatttccgcgcatgggaaggaactctttgtcaacgcagacttgtatatcgttgccggaaggaggtatggcctggtcggcccaaacggaaaagggaagaccaccctgttgaagcatatcgctaatagggctctgtcaatacccccaaatattgacgtgctcttatgcgaacaggaggtcgtggcggatgagactcccgcagtgcaggcagtgctgcgggcagacacaaagcgattgaagctgttggaggaagagagaaggttgcagggccagttagaacagggggacgacactgccgctgagaggctcgagaaagtctatgaggagcttcgggctacgggggcagcagccgcagaggcaaaggctagaagaatcctagcagggctgggctttgatcctgagatgcagaacaggccaactcagaaattctctggaggctggcgtatgcgcgtgtctctcgccagggcactgtttatggaacctaccctgttgatgctggatgagcccactaaccatcttgacctgaacgcagtcatctggctgaataattatctgcagggctggaggaagaccttactgatcgtgtcacatgaccagggattcctggacgacgtctgcacagatatcatacaccttgatgctcaacgattgcactactaccgaggaaactatatgactttcaaaaaaatgtatcagcagaaacaaaaggaactgctcaagcagtacgagaagcaagaaaagaaattgaaagagctcaaagcaggaggcaagtcgactaagcaggctgaaaaacagactaaagaagccctcactaggaagcaacaaaaatgtagacgcaagaatcaggacgaagagtcacaggaggcccctgaactcctgaagcgaccgaaggaatatacggtccggttcacctttcctgacccaccccctttgtcccctcctgtcttgggactccatggtgtcacattcggctatcagggccagaagccactgttcaagaatctggattttggcatcgacatggacagtcgaatttgcatagttgggcctaatggggtgggaaaaagcacgctgctgctgctgctcaccgggaaactgacccccactcacggagagatgcggaagaatcatcgtctgaaaattggatttttcaatcaacagtatgctgaacagctgcgcatggaagagacacccacagagtacttgcagaggggcttcaatctcccataccaggatgcgcgtaaatgcctaggtagattcgggcttgaaagccacgctcataccattcagatctgtaagttgagcgggggacagaaggctcgcgtcgttttcgcagaattagcttgccgggaacctgatgtgctcatcttggacgagccaactaataacttagacatcgagtccatagacgcactcggtgaagccataaacgagtataaaggtgccgtaatagtcgtatcacatgatgcaaggctgattacagaaactaattgccaactttgggtagtggaggaacagagcgtctcacagatcgacggcgatttcgaagactacaaacgtgaagtgctggaggccctaggcgaggttatggtttcaagaccaagagaatag

SEQ ID NO: 215470 - DNA, 717 bp, synthetic construct
  misc_feature 1..717: note = Description of Artificial Sequence: Synthetic coding sequence
  source 1..717: mol_type = other DNA
atgcccaaagccccaaagcagcaaccgccagaacccgagtggataggagacggggaatccaccagtccttctgataaggtcgtgaagaagggcaaaaaggacaaaaaaatcaaaaaaacattctttgaagagctcgcagtcgaggataaacaggctggagaggaggaaaaggtcctgaaggagaaggagcagcaacaacagcagcaacaacaacagcagaaaaagaagcgagatacacgcaaaggaaggcgcaagaaagacgtcgacgatgacggcgaggaaaaagaactgatggagcgtctgaaaaaactgagtagaggcttcaaccttccctatcaggacgccagaaaatgcctgggtcggtttggattggagtctcatgcccacacaattcagatatgcaaactatccggcggtcagaaagctagagtagtgttcgctgaactcgcatgtagggaacccgacgtgttgatattggacgagcccaccaacaatctggatatcgagtccatcgacgccctgggcgaggccatcaacgaatacaagggagccgtgatcgttgtttcgcacgatgcgaggctgatcactgagacgaactgccagctgtgggtcgtggaggaacagtctgtatctcagattgacggtgattttgaggactacaagcgcgaagtcttggaggccctcggggaagtcatggtcagccgccctagggagtag

SEQ ID NO: 215471 - DNA, 1602 bp, synthetic construct
  misc_feature 1..1602: note = Description of Artificial Sequence: Synthetic coding sequence
  source 1..1602: mol_type = other DNA
atgcccaaagcacccaaacagcagccacccgagcctgagtggattggggacggagagtccaccagtccctccgataaggtcgtgaaaaagggcaagaaggacaaaaagatcaagaaaaccttctttgaagaattggccgtggaggataaacaggccggagaagaggagaaagtgctcaaagaaaaggagcaacagcagcagcagcagcaacaacaacaacagaaaaagaaacgcgatactcgcaaggggaggcgaaagaaggatgttgacgatgatggggaggaaaaagagcttatggagcgtctgaaaaaactgtccgtgccaactagtgacgaggaggacgaggtccctgcgcctaaacccagaggaggtaaaaagacgaaagggggtaacgtgtttgccgctctgattcaggatcagagtgaagaagaagaggaggaggagaagcacccccctaagcccgctaaaccggagaagaaccgaatcaacaaggcggtcagcgaagaacagcagccagctctgaagggcaagaaggggaaagaggaaaagtcaaaaggaaaagctaaaccacagaacaagttcgccgcactcgataacgaggaggaggataaagaggaagaaatcatcaaggagaaagagcccccaaagcaggggaaagaaaaggccaaaaaagctgagcaaggcagcgaagaagaaggcgaaggcgaggaggaagaagaagagggcggagaatctaaggccgatgatccctacgcccacctgtccaagaaagagaaaaaaaagttaaagaaacaaatggagtacgagaggcaggtggccagcttaaaggccgcaaatgctgccgagaatgacttctctgtgagtcaggcagagatgtcttctagacaggccatgcttgagaatgcgagcgacataaaactggaaaaattctctattagtgctcatgggaaagaactctttgtaaatgcagacctctacatagttgccggacgaagatatgggctcgtaggccctaacggcaagggcaaaaccactttgctgaaacacatcgcaaacagagcacttagcatccccccaaatatcgacgttctcctctgcgaacaagaagttgtagctgatgagacccccgctgttcaagccgtcctgagggacgacaccgccgcagagaggcttgaaaaagtctatgaggagctgcgggcaactggcgctgctgcagctgaggcgaaggctaggagaatcttggcaggactaggtttcgacccagagatgcagaatagacctacacagaagttctcagggggttggcgtatgcgggtgagtctggctagggccctgttcatggagccaactttgctgatgctggatgagcccacgaacaatttagacatcgagtctatcgatgctctgggcgaggccatcaacgagtacaagggggctgtgatcgttgtctcacatgacgccagacttatcaccgagactaattgccagctgtgggtggtagaggaacagagtgtgtcacagatcgacggggacttcgaagattacaagagagaggtattagaggccctaggagaagtgatggtcagccggcctagggagtag

SEQ ID NO: 215472 - DNA, 717 bp, synthetic construct
  misc_feature 1..717: note = Description of Artificial Sequence: Synthetic coding sequence
  source 1..717: mol_type = other DNA
atgccaaaggctcccaagcaacagccgcctgagccagaatggataggagatggtgaaagtaccagtccctcagacaaggtggtgaagaaggggaaaaaggacaaaaagatcaagaagaccttctttgaagagctcgccgtggaggataagcaagccggagaggaagagaaggtgttaaaagagaaagagcagcagcagcagcagcagcagcaacagcagaagaaaaagagagatacgagaaaaggcagacggaagaaggatgtggacgatgacggagaggaaaaggagttaatggagaggttaaaaaaactgtctagggggttcaatctcccatatcaagatgccagaaagtgtctggggcgattcgggctggaaagtcacgctcataccatccaaatctgcaagctgagcgggggacagaaggcacgggtcgtgttcgcggagctagcttgccgtgaaccagatgtgctcatccttgacgagcctaccaacaacttggatatcgagtcgattgatgcgctgggagaggccatcaatgagtacaaaggtgctgtgattgttgtgagtcatgacgctaggctgataacggaaacaaactgtcagctttgggtcgtggaggagcaaagtgtgtcccaaattgatggagactttgaagattacaaacgtgaggtcctggaagctctgggtgaagttatggtcagtaggcctcgcgagtag

SEQ ID NO: 215473 - DNA, 2538 bp, synthetic construct
  misc_feature 1..2538: note = Description of Artificial Sequence: Synthetic coding sequence
  source 1..2538: mol_type = other DNA
atgccaaaagcgccaaaacagcaaccgcctgagcccgagtggatcggagacggagagagcacctctcccagcgataaagtggtgaaaaaaggcaagaaggacaagaaaatcaagaagacatttttcgaggagctggcagtcgaagacaagcaggctggcgaggaagaaaaggtattaaaagagaaagagcagcagcagcaacagcagcagcagcagcagaagaagaaaagggatacacggaagggccgacgtaagaaggacgtggatgacgatggcgaagaaaaggaactgatggagcggctcaagaagctgtctgtgccaacctcggacgaggaagatgaggttcctgctccaaagccccgtggtggcaagaagacaaaggggggaaatgtttttgcagctctgatccaggaccagtccgaggaggaagaggaggaggaaaaacatccaccgaaaccagctaagccagaaaagaaccgcatcaataaggccgtttccgaggagcagcagccagcccttaaaggtaagaaaggtaaggaagaaaagtccaagggcaaggcgaaaccccagaacaaattcgctgcactggacaatgaagaagaggacaaggaggaggaaatcataaaggagaaggagccgccaaagcagggaaaagaaaaggctaagaaggccgagcaggggagtgaagaggaaggcgagggcgaggaggaagaagaggaagggggagaaagcaaggcagacgacccctatgcccacttgtccaaaaaggaaaaaaaaaagctcaagaaacagatggagtatgaaaggcaggtagccagcctgaaggccgcaaacgctgccgagaacgacttcagcgtaagtcaggctgagatgagcagccgtcaggccatgctcgagaatgctagcgatatcaagctcgaaaagttttccatatccgcacacgggaaggagctttttgtaaatgcagatttatacatcgtagctgggaggaggtacggtctggtaggcccaaatgggaagggaaagaccacactgctaaagcatatcgccaacagggcactcagcattcctccaaacatcgacgtactcctttgcgagcaagaggtggtcgcggatgagactccagctgtgcaggccgtgctgagagctgacacgaagcgccttaagttgctcgaagaagagcggagactgcagggtcagctcgagcagggtgatgacaccgcagccgaaaggctggagaaggtgtacgaggaattgcgggctactggcgcagcagcagctgaggctaaggccagaagaatattggccggtctcggctttgaccccgagatgcagaaccggcctactcaaaagttcagcggaggatggcgaatgagagttagcctggcccgtgcattatttatggagccgaccctactgatgctggacgaacctaccaaccacctggaccttaacgctgttatttggcttaataattatctgcagggctggagaaagacattgctgatagtgagccacgaccagggattcctggatgatgtgtgtactgatatcatccatctcgatgctcagcggttgcattactatagggggaactacatgaccttcaagaaaatgtatcagcagaaacagaaagagctgttgaagcagtatgagaaacaagaaaagaaattgaaggagctgaaggccggaggaaagtctaccaagcaagctgagaaacagaccaaagaagccttgacacggaaacagcaaaaatgccgcaggaagaatcaggatgaagaatctcaagaggccccagagctgctgaagcgtccaaaagagtacaccgtgagattcacatttcccgacccccctcccctctctcctccagtgctgggcctgcacggtgtaacattcggataccaaggacagaagccactgtttaagaacctggactttggcattgatatggatagtagaatatgcatagtgggtcctaacggcgtgggcaaaagcacattgttgctgcttcttaccggaaagttaacacctacgcacggcgaaatgaggaaaaatcacagattaaagatcggatttttcaaccagcaatacgccgagcaactgcggatggaagaaacaccgacggaatacctccagcggggattcaacctcccctatcaggacgcgcgtaaatgtttgggtagatttggcctggagagccatgcacataccatccagatttgtaagttaagcggaggtcagaaggccagggtcgtgttcgccgagctggcgtgccgtgaaccagacgtcctgatcctcgatgagcctactaacaacctggatattgaaagcattgatgctctgggggaggcgatcaacgaatataagggggcagttatcgtagtgagtcacgacgctaggcttatcacagaaactaattgccagctatgggtggtcgaagagcagtccgtgtcacaaatcgacggcgacttcgaggactataagcgcgaggtcctggaggccctaggggaggttatggtttctcgcccaagagagtag

SEQ ID NO: 215474 - DNA, 2538 bp, synthetic construct
  misc_feature 1..2538: note = Description of Artificial Sequence: Synthetic coding sequence
  source 1..2538: mol_type = other DNA
atgccaaaggcccctaagcagcagcctcctgaaccagagtggataggtgatggcgagagcacctccccttctgacaaagtggttaagaagggcaaaaaagataagaaaattaagaagaccttttttgaagaactggccgtggaggacaaacaggcaggcgaagaggaaaaggtcctaaaggagaaagagcaacagcaacaacaacagcaacagcagcaaaagaagaagagagacactcggaaaggcaggagaaagaaagacgtagacgatgacggagaagaaaaggaacttatggagcggcttaaaaaacttagtgtgccaacgagtgacgaggaggatgaagttccagctccaaaacctaggggcggtaaaaaaaccaaaggcggtaatgtattcgctgccctgattcaggaccagtcagaagaagaagaagaagaagagaagcaccctcccaagcctgccaagcccgagaaaaaccggattaacaaggccgtgagcgaagaacaacaacctgcacttaagggaaagaagggcaaagaagaaaagtcgaaaggcaaggcgaagccccagaacaaattcgccgctctcgacaatgaggaggaggacaaagaggaggagatcatcaaagagaaagagcccccaaagcaggggaaggagaaagcaaagaaagctgagcaaggctccgaggaggagggtgaaggagaagaagaggaagaggagggaggcgagtccaaggctgacgatccttacgcccatctttcaaagaaagagaagaagaaactgaagaaacagatggaatacgagaggcaggtggcatctttgaaagcggctaacgccgctgaaaacgacttttctgtatcgcaggccgagatgagtagccggcaggcaatgctggagaatgcgtccgatataaaactggagaagttctctatctccgcccacggcaaggagttattcgttaacgccgatttgtatatcgtcgctggcaggcggtatgggctcgtgggtcctaatggaaaaggaaagactacgctgcttaaacacatcgctaatagggcgctgagcattccaccaaatatcgatgtgttgctgtgcgaacaggaggtcgtggccgacgagacacccgcagtccaagccgtgctccgagctgacaccaagagactgaagctcctggaggaagagaggagactacaaggacagctggaacaaggtgatgataccgccgctgaacgcttagaaaaggtatacgaagagcttagagccaccggcgctgcggcagctgaggctaaagctagacggattctggctgggctggggttcgatccggaaatgcagaaccgcccaactcagaagttcagcggcggatggcgaatgcgggtgagtttagccagagctctcttcatggagccaacactgctgatgctggatgaacctaccaaccatctggacctcaatgctgtgatttggcttaataattaccttcaaggatggcgaaagaccttgttaatcgtgtcacacgaccagggcttcctagacgacgtctgtactgatattatacatctggacgcccaacggctccactattatcgcggtaattacatgacctttaagaagatgtatcagcaaaagcagaaagagttactcaaacagtacgaaaaacaggaaaagaaactgaaggaactcaaggccggtggcaagagtactaagcaggctgaaaagcaaactaaagaggccttgactaggaaacagcaaaagtgccgccgtaaaaaccaagacgaagaatctcaggaagcgcctgaactgctgaaacgacctaaagagtacaccgttcgatttacctttcccgatcctcctcctctgagcccacccgtgctgggactgcacggggtgactttcggataccaaggacaaaagcctctctttaaaaacctggactttggaattgatatggactctagaatctgtatcgtgggcccaaacggggtcggcaagagcacattgctgttactgctcacaggaaagctgactccgacccatggtgagatgcgcaagaaccatagattgaagattggattcttcaatcaacagtacgcagagcagctgagaatggaagaaactcctaccgagtaccttcagaggggtttcaacttgccttaccaggatgcacgtaaatgtctaggacgcttcggactcgagtcacatgcccacacaatacagatctgcaaactctcagggggtcagaaagcgagggtcgtttttgcggaactggcatgtcgggagcctgatgtgctcattctggacgagcccaccaataatctcgacatcgagtcaattgacgctctgggagaggcaattaacgagtacaagggagctgtgatcgtcgtgagtcatgatgccaggctgattactgagactaattgccaactctgggtggtggaggagcagtccgtcagccagattgatggagacttcgaagactataagcgcgaggttctggaagcattaggcgaagtcatggtgtcaagaccgagggagtag

SEQ ID NO: 215475 - DNA, 717 bp, synthetic construct
  misc_feature 1..717: note = Description of Artificial Sequence: Synthetic coding sequence
  source 1..717: mol_type = other DNA
atgccgaaggcaccgaagcagcagcctccagaacctgagtggataggagatggtgaaagcactagccccagcgataaagtggtgaagaaggggaagaaagataaaaaaataaaaaaaaccttttttgaggagctcgcagtggaagacaagcaggccggtgaggaggagaaggtgctgaaggaaaaagagcagcagcaacagcagcaacagcagcagcagaagaaaaaaagggatacaagaaagggcaggagaaagaaagatgttgacgatgatggcgaagaaaaggaactgatggaacgcttaaaaaagctctccagagggtttaacctaccctatcaggacgccaggaagtgtttaggaagatttggtcttgagagccacgcccacactatccagatctgcaagctctcaggcggacagaaggcgagggttgtgtttgctgagctggcatgtcgcgagcccgacgtgctgattttggacgaaccaactaacaatctggatatcgagtccatcgacgctctcggggaggctattaacgaatacaaaggagctgtaattgtcgtgtctcacgatgccaggctcataacagaaaccaactgtcagctatgggtcgtcgaggaacagtcagtgtctcaaatagatggggacttcgaagattacaaaagagaggtgctcgaggcactcggcgaagttatggtcagcaggcctagagagtag

SEQ ID NO: 215476 - DNA, 1602 bp, synthetic construct
  misc_feature 1..1602: note = Description of Artificial Sequence: Synthetic coding sequence
  source 1..1602: mol_type = other DNA
atgcccaaagctcctaaacaacagccccctgaacctgaatggatcggggacggcgaatccacttcgccttctgataaggttgttaagaaaggtaagaaggacaagaaaattaaaaagacttttttcgaggaactggccgtagaggataagcaagccggagaggaagaaaaagtcctcaaagagaaagagcagcagcagcagcagcagcagcagcagcagcagaaaaaaaagcgcgatactcggaagggacgccgaaagaaggatgtagatgacgatggggaggagaaggagctgatggaacggctaaaaaagttatccgtcccaacctccgacgaggaggacgaggttccggctcctaaaccgagaggcggtaagaaaactaaaggtggaaatgtgttcgccgctcttattcaggaccagtctgaagaggaggaagaggaagaaaaacatccaccgaagccagccaagccggaaaagaacagaatcaacaaggcggtatccgaagagcagcaaccagcattgaagggcaagaagggcaaggaggagaaatcaaaggggaaagccaaaccccaaaacaagtttgccgctctcgacaacgaagaagaggataaagaggaggaaattatcaaggaaaaagagccgccaaagcaaggaaaagagaaggccaaaaaagctgagcagggctctgaagaggaaggtgaaggcgaagaagaagaggaagagggcggagagagtaaggctgacgacccctacgctcatttatctaagaaggaaaagaagaaacttaagaaacagatggaatacgaacgccaagtggcttcattgaaggccgctaacgctgccgagaacgacttctcagtatcccaggcagagatgagcagtagacaggcaatgctggagaacgcttctgacattaaactggagaagttttctatctccgcccacggtaaagagctgttcgtcaatgcagatttgtacatagttgcgggacgacgatacggtcttgtgggtcctaacgggaagggcaaaactaccctgcttaagcatattgcgaatcgtgccctcagtatccctcctaatatcgacgtcttgctgtgcgaacaggaggtggtggctgatgaaacccccgcagtccaggccgtgttgcgcgatgatacagctgccgagagactggaaaaggtttatgaggagcttcgagctaccggcgcagcggctgcggaggccaaagcccgtaggatactggctggccttggcttcgatccggagatgcagaatagacctactcaaaagttttcagggggatggcggatgagagtgtccctggctagagccctatttatggaacctaccttactcatgctggacgagcccactaacaatctcgatatcgaatccatcgacgcgctcggagaggcaataaacgagtacaagggcgctgtcatagtggtgtctcatgatgccagactgatcaccgaaactaactgccagttatgggtggttgaggagcagtcggtgtcacagattgatggcgattttgaagactacaaaagggaggtactagaagccctgggggaagtgatggtctcacgtccacgggaatag

SEQ ID NO: 215477 - DNA, 1599 bp, synthetic construct
  misc_feature 1..1599: note = Description of Artificial Sequence: Synthetic coding sequence
  source 1..1599: mol_type = other DNA
atgcccaaagcaccaaagcagcagcctccagagcccgaatggattggtgacggtgaaagcacttccccgtctgacaaggtggtgaagaaaggaaagaaagataagaagataaagaagaccttttttgaggaacttgccgtggaggacaaacaagccggtgaagaggagaaggtgttgaaagaaaaggagcaacaacagcagcagcagcagcagcaacagaaaaagaagagagacacacggaagggcaggcgtaaaaaggacgtggatgacgatggagaagagaaagaactcatggaacgccttaagaagctttccgtgccgacgtctgatgaagaggatgaggtgccggcaccaaagcccagaggcggaaaaaagaccaagggtgggaacgtcttcgctgctctaatacaggaccagtcagaggaggaggaggaagaagaaaagcatcctccaaaacccgctaagccagagaaaaatcgcattaacaaagcagtctcagaggaacaacagcctgcacttaaagggaaaaaagggaaggaggagaaaagcaagggcaaagctaagcctcagaacaagttcgccgcactggacaacgaggaagaggacaaggaagaggaaatcatcaaagaaaaagagccgccaaagcagggcaaagagaaggccaagaaggccgagcaagggagtgaagaggagggagaaggcgaagaagaggaggaggaaggcggagagagcaaggcagatgacccatacgcccatctctcaaagaaagaaaaaaaaaagctcaagaagcagatggagtacgagcgccaggtagctagcctgaaagcagcgaacgcagctgagaatgactttagtgtgtctcaggctgaaatgtcctctcggcaagctatgctggagaatgccagcgatattaagttggagaagttcagcatttccgcgcatggaaaggagctgtttgtaaacgcagacctatacatagtggccggacgtagatatggccttgttggtccaaacggcaagggtaagaccacactcctcaaacacattgcaaacagagccctgtcgattcctcccaatatcgatgtgctcctctgcgaacaagaagttgtcgccgatgagacaccggctgtgcaggccgtgctaagagacgataccgcagcagagcgccttgagaaagtctatgaagagcttagagccaccggggctgccgcagcagaagcaaaggccaggcgaattctcgctgggctgggcttcgatccagagatgcagaatcgacccactcagaagtttagcggcggatggaggatgcgagtgtcgctcgccagggccctttttatggagcccacactcttgatgttggatgaacccacgaacaatttggatattgaatccatcgacgcactcggagaggccatcaacgagtacaaaggcgcagtgatcgtcgtcagtcacgatgcgagactgatcactgagaccaactgtcaactgtgggtagtggaggaacagtccgtctcccagattgacggggattttgaggattataagcgagaggtccttgaggccctgggcgaggtaatggtgagtcggccaagggagtag

SEQ ID NO: 215478 - DNA, 1599 bp, synthetic construct
  misc_feature 1..1599: note = Description of Artificial Sequence: Synthetic coding sequence
  source 1..1599: mol_type = other DNA
atgcccaaggcacctaagcagcaaccccctgagccagagtggataggagacggtgagtccacctctccaagcgataaggtagtgaagaaggggaagaaggataagaaaattaaaaagacctttttcgaggagctggccgtcgaagataaacaggctggcgaggaggaaaaagtgctgaaggagaaagaacagcagcaacagcaacaacagcagcagcagaaaaaaaagcgcgacaccagaaaagggagacgaaagaaagacgtcgatgacgacggagaggagaaggaattgatggagaggctgaagaaactgagcgtgcctacctctgacgaggaagatgaggtccctgcgcctaagcctcgagggggaaaaaagactaagggcggtaatgtctttgcagcactgatccaagatcagtccgaagaggaagaggaagaagagaagcatcccccaaagcccgctaagcctgagaaaaatcgaatcaacaaagcagttagcgaagagcagcaacccgctctcaagggtaaaaaagggaaggaagagaagagtaaggggaaagctaaaccccagaacaagttcgccgcacttgataacgaggaggaggacaaggaggaagagatcattaaagaaaaggaaccccctaagcagggcaaagagaaggcaaagaaagcggagcagggatccgaggaagaaggagagggagaggaggaagaggaggaaggaggggaaagcaaagcggacgacccgtacgcgcatttaagcaaaaaggagaagaagaaattgaagaaacagatggagtatgaaaggcaggtggcctcccttaaggccgcaaatgctgccgagaacgacttttctgtctctcaggcagaaatgtcatcccgacaggcgatgctggagaacgccagcgatatcaagctggaaaagttcagcatttctgcccacgggaaggaattattcgtgaacgctgacttatatatcgtcgcagggagacgctatggtctcgtaggccctaacgggaaaggtaaaacaaccttgcttaagcatattgctaacagggccctgtctatacccccaaacatagacgttctgctctgtgagcaggaggtggtcgcagatgagactcctgccgtgcaagcagtacttagggatgacacagcggctgagagactcgagaaggtgtatgaagagcttagggccacaggcgcagccgcagctgaagctaaggccaggcggattcttgccggtctggggtttgatcccgagatgcagaaccgtcctactcagaaattttccgggggatggaggatgcgggtttctcttgccagggccctgttcatggagcccacgctattaatgctcgacgaacctaccaataatctcgacattgaatccatcgacgcactgggggaagctatcaatgaatacaagggggcagtcatcgtagtgtctcacgatgctagactcataaccgagaccaattgccagctttgggttgtcgaagagcaaagcgtatctcagatcgacggagacttcgaagattacaagagagaagtactcgaggcccttggcgaagtgatggtaagcagacctagagaatag

SEQ ID NO: 215479 - DNA, 1599 bp, synthetic construct
  misc_feature 1..1599: note = Description of Artificial Sequence: Synthetic coding sequence
  source 1..1599: mol_type = other DNA
atgcctaaagctccaaagcagcaaccacctgaacccgagtggattggtgacggcgaaagcacctccccatctgacaaggtggtcaagaaagggaagaaggacaaaaagatcaaaaagacctttttcgaggaactggccgttgaggataagcaagcgggtgaggaggaaaaagtcctgaaagaaaaagagcagcagcagcagcaacagcagcagcaacagaaaaagaaacgcgacactcggaaagggaggagaaagaaagatgtggacgatgacggcgaggaaaaggaactgatggagaggttaaagaagttgagcgtacccacgagcgatgaggaggacgaggtgccggcacctaaacctagaggcggaaaaaaaacaaaggggggaaatgtgttcgcagcgttgatccaggatcaaagcgaagaagaggaggaggaggagaaacatcccccaaagccagccaaacctgagaagaatcgcataaacaaagctgtgagcgaggaacagcagccagccctgaagggcaagaagggcaaggaggaaaagtccaaaggaaaggccaaaccccagaataagtttgcagccctggataatgaggaggaggacaaagaggaggagataatcaaagagaaagaaccgccaaagcaaggaaaggaaaaagccaagaaggcagagcaggggtccgaggaggagggagagggagaggaggaggaggaggaaggaggcgaatctaaagccgacgatccgtacgctcacctgagtaagaaggaaaagaagaagctgaaaaaacagatggaatatgaacggcaggtcgcttccttgaaggccgcaaacgccgctgagaatgacttctctgtctcacaggccgagatgtctagcaggcaggcaatgctggaaaatgcatccgacatcaaacttgagaagttttccattagtgcccacggaaaagagctcttcgttaatgctgacctatatatcgtggccggtaggcggtacggcctggtgggacctaacggcaaagggaaaacgacactcctcaagcatatcgcaaaccgggcattgagcatcccccctaatatcgacgttcttctctgtgaacaggaggtggtggcagacgagacccccgctgtccaggccgtactgcgggatgataccgctgcagagcgactcgagaaggtatatgaggaactcagagctacaggcgcagctgctgcagaggctaaggccagacggattttggctggcctgggctttgaccctgagatgcagaacaggcccacacaaaagtttagtggcggatggcgaatgagggtgagcctcgctagggcactgtttatggagcccacccttctcatgctggacgagcctactaataacctggatatcgaatccatcgatgctttgggagaggccattaatgagtataaaggagcagttatcgtggtctcgcacgacgcacgcctcatcactgaaactaactgtcagctttgggtcgtcgaagagcagagcgtaagccagattgatggggacttcgaggactacaagagagaagtgcttgaagcactgggagaagtgatggttagtcggccaagagagtag

SEQ ID NO: 215480 - DNA, 1599 bp, synthetic construct
  misc_feature 1..1599: note = Description of Artificial Sequence: Synthetic coding sequence
  source 1..1599: mol_type = other DNA
atgcccaaagcccctaagcaacagcccccagagcctgagtggatcggagacggagagagtacaagtccatccgataaggtggttaaaaagggcaaaaaagataagaagataaaaaagacttttttcgaggaactggccgtcgaggataagcaagccggagaagaggagaaggtgcttaaagagaaggaacagcagcaacagcagcaacagcagcagcagaaaaagaaacgcgacacccggaaaggcaggagaaaaaaggacgtagacgatgacggtgaagaaaaggagctaatggaaaggctgaagaagctcagtgtgcctacctcagacgaagaggacgaggtgcccgctcccaagccacgaggcggaaaaaagaccaaagggggaaacgtgttcgcagcattaatacaagatcagtcagaggaggaggaggaagaggaaaaacatccacccaagcccgctaaacctgagaagaaccggataaataaggccgtttctgaagagcaacagccagcgctgaaggggaaaaaaggtaaggaagaaaaatcgaaaggtaaggccaaaccccagaacaagtttgccgctctggacaacgaggaggaagataaagaggaagagatcattaaggaaaaggagcctccaaaacaggggaaagagaaggccaaaaaagccgaacaaggcagtgaggaggagggtgaaggtgaagaagaagaggaggaaggaggggaaagtaaagccgacgatccttatgcccatctgagtaagaaggaaaaaaaaaaactgaaaaagcagatggaatacgaacggcaggtggcctcgctgaaggcggctaatgccgcagagaacgatttctccgtgagccaggccgagatgtcaagtaggcaggccatgttggaaaacgctagtgacatcaaactcgaaaagttctccatttccgcgcatggtaaggagttgtttgtgaatgcagacctatacatcgtcgccggtcggcgatacggactggtgggaccaaacggaaaagggaagaccactctgctgaagcacatcgctaacagggccctgagtattccacccaacattgatgtgctgctgtgcgaacaggaggtagtagctgacgaaacacccgctgttcaggccgtactgagagatgatacagctgctgaacggctagaaaaagtctatgaggagctacgagccaccggagccgctgcagccgaggcaaaggcgagaaggattctagcaggattagggttcgatccagagatgcagaatagaccaacccagaagttttccggcggatggaggatgcgagtaagccttgctagggccctgttcatggaacccaccctgctgatgctggatgagcctacaaacaatctcgacattgagagtattgacgccctgggggaagccatcaacgaatacaaaggcgctgtcatcgtcgttagccacgacgccagactcattaccgagaccaactgccagctgtgggtggtagaggaacaatccgtgtcacagatagacggggatttcgaggactataagagggaggttttggaagcactgggagaagttatggtgagcagaccgagagaatag

SEQ ID NO: 215481 - DNA, 1602 bp, synthetic construct
  misc_feature 1..1602: note = Description of Artificial Sequence: Synthetic coding sequence
  source 1..1602: mol_type = other DNA
atgcccaaggccccaaagcaacaacctcctgagccagagtggatcggggatggagagtctaccagtccatctgataaggttgtgaagaaggggaaaaaggataaaaagataaagaaaaccttcttcgaagaactggccgtggaggataagcaagcgggagaagaggaaaaagtgcttaaggaaaaagagcagcagcagcagcaacaacagcagcaacagcagaagaagaagagggatactcggaaaggaaggaggaagaaagatgtggatgatgacggagaagagaaagaactaatggaaagactgaagaaattgtccgttcccacgtctgacgaagaagacgaggtgcccgctccgaagccgaggggaggcaagaagacaaagggcggaaatgtcttcgctgctcttattcaggaccagtcagaagaagaagaagaggaagagaagcacccacctaaaccagctaaaccagaaaaaaacagaatcaacaaggcggtctcagaggaacagcagcccgcattgaagggaaagaagggcaaggaggagaagagtaaaggaaaagccaagccacagaataagtttgccgcactcgataacgaagaggaggataaggaggaagagattataaaggagaaagagcctccgaaacagggcaaagagaaggcaaagaaggccgaacagggctcggaagaggaaggcgaaggtgaggaagaggaggaagagggcggagaatctaaggccgacgatccttacgcccacctgagtaagaaggaaaagaagaaacttaagaagcagatggagtacgaaaggcaagtcgcatctctgaaagccgctaacgctgccgagaatgacttttccgtgtcacaagccgaaatgtcctcgcggcaggccatgcttgagaacgcctcagatattaagctggagaaatttagcatctccgcccatggcaaggaactgtttgtgaacgcggacctttacatcgtagccggaaggaggtacgggctggtcggtcccaacgggaagggcaagactactctcctgaaacacatcgcgaatcgtgccctgagcataccacccaatattgatgtgctgctatgcgaacaagaagtggttgccgacgaaactcctgccgttcaggcagtccttcgcgatgataccgccgcagaaaggctggagaaagtgtacgaggaactacgcgctaccggtgctgctgccgcagaagcaaaagccaggcggatcctggctggcctgggatttgaccccgaaatgcagaatagacccactcagaaattcagtggaggatggcgtatgcgggtgtctctggccagagctttgttcatggagcctacgttactaatgttggatgaaccaaccaataaccttgacatagagtccatcgacgccttgggagaagccatcaatgaatacaagggcgcagtgatcgtagtatcccacgacgccaggctaatcacagaaactaattgccagctgtgggtggtcgaggagcagtctgtctcccagatagacggggactttgaggattacaagcgcgaggttcttgaagctctaggtgaagtgatggtgtcccgccctcgagagtag

SEQ ID NO: 215482 - DNA, 1515 bp, synthetic construct
  misc_feature 1..1515: note = Description of Artificial Sequence: Synthetic coding sequence
  source 1..1515: mol_type = other DNA
atggacctgatcccgaattttgctatggagacatgggttctggtagcgacctccctcgtgctcctctacatctacggaacacactctcacaaactgttcaagaagcttggtataccgggtcctacacccctgccgtttctagggaccatcctgttttacctccgcggattatggaattttgatagagagtgtaatgaaaaatatggcgaaatgtggggactctatgaggggcagcagcccatgctcgtgattatggaccctgatatgataaagaccgtcctagtaaaagagtgctattccgtttttacaaatcaaatgcccctgggtcctatgggcttcttgaagtcagctttatccttcgccgaggatgaggagtggaagcggattaggacactgttgagtcctgcctttacatctgtgaaattcaaggagatggtaccaataatttctcagtgcggagacatgctagtgaggtcactcagacaggaagcagagaacagcaagagcattaatttgaaggactttttcggggcatacactatggacgtgatcacaggcaccctcttcggcgtaaatttagacagtctgaataatcctcaggacccttttctgaaaaacatgaagaagctgcttaagctcgactttttggatccgtttcttctgctcatctccctgtttccatttctcacgccggtgttcgaagctctgaatattggtctgtttccaaaggacgtgacacacttcttaaagaatagcatagaaagaatgaaagagagccgcttaaaggacaagcagaaacaccgggtcgacttttttcaacagatgattgacagtcagaacagcaaggaaaccaagagccataaggccctgagcgacctagagctggttgcgcagtctataatcattatcttcgccgcttacgacactacatccacaactttacctttcattatgtacgagttagcaactcatcccgatgtccagcagaagctgcaagaagaaattgacgccgtgctacctaacaaggcaccagtgacttacgacgctctggtgcagatggagtacctcgatatggtagtgaatgagacattacggctgttcccggtcgtgtctagagtcacacgtgtctgtaagaaggacatagaaataaatggcgtttttattcctaaggggctggccgtgatggttcccatctacgcgctccaccatgaccctaaatactggacagagccagaaaaattctgcccagaaagtcgtttctctaaaaagaataaagactctatagatctctacaggtacatccccttcggagccggtcctagaaattgtatcgggatgcgcttcgccctgaccaacatcaaacttgcggtcatcagggctctccaaaatttctcgtttaaaccctgtaaagagacacaaattcccctcaaattggacaatctccctatattgcagccggagaagcctattgtcctgaaggtccatctccgggatggaattacgagcgggccatag

SEQ ID NO: 215483 - DNA, 1872 bp, synthetic construct
  misc_feature 1..1872: note = Description of Artificial Sequence: Synthetic coding sequence
  source 1..1872: mol_type = other DNA
atgccttcagatttagcgaagaagaaggccgcaaaaaagaaagaggccgcaaaagcccgtcaaaggccccgaaagggtcatgaagagaacggagacgtggtgacggaacctcaagtcgcagaaaagaacgaagcaaacggaagggaaacaacagaggtggatctgctaaccaaggaacttgaagatttcgagatgaaaaaagcagcggctagggcggtgaccggcgtcctcgcaagccatccgaactccacagatgtacacattatcaacttgtctctgacttttcacgggcaggaactgttatctgacaccaagcttgagctgaattctggtagacggtacggcctcatcgggcttaacggcatagggaaatccatgctgctgagcgccatcggaaagcgcgaagtcccaatacccgagcacatagatatctaccatctaacgagagagatgcctccctccgacaaaacaccactccattgtgtgatggaggtggatactgagcgggcaatgctcgaaaaggaggccgagcggctggcccacgaggatgccgagtgtgaaaagctcatggaattgtatgagaggctagaggaactcgacgctgataaggccgaaatgcgcgctagtcgtatcctccatggcttgggcttcacccccgctatgcagcggaagaaacttaaggacttttccgggggttggcggatgagggttgcattagctcgagccctgttcatccggcctttcatgttgctgctggatgagccaacaaaccatctggacctggacgcctgcgtgtggttagaggaggagttgaaaactttcaaacgtatcctagtactggtgtctcatagtcaagattttctcaatggagtctgcactaatatcatacacatgcataacaaaaaactaaaatactacacaggcaactacgaccagtacgtgaaaacacgactggagttggaggagaaccaaatgaagaggtttcactgggagcaggaccaaatagcccatatgaagaactatatcgccaggttcggccacggcagcgccaaactcgcaagacaggcccagtccaaagaaaaaactctgcagaaaatgatggcctccggactgacggagagggttgtatccgataaaaccctctccttttatttccccccatgcggaaagatccctcctccggttatcatggtccaaaacgtatccttcaagtacaccaaagacggcccttgcatctacaacaacctcgagttcggcatcgacctcgacacacgggtggcactggtcggtccaaatggagccggaaaatccaccctcctcaaactgctaacaggtgaattattacctaccgacgggatgatccgcaagcactcacatgtaaaaattggacgctaccatcagcatctccaggagcaattggacctggacctaagccccctggagtatatgatgaaatgttatcctgaaatcaaagagaaggaggagatgaggaagatcattggcagatatggcctgacggggaagcaacaggtttctccgattaggaatctgtcggacgggcagaaatgtcgcgtctgcctggcatggctggcctggcagaacccacatatgctattcctggatgaacccactaaccatctggacatcgaaaccattgatgcgctggctgacgccattaatgagttcgaaggtgggatgatgctcgtgagtcacgatttccgcttgattcaacaagtggcacaggaaatttgggtatgtgagaaacagaccattaccaaatggcctggcgacattctagcctacaaggaacatcttaagagcaagctagttgacgaagagccccagcttacaaaaaggacccataacgtatag

SEQ ID NO: 215484 - DNA, 723 bp, synthetic construct
  misc_feature 1..723: note = Description of Artificial Sequence: Synthetic coding sequence
  source 1..723: mol_type = other DNA
atgccctctgatctggcaaagaagaaagctgccaaaaagaaggaagctgcaaaagcgcgacagagacctcgcaaaggccacgaggaaaacggggatgtggtgaccgaaccccaggtggccgaaaagaatgaggcaaatggccgagaaactactgaagtcgacctgttgacaaaggagttggaagattttgaaatgaagaaggctgcggcacgcgctgtgaccggtgtgttggcttctcacccgaattctacagacgtccacatcataaacctgtcattaacttttcatggccaggaactgctcagcgataccaagctcgagctgaactccgggaggcggtatggtttaattgggctgaacggaatcgggaaaagcatgctgctctccgctatcgggaaaagagaggtacccattccagaacacatcgacatctatcacttgacgcgggaaatgccgccatcagataagacgcccctccactgcgttatggaagtggatacagagagagctatgctagaaaaagaagccgagagattggcacatgaggatgctgagtgtgagaagctgatggagctctatgaaaggttggaagagctggacgctgacaaggcggaaatgcgcgcttctcgcattctgcatggcctgggattcacaccagcaatgcagagaaagaagctcaaagatttcagcggagggtggagaatgagagttgccttggcttag

SEQ ID NO: 215485 - DNA, 867 bp, synthetic construct
  misc_feature 1..867: note = Description of Artificial Sequence: Synthetic coding sequence
  source 1..867: mol_type = other DNA
atgccaagcgatctggcaaagaaaaaggcagccaagaagaaggaggcagcaaaggccagacagcgccctcggaagggccatgaagaaaacggtgacgtcgttacagagccccaggtggcggagaagaacgaagcaaatgggagagagactaccgaggttgatttattgaccaaagagttagaggactttgaaatgaagaaagctgccgcacgcgctgttaccggagtccttgcaagccatcctaactccactgatgtacacataataaacctctctctgaccttccatgggcaagagctcctgtctgatacaaaattggagctgaattcaggacgtcgctacggcctgatcgggttgaacggtattggaaagtcgatgttactttccgctattggaaaacgcgaagtgccaattcctgaacatatcgacatctatcatttgactcgcgaaatgccaccttccgacaagacacctttgcactgtgtgatggaggtcgacaccgaacgggcaatgctagagaaggaggcggagcggctggcccatgaggacgccgagtgtgaaaaattaatggagctgtatgagcggcttgaggagctggatgcagacaaggccgagatgcgcgcatcgagaatcctgcatggactcggattcactccggcaatgcagcggaaaaagctgaaggacttttctggcggatggcgaatgcgcgttgcactggccagggccttgttcatacgaccattcatgctgctgctggacgagccaaccaatcatctggacctggacgcctgcgtctggttagaggaggagcttaagacatttaaacggatactggtcctggtgtctcactcccaggactttttatag

SEQ ID NO: 215486 - DNA, 2361 bp, synthetic construct
  misc_feature 1..2361: note = Description of Artificial Sequence: Synthetic coding sequence
  source 1..2361: mol_type = other DNA
atggtcaggagaggatggtcagtgtgtacagcgattctacttgcccgtctctggtgccttgtgccgactcacacattcctgtccgagtacccagaggcagcagagtaccctcacccagggtgggtctattggctacagatggcggtcgcgccaggacacctgcgagcatgggttatgcgaaataatgtgaccactaatatcccttccgcattcagtgggaccctcacacacgaggagaaagctgtgctgaccgtgttcactggcacagccactgctgtgcacgtacaagtggcagcgctggcaagtgccaagctcgagtcctccgtgtttgtgaccgattgtgtgtcatgtaaaattgagaacgtgtgcgactctgcactgcaggggaagagggtgcctatgagcggtttacagggcagcagcattgtaatcatgcccccttctaaccgaccccttaaagcctccgcagcgtcttgcacctggtcagtgcaggtgcagggtgggccacatcatctaggggtggttgctatcagtggtaaagtcctgtccgcagcacacggcgcaggtcgtgcctacgggtggggattcccgggtgatccgatggaggaaggctacaaaaccctccttaaggggatctccggcaaatttaatagcggtgagctagttgccatcatgggaccaagcggcgcaggcaagtcaactctgatgaacattttggccggttatcgcgagaccgggatgaagggagcagtgctgatcaacggactgccgagggacttaaggtgcttccgcaaggtttcttgttacatcatgcaggacgacatgctcctccctcacctcaccgtgcaggaagcgatgatggttagtgctcacctcaagctgcaggaaaaagacgaaggcagacgggagatggtcaaggaaattctgactgcacttggcctgctgagttgcgctaacacaagaaccggatccctcagcggcggtcagagaaagagattggccattgcgctagaactcgtgaacaatccacctgtgatgtttttcgacgaaccaacctcagggctcgactctgcatcatgcttccaggtagtgtctctgatgaaaggccttgcccagggagggaggtctattatatgcaccatccatcagccttcagccaagctttttgagctgtttgaccagctgtatgtgctttctcaaggacagtgcgtgtacagaggaaaggtgtgtaacctcgtcccttacctgcgcgacctggggctcaattgccctacttaccacaacccagctgacttcgttatggaagtcgcttctggggaatatggagatcagaattcccgccttgtcagagccgtaagagaaggaatgtgcgactccgaccataagagagatctgggaggtgacgccgaagtcaacccatttctatggcatagaccttccgaggaagtgaagcagactaaaaggctaaaaggactgcggaaagattcatcttctatggaggggtgtcatagtttctcggcaagttgtctgacccagttctgtatcctcttcaagaggaccttcttgagcataatgagggacagcgttctaacacaccttcgcatcacatcccacatagggataggcctgctgattgggctattgtacctgggtatagggaatgaggcgaaaaaagttctgtctaacagtggttttctatttttcagtatgttgttcctcatgttcgcagctctgatgcctaccgtactcacattcccactggagatgggcgtatttctccgcgaacatctgaactattggtactcactgaaggcctactatttggcaaagacaatggccgacgtccccttccagatcatgttccctgtcgcctattgctccattgtttattggatgacaagtcagcccagcgacgcagttcgctttgtgctgttcgcggcacttgggacaatgacatcgttggtggcacagtctttgggtctgctcataggagccgcatccacgtctcttcaggtggccacttttgtgggacccgttacagctatacctgtgctgttgttttccggatttttcgtgtccttcgacaccatacctacatatctacagtggatgagctacatatcctatgtgcgctatggttttgaaggagtgatcctgtcaatatacggtctggatcgagaagacttacattgtgatattgacgaaacttgtcattttcaaaaatccgaagctattctccgcgagctggatgtggaaaacgctaagttatatctggattttatcgtgctggggatttttttcatcagccttaggctgatagcttactttgtgctgcgatacaagattcgtgctgaacggtag

SEQ ID NO: 215487 - DNA, 2034 bp, synthetic construct
  misc_feature 1..2034: note = Description of Artificial Sequence: Synthetic coding sequence
  source 1..2034: mol_type = other DNA
atgaggatttctttgcccagagcccctgaacgcgatgggggagtatccgctagttctctgctagacactgtcactaacgcctcttcctacagcgctgagatgaccgagcccaaaagtgtatgcgtatcggtggacgaggtggtgtcatccaacatggaggcaacggagaccgacctcctgaatggccacctgaagaaggtggataataatctcaccgaggcccaacgcttttcttcactgccaagacgcgcagctgtaaacattgaatttagggacctcagttattctgtcccagaaggaccttggtggagaaagaaggggtataaaaccctgttaaagggaattagcggaaaatttaatagcggagagctggttgccattatgggtcctagcggggcaggcaaatctactctgatgaacatactcgcgggataccgagagacgggcatgaagggcgctgtgctgattaacgggctgccgagggacctgcggtgcttccggaaggtttcatgctacataatgcaagacgatatgcttctccctcatctgacagtgcaagaggcaatgatggtgtcagcgcacttgaagcttcaagagaaagatgagggtcgcagagagatggttaaagagatactcacagctcttgggctgctgtcttgcgccaacaccagaacgggatcattgtccgggggtcaacgcaagaggctggccatagccctagagctggtgaacaacccacctgttatgtttttcgacgagcccacatctggcttggatagtgcttcctgtttccaagtggtgagcctcatgaaaggactcgcccaagggggtcgatctattatttgcaccatacaccagccctcggccaagctgtttgaactgttcgatcagctgtacgtgttgtctcagggacagtgcgtctaccgcggaaaagtgtgtaatctggtgccatatttgcgggacctgggtctgaactgccctacgtaccataatcccgcagattttgtcatggaagtggcaagcggtgagtacggagatcaaaactctcggctggtaagagcggtccgagagggcatgtgtgactctgaccataaacgcgatctgggaggggatgcagaggtcaatccctttctatggcacagaccatccgaggaagatagctcttctatggagggatgtcacagtttcagtgcaagttgtctaacacagttttgcattctgtttaagaggacattcctatcgatcatgagagactccgtgctgacgcacctacgcataaccagtcatattggaatcggcttgctcatagggcttctgtacctgggaattggcaacgaagcaaaaaaagttctgagcaattccggttttctatttttttccatgctttttctgatgtttgccgcactgatgccgacggttctaacatttccactcgaaatgggagttttcctgcgcgaacacctgaactactggtattcattgaaggcttactatctcgctaagacaatggctgacgtgccctttcaaatcatgttccctgtggcgtactgttccatcgtttactggatgacctcacaaccctccgacgcggtcagattcgtcctctttgctgctctaggtactatgacatcattggtcgcccagagccttggtctgctcattggcgctgccagcacctctcttcaagtggctaccttcgtggggcctgtgaccgccatcccagtgctcctattttctggttttttcgtctcttttgacacaattccaacttacctgcagtggatgtcttatatttcatacgtgcgctatggcttcgagggcgtcatactgagtatatacggtttggatcgggaagacctgcactgtgatatcgatgagacctgtcattttcaaaagtccgaagctatcctcagagaactggacgtcgaaaacgccaaactttatctggactttattgtgctcggaatattcttcatcagcttgcgactgattgcatattttgtcttgagatacaagatcagggccgagaggtag

SEQ ID NO: 215488 - DNA, 1992 bp, synthetic construct
  misc_feature 1..1992: note = Description of Artificial Sequence: Synthetic coding sequence
  source 1..1992: mol_type = other DNA
atgataatgagactgccacagccacacggcaccaacgcttcttcttatagcgcagaaatgactgaaccaaagagcgtgtgcgtgtctgtggatgaggtcgtgtcatcaaatatggaggcaacagagacggatctgttaaatgggcacctaaagaaggttgataacaatctgaccgaagcccagagattcagttcccttcccagacgtgctgcggttaatattgagttccgggatttatcgtattctgtgcccgaaggtccttggtggagaaagaaagggtataagaccctgctgaagggaatcagtggaaaatttaattccggtgagctcgtcgctatcatgggcccttccggtgctggcaagtccaccctgatgaacatcttggctggatatcgtgagactggaatgaagggcgcagtgctcataaacgggcttcctagagatttacggtgcttccggaaggtgagttgctacatcatgcaggacgacatgctcctgccccaccttaccgtccaggaagccatgatggtgagcgctcacctgaaattgcaggagaaggacgaggggagacgcgagatggtcaaagagattctcactgccctcggtcttctgtcttgtgctaatactcgcaccgggagcttaagcggaggtcagcgtaaaaggctcgctatcgctttagaactggtgaataacccccctgttatgttttttgatgagccaacttccggattggattccgcttcatgttttcaggtggttagcctgatgaagggccttgcacagggaggacgatctatcatctgcacaatccaccagcccagtgccaagttgttcgaacttttcgaccagctttacgtgctatctcaggggcagtgtgtgtatcggggtaaggtgtgcaatctggtcccttacctccgggacctgggcctgaattgccctacctatcataaccccgctgactttgtgatggaggtggcttcaggcgaatacggagaccagaatagcagactcgtgcgcgcagtcagggagggtatgtgtgactctgatcacaaacgggatctgggaggggacgctgaggtcaaccccttcttgtggcaccgcccttcagaagaggacagctcaagcatggagggttgccattcatttagtgcttcatgtcttacccagttttgtatcctcttcaagaggacatttctgagcattatgagggacagcgtgctgacacatctacggatcacaagccacatcggtataggattgctgatcggattgctgtatctgggcatcggaaacgaggcaaaaaaagttctatctaattccggtttcttattcttcagtatgctgtttctcatgttcgctgctctgatgcctactgtcttaaccttcccactggaaatgggggtgtttctgcgtgaacacctgaactattggtattctcttaaggcctattatcttgccaaaactatggcggatgttccattccagatcatgtttccagtagcttactgttctatcgtgtattggatgacatcccagccttcagacgcggtgcgatttgtgcttttcgcagccctcgggacaatgacctcactggtggcccagtccttgggactgctgatcggtgccgcttccacaagtttgcaggtggctacctttgtgggacccgtaacagcaatcccagtgttactcttctccggatttttcgtaagcttcgatacgatccccacctatttgcagtggatgtcatacatcagttacgtgagatacggcttcgaaggggtcattctgtccatctacggtctcgacagggaggacctccactgcgatatagatgagacctgtcacttccaaaagtcagaagccatacttagggaactagacgttgaaaacgcaaaattatatcttgattttatcgtgctaggcatttttttcataagtcttagacttatcgcctactttgttctcagatataagatacgagcagaaagatag

SEQ ID NO: 215489 - DNA, 2037 bp, synthetic construct
  misc_feature 1..2037: note = Description of Artificial Sequence: Synthetic coding sequence
  source 1..2037: mol_type = other DNA
atggcatgtctgatggctgctttcagcgtggggaccgcaatgaacgcatcctcatacagcgcagagatgaccgagccaaaatctgtttgcgtgagcgtggacgaagtcgtctcctcaaatatggaggccactgaaaccgatcttctgaacggacacctgaaaaaagtggacaacaacctcaccgaagcccaaagattctcttcactgccgaggcgagcggcagtgaatatagagttccgggatctgagttatagcgtgcccgagggaccatggtggcgaaaaaaggggtacaagacactactgaaaggtatttctggcaaattcaattccggcgagctcgtcgccattatggggcctagcggagcaggtaagagtacacttatgaacattctcgccggatacagggagactggcatgaagggagccgttcttattaacggcctgccacgtgacctgcgctgttttaggaaggtctcctgttacataatgcaggacgacatgctattgccacacctcacagtacaagaggcaatgatggtgtctgcccatttgaaattacaggaaaaagatgaaggcaggcgtgagatggtgaaggaaatactgaccgccttgggactactcagctgtgccaatacccgaacgggcagccttagcggcggacagagaaaacgtttggccattgcattggaactggttaataacccaccagtgatgtttttcgatgaacccacctccggcctggacagcgcttcctgcttccaggtggtgagtctgatgaaagggttggcccagggcggaaggtccatcatctgtacaattcaccagcccagcgccaagctctttgaactattcgaccagctgtacgtgctctcccaaggacagtgcgtgtatcgaggcaaagtctgcaacttggttccctacttgcgagatctggggctcaactgcccaacttaccataaccctgccgactttgtcatggaagttgcttcaggcgaatacggcgaccaaaacagtcgcttggtgcgtgctgtgagagaaggcatgtgcgattctgaccacaagagggacttaggtggtgatgcagaggtcaatccctttctttggcacaggccaagcgaagaagtcaagcagacaaaaagactgaagggccttcgcaaggattcttctagcatggagggttgtcactccttctccgcctcctgtttgactcaattctgcatacttttcaaacggacattcctatcaattatgcgagatagtgtcttaactcatcttcgcatcacaagccacattggtatcggactcttgattggcctgctttatttagggatcgggaatgaggccaaaaaggtcctgagcaatagtggctttctgttcttctctatgctcttcttgatgttcgctgcccttatgcctacagtgttgacatttccactggaaatgggggtgttcttgcgcgagcatttgaattattggtacagtcttaaggcctactatttagcaaagaccatggcagacgtccccttccagataatgttccctgtcgcctattgttcaattgtatattggatgacaagccagccctccgatgccgttcgcttcgtcctatttgctgcgcttggcactatgacatccttagttgctcaatctctggggttattgatcggggcagcatccacatctcttcaggtcgccactttcgtcggtcccgtgaccgccatcccggttcttctgtttagcggcttcttcgtctcctttgacactattccaacctatctgcagtggatgagttacatctcttacgtgcgctacggcttcgaaggagtgatcctgtccatctatgggctggacagagaggacctacactgcgacatcgatgagacctgccattttcaaaaatcagaagctatcctgcgggaactcgatgtggaaaatgcgaaactctacttggactttattgttctggggatatttttcatctcactcaggttgattgcctactttgttttgcgttataagatcagggcagagagatag

SEQ ID NO: 215490 - DNA, 2475 bp, synthetic construct
  misc_feature 1..2475: note = Description of Artificial Sequence: Synthetic coding sequence
  source 1..2475: mol_type = other DNA
atgttggccgttcaacagacagagcatctcccagcatgccctcctgcacggcgttggtctagcaatttctgcccggaatcaactgaaggcggaccctcactgctcggactgcgtgacatggtgagacgcggatggtccgtctgtacagcgattttattagctcgcttatggtgtttagtgccgacccataccttcctgtccgagtatccagaagccgcagaatatccccacccaggatgggtctactggctgcagatggccgtcgcgccaggacacctgcgcgcttgggtgatgcggaataacgtgacaacaaatatcccttcagcgttttccgggacactgacccacgaggagaaagcagttctgacagtgtttaccggcacagccacagctgtccatgtccaggtcgcagctctcgccagtgctaagctagagagctccgtgtttgtcactgactgtgtatcatgtaagatcgaaaatgtatgcgattctgcacttcagggcaaacgagtgccaatgtccgggttgcagggcagttccattgttattatgccccctagcaataggccactcgcttcagccgcatcctgcacctggagcgtgcaggttcagggaggcccacatcatcttggagttgtggctatttccggcaaggtgctctctgccgcacacggggctggcagagcatacgggtgggggtttcccggagatccaatggaggagggctataaaaccttgctcaagggaatcagtggcaagttcaactcaggagaactggtagcaatcatgggccctagcggggcaggcaagagtacactgatgaatatccttgccggttatcgggaaaccggcatgaaaggcgcagttctgattaacggactaccaagagacctacgttgctttcggaaggtcagctgctatataatgcaggatgatatgctgctgccccacttgaccgtccaggaggcaatgatggtgtcagctcatctgaagctgcaggaaaaggacgaaggtcgtcgagagatggttaaagagattctgacagccctgggtcttctgtcttgtgccaacacgagaacggggagcctgagtgggggacagagaaagcgcttggccatcgccctggagctcgtgaataatcctccagtgatgttcttcgatgagccaacctccgggttggacagcgcctcctgctttcaggtggtgtcacttatgaagggactggcacaggggggacgatcaatcatctgtaccatacatcagccctccgctaagctttttgagctgttcgaccaactttacgtactgtcacaggggcaatgcgtatataggggtaaagtctgtaatctagtgccctatcttagagacttgggcctaaactgcccaacctaccacaacccggctgacttcgtgatggaggtcgccagcggggaatatggtgatcagaattcacgcctcgtgcgagctgtacgggagggcatgtgcgactctgatcacaaacgtgatctcggcggtgacgccgaagtcaatcccttcctctggcacaggccatcagaggaagtgaagcagaccaaacgcttgaaggggctgaggaaggactcatcttctatggagggatgccactcattctcagcgagctgcttaactcagttctgtatcctgttcaaacggactttcctgtccattatgcgggacagcgtcctgacacacctgagaataaccagccacatcggcataggattgctgattggtcttctctacctgggtatcggtaatgaagcaaaaaaggtcctgagcaactccgggttcctcttcttttccatgcttttcctgatgttcgcagccctaatgcccactgttcttacttttccgctggaaatgggagtcttcctccgcgagcatttaaattattggtacagtctgaaggcctattacctggccaagacaatggctgacgtccccttccaaatcatgtttcctgtcgcctattgctcaatcgtgtactggatgacttcccagccaagcgatgccgtcaggttcgtgttgtttgccgctctgggcaccatgacttccctggtggcccaatcactcggtctgcttattggggcagcgagcactagcctgcaggtggcaactttcgtgggccctgtgactgctattcccgtgttgttgtttagcggattctttgtgagctttgataccatacccacttatctgcagtggatgagctatatttcctacgtgcgttatggctttgagggtgtgatcctgtccatttacggcctcgatagagaagacctacattgcgacattgatgaaacttgccattttcagaagagcgaggctatacttagagagcttgacgttgaaaatgctaaactgtaccttgactttattgtgctgggaattttcttcatatcactgaggttgatcgcctatttcgtactgcggtataagatccgggctgagcgatag

SEQ ID NO: 215491 - DNA, 2001 bp, synthetic construct
  misc_feature 1..2001: note = Description of Artificial Sequence: Synthetic coding sequence
  source 1..2001: mol_type = other DNA
atggcatgcctgatggcggcattcagcgtcggaactgctatgaacgccagctcatattcagccgaaatgaccgaacccaagtctgtatgtgtgtcagtggacgaggtagtctcgtcaaatatggaagcaaccgaaacagatctcctgaatggtcaccttaaaaaagtggataataacctgacagaggcgcagagattctcttctctgcctcgccgtgctgctgttaacatcgagtttagggatttgagctactctgtgcctgagggaccatggtggaggaagaagggttacaagacactgcttaagggcatttctggaaaattcaactccggcgaactggtggctatcatggggccaagcggcgcaggtaagagcactttgatgaacatcctggcaggttatcgggaaacaggaatgaaaggcgcagtgctgatcaatgggctgccgagggatctccgctgcttccggaaggtttcctgttacattatgcaggatgacatgctgttgccacatctaaccgtgcaggaggccatgatggtgtctgcacaccttaagctccaagagaaggatgagggaaggcgtgaaatggtgaaggagatcctgaccgcactgggcttactttcctgcgcaaacacacgcaccggatccttatccgggggacagcggaaaaggctggctattgctttggagctggtgaacaaccccccagtcatgttttttgacgaaccaacttctgggctggacagtgccagttgcttccaggttgtatcgctcatgaaaggactggcccagggtggtagatctatcatatgcaccatccaccagccctccgcaaagctcttcgagctcttcgatcagctctacgtactgagtcagggacagtgcgtgtacagaggtaaggtatgtaatctggtaccatatttgagagacctcgggctgaactgtcccacctaccataatccagcagacttcgttatggaagtggcctctggcgagtacggcgatcagaattcgaggcttgtgcgagccgttcgcgaggggatgtgcgattctgatcacaaacgcgaccttggcggagacgcggaagtaaatccctttctctggcaccggccttccgaagaagacagcagttccatggaggggtgccatagcttctccgcttcgtgcctcacgcagttttgcatcttgttcaagcgaacctttctgtcgataatgcgcgactctgtgttgacacaccttcgcattacaagccacattggtatcggcctactgatcggactattgtatctcggaatcggaaacgaagccaaaaaggtgctgtccaacagcgggtttttgttcttcagtatgctcttcctcatgtttgcagctctgatgcccaccgtgttgactttcccactggagatgggtgtcttcctgagggaacacctgaactactggtattcgctgaaagcttattatctggctaaaaccatggccgatgtgcccttccagatcatgttcccggtggcctactgctcaatcgtatactggatgacgagtcagcccagtgacgcagttcgctttgtgctttttgctgccttgggcactatgacatcccttgttgcccagagcctgggcctcctgatcggcgcagccagcacttcactccaagtcgctactttcgttggaccagtaacagcgatacccgtcttacttttttctgggttcttcgtctcattcgacactatccctacctatttgcagtggatgtcttatatcagctatgtgcgctatggattcgaaggcgtcatcctcagcatctacggattggatagggaagatctccactgcgatattgacgagacttgtcattttcagaaatcagaagctattctgcgcgaactggatgtggaaaacgctaagctctacttagacttcatcgtgctgggcatctttttcatttctctccggctgatcgcctattttgtgctgaggtataaaattcgcgcagaacggtag

SEQ ID NO: 215492 - DNA, 2007 bp, synthetic construct
  misc_feature 1..2007: note = Description of Artificial Sequence: Synthetic coding sequence
  source 1..2007: mol_type = other DNA
atgctgggaactcaggggtggactaagcagcgcaaaccttgcccccaaaacgcgagcagttacagcgcagaaatgaccgaacccaaatcagtatgcgtgagtgtagacgaggtggtatcgagtaatatggaggccacagaaaccgatctcctcaatggacacctgaagaaagtcgacaacaatctgactgaggctcaacgcttctcttcactgcccaggcgggcagccgtgaacatcgaatttcgggatctttcctactcagtgcccgaaggtccttggtggcggaagaagggctacaagactctgctgaaaggcataagtggcaaattcaactccggtgagcttgtcgctattatgggaccctccggcgctgggaaatcaacgctgatgaacatattggccggataccgggaaaccggaatgaagggcgcagtgcttatcaacggcttacctcgagatcttaggtgttttcgcaaagtgagttgctacataatgcaggacgatatgcttttgccccacctgaccgtgcaggaggccatgatggtgtccgctcatctgaagctgcaggaaaaagacgaaggaagacgggaaatggtaaaagagatactgactgcactgggtttgctctcatgcgccaataccaggactggatcattgtccggcggacaaaggaagaggctggccatagcgcttgaactggtgaataatcccccagtaatgttcttcgatgaaccgaccagcggccttgactccgcctcatgttttcaggtggtttctctcatgaagggcctggcccaggggggtcggtctattatttgtactatccaccagccttccgcaaagctgttcgaacttttcgaccagttgtacgtactctcacagggtcagtgtgtctaccgaggcaaggtatgcaatttggtcccatacctgagggacctcgggctgaactgccccacctaccacaaccctgccgatttcgtgatggaagtggcctcaggcgaatacggtgatcagaacagcaggcttgtgagagccgtgcgagaaggtatgtgcgactctgatcataaacgagatttaggtggcgacgccgaagtgaacccttttttgtggcatcgacccagtgaagaagactctagtagtatggaagggtgtcactctttcagcgccagctgcctaactcagttttgtattttgtttaagagaaccttcctgtctatcatgcgggacagtgtgcttacccacctgagaattactagccacatagggattggattactgataggcctcctgtacctgggcatcggaaacgaggctaagaaagtgctgtctaactctggttttctgttcttcagcatgctttttctgatgttcgccgcattaatgccaacagttcttacctttcctctagagatgggagtgtttctgcgtgagcatttgaattattggtactctttaaaggcctactacttagccaaaacgatggccgacgtgccttttcagattatgttccccgttgcatactgctcaattgtgtattggatgacatctcagccctcagatgccgtgaggttcgtcttatttgccgctctcggaactatgacgagtctggtggctcaatcactgggcctgctcataggagccgcaagtaccagcctgcaagttgccacatttgtaggacccgtgaccgccattccggtgttgctgttctcaggattctttgtaagctttgacacgatcccaacgtatctccagtggatgtcttacatcagttatgtccgctatgggtttgaaggtgtgatcctgtcaatttatggactggatcgggaggatctccactgcgatatcgacgagacttgccattttcaaaagtccgaagccattcttcgcgaactggatgtggagaacgctaaattgtatctggatttcatcgttcttggtattttctttatctccctccgcctgatagcttacttcgtcctaagatacaaaatcagggctgagcgttag

SEQ ID NO: 215493 - DNA, 1941 bp, synthetic construct
  misc_feature 1..1941: note = Description of Artificial Sequence: Synthetic coding sequence
  source 1..1941: mol_type = other DNA
atggccgagaaggccctagaggctgtcgggtgtggtctgggcccaggggctgtagctatggctgtgacgttggaagatggagccgaacctcctgtactgacgacacacttaaaaaaggtcgagaaccacatcaccgaggcccagagattcagtcatcttcccaagaggtctgccgtggatatagagttcgtggagcttagctacagcgtgagagagggcccttgttggcgaaaaaggggttacaaaacgctgctgaaatgtttaagcgggaaattctgtagacgagagctcatcggaattatggggcctagcggagccggaaaaagcacatttatgaacattctcgctggctaccgcgaatctggcatgaaagggcagatcctcgtgaatggaagaccaagagagctgaggaccttcagaaagatgtcatgctatattatgcaggacgacatgctcctcccccacctgacagtgttggaggccatgatggtgtctgccaatcttaagctgtccgagaagcaggaagtgaagaaggaactcgttacagagatcctgactgccttggggctcatgagctgcagtcatacgagaactgccctactgtcagggggtcagaggaagcggttggccatcgctttagaactggtgaataatccccctgttatgttcttcgatgagcctacatcaggcttggactccgcttcttgcttccaagtggtcagtctaatgaaatctctggctcagggaggtagaaccatcatctgcaccatccatcagccgtctgctaagctgtttgagatgtttgacaagctgtacattctttcccaaggacagtgtattttcaaaggagttgtgactaacctgattccttatttgaaagggttgggcctgcactgcccaacttatcacaacccagccgacttcatcatcgaggtagcctcaggagagtatggagacctaaaccccatgctgtttagggccgttcaaaacggtctgtgcgccatggcagaaaagaagtccagccccgagaaaaacgaagtgccagctccctgtcctccgtgtcccccagaagtcgatcccatcgagtctcatacatttgccacaagcaccctgacacagttctgtatcctgtttaagaggacctttctgagtatattgagagataccgttcttacacacttaagattcatgtcccacgttgtaattggggtgctcattggtctactgtatctgcatattggagatgacgcgagtaaggtgtttaataataccggctgtctcttcttttccatgctgtttttaatgtttgctgcactgatgccaacagttttgacatttccgttagagatggctgtctttatgagagagcacttaaattattggtatagtttgaaagcatactatctggctaagaccatggctgatgtgccttttcaggtggtgtgccccgttgtgtactgctctatagtgtattggatgactgggcagcctgctgaaactagtaggtttctgctcttctcagcactcgctaccgctactgcacttgtggcccagtccctgggactcctgattggcgctgcttctaattccttacaggtcgctaccttcgtaggacctgtcaccgctatccctgtcctgttattctccggttttttcgtcagcttcaagaccataccaacttatctccaatggagtagttatctgtcttatgtccgctacggctttgagggcgtcattctcacaatctatgggatggaacgtggggacctgacttgcctggaagagaggtgtcctttcagggaaccccagagcattctgagggccctcgacgtggaagatgcgaagctctatatggatttcctggtgctgggcattttctttttagccctgaggttgttggcttatctcgtgctgagatatcgtgtgaaatcagaacgctag

SEQ ID NO: 215494 - DNA, 1941 bp, synthetic construct
  misc_feature 1..1941: note = Description of Artificial Sequence: Synthetic coding sequence
  source 1..1941: mol_type = other DNA
atggccgaaaaggccctggaagctgtggggtgcggactagggcctggcgcagttgcaatggcagtcaccctcgaggatggcgctgagcctccagtactgacaactcatctgaagaaggtggaaaaccacatcactgaagctcagagattttcacacttgcccaaacgaagcgctgtagacatcgagtttgttgaattaagctattcggtcagagaaggcccttgctggagaaaaagaggatacaagaccctattgaagtgtctgagtggcaagttttgcaggcgggaacttattggaataatgggcccttcgggtgcaggaaagagtacctttatgaacatattagctggataccgggaaagcgggatgaagggccagatcctcgtaaatgggcgaccccgtgagctgagaacctttagaaaaatgtcctgctacatcatgcaagacgatatgcttctgccacatctgactgtgctcgaagccatgatggtatctgccaatctgaagctcagcgagaagcaggaggtgaagaaagaactggttacagagatccttaccgctctaggcctcatgagctgttctcacacaagaaccgccctgctctccggaggtcagagaaaacgcctcgctatcgccctcgaattagtgaataatcctcctgtcatgttctttgacgaacctacctcaggcctggacagcgcctcctgcttccaggttgtctcactcatgaaatccctggcccaggggggacggaccatcatctgtacgatccaccagccatcagcaaaactgttcgagatgtttgacaaactgtacattctcagtcaggggcagtgtatcttcaaaggggtcgttacaaatctgattccgtatcttaaagggctcggcctccattgtcctacttatcacaatccagctgattttatcatagaagtcgctagcggagagtacggagatctcaatcccatgctgttcagagccgtccaaaacggcctatgcgccatggccgaaaagaagagcagtccggagaaaaatgaagtgcccgctccttgccccccatgccctcctgaggtcgatcctatagagtcgcatacttttgctacctccacactcacccagttttgtatcctgttcaagcggacctttctgagcatattgcgggacacagtactcacccatctgcgatttatgtcccacgtcgttattggagtcttaattggacttctgtacctgcacataggcgatgacgcaagcaaggtttttaataacaccgggtgcctgttcttctccatgctgttcctcatgttcgcagctctgatgcccaccgtgctgacctttcctctggaaatggcagtctttatgcgagagcacctgaactactggtattctttaaaggcctattacttagccaagaccatggcagacgtgccttttcaagtggtctgtccagtggtctattgttcaatcgtgtattggatgaccggacaacctgccgagacaagcaggtttctgctgtttagcgctctcgcaaccgctactgctctcgtggctcaaagcttgggcctgcttatcggggctgccagcaacagtctgcaagtagcaaccttcgttggtcccgtaacagccattccagtcctcctttttagcggtttcttcgttagtttcaaaacgatccctacttatttacagtggagcagctacctgtcatatgtgaggtatgggttcgagggggttatcctcacgatttacggtatggagcgtggtgacttgacatgtcttgaagagcgttgtcccttccgtgaaccacaaagcatactgcgcgcacttgacgtggaagacgccaagctctatatggacttccttgtgctgggcatattttttctcgcactgagattgctcgcttacctggtgctccgttatcgcgtgaagtccgaaagatag

SEQ ID NO: 215495 - DNA, 1941 bp, synthetic construct
  misc_feature 1..1941: note = Description of Artificial Sequence: Synthetic coding sequence
  source 1..1941: mol_type = other DNA
atggccgagaaagccctcgaggctgtggggtgcggcttagggcctggagctgtggccatggccgtcaccctagaggacggagcggagcccccagtgctgacaacccacctaaagaaggtcgagaatcacataacagaggcccagcggttctctcatctgccaaagcggagtgctgtggacattgagtttgtggagctgagctactctgtacgggagggaccgtgttggaggaaacggggttataaaacactgctgaagtgtttgagtggaaaattttgccgcagagagctgattggaattatgggcccttctggggcaggaaagtccaccttcatgaatatattggcgggatatagagaatccggcatgaaagggcaaatcctagtcaacggcagaccgagagagcttcgtacctttaggaagatgtcatgttatattatgcaggacgatatgctcctgccacatctgacagtattggaggccatgatggtgtccgctaatctgaagctatcagagaaacaagaggtcaaaaaggagcttgtaactgagatcttgaccgcgctcggtctgatgagctgttctcatactcgaactgccttactttccggtggtcagagaaaaagactagcgatcgccttggagctggtcaacaaccctcctgtgatgttcttcgatgaaccaaccagcggcctggacagtgcgtcttgctttcaggttgtctctctgatgaagtctttagcccaggggggacgcactatcatatgtaccatacaccagccaagcgccaagctgttcgaaatgtttgataagctgtacatcctcagccaaggccagtgcatctttaagggcgtggtaacaaacctcattccatacttgaagggactgggtttacactgtccaacttatcacaatcctgccgacttcatcattgaggtcgcctccggcgagtatggagacctgaaccccatgctctttcgagccgtacagaacggcctctgtgctatggcagaaaagaagagttcccctgagaaaaacgaagtccccgctccttgccctccttgccctccagaggttgatcctattgagtcccacacgttcgccacctcgaccctgacacagttctgtatcctgtttaaaagaacctttttaagcatcctgagagacaccgtgctgacccatctgcggtttatgtctcacgtagtgatcggagtcctaattggacttttgtatctacacatcggagatgacgcttctaaggttttcaataacactggatgccttttcttttcaatgctttttctgatgttcgcggctttaatgccaaccgtcctcaccttccccctggagatggcggtttttatgcgcgagcacctgaattactggtatagcctaaaggcttactacctggctaaaaccatggcagacgtcccgttccaagtggtctgcccagtggtttactgcagtatcgtgtactggatgaccggccaacccgcagagacctctaggttcttactgttcagcgcccttgccactgctacagccttagtggcgcagagcctcggactgcttattggggcagctagtaacagtttacaggtagccacctttgtggggccagtgaccgccatccccgttttgcttttctctggattctttgtctcatttaaaacaatacccacatacttacagtggtcctcctaccttagctatgtccgatacggttttgagggtgtaatactgacaatatatgggatggagcgcggagacctaacgtgcctggaagaacgctgcccatttcgggagccacaatcaatcctgagggccctcgacgtcgaggacgccaagctctacatggatttcctcgtgctgggaatcttttttcttgcattgcgactgctggcatatcttgtgctgagatatagggtaaagagtgagaggtag

SEQ ID NO: 215496 - DNA, 1956 bp, synthetic construct
  misc_feature 1..1956: note = Description of Artificial Sequence: Synthetic coding sequence
  source 1..1956: mol_type = other DNA
atgggcgatctgagttccttgaccccaggaggcagtatgggtctgcaagtcaatcgagggagccaaagttccttggagggggcacctgccaccgcccctgagccacattcactgggaattctgcacgcctcatacagtgtctcacacagagtccgcccttggtgggacatcacctcatgtcggcaacagtggactcggcagattcttaaggacgtcagcctgtatgtcgagagtggtcagattatgtgcattctggggagctccggaagcggaaagaccacactacttgacgctatgtcaggcagactcggcagagccggaacatttcttggggaagtctatgtcaatggaagagccctcaggcgcgagcagttccaggattgtttcagttacgtgctgcagtcggacaccctgctgtctagcctgaccgtgagagagaccctgcattataccgccctgttggccatccggagaggaaacccaggcagttttcagaaaaaagttgaggctgtaatggccgagctcagcctctctcacgtagcagataggctcatcggcaattactcactgggcggtatctcaactggggagaggcgtcgcgtgtcaatcgccgctcagctgctgcaagacccaaaggtcatgctgttcgacgagccgactaccggattggactgcatgactgccaaccagatcgtggttctactggttgagctagcgagaaggaatagaatagtggtgctaactatccaccagccaagatctgaactcttccagctgtttgacaaaatcgccatcttgtctttcggagagctgatcttttgcggtacacctgccgagatgctagatttctttaacgactgtggttatccatgtcccgagcattcaaatccattcgatttctacatggatctcacctctgtggacactcagagcaaggagcgcgagattgaaacaagcaagagggtgcagatgatcgagagcgcctataagaagtcagcgatctgccacaaaacactgaaaaatattgaacgcatgaaacatttgaagaccctgcccatggtgccgttcaaaacaaaagattcacccggagtgtttagcaaactgggagtgcttcttcggagggtcactcgcaacctggtgagaaataagttagctgttatcaccaggcttctgcaaaaccttataatgggcctctttctgctgttcttcgtgttacgagtacgctctaacgtactgaagggcgctatccaagatagagtgggcctgctttaccagttcgttggagcgactccctataccggtatgctcaacgcagtgaacctgtttcccgtgcttcgcgctgttagtgatcaggaatcacaggatgggctgtaccaaaagtggcaaatgatgctcgcctacgcattacatgttctgccgttttccgtggtggccaccatgatcttttctagcgtgtgctattggacactcggtctacatccagaggttgctagattcggatacttttccgcggcattactggcccctcacctgattggagagttcctcacccttgtgctcctgggcattgtccaaaaccctaatatcgttaatagtgtcgtggcactgctgagcattgcaggagttttggtgggctcggggttcctgcgcaacatccaggagatgcccatcccatttaaaattatttcttattttacgtttcagaaatactgttccgaaattctggtcgtgaacgaattctatggtctgaacttcacttgtggctcctccaatgtctcagtgactaccaatcctatgtgtgcctttactcagggtatccagtttatcgaaaagacttgccctggcgcaactagccgattcactatgaatttccttatcctgtacagctttattcctgccctggttattcttggaatcgtggttttcaagattagggatcatttgatttcgcgctag

SEQ ID NO: 215497 - DNA, 1443 bp, synthetic construct
  misc_feature 1..1443: note = Description of Artificial Sequence: Synthetic coding sequence
  source 1..1443: mol_type = other DNA
atgtgtattctgggatccagcggaagcggtaaaaccacactgttggacgccatgagtgggaggctaggtagagcgggaaccttcctgggcgaggtctacgtcaatggccgagccctgcggcgagaacagtttcaggactgcttctcttatgttctccagagtgatactctgttgagcagcctaaccgtgagagagacacttcactacaccgccctcctcgctatccgaagaggcaatccagggagctttcagaagaaagtcgaggccgtgatggccgagctcagcctgtctcacgtggcagatcggctcatcgggaactattctctggggggtatttccaccggagaaaggaggcgcgtgagcatcgcagcacaactgttgcaggatcctatggacctgacctccgttgacacacagtccaaagagcgggagatagagaccagtaagcgcgtccaaatgatcgagagtgcttataagaagtcggccatatgccacaagacattgaagaacatcgaaagaatgaagcacctgaagacactcccgatggtgcctttcaaaacaaaggactcccccggtgtgttctcaaagcttggtgtccttttgcgtcgcgtgacgagaaacctggttcggaataaactggctgtcataaccagactcctccaaaacctcatcatgggcctctttctcctcttttttgttctcagagtcagaagtaacgtgttaaaaggtgcaatccaggatagagtaggccttctgtatcaattcgtgggggcaaccccctacactggcatgcttaacgctgtgaatctcttccctgtccttcgcgctgtgtctgaccaggagagtcaggatgggctgtatcagaaatggcagatgatgctcgcatacgccctgcatgtcttgcctttcagcgtcgtggccaccatgatttttagttccgtctgctattggaccttgggcctgcacccagaagtggcccgatttggctatttttctgcagcactgctcgcaccccatttaataggcgagtttctaacactggtacttcttggtatcgtgcagaatcctaacattgtcaatagcgtcgtggccttgttgtcgatcgctggtgtcctggttggcagtggatttctgagaaacatccaggagatgcccattccattcaagattatcagctacttcactttccagaagtattgctcagaaattcttgtggtgaacgagttttacgggctaaacttcacatgtggaagcagtaatgtgtcggtcactaccaatccaatgtgtgcgtttacccagggtattcaatttatcgagaaaacatgtccaggtgcaacatccagattcaccatgaacttcctcatcctgtactctttcatccccgcattagtcattctcggcatcgtggtattcaaaatccgagaccacctgattagtaggtag

SEQ ID NO: 215498 - DNA, 771 bp, synthetic construct
  misc_feature 1..771: note = Description of Artificial Sequence: Synthetic coding sequence
  source 1..771: mol_type = other DNA
atgggattattcctccttttctttgtgcttagagtccggtccaacgtccttaagggcgctatccaggatcgtgtaggactgctctaccagtttgtaggcgcaacaccctacaccggaatgctgaatgcagtcaacctcttcccggttctgcgtgcagtgagtgatcaggaatcacaggacggcctgtaccaaaagtggcaaatgatgcttgcttatgcactgcatgtgcttccattttctgtagtggcaaccatgatcttctccagcgtgtgctactggactctgggtctccaccccgaggtcgctcgcttcggctattttagcgcggctctgctggcaccccacctgatcggtgagttcctaactctggttctccttggcattgtccagaaccctaacatcgtgaatagtgtggtagcattactctcgatcgcgggagtcctggtgggctccggctttctacggaatatccaagaaatgcctataccctttaagataatttcctattttacctttcaaaaatactgctctgagatccttgtggttaacgagttctacgggctcaatttcacatgtggcagctccaatgtgtctgtaactaccaatcctatgtgtgcgttcacgcaggggattcagttcattgaaaaaacttgtcccggagcaacaagccgcttcaccatgaacttcctgatcctgtactcctttatcccagccctcgtcatcctgggtatcgtcgtgttcaagattcgggatcatcttatctcccgctag

SEQ ID NO: 215499 - DNA, 2022 bp, synthetic construct
  misc_feature 1..2022: note = Description of Artificial Sequence: Synthetic coding sequence
  source 1..2022: mol_type = other DNA
atggctgggaaggccgctgaagaacggggattacccaagggagccacgcctcaggacaccagtggactccaggatcgtttattctcttccgaatccgacaactccctgtactttacctatagtggtcagccaaatacgctggaggttcgcgacttaaattaccaggtggacttggcttctcaagtgccatggttcgaacagttggcacagttcaaaatgccttggacctcccccagctgccagaattcctgtgaattgggaatccaaaatttgagctttaaggtgcgctccggacagatgttggctattattggctctagtgggtgtgggagggcctctctgctggacgtgataactggacgtggacatggtggaaaaatcaagagtggacagatctggatcaacggccaacccagttccccacagcttgttcgcaaatgcgtggcccacgtacggcaacacaaccaacttcttccaaacttaacggttcgagagacactggcctttatcgcccaaatgcgattgcctagaaccttcagtcaggcacagcgtgacaagcgcgtcgaggatgtgatcgctgagcttcggctgagacagtgcgcagatacaagagtcggaaacatgtatgtaagaggcctgtccggaggggagcggcgaagagtttccattggggtacagcttctgtggaatccgggtatactgatcttggatgagcccacctccggcctcgattcattcacagcccacaatctcgtcaagaccctatcccgcttagcaaaagggaatcgcctggtattgatcagcctccaccagcctaggagcgatatttttcgcctgtttgatttggtcttgttgatgacatcaggtactccgatttacttgggggcagctcagcacatggtccagtacttcaccgcgattggatacccttgtcctcgttattcaaacccagctgacttttatgtggatcttacaagcatcgaccgccgatcgcgcgaacaggagctggccacccgggagaaagcccaatctctcgccgcactcttcttggaaaaggttcgggaccttgatgacttcctctggaaagccgagacaaaagatctggatgaagatacgtgcgttgagtcctcggtgacccccttggatacaaactgtctccccagccctacaaagatgcccggagccgtgcagcaatttaccactcttatccgcagacagattagcaatgattttcgtgatctcccgacattattaatccacggtgcagaggcttgccttatgtcaatgaccattggcttcctctatttcggccatggctccattcaattgtctttcatggatacagcggcactcctgtttatgatcggggcactgatcccctttaatgtgattctcgacgtaatcagcaaatgttacagcgaaagggccatgttatattacgagctggaggacgggctgtacacgacaggaccgtatttcttcgccaaaatcctcggggaattacccgagcactgcgcctatattatcatctacggcatgccaacctactggctcgcaaacttgaggccagggttgcagccctttcttctccactttctactggtgtggttagtcgtattctgctgtagaattatggcactggcagcagcggctctgcttcccaccttccacatggcatccttctttagcaacgcattgtataactccttctacctggcaggaggattcatgatcaacttgagctcactctggactgtgcccgcatggatcagcaaagtgtcattccttcggtggtgctttgagggcctgatgaagattcagtttagcagacggacctacaaaatgccgttgggaaacctgacaatcgcagtctctggtgacaagatcctgtccgtcatggaattagacagctatccactgtacgcaatctacctcatcgtcatcgggttgtcggggggattcatggtcctgtactatgtgtcactgcgatttatcaagcagaagcctagccaggattggtag

SEQ ID NO: 215500 - DNA, 2376 bp, synthetic construct
  misc_feature 1..2376: note = Description of Artificial Sequence: Synthetic coding sequence
  source 1..2376: mol_type = other DNA
atggcgggtacctctgccccaggcagcaagagaagatcggaaccaccagcgcctagacctgggcctcccccaggtactggccatcctccttctaagcgagctcgaggctttagtgccgctgctgcccctgaccccgacgatccatttggtgctcatggagacttcacagccgacgacctggaagaattagacacccttgcatcacaagctctgtcccaatgcccagcagccgctagggacgtgagctcagatcataaggttcacagactcctcgacggtatgtcgaaaaatccctcaggtaaaaaccgggagactgtgccgattaaggacaactttgaacttgaggtgcttcaagctcagtataaggagttgaaggagaaaatgaaggtaatggaagaggaagtgctgattaagaacggggagatcaaaatccttcgggactctcttcaccagacagaatccgtactggaggagcagaggagaagtcacttcctcttagagcaggagaagacccaagccctgtcggataaggagaaggagttttctaagaaacttcaatctctgcagtccgagctccagtttaaggatgcagaaatgaacgaactgagaacgaaactccagactagcgagcgagcgaataagctcgctgctcccagtgtctctcatgtgtcgcccaggaagaaccccagcgtggtgatcaaaccagaagcttgctcgccccagttcggaaaaacttccttccccactaaagagtctttttcagccaatatgtccctgccgcacccatgccagacggagagtggatataaaccactagtcgggagagaagatagcaagccgcacagcctccggggtgatagcataaagcaagaagaggcccagaagtctttcgtggattcctggcgtcagagatcaaatacccagggctccatcctgattaacctgttgctgaaacagcctctgattcctggctcctccttgtctctctgtcacctgcttagctcatcttctgagagccccgctggcacccctttgcaaccaccgggatttggatctaccctcgccggtatgagcggtttgcgcaccactggatcatatgacgggtccttttccctctccgctctcagggaagcacaaaacctcgccttcactggtctgaatttagtggcgcgtaatgagtgctctcgggacggggaccccgctgagggaggccgaagagccttcccactttgtcaactcccaggggctgtacattttctgccgctggttcagttcttcatcggtctgcactgtcaagcactccaggatctggcagccgctaaacgcagcggtgcaccgggagattctcccacccattcatcttgtgtcagcagcggcgtggagactaatccagaggattctgtttgcatacttgaggggttttctgtgacggctctgtcgattctccagcacctggtgtgccacagcggagctgttgtaagcctgctattgagcggcgtgggcgctgatagtgccgctggtgaaggcaacaggagcttggtgcacaggctttcagatggagacatgacttcagccctcagaggtgtggcggatgaccagggccaacatcctctgttaaaaatgttacttcacctgctggcgttcagctccgctgccaccggccacctgcaggccagcgtgctgacacagtgtcttaaggtcctggtcaagcttgccgagaacactagctgcgacttccttcctaggttccaatgcgtgttccaggtgctgcccaagtgtctcagtcccgagaccccccttccctcagttctgctcgccgttgaactccttagcttactggccgatcatgatcagctggcccctcaactgtgctcacactcagagggctgtctccttttactcctctatatgtacatcaccagcagacctgaccgggtggctttggaaacccagtggctgcaactggagcaggaagtggtctggctgctggccaagcttggtgtgcagagtcctttgccgccagtcaccgggagtaactgccaatgcaacgtggaagtggttcgcgcattgaccgtaatgctacaccggcaatggctaaccgtccggagggcaggtggtcctcctcggactgatcaacaaagacgtacggtccgctgcctccgagataccgtcttactcctgcatggcctgtctcagaaggataaattattcatgatgcattgcgtggaggttctacaccaattcgaccaggtcatgcctggcgttagtatgctaattagaggactgcccgacgtgacagactgcgaggaggctgctcttgatgatctctgtgcagcagaaaccgatgtggaggaccccgaggtcgaatgtggctag

SEQ ID NO: 215501 - DNA, 2295 bp, synthetic construct
  misc_feature 1..2295: note = Description of Artificial Sequence: Synthetic coding sequence
  source 1..2295: mol_type = other DNA
atggccggtacctctgccccaggttctaaacgtcgctctgagccccctgccccaaggcccggaccccctcctggtaccggacacccgccatctaaaagagcgagggggttttctgctgcggcagccccagatccagatgatcctttcggcgctcatggcgactttacagctgatgacctagaggaactggatactctggcgtcccaggctctgagtcagtgccccgctgctgcaagagacgtgtcatcggaccacaaggtccatcgcttgttagacggaatgagcaagaatccaagtgggaagaatcgagagactgtaccaataaaggacaactttgaacttgaagttttgcaggcccagtataaggagttgaaagaaaaaatgaaagttatggaggaagaggtgctcatcaagaatggggaaatcaagatactgcgcgattccctgcatcagactgagtccgtgctggaagaacaaaggagatctcattttctgctggagcaggaaaagacccaagccctgagcgataaggagaaggagttcagcaagaaactgcagagcctgcaatccgaactccaattcaaagacgctgagatgaacgagttaagaacaaagttgcagacctcagagcgggctaacaaactcgccgcaccctctgtgagtcacgtcagcccgcgaaagaaccctagcgtcgtgatcaagcctgaagcctgctcaccacagtttggtaagacttcattccccacaaaggaatcctttagcgctaatatgtccctgccccacccttgccagacagagagtgggtataagcctttggttggcagggaagactctaagccacattccctgcgcggtgatagcatcaagcaggaggaggcgcaaaaaagtttcgtggatagttggcggcagaggagcaacacgcaaggatctatcctgattaacctgctgctgaagcagccgctgattccaggatcctccctgagcctttgccacttactgtcttcttcaagcgagagcccagccggtaccccactgcagccccctggcttcggctcaaccctggccggaatgagcggtctgagaacaacaggtagctatgacgggtcctttagtctatccgcattgagggaagcgcagaatcttgctttcactggtcttaacctggtagcgagaaacgagtgttcacgcgatggcgatcccgcagagggcggacgccgtgcattccccctatgtcaactcccgggagccgtccattttctccctctggttcagttttttattgggcttcactgtcaagcacttcaggacctcgctgccgctaagaggtctggagccccaggagactcaccaacccactcttcttgcgtgtctagcggagtggaaactaacccggaggactccgtgtgcattctggaagggttctcggttaccgcactgtcaatcctgcaacatctggtttgccactccggagctgtcgtctccctcctgctgtcaggagtgggggcagattctgctgccggagaggggaacaggtcattggtacatcgtttgtctgacggggacatgacatctgctctgcgcggagtagcagacgatcaaggacagcatccactcctgaagatgcttctgcacttgctggctttttctagtgccgcaacaggtcacttgcaggccagcgtgctgacccaatgtctaaaggtgctggtgaaacttgcagaaaacacttcttgcgactttctgcctaggttccagtgcgtgtttcaggtgctcccgaagtgtttgtcacccgagacaccactgccaagtgtgctcctggccgtggagttgctgtctttactggcagatcacgatcaactggcacctcagttgtgttcccactctgaagggtgcctacttctcctgctttatatgtacattacatctcggccagaccgggtggccctggagactcagtggctgcaacttgaacaggaggttgtgcgagcattgactgttatgttacaccggcagtggttaacagtgagacgagcaggcggacccccaagaaccgaccagcaacgcaggacagttcgctgcctgagagatactgtcctactgctgcatggactatcccaaaaggataagttgtttatgatgcactgcgtcgaggtcctccatcagttcgaccaggttatgccaggcgtgtcaatgcttatacgaggcctgcctgacgtgactgactgtgaagaggccgctctggatgacttgtgtgccgcagaaacagatgtcgaagatcccgaagtcgagtgtggctag

SEQ ID NO: 215502 - DNA, 1995 bp, synthetic construct
  misc_feature 1..1995: note = Description of Artificial Sequence: Synthetic coding sequence
  source 1..1995: mol_type = other DNA
atgaaagtcatggaagaggaagttttgatcaagaatggggaaatcaagattttgcgggacagtctgcaccagactgaaagcgttttggaggagcagcgtagatcccatttcctgttggagcaggagaagacccaggccctgtcagataaagagaaagaattttcgaagaagctacagtctctccagtctgagctacagttcaaggatgcagagatgaatgaactccggaccaagttgcagacctcagaaagggctaataagctggccgcaccaagtgtgtcgcacgtctcaccacgaaagaaccccagcgttgtcattaagccagaagcctgtagcccacagttcggcaaaacgtcgtttcccactaaagaaagctttagcgccaacatgtctttgccacacccttgtcagacagaatcaggatataagcctctcgtgggacgagaagatagcaagccccattccttacgaggcgattcgataaagcaggaggaggcacagaagtccttcgtggattcttggcggcagcgatctaacacccagggatccatcctgatcaacctgctacttaagcagccgctgatccccggatcgagtttgtcgttgtgtcatctgctgagctcgtccagtgagagccccgctggtactcctctgcagcccccaggatttggaagcactcttgctggcatgtccggcctgaggacaaccggatcctatgatggctcattcagcctttctgccctccgcgaggcacaaaacctggcgtttactggcctaaacctagtggccaggaatgagtgttctcgcgacggagatccagcagagggcggacgacgtgcctttcctctgtgtcagctgcccggagctgtgcacttcctcccactcgtgcaattcttcattggactccactgccaggccctgcaagacctggctgccgctaagcgcagtggggcacctggggatagcccaactcactcgagttgtgtgtctagcggcgtcgagacaaatccggaagatagtgtttgtattctcgagggcttcagtgtgaccgcactgtcgatcctgcagcacctggtatgccatagcggcgctgtggtgtctctgcttctgtcaggggtaggcgctgattccgccgctggagagggaaacaggtccctcgtccacagattgtctgacggggatatgacaagtgcacttcgcggagtcgccgacgaccagggacagcaccctctgctcaagatgctcctgcacctgctggcctttagtagcgccgctacaggccatttacaggccagtgtcctgacccagtgtctgaaggtgctggttaagctggccgagaatacttcatgtgattttttacctaggtttcagtgcgtgttccaagtgttacctaaatgtctgtctccagaaaccccacttcctagcgtactgctggccgtagagctcttaagcctccttgccgatcatgaccagttggcccctcagctgtgctctcacagcgagggctgtctgttgctgttgctttatatgtatatcacgagtcgccctgatagagtggcgctagagactcaatggctgcagctcgagcaggaagtggtctggttgttggctaagttgggtgtgcagagccctctccctccagtgaccggcagtaactgccagtgcaatgtcgaggtcgttcgggcactcacggttatgctccataggcaatggctgacagttaggagagcgggtgggcctccaaggacagatcagcagagacggacagttaggtgcttaagagacacagtgctgctgcttcatgggctgagccaaaaggacaagttatttatgatgcactgcgtggaggtgttgcatcagttcgaccaggttatgccaggtgtgtctatgttaatccgagggttgcccgacgtcacagactgtgaggaagccgcattggacgatctgtgcgctgcggaaactgatgttgaggatccagaagtagaatgtggttag

SEQ ID NO: 215503 - DNA, 2097 bp, synthetic construct
  misc_feature 1..2097: note = Description of Artificial Sequence: Synthetic coding sequence
  source 1..2097: mol_type = other DNA
atgagtaagaatccctctgggaaaaatcgggagaccgttccgatcaaagacaactttgagctggaagtgttgcaggcccagtataaagagctcaaagagaagatgaaggtaatggaggaggaggtgcttatcaaaaacggagagatcaagattttaagagactctttgcaccaaaccgaaagcgtgcttgaagagcagcggagatcacacttcctcctggagcaagagaagactcaagcactatcagataaagaaaaagagttctctaaaaaactccaatcgcttcagagtgaactgcagtttaaggacgccgaaatgaacgagctccgtaccaagttgcaaaccagcgagagggcaaataagcttgctgcaccttccgtgtcacatgtgtcacctagaaagaacccgtccgtagtcatcaagcccgaggcctgcagccctcaatttggcaaaaccagctttcctactaaagaatccttttccgcaaacatgtccctgcctcacccttgccaaactgaatcgggctataaacctctcgtggggcgagaggattcaaaaccccacagtctgcgcggagacagcatcaaacaagaagaagcccagaaaagctttgtggacagctggcgacagagatccaacactcagggctctattctgattaatctcctgctcaagcagccactgatccctgggagcagcctgtcgctgtgtcaccttctgtcttcaagttctgaatccccagcagggaccccgttgcagcctccgggtttcgggtctacgttggccggtatgtctggactgcgtaccactggatcctatgatggttctttctccctgtccgccctgcgtgaagcccagaacctagcattcacaggcctcaatttggtggccaggaacgaatgtagcagggatggcgatcctgccgaagggggtagacgtgccttcccgctgtgccaactgccgggagccgttcactttctcccgctggtccagttcttcatcgggttacactgtcaggccttgcaagacttggcggcagcaaaacggagtggggctcccggagatagtcccacacattcaagttgcgtgagttccggcgtggagactaaccccgaggacagtgtgtgcatcttagaggggtttagcgtcaccgcccttagcatcttgcagcatctcgtctgccacagtggtgcagtcgtgtctcttttgctttccggtgtgggggcagattccgccgcaggtgaaggcaacaggagtctggtgcaccgactgtctgatggtgatatgacctcggctctgcgcggtgtggccgatgatcaagggcagcaccctctgctgaaaatgctactgcacctgttagcctttagcagcgctgctaccggccatctgcaggcttcagttctcacccaatgtttaaaagtgctagttaagctcgcagagaacacttcttgtgactttctgccacggttccagtgcgtcttccaagtgttacccaaatgcctctcccccgagacgccacttccgtcggtcctgttggccgtagaattgctgtcgcttctcgccgatcacgaccagctggctcctcagctgtgttctcacagtgagggctgcctgctgttgttactatacatgtacattaccagccgacctgatcgcgtggccttagagacacagtggctgcagctagagcaagaagtggtctggctcctcgcgaaactgggagtgcagtcccctctgcctcctgtgacgggtagtaactgccaatgcaatgtggaggtcgtgcgagccttgaccgtcatgctgcatagacagtggctcaccgtacgccgagctggcggacctcctcgcaccgaccagcagcgtagaacggttcggtgtctaagggatactgtgctgctgctgcacggtctcagccaaaaggataaattgttcatgatgcattgtgtagaagtcctgcaccagttcgaccaggtgatgcccggagtttccatgttgataagggggctgcctgatgttacagattgtgaggaggccgcacttgacgatctgtgtgcagctgagaccgatgtcgaggaccctgaggtggagtgcggctag

SEQ ID NO: 215504 - DNA, 591 bp, synthetic construct
  misc_feature 1..591: note = Description of Artificial Sequence: Synthetic coding sequence
  source 1..591: mol_type = other DNA
atgtcgaagaacccgtcaggtaagaatagggagactgtgcccatcaaggacaattttgaactcgaagtgttgcaggcccaatacaaagagctcaaggaaaaaatgaaagtgatggaagaagaggtattgatcaagaatggcgagatcaagatcctgcgtgactcactccatcagacagaatctgtcctggaggagcagaggcgctcccactttctgctggagcaggagaaaacacaggctcttagcgacaaagagaaagagttctcaaaaaaactgcagagcctacagtcagaattgcagtttaaggatgccgaaatgaatgagctcagaacaaaattgcaaacctccgaacgggcaaacaagctggccgcaccatctgtgagccatgtgagccccaggaagaacccctcagtagtcataaagcctgaagcatgtagtccccaattcgggaagactagttttcccacaaaggagtccttctctgccaatatgtccctgccccatccatgtcagaccgagagtggatataagcctttggtgggaagagaggactcgaaacctcattctttgaggggcgactcaattaagtag

SEQ ID NO: 215505 - DNA, 141 bp, synthetic construct
  misc_feature 1..141: note = Description of Artificial Sequence: Synthetic coding sequence
  source 1..141: mol_type = other DNA
atgagcaagaatccctccggcaagaatcgcgaaacagtaccgataaaggataacttcgagcttgaggtcctgcaggcccagtacaaggagctgaaagagaaactctgcaagaaggctgatacctcctaccatcacctgtag

SEQ ID NO: 215506 - DNA, 1305 bp, synthetic construct
  misc_feature 1..1305: note = Description of Artificial Sequence: Synthetic coding sequence
  source 1..1305: mol_type = other DNA
atgagcatagaaaagatctgggcgcgtgaaattctcgacagtcgcggaaatccaacagtcgaagtagatttgtacaccgccaaaggcctgttccgcgcagccgtgccaagtggcgctagcaccgggatttacgaggcactcgaactgcgggatggtgataaacagagatacctgggaaagggtgtgttgaaagccgttgaccacattaactcaaccattgccccagccctcattagttcaggcctcagcgtcgttgagcaagaaaagctagacaatctgatgctcgagcttgatggaactgagaataagagcaagttcggcgcaaacgctatccttggagtgtcactggctgtgtgcaaagccggtgcggctgagagggagctcccactgtaccgccacattgcccagctggccggaaattctgacctgattctcccagttcctgcttttaatgtgatcaacgggggatcccacgccggtaataagctggccatgcaggagtttatgatcctccctgtgggcgcagagtcttttagagatgcaatgagacttggcgcagaggtctaccataccctcaaaggggtgattaaagataagtatgggaaagacgccacaaatgtaggagatgaaggaggatttgcaccgaatatcttggagaatagtgaggccctcgaactagtaaaggaagcaatcgacaaggctggatatacggagaagatcgtgattggtatggatgtcgccgcatccgagttctatcgtgacggaaaatatgatctggattttaagtctcccaccgatcccagcagatatattacaggagaccaactgggcgcactgtaccaggactttgtacgcgattacccggtcgtgtccattgaagacccttttgaccaagacgattgggcagcctggtccaagttcaccgcgaatgttgggattcaaattgtcggggatgacctgacagtcaccaatcccaagcggattgagagggctgtggaggaaaaggcctgtaactgcctgctgttaaaggtgaatcagataggctctgtcaccgaggcgatccaagcctgcaaacttgctcaggagaacggctggggggttatggtttctcaccggtctggcgagacagaagacactttcatcgcagaccttgtcgtgggtctgtgcacagggcagatcaagactggtgccccatgccgcagcgaaaggctggcaaaatacaaccaactgatgcgcatcgaggaggagttgggtgatgaagccaggttcgcgggtcataacttccggaaccctagtgtactgtag

SEQ ID NO: 215507 - DNA, 3573 bp, synthetic construct
  misc_feature 1..3573: note = Description of Artificial Sequence: Synthetic coding sequence
  source 1..3573: mol_type = other DNA
atgaagacacgtcagaacaaggattccatgtccatgcgatccggacggaaaaaagaagctccagggcctagagaggaacttagaagtcgaggacgggcatcccctggaggtgtgagtacatccagcagtgatggaaaggcagaaaagtctcgacaaacagcaaaaaaagccagggtggaggaggctagcaccccaaaagtgaacaaacagggcaggagcgaggaaatctccgaaagcgaatcggaggaaacaaacgctcccaaaaagacaaaaaccgaacaggagctgccacggccacagtcaccctccgacctagactccctggacgggagatcgctgaatgatgacgggagctcagatccgagggatatagatcaggataaccgctcaacttccccatcaatctattctccaggcagtgtggagaacgattccgactcatccagcgggctgtcccagggccctgcacggccatatcatcccccacctctatttccaccttctccccagcccccagacagcactccccgacagcctgaagcgagttttgaaccacacccaagcgtcactcccaccggctaccatgccccaatggagccacctaccagcagaatgtttcaagcccctcccggagcccctccccctcatcctcagctgtaccccggagggactgggggtgtgttgtcggggcctcccatgggaccaaaagggggtggggctgcctccagtgtaggcggtcccaatggcggaaagcaacatccccctcccacaaccccaatttccgtgtccagctcgggtgcgtcaggcgctccacctactaagccaccgacaaccccggtgggagggggaaatctgcccagtgctccccctccggctaattttccccatgtgacacccaacctgccccctcctcctgccctacgacctcttaataacgcttccgcttcacctccagggttaggggcacagcccctcccgggtcacctacctagcccacacgctatggggcagggaatgggcggtctgccgccaggaccggaaaagggacccacactggcaccttccccacattctctgccccctgcatcaagctctgcgcctgctcccccaatgcgcttcccctactcgtcgtcctctagttccagcgccgctgcttcatcatcctcatcctcctcttctagcagcgcatcccctttccctgccagtcaggctttaccgtcctacccacatagttttccccctcctacttcattatctgtgtctaaccagccacccaagtacacgcagcctagtctgccttctcaagccgtatggtctcagggccctcctcctccccctccctacggtagactgttggctaacagcaacgcacatccaggccctttccccccaagcacaggcgctcagtccaccgctcacccacctgtttccacacatcatcaccatcaccaacagcagcaacagcagcagcagcagcagcaacaacagcaacagcaacaacagcagcatcatggaaattctggacctcctcctcccggagcgtttcctcaccccctcgagggaggatcctctcatcatgcccacccatacgcaatgagtcccagtctgggcagcttacggccttacccaccaggccctgcacatttgcctccccctcactcccaagtctcgtacagccaggcgggacctaatggcccacctgtgtcttccagctctaacagctcctccagtacatctcagggcagctacccatgtagccaccccagcccttcacagggcccacagggtgccccatacccttttccgccagtccctactgtcacaacctcaagcgccaccttgtctactgtgatagccaccgtggcttcatcaccagccggatacaagacggccagccccccaggaccccctccgtacggcaaacgggcaccatccccaggggcttacaagacggccacaccgccaggatacaaacctggatctccacctagcttcaggacaggcacccccccaggttatcgaggtacatctccacccgcagggccaggcacgttcaagcctgggtcaccaacagtgggtcccggaccactgccacctgctggcccatctggcctgcccagcctccctccgccaccagccgctccagcttccggacccccactctctgcgactcagattaagcaggaacccgctgaggagtacgaaacccccgagagccctgtgccacccgctagaagtccctccccccctccaaaggtggttgacgtgcctagccatgccagtcagtcggccaggttcaataagcatcttgatagaggcttcaattcttgcgcccgatccgacctgtactttgttcccttagaaggatcgaagctagccaaaaagcgcgctgatttggttgagaaggtgagacgggaggctgaacagagggccagggaggagaaggagagagaaagagagcgcgagagggaaaaggagcgggaacgggaaaaggagcgagaactagagcgaagcgtgaagcttgcccaggagggacgagcccctgtagaatgcccctccttaggcccagtgcctcataggcccccatttgagccaggaagcgcggtagcgaccgttccaccttatctgggacccgacacacctgccctccggactctttctgagtacgctcggccacatgtaatgagtccgggaaaccggaatcatccattttatgtacctctcggagctgtagaccccggactcttagggtataacgtccctgcactgtactctagcgatcctgctgccagagagagagaacgcgaggccagagagcgtgatctgagggacaggctaaaaccgggattcgaagtgaaaccaagcgaactcgagccactccatggggttcctggccctggcctggaccctttccctcggcacgggggactggctctccaacccggtcctcccggtttacatccctttccctttcacccgagtctgggacccctcgaaagagagcgactcgccctggcggctggtcccgcactcagacctgacatgagctatgccgaaagattagccgcagaacgtcaacacgcggaacgcgttgcagccttggggaatgatcctctggcccgattacagatgctgaatgtgacccctcaccatcaccagcacagtcacatacactcccacttgcacttacaccagcaagacgcaatccacgcagcttccgccagcgttcacccactgatagacccgcttgcctcaggttcacacctgacccggatcccctaccctgccggaacacttcctaacccattactaccgcatcccttgcatgaaaatgaagtgctgcgccatcagttgttcgcagcgccttacagggacttaccagcaagcctgtccgcaccgatgagtgccgctcaccagcttcaggccatgcatgcacagagcgccgagctgcaacgtctagctctggaacagcaacagtggctccacgctcaccaccctttacattctgtccctttgcccgcacaggaggattattattcacacctgaaaaaagagtccgataagccattgtag

SEQ ID NO: 215508 - DNA, 3573 bp, synthetic construct
  misc_feature 1..3573: note = Description of Artificial Sequence: Synthetic coding sequence
  source 1..3573: mol_type = other DNA
atgaaaaccaggcagaacaaagacagcatgtctatgaggagcggcagaaaaaaagaggctcccggtccacgcgaggagttgaggtcaagagggagagccagtcctggcggagtatctacatcctcatcggatgggaaagctgaaaagtcacgtcaaaccgctaagaaggccagagtagaagaggcgtccaccccgaaagtgaacaaacagggccgttcagaggagatctcagagtctgagtcggaagagacgaatgcccctaaaaaaaccaagaccgagcaggaactgcctagaccccagtcaccctccgacttggactccctggatggcagaagtctcaatgacgacggatccagcgatcccagagacatagaccaagacaaccgctcaacatctccaagcatatactctcctggatcggttgaaaatgactctgactctagttctggactgtctcaaggcccagcccgtccctatcatccaccccctctgtttcctccttctccccaacctcctgacagtaccccacgtcaaccagaagcaagcttcgagccacatcctagtgtaacacccaccgggtatcacgcccctatggagccgcctacatctcgcatgttccaagccccacctggggcaccacctccccacccacagctttatcctggcggtaccggaggcgttcttagcggcccacccatggggcctaagggcggtggggcagcttcctctgtgggcggtcctaatggcggaaaacaacaccctcctcccactacacccattagtgttagtagctccggcgcatcaggagcgccacctacaaaaccacccacgacccctgtgggcggtggaaacctcccctctgctccgcctccagccaattttcctcatgtaacccctaatctccctccacctcctgcgttgcgacctctaaataatgcaagtgcctctccccctgggctaggggctcagcccctgcctgggcatctgccctccccacatgctatggggcagggaatggggggtctgccgcctgggcctgaaaaagggcctaccttggccccatccccgcattccctgcctcccgcatcctccagtgcgccagctcccccaatgaggtttccgtattcatcctcgtcgagctcatcagcggctgctagtagcagcagctccagcagctcgtcaagtgcttccccgttcccggcttctcaagcgctgccatcctatcctcatagtttccccccacccacttcccttagcgtgtcgaaccagcctcccaagtacacccagcccagccttccctcacaagccgtgtggtcgcagggcccaccaccaccccctccttacggccgacttctggcaaactccaacgcacatccaggtccctttcctccctcaacgggggctcaatcaacagctcatcccccagtgtcaacccaccaccaccaccaccagcagcagcagcagcagcaacagcaacagcagcagcagcagcaacaacagcaacaacaccatggtaattccgggccacctccccctggcgcatttccacatcctttagagggcggatcttcccatcacgctcatccttatgcaatgtcgccaagcctgggctcactgcgcccttacccccctggccctgcccacctgccccctccccatagccaggtgtcatactctcaggcaggtccaaacggaccccctgtttcctccagttcaaattcttcgtcctcgaccagccagggtagctatccgtgttctcacccctcccccagccaggggccacagggagccccataccctttcccgcctgtcccaacggtaaccacctcttccgcaactctctccaccgtgatcgccactgtggcttcctcaccagcaggatacaaaacagcgtctccaccaggtccacctccttatggtaagcgcgctccctcccccggagcctataaaaccgctacgccaccaggctacaagccgggttcccccccatctttccggacaggcaccccaccaggataccgtgggacctcacctcctgcaggtcctggcaccttcaaacctggaagccccaccgtagggccagggcctctcccgccagccggtccatctggcctgcctagcttaccgccaccacccgctgcgccagctagtgggccaccgctgtccgcaacacagatcaaacaggagccagccgaggaatacgaaacacctgagtcccccgtacctcctgccaggagtccatcaccacctccaaaggtggtcgatgtcccttcccacgcttcacaaagcgcccgatttaacaaacatttggatcggggatttaactcctgcgcgaggagtgatctctactttgtgccactggaagggtccaaattggctaaaaaacgcgctgacctggtggagaaggtgagacgcgaagcagaacagcgagccagagaggagaaagagcgtgagagagagagagaaagagagaaagaacgcgagcgggagaaagagagagagctcgaaaggtccgtgaaactcgcgcaggagggccgagctcccgttgaatgtccatccctggggccagttccccacaggcccccttttgagcccggatccgccgtggcgacagtcccaccgtatcttggacccgatacacctgcactgcgcacgctgagcgaatacgccaggcctcacgtcatgagcccaggaaacagaaaccatcccttttacgtccccttgggagccgtggacccaggtctgctgggatacaatgtgccggctctttacagctcagaccccgcagccagagagagggaacgggaagctagagagagggaccttcgggatcgcctgaagcccggattcgaggtcaagccttccgagctggagcctctgcatggtgtcccaggaccaggcctggacccctttccccgtcatggcggtctggcccttcagcctggcccaccaggattgcatccatttccattccaccctagtctgggccctctcgaaagagaacgtctcgcccttgctgccggacccgcattacgccctgacatgtcatacgccgagcggctggcggctgagaggcaacatgcagagcgtgttgccgctctggggaacgatccactggccaggctacaaatgcttaatgtgactccacaccatcaccaacactcgcatatccattctcacctccacctccatcaacaggacgccattcacgccgcatctgcatctgtccatccattaatagatcccctggccagcggcagccacctcactcgtatcccttatccggcagggacccttcctaaccccttgctccctcaccccttacacgagaacgaagtgctgagacaccagctgttcgcggcaccttacagagacctccccgcaagcctgtccgctccaatgtcggctgctcatcagttacaggccatgcatgcccagtctgccgagcttcagcgcctggctctcgagcagcagcaatggctccacgcacatcaccccctgcactctgtacccttgcccgcacaggaagactactatagtcacctgaagaaggaatccgataaacctctgtag

SEQ ID NO: 215509 - DNA, 3573 bp, synthetic construct
  misc_feature 1..3573: note = Description of Artificial Sequence: Synthetic coding sequence
  source 1..3573: mol_type = other DNA
atgaaaacccggcagaacaaggactctatgagcatgaggagtggccgaaagaaggaggctcccggtcctagagaggagctccgttcaagaggtcgtgcctccccaggaggagtctcgacatcaagtagtgacgggaaagccgaaaagtctcgccagactgcgaagaaggccagagtggaagaggcttccactcccaaggttaacaaacaaggcaggagcgaggagatcagtgaatctgaatccgaggaaaccaacgccccaaaaaagaccaagaccgaacaggaactgcccagaccacagtcgccaagcgacctggactcgttagatgggaggtcactaaatgacgacggctcttcagaccccagagatattgatcaggacaaccgttcgactagtcccagtatttacagccccggatctgtagaaaacgactctgacagttccagcggtctgtcccaagggcctgcacgaccatatcacccccctcctctcttcccaccctccccccaacccccagactccacccccaggcagcccgaggcatcttttgagccacacccctccgttactcccacgggctaccacgcccctatggaacccccaacatcccgcatgttccaagctcctccaggagcccctcctccacacccccaactgtatccaggcggaactggaggtgtgctgagtggtcccccaatgggccctaagggcggaggtgcagcgtcctctgtgggcggacccaacggcggaaaacagcaccctcccccaaccacccccatcagcgttagctcgagcggagctagcggcgctccaccaaccaaacctcccacaactcccgttggaggtggaaacctaccctccgcgcctccccctgcaaacttccctcacgtgactccgaacttgccaccccctcctgctctgagaccactgaacaatgctagtgcatcacctcctgggctgggcgctcagccactgccagggcacctgccttcaccacacgccatgggtcagggtatgggcggtctgcccccaggacccgagaagggtccgacactggctcccagtccccactcattgccacctgcctcatcctctgctcctgcacccccaatgcgcttcccttattcttcttcctcatccagcagcgcagccgcatcctcgagcagctcatccagttcctcaagcgcaagccctttccccgcaagtcaggccctgccctcctacccccattctttccctcctcccacaagcctctctgtctcaaaccagcccccaaaatacacccagcctagcctcccctctcaggccgtgtggtctcagggcccacctccgcctcccccatatgggaggctgttagctaattcgaacgcacaccccggacctttccctcccagtactggcgcacagagtaccgcccacccacccgtctcaacacatcaccatcaccaccaacagcagcaacagcagcaacagcaacaacagcagcaacagcagcagcaacaacagcatcatggcaacagcggacccccacctccgggagccttccctcaccccctggagggaggtagcagccaccatgcgcatccatacgcgatgtccccgagtctagggagtctgaggccataccctccaggacctgcccatctacctccaccccactctcaggtctcttacagccaggccggaccaaacgggcctccggtgtccagcagcagcaattcctcgtcttccacgtcccagggctcctatccatgcagtcatccaagtccctcccagggtccgcagggagcaccttaccccttccctccagtccctaccgtcactacatcctccgccacactctcaactgtgatagctacagttgcttcctctcccgcaggctacaaaacggcgtctccaccaggtccacccccttacggaaagcgtgctccttcacctggagcgtacaaaaccgctacccctcctggatacaagccaggatccccaccatccttccggaccggtaccccccctggatatcgtggcacaagccccccagcgggacctgggacgttcaaacctgggtcaccgaccgtaggccctgggcctcttccacccgcaggaccgagcggtttaccatccctccctcccccaccggcagccccagcttctggaccaccactatctgccactcagattaagcaggaacctgccgaggagtatgaaacgccagagtcccccgtccctccagcacgaagtccctcccccccaccgaaggtcgtggatgttccctcccacgcgtcccagtccgcccgattcaacaagcatctggataggggtttcaatagttgcgccaggtctgatctgtattttgtgccattagaagggtctaaattggctaagaaacgggctgacttagtggaaaaagtgcgtcgagaggctgagcaacgagccagagaggagaaggaaagagagagagagcgcgaacgggaaaaggagagggagagggaaaaggaaagggaactggaacggtccgtaaagcttgcccaagagggccgagcccctgtggaatgtcccagccttgggcctgtaccccaccgaccaccattcgaacccggaagtgccgtggctactgtccccccatatctgggtccagacactccagctcttagaaccctgagcgagtacgccaggcctcacgtcatgtcacccggtaaccgcaaccacccattctatgtaccactcggagccgttgatccagggctgctcggttataacgtccctgcactgtattccagtgacccggctgctcgcgaaagggaaagagaagcccgtgaacgggatcttagggacagattaaagcctgggttcgaagttaaaccatccgagctggagccccttcatggagttccgggtcctggacttgacccctttccgagacatgggggtctcgccctccagcctggaccccctggcctgcaccccttcccgttccatccctcccttgggcctctagaaagagaaaggctagccttagcagcgggacctgcactacggccagacatgagctatgccgagaggctcgcagccgaaaggcaacacgccgagcgggtggcggcattaggaaacgacccgcttgctaggctacagatgctcaacgtgacaccacatcaccatcaacattcacacatccactcacacctgcaccttcaccagcaggacgctatccacgcagcttcggcttccgtgcatcccctgatcgatccactcgcctcaggaagtcacctgacacgtatcccgtatcctgcgggaaccctaccaaacccgctgcttccacatccactgcatgaaaatgaagtgttgcgccatcagctattcgccgcaccctacagagacttgccggctagtctcagcgccccaatgtctgccgctcaccaattgcaggcaatgcacgcccagtccgctgagctgcagcggctcgctctggaacagcagcagtggctgcacgctcatcaccccttgcactctgtccctctccccgctcaggaagattactattctcatctgaagaaggagtcagataagcctctgtag

SEQ ID NO: 215510 - DNA, 519 bp, synthetic construct
  misc_feature 1..519: note = Description of Artificial Sequence: Synthetic coding sequence
  source 1..519: mol_type = other DNA
atgctggtgatccacctggaggaacatgtcattatcgccttttctcagcacaatactattatggacctggtccaattctttgttacattcttttcttgcttcctctcactgctgttagtcgcagccgttgtatggaaaatcaaacaaacctgttgggctagcaggaggcgagaacagctgctgcgcgaaaggcagcagatggcatccaggccttttgcctccgtggatgtcgccctggaggtcggagcagaacaaaccgaattcctgaggggaccccttgagggtgctccgaaaccgattgccatcgaaccctgcgccggaaaccgagctgcggtgctgactgtctttctttgccttccacgtggttcatcaggtgcaccaccgccaggtcaatctggtttggccatcgcaagcgcactgatcgatatatctcagcagaaggcgtctgactctaaagataagacgagcggggtccggaacaggaaacacctcagtacaaggcaggggacctgtgtgtag

SEQ ID NO: 215511 - DNA, 4140 bp, synthetic construct
  misc_feature 1..4140: note = Description of Artificial Sequence: Synthetic coding sequence
  source 1..4140: mol_type = other DNA
atggagacgggaggccgagcccgtaccggcaccccgcaacctgctgccccaggggtctggcgggcaagaccagctggaggaggcggtgggggagctagcagctggttgctcgatggcaatagttggctcctatgttacgggtttctttacctcgctctgtacgcacaggtcagccagagtaagccttgcgagagaactggcagttgcttttctggccgatgtgtcaacagcacgtgtctgtgtgatccgggttgggtgggcgaccaatgccagcactgtcagggcagattcaaactgacggagccttcaggctacttgacagatgggccaattaactacaagtataaaacgaagtgtacctggctgattgagggttacccaaacgctgttctcagactccggtttaaccatttcgctaccgaatgttcctgggaccatatgtacgtgtatgacggcgatagcatttatgcccctctcattgcagtcctatccggtcttatagtgcccgagattaggggcaatgaaacagtgcccgaagtggtcacaacatctggatatgccttgcttcatttcttctccgacgcagcatataatttgacgggattcaatatattttattctatcaattcatgtcctaacaactgttccgggcacggtaaatgcacaaccagtgtttccgtgccctcccaggtttactgcgagtgtgataaatattggaaaggtgaagcgtgtgatatcccctattgcaaggctaattgcgggagccccgaccacggttactgcgatttgacaggggaaaagctgtgcgtgtgcaatgacagctggcagggcccagattgcagtctaaacgtcccgtctaccgagagctactggatcctgcccaatgtgaagccattctctccatcggtgggtagagcctcacataaggcagtcttacacgggaaatttatgtgggtcataggcggatacacttttaactactcttctttccagatggtcttgaattacaatctggagagttccatctggaacgtaggcacacccagcagaggtcctctccagaggtacgggcattcccttgccctgtatcaggagaatattttcatgtatggaggacggattgagacaaatgatggaaacgtgacagatgagctgtgggtcttcaatatccattcccagtcatggtcgacaaagacacccacagttctaggacacggtcagcagtatgcagttgagggacactcggcacatatcatggagctcgactctagggatgtcgtcatgataattatcttcgggtattccgccatttacgggtatacatcatcaattcaggagtaccacatctcaagcaacacttggctcgtgccggaaacgaaaggagcaattgtgcaaggtgggtacggtcatacatctgtgtatgatgaaatcaccaaatccatttacgtgcatggtggctataaggcactgcccggaaacaaatacggcctggtggatgatctatataaatacgaagtaaacaccaaaacttggacaatcttgaaggaaagtgggttcgctaggtatttgcatagtgcagtccttatcaatggagctatgctgatcttcgggggaaacactcataacgatacaagtctcagcaatggagccaaatgtttcagtgcggattttctcgcctacgacattgcatgtgatgagtggaagatcctgcccaagccaaatttacaccgagacgtaaataggttcggtcacagcgccgtggtcatcaacggatctatgtatattttcggcggattctcctcggtgcttttaaatgatattctggtgtataagcctccaaactgcaaggcctttcgggacgaagagttgtgtaaaaacgcaggccctggcattaaatgcgtgtggaataagaaccattgcgaatcttgggagtcaggcaacaccaacaatattctgagggctaagtgtccgcctaaaaccgcggcttccgacgataggtgttaccgctatgcagactgtgccagttgcactgccaacaccaacggctgccaatggtgcgatgacaaaaaatgtatatcagctaactccaattgtagcatgtccgttaagaattatactaagtgtcacgtgcgtaatgagcagatctgcaataaactgacatcttgcaaaagttgcagcctgaacttaaattgtcaatgggatcagaggcagcaggagtgccaagccttgcccgcacatctgtgcggtgaggggtggagccatattggagacgcctgccttagagtcaatagcagcagggagaactacgataatgcaaagctgtattgctacaacctgtccgggaatctcgcatcgctgaccacttctaaagaagtggaattcgtgctggacgagatacagaaatacacgcagcaaaaggtgtcaccctgggtgggcctgcggaagattaacattagctactggggttgggaggacatgtccccctttaccaataccactttgcagtggttacccggagaacctaacgatagcggattttgcgcctatctcgaacgggctgctgtcgccggactaaaggccaacccctgtacgtcgatggccaacggcctggtttgcgagaagccagtcgtgtcgcctaaccagaatgctcgaccgtgtaagaaaccatgctctttacgcactagctgttctaactgcacctctaacggcatggaatgcatgtggtgttcttcaactaagagatgtgtggacagtaacgcttacattatatctttcccctatggacaatgcctggagtggcaaactgctacatgcagcccacaaaactgcagcgggttgcgcacttgcgggcaatgtctagaacagcccggttgcggctggtgtaacgatccttcaaacacagggaggggccactgcattgagggatcctccaggggccctatgaaactgatcggaatgcatcatagcgagatggtgctcgacaccaacctctgtcctaaagagaagaactatgagtggagcttcattcagtgccctgcctgccagtgtaatggacactctacttgtattaataacaacgtttgcgaacagtgtaaaaacttgacaaccggcaagcagtgtcaggactgtatgccaggctactacggtgacccgaccaacggaggtcagtgtacggcttgtacctgctctggtcacgccaacatctgccatcttcacaccggcaagtgtttttgcaccaccaagggcattaagggagaccagtgtcagttgtgtgatagtgagaatcggtacgtgggcaacccactgaggggcacttgctattactctcttctgattgactatcagtttacgttttccctcttgcaggaggatgacagacatcataccgcgatcaattttatagccaatcccgagcaatcgaataaaaatctggacatttcaatcaatgcctccaacaacttcaacttgaatatcacttggagcgtggggagtaccgccggtacaatttcgggggaggagacatcgatcgtgtcaaaaaacaacatcaaggagtatcgcgacagtttttcctatgaaaagttcaacttccggtctaatcccaacatcactttctacgtttacgtgagcaatttttcttggcccatcaaaatacagatagcatttagccagcacaataccatcatggacctggtgcagtttttcgtgacttttttctcctgtttcttgagtctgctactagtggcggcagtcgtgtggaaaatcaagcaaacttgttgggcatccagaaggagggagcagctcctcagggagagacagcaaatggcttctagaccttttgcctcagtcgatgtggcactggaggtgggcgctgagcaaaccgagtttttgagggggcctctggagggggctcctaagcccattgccattgagccctgcgccggtaatcgggcagccgttctcactgtgtttctatgcctccccaggggctcttctggtgcccctcccccaggacagagcggtcttgcgatagcctcagctctgatcgacattagccagcaaaaagccagtgattccaaagataaaacttctggggtgcggaatagaaagcatctaagtacacgacagggcacgtgcgtgtag

SEQ ID NO: 215512 - DNA, 1293 bp, synthetic construct
  misc_feature 1..1293: note = Description of Artificial Sequence: Synthetic coding sequence
  source 1..1293: mol_type = other DNA
atggagtgtatgtggtgttcctctactaaaagatgcgtggactccaatgcatatataatcagctttccatacggacaatgtctagaatggcagaccgcgacatgcagtccccaaaattgtagcgggctcaggacctgtgggcagtgtctggagcagccaggatgtggctggtgcaacgacccaagtaatacaggcagaggccattgtatcgagggcagcagcagagggcctatgaaattgatcggtatgcaccacagcgaaatggtgctggacacaaatctgtgccctaaggaaaagaattacgagtggagtttcatccagtgccctgcctgcacctgtagtggccacgctaacatttgtcacctgcatacgggtaaatgtttttgtactacaaaaggcataaaaggggaccagtgccagctttgcgacagtgagaatcggtacgtcgggaacccactccggggaacatgttactattccctgttgatagactatcagtttaccttcagcctcttgcaggaagacgacaggcaccatactgctatcaacttcattgcaaaccccgagcagtcaaataaaaatctcgatatctccattaacgccagtaacaacttcaacttaaatataacctggagtgtcggatccactgctggaacgatttccggagaggagacatctatcgtctctaagaataacatcaaggagtatcgtgatagcttcagctatgagaaattcaatttccggagcaaccccaatatcaccttttacgtctacgtttcaaactttagctggcccatcaagattcagatcgctttctctcaacacaacaccattatggatctggttcagttttttgtcactttcttttcttgcttcctgtccctgctcttggtggctgctgtcgtctggaagatcaaacaaacctgctgggcttcacgtaggcgcgagcagttactgagggaacgccaacaaatggcttctagaccttttgcctctgtggacgtggccttagaggtcggggcagagcagacagaatttcttcgaggaccccttgaaggcgctccaaaacctatcgccatagagccttgcgccggaaaccgggcagctgtacttacagtgtttctgtgtctgcctcggggaagctcaggagcgcctcctcccggacaatccggtctggcaatcgcttccgccctgatcgacatctctcagcagaaggccagcgactctaaggacaagacctcaggggtgaggaaccgcaaacatttatccacacggcaggggacctgtgtgtag

SEQ ID NO: 215513 - DNA, 207 bp, synthetic construct
  misc_feature 1..207: note = Description of Artificial Sequence: Synthetic coding sequence
  source 1..207: mol_type = other DNA
atgccgaagcatgagttctccgtcgacatgacctgtgggggatgtgcggaggccgtgtctagagtgttgaataaactgggaggggtgaagtatgatatcgacctccctaacaaaaaggtttgtattgagagcgaacattctatggataccttgctggcaacacttaagaaaaccggaaagaccgtatcatacctgggcctcgaatag

SEQ ID NO: 215514 - DNA, 207 bp, synthetic construct
  misc_feature 1..207: note = Description of Artificial Sequence: Synthetic coding sequence
  source 1..207: mol_type = other DNA
atgcctaaacatgaattctctgtcgacatgacgtgcggcggatgtgcagaggcagtttcaagggtgcttaataaactcgggggagtgaaatatgacatagaccttcccaacaaaaaggtttgtatcgagtctgagcatagtatggacaccctgttggccaccctgaagaagacagggaagacagtaagctatttgggcctggaatag

SEQ ID NO: 215515 - DNA, 207 bp, synthetic construct
  misc_feature 1..207: note = Description of Artificial Sequence: Synthetic coding sequence
  source 1..207: mol_type = other DNA
atgccaaaacacgagtttagcgttgacatgacatgtggcggttgcgcggaggccgtgtctcgggtcttaaataaactgggaggcgtcaaatatgacatcgatcttccgaacaaaaaagtttgcatcgagtcagaacacagtatggacacactgttagctacactgaaaaagactggcaagaccgtatcttatctcgggctcgaatag

SEQ ID NO: 215516 - DNA, 933 bp, synthetic construct
  misc_feature 1..933: note = Description of Artificial Sequence: Synthetic coding sequence
  source 1..933: mol_type = other DNA
atggctgctgctgtcgccgctgccccaggggctttgggatctctgcatgctggaggggcacgtcttgtggctgcgtgtagcgcttggctctgccccggtttacgtttaccaggatcgctagccggacggagggcagggcctgctatttgggcacaggggtgggtgcctgccgctggcggtcccgctccaaaaaggggctacagctctgaaatgaagactgaagacgagttgagagtgcggcatctcgaggaggaaaataggggcatcgtggtgttggggatcaatagagcctacggaaagaacagtcttagcaagaaccttatcaaaatgctgtccaaggcagtggatgccctaaaatcagacaaaaaagtcaggaccatcatcatccggtcagaggtcccgggaatcttctgcgctgctaacctgcctgtcccgaccatcgccgcaatcgacggcctggccctgggaggaggcctggagctcgccctggcttgcgatatcagggtggccgcatcaagtgctaaaatgggcttagtggagacaaagcttgccataattccaggaggcggaggtacacagcgtctcccacgggcaatcgggatgagcctggcgaaagagctgatcttttccgcgagagtattggacggcaaagaggctaaagcggtaggcctgatctcccacgtgctggagcagaatcaggagggcgacgctgcttatcgcaaggcactggatctggccagggaatttcttcctcaggggcctgtagccatgcgggtagctaagcttgccatcaatcagggcatggaagtggatttggtaacaggcctcgcaatagaggaggcatgctacgcccagactatcccaactaaagacagactggagggactacttgctttcaaggagaaacgcccaccgcgatataagggtgaatag

SEQ ID NO: 215517 - DNA, 1020 bp, synthetic construct
  misc_feature 1..1020: note = Description of Artificial Sequence: Synthetic coding sequence
  source 1..1020: mol_type = other DNA
atggctgccgcagttgctgcggcaccaggcgcacttggatctcttcatgcagggggagccagattggttgccgcttgcagcgcctggttgtgtcctggccttcgattgcctggctctttagctggaagaagagccggaccagccatatgggctcagggctgggtgcccgcagcaggaggcccagcgcctaaacgaggttactcttcggagatgaagacagaagacgagctgagagttcgccaccttgaagaggagaacaggggaatagtggtcctgggcattaacagggcctatggaaagaacagtctctctaagaacctgattaagatgctctcaaaggcagttgacgccctcaaaagcgacaagaaggttagaaccattataattagaagcgaggtgcccggtatattctgcgccggagcagacttgaaggagcgggctaagatgagcagctctgaagtgggcccttttgtgtccaaaatcagagcagttatcaacgatattgcaaacctgcccgtgcccacaattgcagccattgatggtctggccctaggaggcggactggagctagctcttgcctgcgacatccgagtggctgcctcctctgcgaagatgggtctcgttgaaacgaaacttgcgattattccaggaggtggtggtacacagcgattgccgagagcgatcgggatgagtctcgcaaaagaactgatcttctctgcccgtgttctagatggcaaggaggccaaagccgtgggactgatatcccacgtcctggaacaaaatcaggagggtgatgctgcatataggaaagctctcgatttagctagagagtttttgccacaaggccctgttgccatgagagtggctaagcttgccattaatcaggggatggaagtggacctggtgacaggattggccattgaggaagcctgttatgcccagaccatccccacgaaagaccggctggagggcctgctagcttttaaagaaaagcgccctcctcgttataagggtgagtag

SEQ ID NO: 215518 - DNA, 768 bp, synthetic construct
  misc_feature 1..768: note = Description of Artificial Sequence: Synthetic coding sequence
  source 1..768: mol_type = other DNA
atggccgcagccgtggctgcggctcccggtgctctcgggtcactgcacgcaggaggcgcacgcctcgtcgctgcctgttctgcctggctctgccccggactgagacttcctggtagccttgccggtaggcgggcagggcctgcgatctgggctcaggggtgggtgcctgccgctggcggtcctgcaccaaaaagaggatattccagcgagatgaagaccgaagatgagctgcgagtgcggcacttagaagaggaaaacagagggatcgtagtcctcggcatcaatagggcttatgggaagaacagcttaagcaagaatctaatcaagatgctgtccaaggctgttgatgctcttaagtcagacaagaaagtgcggacaattataatccgatcagaggtgccaggaattttctgtgccggagccgacttaaaagagcgtgccaagatgtcttcctccgaggtgggtccttttgtgtctaagattagagcagttataaacgacatcgccaatctccctgttcccacaatcgcagccatcgacggactagccctgggaggcggtctcgagctcgccctggcctgcgacatccgtgtggccgcaagcagcgccaagatgggcctggtggaaaccaaactggcaattatccccggaggggtgacatcaagcacggaggtgctgaacccctctaagagctccatgaaaatagggattattatcttccaaacacccgtgaacatcgacatcctggcttcttcacacgagtcatag

SEQ ID NO: 215519 - DNA, 1932 bp, synthetic construct
  misc_feature 1..1932: note = Description of Artificial Sequence: Synthetic coding sequence
  source 1..1932: mol_type = other DNA
atgcccctgctttttctggaacggtttccttggccgtctctgcgcacgtataccggtctctctggactggctctgctgggtacaataatttccgcgtaccgtgctttgtcacagcccgaggccggacccggtgaaccagatcagctgaccgcgagtcttcagcccgaacctccagcacctgcccgtccaagtgccggaggaccgagagcccgagacgtagcacaatatctgcttagcgactcactttttgtctgggtcctggtgaacactgcctgctgtgtactgatgcttgtggccaagctgatacagtgtattgtttttgggccactgcgggtgagcgagaggcagcatttgaaagataagttctggaatttcatcttttacaaatttatattcatctttggtgttttgaatgtgcagaccgtcgaggaagtagtgatgtggtgcttatggtttgccggactggtcttcctgcatctgatggttcagttgtgtaaagatcgctttgaatacctctcatttagccctactacacctatgagctctcatgggagagtgctcagcttgctggtggccatgttattgtcttgctgcgggcttgctgccgtgtgttccatcacgggctatactcatggcatgcacacccttgccttcatggcagcagagagtctcctggtgacagtgcggacagctcatgtaatcctgcggtatgtgattcacctgtgggatctaaaccacgaagggacttgggaaggtaagggcacgtatgtctattacacagattttgtcatggaattaacactcctctcgctggatttgatgcaccatatccacatgctgttatttggcaacatttggctctctatggcctcgctggtgatattcatgcagctgagatatctgtttcatgaggtgcagcggcgtatcagaagacataagaattacctgcgggtggtaggtaacatggaagcccgattcgcagtggcaacacctgaagagcttgcggtcaacaatgatgactgtgctatctgttgggacagtatgcaagccgcaagaaagctcccttgcggtcacctcttccacaactcttgcctgcggagctggttggaacaggacacatcgtgtccaacctgcaggatgagcttgaacatcgccgacaacaatcgggtgagagaagaacaccagggggagaacctggatgagaacctcgtgcccgttgctgcggctgaggggcgaccaagactgaaccagcacaatcacttctttcacttcgatggttctcggatcgcaagctggcttccttccttttccgttgaagtgatgcatacaacaaatatactcggtatcacacaggctagcaatagccagttgaatgctatggcccatcaaattcaagaaatgttccctcaggtgccctaccatctcgtccttcaggatctacagctgacacggtctgtcgaaattacaacggacaatatcctggagggaagaattcaggtccccttcccaactcaacggtcagactcaatcagaccggctctcaatagccccgtggagcggccaagctctgatcaggaagagggcgagacatccgcgcagaccgagcgggtgcctctagatctttctccaaggctggaagaaactctggacttcggcgaagtggaggttgaaccctctgaagtggaggacttcgaagcacgaggtagcagattctccaagagcgccgatgaacgtcagcgaatgttggtgcaaagaaaagatgaacttctgcagcaggccagaaaacggtttctgaataagtcttctgaggacgatgctgcgagcgaatcatttcttcccagcgaaggggcttccagcgaccccgtcacattgagaagacgtatgctggccgctgccgctgagaggcggctccagaagcagcagacgtcctag

SEQ ID NO: 215520 - DNA, 954 bp, synthetic construct
  misc_feature 1..954: note = Description of Artificial Sequence: Synthetic coding sequence
  source 1..954: mol_type = other DNA
atgcgcgactcagcctgttggcagcgaaaggacgagctgcttcagcaggcgaggaagagattcttgaacaaatcctctgaagacgacgctgcctccgaatccttccttccctcagaaggcgcttcatcagacccggttaccctgagacgcagaatgctcgcagccaggaatggtggctttcggtcttccaggccaccctcggccccacttccatcttcagcggcttcttgcgcattgtgcccaacggactggcgccgtccggtgcccatcccactccacggtaaggctggtctgacggcgctgcccctgtataaggcttgcgggcttatcgtatttggacagctgatcaacctgatactcctgtgtaacaccttttatgtcaccttcctctttcccctggagacacttcagatcctcaccgttggtatgatttcatccggtgtagattggaccgcttgggggggtggtagatccggcggaagtgaggttgcctgtctacagcaggcagcaagtaccccagcaagctgtgtgcgcccaaccaacgccggagtactgagcacaactccatccggcaagtcggtgggcgaggcgcactccgtcagccctccacctcggaggggcgtgaccagcgtcatcaagctcctgtcactcctgtggaagcacgtcgattgtgccagaaggcccaccgggagttgcacgccccaacagggtatactggagaaggagctcctggtgcgctatcttgaacagagaagaggcaaatcgagggccatcgggtgtgacgaggtgaccccattttgccccacaacttcaggaacagactttccaagtctccaaagcaaagcaggccttataagtgtaaattccggagcgcctgctagccatgaatgtgccccatgggtgccctcccccctgagcatatccctgtctaggctggacctgggaagcgggtag

SEQ ID NO: 215521 - DNA, 1638 bp, synthetic construct
  misc_feature 1..1638: note = Description of Artificial Sequence: Synthetic coding sequence
  source 1..1638: mol_type = other DNA
atggcaaccgatgccgcattgagacggctcttgcggctgcacaggacagagattgccgtggccgtagactccgcgtttcctctgctccacgctcttgcagaccatgacgtggtacctgaagacaagttccaggagactctccatctaaaggagaaggagggctgccctcaagccttccacgctttactgagttggcttctcactcaagattccaccgctattctggatttctggcgagtcctattcaaggattataacctcgagcgctatggcagactgcaacccatcttagactcctttccaaaggatgtcgacctgagccaaccaaggaagggccgtaaaccgcctgccgtgcccaaggcactggtccccccacctcgtttgccaaccaagagaaaggcaagcgaggaagccagagccgctgccccagcagctctgaccccccgtggcaccgcgagtccaggatctcagctgaaagctaaacctccaaagaagcctgagtctagcgctgagcagcagcgactgccccttgggaacggtatacagacaatgagcgccagtgtgcagcgagcggtagctatgtctagtggtgacgtgccaggggcacgaggcgctgtggaaggtatcctgattcagcaggtcttcgagtcagggggtagcaaaaagtgcatccaagtggggggtgagttctatacacccagcaagttcgaggactccggttccggcaagaacaaagcacgatcttcttcgggaccaaagcccctggtgcgagccaaaggagctcaaggcgctgcaccaggcggtggggaagcaaggctggggcagcagggctccgtcccagcccctctggcactgccatcggaccctcagctccaccagaagaacgaagacgagtgcgcagtgtgccgcgatggaggagagctgatctgttgcgatggctgtccacgggcatttcatctggcctgcctgagccccccattgcgtgaaattcccagcgggacttggcggtgttcctcttgtctgcaggctacggtacaagaggtccagccaagggctgaagagccacggccacaggagccacctgtggaaacccccctcccccctgggctaaggtctgctggtgaagaggttcgcggtcctccgggtgagcccttggctggtatggacaccaccttagtgtataaacacctccctgctcccccaagcgccgcacctcttcctgggctggatagctctgcgctgcacccattgctgtgcgttggccctgaggggcaacagaacctcgctcccggagccagatgtggagtgtgcggggacggtactgacgtgctccggtgcacccactgtgccgcagcctttcattggcgctgccacttcccagctggcacgagcagaccgggaaccggccttaggtgtaggtcttgctctggggatgtcacccctgcccctgtagaaggcgtcctggccccatcccccgctaggctggcacctgggcctgccaaagacgatactgctagtcacgagccagctctgcaccgggacgacttagagagtctgctgtctgaacacacttttgatggcatcctgcagtgggctatccaatccatggccagacccgcagctccattcccatcctag

SEQ ID NO: 215522 - DNA, 735 bp, synthetic construct
  misc_feature 1..735: note = Description of Artificial Sequence: Synthetic coding sequence
  source 1..735: mol_type = other DNA
atgtggttggtatattcttccggtgcccctggcacacagcagcctgctcggaaccgcgtcttttttcctatcggtatggctcccggtggtgtgtgttggcggcctgatggctggggtactggcggtcaaggcagaattagcggtcctgggagcatgggagctggccagcgcctggggtcctctggcacacagcgatgctgctggggcagttgctttggcaaagaggtggccctgagacgggttctgcatccctcacccaagaatgaagacgagtgtgccgtctgcagagatggcggagaattgatctgctgcgacggctgccccagggctttccacttagcttgtctgtctccacccttgcgcgagattccatcaggcacttggcgatgcagttcttgcctgcaagcaaccgtccaggaggtgcagccaagggctgaggaacctcgaccccaggagccacctgtagaaactcccttaccccctggcctaagatctgccggagaggaacccagatgccagggttggactccccgtccatgtactccatactgcgtgtgggtgctgcgcgtatcacggacctggttgctggtaagggttgccggttgtgccgagatggtgcggacttgctgcggagtgttaaccgctcccttgccaagcacgggagcagcgacctcccagccggctccacccggtcctggaagagcttgcgccgctgatcccgctcaggaaacctag

SEQ ID NO: 215523 - DNA, 1047 bp, synthetic construct
  misc_feature 1..1047: note = Description of Artificial Sequence: Synthetic coding sequence
  source 1..1047: mol_type = other DNA
atgtggctggtatattcttcgggggcaccgggtactcagcagccagccaggaaccgggtgtttttccccatcggtatggccccaggcggagtctgttggagacctgacggctggggcactgggggacagggccgtatctcagggcctggctccatgggagccggacaaaggctcggaagcagcggcacccagcggtgctgttgggggagctgctttgggaaagaggtggccctgcgcagggtactccatcctagcccagtgtgcatgggggtatcttgcctatgtcagaagaatgaagatgagtgtgctgtgtgccgcgacggcggtgagctgatctgctgcgatgggtgcccaagagcatttcatctggcctgtctttctcccccactacgggaaatcccctcaggcacctggcggtgctcctcctgccttcaggcaaccgtgcaggaggtacagccccgagcggaggagccacggccacaggaaccccctgtcgagaccccactccctcctggattacgcagtgcgggagaagaagttaggggacctcccggtgagccgctggcgggaatggatacaactctcgtctacaagcatcttcctgcccctccatctgccgcaccgttgcctggcctggacagttccgccctgcaccctttgctctgcgtgggacccgaggggcagcagaacttagccccaggcgctcgttgtggagtgtgcggggacggtacagatgtgttgaggtgcacacactgtgctgcggcattccattggaggtgccattttcccgctggaacttctcgcccaggcaccgggctgaggtgcaggagctgtagtggcgatgtgactcctgcccctgttgagggtgtgctggccccttcacctgccaggcttgcgccaggcccagcaaaagacgataccgccagccacgaacctgccctccaccgagacgacttagaatcccttctatctgagcacaccttcgacggaattcttcaatgggccatccaaagcatggcacggccagcagccccttttccttcctag

SEQ ID NO: 215524 - DNA, 1017 bp, synthetic construct
  misc_feature 1..1017: note = Description of Artificial Sequence: Synthetic coding sequence
  source 1..1017: mol_type = other DNA
atgtggctggtttatagcagtggcgctcctggcactcagcagccagcccgtaatcgagtgtttttccctattgggatggcccctggaggggtgtgctggagaccagatggatgggggacaggtgggcagggaaggataagcggaccgggttctatgggcgctggacagcgcctcgggtcttcaggtactcagcggtgctgttgggggagttgcttcggcaaagaggtcgcacttcggagggtactccacccttctccaaagaatgaagacgagtgtgccgtctgccgtgacggcggagaacttatctgctgtgatgggtgtcccagagcttttcatctcgcctgcctgtctcctcctttacgcgaaattccaagcggcacatggcgatgtagcagctgtctgcaggctactgtacaggaggtgcagccaagggccgaagaacctcgaccacaggaacccccagtagaaactccgctcccacctgggttacggtcagctggagaggaagttcgtggccctcctggagagccactggccggaatggataccactttggtttacaaacatctgcccgctcctccaagcgccgctcctctacccggactggatagttccgccctgcaccctctattgtgcgtcggacctgaaggccaacagaaccttgcacccggagccaggtgtggcgtatgcggcgacggaaccgatgttctccgctgcacacattgtgcagccgcttttcactggagatgccacttccctgcaggtacttctcggccaggaacaggactaaggtgccggtcctgttctggagatgtcactcccgctcccgttgaaggcgtgctggcccctagccctgccagacttgcacctggacccgcaaaggacgatacagcatcacacgaacccgcactccacagggacgatcttgaaagtctgctaagcgaacataccttcgatggaattctgcagtgggcaatacaatcaatggcacgacctgcagctcctttcccctcctag

SEQ ID NO: 215525 - DNA, 1047 bp, synthetic construct
  misc_feature 1..1047: note = Description of Artificial Sequence: Synthetic coding sequence
  source 1..1047: mol_type = other DNA
atgtggctcgtttactcctccggcgcaccgggtacgcagcagccagcaaggaaccgggttttcttccctattggtatggcccctggtggagtgtgctggagacccgatggctggggcacagggggtcaagggcgaatcagcggacctggctccatgggcgctgggcagcgcctgggatcttcggggacacaaagatgttgctgggggtcctgtttcgggaaggaagtggcactcagacgcgtgcttcaccctagtccagtttgtatgggagtttcttgtctgtgtcagaagaacgaggacgagtgtgctgtctgtagagacggaggcgaactgatatgttgtgacggatgccctcgggcatttcatctcgcttgcttaagcccgccacttcgggagatcccctccggcacatggcgctgtagctcctgcctccaggctaccgtgcaagaggtccagcccagagccgaggagccccgtccacaagaaccacccgtggagactccactgccccctgggctgcggtctgccggtgaggaagtgcggggacctccaggagaacctcttgcgggtatggacactaccctggtgtataagcatctgcctgcaccccctagtgctgctccactcccgggtttggactctagcgccctacaccctctcctgtgcgtcgggcctgaggggcagcagaacctcgcaccaggagccaggtgcggtgtttgtggagatggtacagacgtgctgagatgtacacactgcgccgctgcatttcattggagatgccacttcccagccggtacctcccggccaggcacaggcttacggtgtcggtcctgctcgggcgatgtgaccccagctcctgtcgagggcgtgctagcgccatctccagccaggctggcacccggacccgcaaaggacgacaccgcctcacacgagccagccctccatagagacgatctcgagtctctgctcagcgaacatacctttgatggtatccttcagtgggctatccaaagtatggcgaggcccgctgcgccttttccatcctag

SEQ ID NO: 215526 - DNA, 3717 bp, synthetic construct
  misc_feature 1..3717: note = Description of Artificial Sequence: Synthetic coding sequence
  source 1..3717: mol_type = other DNA
atgaaggtggtgcctgagaagaacgccgttcggatcttgtggggccgtgaaaggggggcacgggcaatgggggcacagcgcctgcttcaggagctcgttgaagacaaaactcgttggatgaagtgggagggaaagagagtcgagttacctgactctccaagatccactttcctgcttgcgttttctcccgacaggacgctgcttgcgtctacccatgtgaaccacaatatctatatcaccgaagttaagaccggcaagtgtgtgcactccttaattggccaccggagaaccccatggtgtgtgaccttccatccaacgatctcaggcctgattgccagcgggtgtctggacggagaggtgcgaatctgggacctccacggtggaagtgaatcttggtttaccgatagcaacaacgccatagctagtttagctttccatcccaccgctcagctcttgctgattgcaaccgcaaatgagattcatttctgggactggagccgaagagagcctttcgccgtcgtaaagacagcgagcgaaatggagcgcgtgcgcctggtgcgtttcgacccactgggtcattatctgctaacagccattgtgaacccctccaatcagcaaggtgacgacgagccagagatccccatcgacggcactgagctgagccactacaggcaacgggctctgctgcagagccagccagtacggaggacaccgctactccataattttctgcatatgctgtcctcacgcagttcaggtatccaggtcggcgagcagtccactgtccaggactcggcaacccccagcccccctcctccgcctcctcagcccagtaccgaaaggcctcgtaccagtgcttatattagacttaggcaacgtgtgtcgtatcctactgcggaatgctgtcagcacctgggtattttatgtctgtgttcccggtgttccggcactcgggttccctctttactaccccaccaggattcggtcccgcctgcctccgcgcgagccacgactccttctttttccttcgtgcagacagaaccctttcacccccctgagcaggcctcgtcgacccagcaggatcagggattgctgaacagaccgtccgccttcagtacagtacagtcatcaacagcgggaaacactctgcgcaaccttagcttgggcccaaccaggagatctctggggggaccactgagcagtcatccttctcggtaccaccgcgaaatcgctccgggtttgacaggatcagagtggactaggacggttttatccctgaacagtagatccgaggcagaaagtatgcctccaccaaggacatccgcatccagcgtctctctgctgagtgttcttaggcagcaagaaggcggttctcaggcgagcgtgtatactagcgcaaccgagggacggggattccccgcaagcggactcgcaaccgagtcagacggcggaaatggatcttcgcagaataactccggcagtatccgtcatgaactccagtgtgaccttagacgctttttccttgagtatgaccgcctgcaggagctcgatcagtcactctcgggagaggcgcctcagacccagcaggcacaggagatgctgaacaataatatcgagagtgaacggccaggaccctcacaccagccaactccccatagctcagagaataatagtaacctgagccggggtcatttaaatcgctgtagggcttgtcataatcttttgacttttaacaatgatactctccgttgggagcgaaccacaccaaattatagcagcggtgaggcctcatcttcctggcaggtccccagcagtttcgaaagcgtgccatcctccggatctcagctcccccctcttgaacggactgagggccaaactccttcatcaagcagattggagctgagtagctcagcctccccccaggaggagaggaccgttggcgtggcctttaatcaggaaaccggccactgggagaggatatacacccaatcgagtcgaagtgggactgtgagtcaagaagccttgcaccaagatatgcccgaggagagcagtgaagaggactcgctccgaaggaggttgttagagagttcactgatctcactgtcaaggtatgacggagcaggtagtcgggagcatcccatttacccggaccctgcacgcgacaatggcgataggtcccgtcatagggctccacgtaacgcgcgaatgtcagctccttcgctgggtcgctttgttcctaggcgctttcttcttcctgaatacctgccttacgccggaatatttcatgaacgaggacagcctggtctcgctacccactcctcagtaaatcgggtgctggccggtgccgtcatcggagacggccagtctgctgtggccagtaacatagctaacaccacctatagactgcagtggtgggacttcacaaaatttgatctgccagaaatcagcaatgccagcgtgaatgtgctggtgcaaaactgcaagatctacaacgatgctagttgtgacatatctgcggatggtcagctcctcgcagcatttattcccagctcccagagaggcttcccggatgagggcatcctggcagtgtactccttggctcctcacaatcttggggaaatgctgtatacaaagcggttcgggccaaacgccattagtgtctcgcttagcccaatggggagatacgttatggttggcctcgcctcgcggcgaatacttctccacccttccacggagcatatggtggctcaggtctttcgcctgcagcaggcgcatgggggagagacctcaatgcgacgggtgtttaacgttttataccctatgccagccgatcagaggagacacgtatcgatcaatagtgcccgttggctgcctgagcctggactaggtctcgcctatggtacaaataagggcgatctggtgatatgtcggccagaggcgctcaactccggcgtagaatactactgggaccagctaaacgagaccgtgttcacggtgcactcgaattctcggtcatctgaaagacccggaacctcgcgggctacgtggcgcaccgatcgggacatgggcctgatgaacgccatcggcctacagcccagaaatccagccacctcggtgaccagtcaggggacccaaactcttgccctgcaactacaaaacgctgaaacccaaactgaaagggaagtgccggagcctggcacggcggctagcggtccgggagagggagaaggatcagagtacggtgcctcaggcgaagacgcactgtcacggatacaacgattgatggctgagggtgggatgaccgctgtggtgcaacgggaacaaagcaccacaatggcttctatgggaggctttggaaacaacatcatcgtctcccaccgcattcaccgaagcagccagactgggacagagccaggagctgcacatacatcaagcccacagccctccacaagccgcggactgcttcccgaagccggacaactggctgaaaggggtctgagcccacgaactgcatcttgggaccagcccggaacgcccggtagagagcctactcagcctaccctcccatcaagctcccccgttcccattcccgtaagtttgccatccgccgaaggaccaactctgcactgtgagcttacaaacaacaaccacctcctggatggtgggtcttcccgcggagatgccgctggacccagaggcgagcccaggaatcgttag

SEQ ID NO: 215527 - DNA, 2169 bp, synthetic construct
  misc_feature 1..2169: note = Description of Artificial Sequence: Synthetic coding sequence
  source 1..2169: mol_type = other DNA
atgaaggtagtgccagaaaagaatgccgttaggatactgtggggcagagaacgcggtgctagggctatgggggcacagaggctgctacaggaactggttgaggataaaacccggtggatgaaatgggagggaaagcgagtggaacttccagattcacccagaagtaccttcctgttagccttctctcctgaccgcaccctactagccagcacacacgttaaccataatatttacatcaccgaggtaaagacaggtaagtgcgtccacagcttgataggccaccgacgtaccccgtggtgtgtaacctttcacccaactatttccggcctgattgcctcagggtgcctggacggagaggtccgcatttgggatttgcatggagggtctgagagctggttcacagactccaacaatgccattgcttcgctcgccttccaccctactgctcagctcctgctgatcgccactgccaacgagatacatttctgggactggtccagaagggagccttttgccgtagtgaagactgcctcagaaatggagagggtgcgactagtcagatttgatcctcttggccactacctcttaacagcaatcgtcaatccctctaatcagcaaggggatgacgagcctgaaatccccatcgatggtactgagctgtcccattaccggcagcgggctcttcttcagagtcagcccgtacggagaacccccttgctgcacaactttctacacatgttgtcatctcgaagttccggcattcagaccgaacccttccatccaccagagcaggcttcaagtacccagcaagaccaggggctgctaaatcgtccgtcagccttttccacggtgcaaagcagtactgcaggaaacacactccgaaacctgagcctgggacccactcgacgctcccttggcggaccgttgagttcacatccgagccgctaccaccgcgagatagccccagggctcacgggatcagaatggacccggaccgtactcagccttaattctcgctcagaggcggagagcatgccccctccgagaacaagcgcatcttctgtgagtctcttaagcgtgctgcggcagcaggagggaggctcccaggccagcgtttacacatcggccacagaaggaagggggttccctgctagcgggctggcgaccgaaagtgatgggggaaacggttcatcacagaacaattctggtagtattagacacgagcttcagtgtgacttgcggaggttcttcctggaatatgaccgactgcaagaacttgatcagtcactgagtggagaagctcctcaaacccaacaagcgcaggaaatgctgaacaataatattgagtcagaacgcccaggtcctagtcaccagcctaccccccactcctccgagaataacagtaatttgagtcggggacacctcaacaggtgtcgagcctgccacaacctactgacatttaacaacgatacactgcggtgggagcgcacaacacccaactatagcagtggggaagcatccagttcctggcaggttccaagcagcttcgaatctgtgccctcttctgggtctcagttgcctcctttggagagaaccgaaggacagaccccctccagctctcggctcgaactaagctcttcagctagtccgcaggaggagcggacagtgggagtggcctttaatcaagaaaccggtcattgggagcgtatctacacccaaagttcaagaagcggtacggtatcccaagaggccctgcaccaggacatgcccgaggagtcttctgaagaggactctctccggcgacgtagtttagcccttagtcccaggttagagtattcaggagccatcttggcccactgcaaactgcgcctgccaggcagctgccactcaccagcctctgccagccaggtcgcaggcacaaccggagctcatcaccatgctaggctaatatttgcgtttcttgtggagatggaatttcatcacgtgtcccaagcgggactagagttgctgacgagcggagacttgcctaccagtgcctcacagagcgctggaatcactggtgtgagccatcgcgcttggccaaggctattagagtccagcctcattagcttgtctcggtacgacggcgctgggtcccgggagcacccaatttatcctgaccctgcctag

SEQ ID NO: 215528 - DNA, 3627 bp, synthetic construct
  misc_feature 1..3627: note = Description of Artificial Sequence: Synthetic coding sequence
  source 1..3627: mol_type = other DNA
atgaaggtggtgcccgagaaaaacgcggtacgtatactctggggcagagagaggggggctagggctatgggcgctcaaaggttgcttcaagaactagtggaagataaaacacgctggatgaaatgggaaggcaaaagagtggaactccccgacagccccagaagcactttcctgctggcatttagtccagaccgcaccctgctcgcaagcacgcatgtgaaccacaatatatacatcactgaggtgaaaacagggaagtgcgtccactccctcattgggcatagacggacgccctggtgcgtgacattccaccctacaatcagcggtctcatagcttccggctgtctggatggagaggtgaggatttgggatctccacgggggaagcgaatcatggttcacagattccaacaatgcaatcgccagtctagcatttcaccctactgctcagttattgctcatagcaacagcaaatgaaatccacttttgggactggtcacgccgagagccattcgcggtggttaagaccgcttctgagatggagagggtcaggctcgtgagattcgacccactgggtcactatttactgaccgctatcgtgaacccctctaaccagcagggggacgatgagcctgaaatccctattgatggcactgagctgtcccactatagacagagggccctgcttcaatcccagcccgtacgcaggaccccattactgcacaattttcttcatatgctctcctctcgctccagcggaattcagaccgagccgttccaccccccagagcaagcctcttccacccaacaagaccaaggtctcctgaaccgcccatccgccttctccacagtccagtctagcactgccggtaatacattacgtaatctctctttaggtccaactaggcgctcactgggcggtcctctgtcctcacatccatctcgctatcaccgtgagattgctccaggccttaccggaagcgagtggacacgtacagttctttctttaaacagtcgatctgaagccgagtccatgccaccccctagaactagtgccagctctgtttctttactgagcgtgcttagacaacaggaggggggaagccaggcctccgtctataccagcgccacagagggcagagggttcccagcaagcggcctagctaccgagtcagatggagggaatggcagctcccaaaacaatagtggaagcatcaggcacgaattgcagtgcgatctccgacggtttttccttgagtacgacagactgcaagagctcgaccagtccctgtctggcgaagcaccccagacacagcaagctcaagagatgctgaataataacatagaatcggaaaggcccggacctagccaccaacccactccccactcatccgaaaataactcaaatttgtcacggggacacttgaaccggtgccgcgcttgccataacctgttgacctttaacaacgataccctgaggtgggagcgtactacgccaaactatagctcgggcgaagcatcctcctcttggcaggtacccagtagctttgaaagcgttccgtcatcagggagtcaactgcctccgctcgagcggacagaaggacagacacccagttccagccggctcgaactgagctcttccgcttccccacaggaggagcgcactgtgggagtggcctttaaccaagagaccggtcactgggagcgcatatatacacagagcagccggagcggtacagtgagtcaggaagcgctgcaccaggatatgcctgaagagtcatcagaggaggatagtttacgtagacggctgctggagagttcactgatttctctcagccggtacgacggcgcaggctctcgggagcacccaatctatcccgacccagctaggctctcacccgcagcctattacgcccagagaatgattcaatatttgtcccggagagattccatcagacagagaagcatgcgctaccaacagaatcggttgcgtagtagtacctcgtcaagtagctcagacaatcaagggccatctgtggagggaacggatttagaatttgaagactttgaagataacggtgatcggagccgccaccgcgctcccagaaacgcaagaatgagcgcaccttcactgggaaggtttgtacccaggagatttttgttgcctgaatatctcccatacgctggtatctttcatgaacgaggacagccaggattggccacgcactcctcagtgaatagagtcctcgcaggcgcagtcatcggcgatggtcagagcgccgtggcgtcaaacatagctaataccacataccggcttcaatggtgggactttacaaaatttgacctccctgaaatcagcaacgcctccgtcaacgtgctggttcagaattgtaagatttacaacgatgcaagctgtgacatctctgcagacggacaactcttagccgcttttattccaagctcgcagcggggatttccagacgagggaatccttgctgtgtactcactggcgccacacaatctgggagagatgctttatactaaacggttcggcccaaacgccatctctgtatctctgagccctatgggacgttacgtcatggtcggacttgcgtcccgtcgtattctgctgcacccctccactgagcatatggttgcacaggtatttaggttgcagcaggcccacgggggagagacctctatgagacgcgtgtttaacgtcctctacccgatgccagccgaccagcgtcgtcacgttagcataaactcggcacgctggctgcccgaacctggcttggggctggcctatggcactaataagggcgacctggtcatctgtcggccagaggccctgaatagtggcgttgagtactattgggatcagttgaacgaaacagtttttaccgttcattctaattcacgtagttcagagaggccaggcactagcagggccacctggcgaacagaccgcgacatggggttgatgaatgccataggtcttcagccaaggaaccccgctacctctgtgacgtcccagggcacacaaactcttgcgttacagctgcaaaacgctgagacgcaaacagagcgggaagtgccggaacctggaactgccgcttctggccctggcgagggggaggggtcagaatatggggcaagcggtgaagatgccctctcacgaatccagcgcctaatggctgaaggaggaatgactgcggtggtccagagagaacagagcactacgatggcatccatggggggatttggtaacaatattattgttagccacagaatccaccgctccagccaaactggcactgaaccaggggctgcgcatactagcagtccacagccgtcgacttctaggggccttctgccagaggccggacagctggctgaacgcggattgagtccccgtacggcttcatgggaccagcccggaacgcccggtagagaacccacccagccaacgctgcctagtagcagccctgttcctatacccgtcagtctgcccagcgctgagggccctactctgcattgcgagttaactaataataaccacctattagacggcggatcgtcaaggggcgacgccgctggtccccgaggcgaacccagaaatcgctag

SEQ ID NO: 215529 - DNA, 3810 bp, synthetic construct
  misc_feature 1..3810: note = Description of Artificial Sequence: Synthetic coding sequence
  source 1..3810: mol_type = other DNA
atgaaggttgtgccagagaagaatgccgtaagaattctttgggggagggagcggggagctcgggctatgggggctcagaggctccttcaagagctggtggaggataaaacaagatggatgaagtgggagggcaagcgtgtagaactcccggacagccctcgctcaacatttttgctggcattctcacccgatcgcacgctgcttgcaagcacccatgtcaatcataacatttacatcaccgaagttaaaacaggtaaatgcgtgcatagcctcataggccatcgacgaacaccttggtgcgtgaccttccatcctactatcagcggcctcattgcatctggttgcttggacggagaggtgcgtatctgggatctgcatggcggttcagagtcttggttcacggattctaataatgcaatcgcaagcctcgccttccaccctacagcccagctgctgctcattgcaacagccaacgagattcacttctgggactggagcagaagagagccctttgccgttgttaagactgcaagcgagatggaaagggtgaggttggttcgtttcgacccccttggccactacttgcttaccgctatcgtcaacccttccaatcagcagggtgacgacgagcctgaaatccccatcgacggtactgagttaagccactatcgtcaacgagctctcctccaatctcagccagtgaggagaacacccttgctgcataactttctgcacatgctcagcagccgcagctctggcatacaagtaggggagcagagcaccgttcaagactccgctacgccatctccccctcctccccctccccaaccgtccacggagcgaccacgaacgtccgcgtacatccggctcaggcaacgggtctcatatcccaccgctgagtgttgccaacacttgggcattctatgcctgtgctcgcggtgtagcggtacgcgggttccctctctgttgccgcatcaggactcggtgcctcctgcctctgcccgagccaccacgccttctttttcttttgtgcagaccgagccattccacccccctgaacaggcctcctctactcaacaggaccagggattacttaataggccatcagcttttagtacagtgcaatcgtccaccgccggtaatacccttcgtaatttaagccttggacccactcggagatctcttggcggaccgctgagctcacacccttcccggtaccaccgggaaatcgcacctggcctgacagggtctgagtggactagaacagtgctgtccctaaattcccgctccgaggccgaaagtatgcctccaccccgtacttccgcttctagcgtgagccttctaagcgttctcagacagcaggaaggagggagtcaggcatctgtgtatacaagtgcaacggagggacgaggatttcccgctagtggtctcgcaactgagtccgatggtggcaacggctccagccagaacaattcaggttccatcagacatgagctacagtgtgatctccggagattcttcctagaatatgataggctgcaggaactggatcagagtctctccggtgaagcaccccagacccagcaggcacaggagatgctgaacaacaacatcgaatctgaacggcctggaccctcacaccagcctactccacattctagcgaaaacaattcgaatctttcaaggggacatctgaatcgctgtagggcttgccataatttattgactttcaataacgataccctgcgctgggagagaaccaccccaaattactcaagtggcgaggcaagctcatcttggcaggtgccttcatctttcgagtcagtgccttcatccggatctcagctgccaccactcgagcgcactgagggtcaaacacctagttcttccagacttgagttgtcctcctccgccagtccccaggaagagcgaacggtgggcgtggccttcaaccaggagacaggacactgggaacggatctacacacagagcagcagatcagggactgtgtctcaggaggccctgcatcaggacatgccagaagagagctccgaggaggactccctgagaagactttcacccgctgcctactatgcacagagaatgatccagtatctgtctcgcagggatagcattcgacagagaagcatgcggtatcagcagaatagactgagatcatcaaccagctcctccagctccgacaaccaaggcccaagcgtcgaggggaccgatctcgagtttgaggacttcgaggacaacggcgatagatctcgccaccgggctccccgaaacgcgcgaatgtcagctccctctctggggcgatttgtccccagaaggttcctgctcccagagtacctgccatacgccggaatcttccacgaacgcggacagcctgggttggccacacactccagcgtcaaccgggtgctcgctggtgccgtgatcggcgatgggcagagcgcagtggcaagcaacatcgcaaataccacttaccgcttacaatggtgggactttaccaaattcgacctgcccgagattagtaatgcttcagtcaatgttctagtgcagaactgtaagatttacaatgatgcctcctgcgacatctccgcggacggccagctcctggccgctttcattccttcttctcagcgcggatttcctgatgaaggcatactggctgtatacagcctggctcctcataaccttggcgagatgctgtatactaagagattcggccctaacgcaatctcagtaagcctgagccccatgggtcgctacgtgatggtgggcttggctagtcgcagaatcctgctgcatccctccaccgaacatatggtcgcgcaggtgtttagactgcagcaggcacatggcggtgaaacctccatgcgtcgcgtctttaatgtcttgtaccctatgcccgcagatcagcgcagacatgtaagcattaactctgcaaggtggcttccagaacccggactgggactagcttacggcaccaacaagggcgacctcgtgatatgtagacccgaggctcttaatagcggcgtggaatattattgggatcagctcaacgagaccgtttttaccgtgcacagtaattctcgtagctccgagagaccagggacaagcagggcaacgtggcgaaccgacagagacatgggacttatgaacgccatcggcctccagcccaggaatccggcaacatcagtgacttcacagggtacacaaactttggcccttcagctacagaatgctgagacccaaaccgagcgcgaggtccccgagccagggactgcggcaagcgggccaggagagggggagggcagcgagtatggcgcttctggggaagatgcactcagtcggattcagaggttaatggctgaggggggtatgacggctgtggtgcagagagagcagtctaccacaatggcctcaatgggaggcttcggtaacaatatcatcgtctcccaccggattcacaggtcatctcaaaccggcaccgagcccggtgccgctcatacctcctctccacagccctcaacctctcgagggctactccctgaggccggacaactggccgagcgcggtctaagtccccgtactgcctcttgggaccaacccggaacccctggacgagagccgactcagccaactctgccttcctccagcccagtacccatccctgtgagcctgccctccgccgagggtcccaccctgcattgtgagttgaccaacaataatcaccttctggacggtggctcaagcagaggggatgccgctgggcctcggggagaaccgagaaatcgatag

SEQ ID NO: 215530 - DNA, 3897 bp, synthetic construct
  misc_feature 1..3897: note = Description of Artificial Sequence: Synthetic coding sequence
  source 1..3897: mol_type = other DNA
atgaaggtagtgccagaaaagaacgcggtccgcatattgtggggtagagagcggggagcacgtgccatgggagctcagcgtctcttgcaggagctagtagaagataaaacccgatggatgaaatgggaggggaagagggttgagctgcctgacagcccaaggagcacttttttgctggccttcagccccgaccgtacgctgcttgccagcacacatgtgaatcacaatatttatataacagaagtgaagacgggcaagtgcgtgcactcactgattggacataggagaaccccctggtgcgtgaccttccaccctaccatttcaggattgatcgccagcggatgccttgatggtgaggttcgaatatgggacttgcacggtggctccgagtcctggtttactgactctaacaacgctatcgctagtctggcctttcacccaaccgcacagctccttcttatcgccactgcgaacgaaatacacttctgggactggagcaggcgcgaaccatttgccgtggttaaaactgcctcagagatggagagagtgagactggtgcgatttgatccactggggcactatttgctgacagcaatcgttaatcccagtaaccaacagggcgatgacgaacctgaaatccccatcgatggcactgaactctcccactacagacaaagggcacttctacagagtcagccagtgcgccgtactccgctcctgcacaatttcctgcacatgttaagcagtcgctcctccggaatccaggttggagagcagtcaaccgttcaggatagcgccacgccttccccccctccacctcctccacagccctccactgaacgacctaggacgagcgcctacattagactgagacaacgcgtgtcatatccgacggctgagtgctgtcagcatttaggtatattgtgtctgtgtagtcgatgcagcggtacccgggtgcccagcttacttcctcaccaggatagtgtaccccctgcgtcagcaagggctacaactccctcattctcatttgtgcagaccgaaccatttcatccgccagaacaagccagtagcacccagcaggaccaaggcttacttaaccgaccgtccgccttctccacagttcagtccagtaccgcaggcaacaccctgagaaatttatctcttggacccacacgcaggagcctgggagggccattgtcctctcacccttccaggtaccaccgcgagattgcacctggcctaacagggtctgagtggacgcgtaccgtcttgtcattgaatagtcggagtgaagccgagtcaatgcctccacctcgcacatccgcctcctctgtcagcttactttcagtcctacggcagcaggaggggggatcacaggcgtcagtctatacttccgcaacagagggaaggggctttcccgcaagcggcctggccactgagtccgatggcggaaatggaagctcccaaaataatagcggcagcatccgacacgagctgcaatgcgacctgaggagattcttcctcgagtacgaccgcttgcaggaactggatcagagcctgtccggggaggctccacagacccagcaggcccaggagatgttgaataacaacatagagagtgagaggcctgggccttctcaccagcccacaccacacagttctgaaaacaactcaaacctctctcggggtcacctgaacagatgcagggcctgccataacctcctgaccttcaataatgacacactgcgttgggagagaacaacccccaactactcaagcggagaggcatcctcaagctggcaggtgccaagcagtttcgagtcagtaccctcaagtggcagtcagctgccaccgctcgagcgaacagaaggccagaccccctcttcgagccgactagagctgtcctcctcagcctcaccccaggaggagcggaccgtgggggtagcgtttaatcaggaaactggccactgggagcggatctatacccagtcaagtaggagcggcactgtaagtcaggaagccttacaccaagacatgccagaggaaagcagtgaagaagatagcctgcggaggagactactggaaagctctttgattagcctttcgcgctatgatggagctgggtcaagagaacacccaatttatcccgatccggcacgcttaagccccgctgcttattacgcacagcgaatgatccagtatctgtctaggagagactccatacggcagcgcagtatgcggtaccagcagaataggctgaggtcctctacctcttcctcttcatctgataaccaaggcccatctgtggagggaacggatctagagtttgaagactttgaggataacggcgaccgctcccgccacagggcccctcgcaatgcgaggatgagtgctccatccctgggcaggttcgtgcccaggcggttcttgctcccagagtatctcccttacgccggtattttccatgagcggggacagcctggtctggcaacgcatagtagcgtaaacagagtactggcaggcgctgtaataggagatgggcaatcagccgtggcttctaatattgccaacacaacctacaggctgcagtggtgggacttcacgaaattcgatctgcctgagatctcgaacgcaagcgtcaacgtgctggtacaaaactgtaaaatatataacgacgcgtcatgcgatatcagcgcagatggccagctgttagcagcttttatccctagttcacagcggggatttccggatgagggcatcctcgcagtctacagtctggcgccacacaatctcggcgagatgttgtacacaaagcgcttcggacccaatgctattagcgtgagcctcagccctatgggaaggtacgtgatggtggggcttgccagccgacgtatcctcctgcacccaagcacggagcatatggtggcccaggtgtttaggctacaacaggcccacgggggagagacctctatgaggcgcgtgtttaacgtattatatccaatgccagccgatcagcgcagacacgttagcatcaactccgcccgatggctacctgagcccggactcggattggcctatggcaccaataagggggacctcgtcatctgcagaccagaggccttgaactcaggagtggagtattactgggatcaactgaatgagacggtgtttactgtgcactctaactccagaagttctgaaagaccaggaacatcccgagccacctggcggaccgatagagacatgggtctgatgaatgctatcggactccagcctagaaaccctgccacctccgttacaagccagggcacccagacactggcgctccagctccagaacgcggaaacacaaaccgaacgcgaagtgcccgaacctggcacggccgcttcaggtcccggtgaaggtgaaggatctgaatatggagcttcgggggaagacgccctgtcccgaattcagcgactaatggccgaaggcggaatgacagctgtcgtgcagcgagagcagtctaccacaatggctagtatggggggatttgggaataacattatcgtgtctcatcgcatccatagatcatcccaaacaggcactgagccgggagctgcccacacatcatccccacagccctcaacctcccggggtctgcttccagaagccggtcagttggctgagcggggactttctccccgtactgcctcatgggatcagcctgggacccctggcagggaacctacacaacccaccctgccctctagcagccctgtgcccatccccgtatctctgccctccgctgagggcccaacccttcactgtgagctgaccaacaataaccacttgctggacgggggttcatcgcggggagatgccgctggcccacgtggcgagcccagaaatcgttag

SEQ ID NO: 215531 - DNA, 75 bp, synthetic construct
  misc_feature 1..75: note = Description of Artificial Sequence: Synthetic coding sequence
  source 1..75: mol_type = other DNA
atgaaggttgttcctgagaaaaatgccgtccggattctctggggtagggagcgcggtgcaagggccatggggtag

SEQ ID NO: 215532 - DNA, 3810 bp, synthetic construct
  misc_feature 1..3810: note = Description of Artificial Sequence: Synthetic coding sequence
  source 1..3810: mol_type = other DNA
atgaaggtggtgcccgaaaaaaacgcagtaagaatcttgtggggccgtgagcgaggtgctcgggctatgggagcccagcggctcctccaagagctggttgaagataagactaggtggatgaagtgggaaggcaagcgcgtcgaattacccgattctccaagatctaccttcctgttggccttcagccccgaccgtacgttgttggctagtacccatgtcaaccacaatatctatatcactgaagtcaagacaggcaagtgtgttcactctctgattgggcacaggaggacaccatggtgtgtgacattccatcctactattagtggactgattgccagcggttgtttagacggggaagtgcgcatatgggatctccacggtgggtccgagtcgtggttcaccgattccaacaatgctattgcatccctcgctttccacccaaccgcccaactcttgctgatcgctactgccaacgaaattcatttttgggactggtctaggcgggagccctttgcagtggtaaaaactgcgagcgaaatggaaagagtacgcctggttcggtttgatcctttaggacactatttactaaccgccatagtcaatccctctaatcaacagggtgatgatgaacctgagatccccatcgacggaaccgagctgtcacactaccgtcagagagccctgttgcagtctcagcctgtgcgcagaacacccctccttcacaatttcctgcatatgttatctagccgctcatccggaatccaagtgggggagcagtccacagtccaagacagtgccaccccttctcctcccccaccaccaccgcagccctccacagaacgaccccgaacttccgcatatattaggttgcgacagcgtgtgtcatatcccactgccgagtgctgtcaacacctaggcatcctgtgtctgtgttctcggtgtagcggaaccagggtacccagcctgcttcctcaccaggatagcgttcccccagccagcgccagagccacgaccccttccttttctttcgtgcaaacagagccgttccaccccccagaacaagcgtcttccactcagcaggaccagggactgcttaatcgtccatcagcttttagcacggtacagtccagcacagcaggcaacacactgcgcaacctttctctcggacccactagaagaagtctgggaggccctctgagctctcatccaagccgttaccaccgcgagattgctccgggactgaccgggagcgaatggacccggacggtgttgtcgctgaatagtaggagtgaagccgagtccatgccgcctccacgaacctctgcaagcagcgtgtcactactgtctgtgctgaggcaacaggaaggcggatctcaagcctctgtgtatacttctgccactgagggacgtggtttccccgcaagtggtcttgccactgagtccgacggcggaaacggcagctcccagaacaatagcggatctattcggcacgaactgcagtgtgacttacgcagattcttcctggagtacgaccgactacaggagctcgaccagagtctgagcggcgaagctccacagactcagcaggcacaagaaatgctgaataacaatatcgaatctgagcggcctggcccatcacatcagccgacccctcactccagcgagaataactccaacctgtcaagaggccatctgaaccgctgccgcgcttgccacaacctgttgaccttcaacaacgatacactgcggtgggaaaggaccactcctaattactctagcggagaggcctctagctcctggcaagtgccctcttcatttgagtctgttccaagcagcgggagccagctgcccccactggagcgaacagaaggtcaaactccctcgtcgagcagactggagctctcgtcttcagcctcccctcaggaggaacggacagtcggtgtggccttcaatcaggagaccgggcactgggagcgaatatatactcagtcctcgcgctctgggacggtgtcacaggaggccctccatcaagatatgcctgaggagagcagcgaagaggacagcctaaggaggctgagccctgcagcgtactatgcacagcggatgatccagtatctctctagacgggacagcatacgacaacggtccatgaggtatcagcagaaccggcttcggtcctccacctcatcaagctcaagtgataaccaggggccaagcgtggaggggacagacttggagtttgaagactttgaagacaacggcgataggagccgccaccgggcaccacggaacgcacgcatgagcgccccttcattggggcgttttgtgcccagacgttttttgctgccggagtacctgccatacgccggaatttttcatgagcgcggacaacccggactcgctacacactctagcgtgaatagagtcctggcaggggctgtgattggggatggacagtccgccgttgctagcaacattgccaacaccacatatcggctccagtggtgggacttcactaagttcgacctccccgagatttcgaacgcctcagtgaacgtcctggtgcagaactgcaagatctacaacgacgcctcatgtgacatcagtgcagacggccagcttctggccgctttcatcccgtcgagccagcggggattccccgatgagggaatcctagccgtgtatagcctcgccccacataatctcggggaaatgctctatactaagcgctttgggccaaatgccatcagcgtctctctgagccccatgggcagatatgttatggtcggcctagcctctcgtcgaatcctcctgcacccatctacggagcatatggttgcccaggtctttcgcctgcaacaagcccatggcggagagacctccatgcggagggtcttcaacgtgctgtaccccatgcccgctgatcagcgcaggcacgtgtccattaactctgcgagatggttgccggaacccggactgggcttggcatatggaacaaacaaaggggacctggtaatctgccggcctgaggctctgaactccggcgtcgaatactactgggaccaactgaatgaaacagtgtttacagttcacagtaattcccgctccagtgaacggccagggaccagtagggctacctggagaacagaccgggatatgggactgatgaatgcaatcggtctgcagccacggaatcccgctacctctgtcacatcgcaggggacacagaccctcgcactgcagttacaaaacgcagaaactcagacagaacgcgaagttccagagccaggaaccgctgcaagcggcccaggcgaaggtgagggcagtgagtacggagcatcaggggaagacgccctgtctcggatacaacgtctgatggcggagggtggcatgactgctgtggttcagagggagcaaagtactactatggccagtatgggagggtttggtaataatatcattgtttctcaccggatccataggtcaagccagacaggtacggaacccggagccgcacacacctccagtccacaaccctcaacctctcggggtctactgcccgaggcgggacagcttgcagaacgcggactgtcgcctcggactgctagttgggatcagccaggtacccccggtagggagcctacccagcctacattaccttcttcaagccctgtccccatacccgtgtcacttcctagcgccgagggacctacattgcactgcgagttaacaaataataaccatttgctcgacgggggatcttctcgcggagacgctgccggaccgcgtggagagccaagaaacaggtag

SEQ ID NO: 215533 - DNA, 3717 bp, synthetic construct
  misc_feature 1..3717: note = Description of Artificial Sequence: Synthetic coding sequence
  source 1..3717: mol_type = other DNA
atgaaggttgtccccgagaagaatgcagtgcgcatcctctggggaagggagcgcggagcacgggcaatgggggctcaaaggctcctacaggaattagtcgaagacaaaacacggtggatgaaatgggaagggaagcgagtggagctgccggatagtccacgctccactttcctgctcgcattttcccctgatcggacactgctcgccagtactcacgtgaaccataacatctatattacggaagtgaaaacgggaaagtgcgttcacagtctaatcggtcaccgtagaaccccctggtgcgtcacattccacccaacgatctctgggctaatcgccagcggctgcttggacggagaggttagaatttgggacctccatggaggcagtgagtcatggttcacagacagcaacaatgcgatagccagtctagctttccatccgaccgcccagttgctgcttatcgctaccgcaaacgagatacatttttgggattggtctcggagggaaccgttcgctgtggtgaagactgcttccgaaatggagcgagtccggctagtgcggttcgaccccttaggtcactatctgcttactgccatagtaaatccaagcaatcagcaaggggacgacgaacctgagataccaatcgacgggaccgagctctcccactatagacagcgagccctgctccagtcacaacccgtacgccgaacgccactactccataactttcttcacatgcttagtagtagatctagcggaatccaggtgggcgagcagtccaccgttcaggatagtgcgactccctcgccgcctccgcctccaccacagcccagcaccgagagaccccgtactagcgcatatataagattgcgtcagcgggtgagctaccccaccgccgaatgctgccaacacctgggcatcctgtgtttatgcagtcggtgcagcggcactcgcgtgcccagtttactcccgcaccaggacagtgttcctccagcatccgccagagcaacaaccccttctttcagtttcgtccagaccgaacccttccatccccctgaacaggctagcagtacacaacaggaccagggacttcttaaccggccaagcgctttctctacagtccagagttccactgctgggaacactcttcgcaatctgtccctcggtcccacccgaagatctctcggtggacccctctcttcccacccatctaggtaccaccgcgaaattgctccaggcctcaccggatctgagtggactcgaaccgtcctctccttaaacagcagatctgaagcagaatctatgcctcccccacgaacctccgcctctagtgtctcactgctttccgtgttgaggcagcaggagggcggtagccaggctagtgtgtatacctctgcaacagagggcagaggatttccagccagtggtctggctacggaatcagatgggggaaatggatcgagccaaaacaactctggcagtatccggcatgagctgcaatgcgacctgcgcaggtttttcctggagtacgataggctccaagaactggaccagtctctctcaggcgaagcacctcagacacagcaggctcaggagatgttgaacaacaacatcgagtctgagcgtcccggacccagtcaccagcctacaccccactcctccgaaaataacagtaacctgtcacgcggacacctgaatcgttgtcgcgcttgccataacctcctaaccttcaacaacgacactctgagatgggagcggaccactccgaactactccagcggagaagcgtccagttcctggcaggtgccctctagctttgaatccgtccctagttccggtagtcagctgccgcctcttgagcgcacggagggtcaaacgccctcctcgagcaggctggaactgtcatctagcgcttccccccaggaggaacgaacagtaggcgtcgcgttcaaccaggagacgggccattgggaaaggatttatacccagagtagtcggtcgggaaccgtgagccaagaggcccttcaccaggatatgcccgaggaaagtagtgaagaagatagccttaggaggaggctgctggagtccagtctcatctccctctcacgctacgacggggctggatctagagaacatccaatttaccccgaccctgccagggacaacggcgatcgctcgagacatcgggcaccgaggaatgcgaggatgtctgccccatcgctgggcaggttcgtgcctcggaggtttctgttacccgagtatctgccgtatgccggtatcttccacgaaagggggcaacccggtttggcaactcacagttccgtcaaccgggtgctggcaggagccgtgatcggggatgggcagtctgccgtggctagcaatattgccaacaccacttatcgactgcaatggtgggattttacaaagtttgatctgcccgaaatcagcaatgcaagtgtgaacgtgcttgtgcagaattgcaagatctataatgatgcatcgtgtgacatctccgccgacggtcagttgcttgccgcttttattccatcctctcagcgcggattcccggacgaaggcatactggccgtttattccttggcacctcataacctgggcgagatgctctacacaaaaaggttcgggcctaatgccatttcggttagcctttcacctatgggacggtacgttatggttggcctggctagcaggcgcatcctcttgcaccctagcactgagcacatggtcgcacaggtcttccgattacagcaggctcatggaggcgagacttccatgagaagagtgtttaacgtgctgtaccctatgccggctgaccagaggagacacgtctccatcaactcagccagatggctgcccgagcccggtctcggcttagcatatggcactaataagggggatcttgtgatttgtcggccagaagctctcaactccggtgtcgagtactattgggatcaactgaacgagactgtttttactgttcactcaaacagccgtagttctgaacgcccaggaacttcccgggcaacctggagaactgacagggatatggggctgatgaacgctattggcttgcagccccgaaaccctgctacgtcggtgacctctcaggggacccagacgctcgctcttcagctgcagaatgcagagactcagaccgagagagaggtgcccgaacccggaactgccgcttcaggacctggtgagggtgaaggctccgaatatggtgccagcggcgaggacgccttgtcccgtatccagcgactgatggctgaggggggaatgactgctgtcgttcagcgtgagcagtctactaccatggcatccatgggcggattcgggaacaatattattgtgtcccataggattcacaggagcagccagactgggactgaacccggagccgcacatacttcctctccccagccttcaacgagccgaggactgctgcccgaggcaggccagctagccgagcggggtctgtcccctagaaccgcctcctgggaccaacccggaactcccggtagagaaccgacacaaccaaccttgccctcatctagtcccgttcccatccccgtttctttacccagcgccgaggggcctaccttgcactgcgaactgaccaataataatcacttgttagatggcggtagcagcaggggcgacgctgctggcccaagaggcgagcctcgtaatcgatag

SEQ ID NO: 215534 - DNA, 3540 bp, synthetic construct
  misc_feature 1..3540: note = Description of Artificial Sequence: Synthetic coding sequence
  source 1..3540: mol_type = other DNA
atgaaagtcgtaccagaaaagaatgcggtgcgcattctgtggggacgggagagaggagctagggcaatgggcgcacagagacttcttcaggagctcgtggaggacaagacaaggtggatgaagtgggaggggaaacgcgtggaactacctgattcacccaggtccacattccttctggctttttccccggataggactctcctggcaagcacgcacgttaatcacaacatctacattactgaagtaaagacgggcaaatgcgtacactctctcattggacatcgaaggactccttggtgcgtgacctttcatccgacaatttctggactgatcgccagtggatgtctggacggcgaagtgcgcatctgggatctgcacggtggcagtgagtcctggttcactgactcaaataatgcaatagcatccctggcttttcacccgactgctcagttgttgttgatagccaccgctaacgaaattcacttttgggactggtctcgtcgggagccatttgcagtggtcaagacagcctctgaaatggagagagttcgacttgtgagatttgatccactcggacattacctgttgacagcaattgtgaacccatctaaccagcagggtgatgatgagcctgagatcccaatagacggaaccgagctgtctcattataggcagcgtgctttgcttcagtcccagcccgtccgacgtacacctctccttcataacttcttgcatatgctctccagcaggagctccgggattcaaacggagccattccacccgccagagcaggcatccagcacccaacaggatcaggggctcctgaacaggccatctgcattcagtacagttcaaagctcgaccgcgggaaatactctgcgcaacttaagtctggggcctacccggaggagcctcgggggacccctctcttctcatccttcacggtatcatcgggagattgcccctggccttaccgggtccgagtggacaaggacagtcctctctctcaacagtcgttccgaggccgagagcatgccccctcctagaacttcagctagcagtgtttcgctgctatcagttctcaggcagcaggaaggtgggtctcaggcctctgtgtatacatccgcaactgaaggcaggggatttccagctagcggcttagccacagaatcagacggaggcaacggcagcagccagaataactcgggtagcatccggcatgaattgcaatgcgacctcaggagattctttttggagtacgacagactccaggaacttgatcagagtttgagcggagaagctccgcaaacccagcaggcacaggagatgttaaataataacatcgagtcagaaaggccaggaccttcccatcaacctaccccccatagctcggagaacaactcaaatttgtctcggggacacttgaaccggtgcagggcatgccataatctcctcacatttaataatgacacgctgcgctgggaaagaactactcccaactactcctccggagaagcatcatcctcatggcaagtgcccagttctttcgaatcagtaccttcatcgggctcccagctccccccactggagagaacggaagggcaaacaccaagcagttctcgcctggagctgtccagctcggcctctccacaggaggaaaggacggtcggggtggctttcaatcaggagacgggccattgggaacgcatttacacccagagctctcgcagcggcactgtgtcacaagaagcactgcatcaggacatgccggaggaatcgtcagaggaagacagccttagaaggttgtcccccgcagcgtattatgcacaaagaatgattcaatatttatcccgccgtgattccatacggcagcggtcaatgcgctaccaacagaatagattacggtccagcacgtcctcttccagcagcgacaaccagggtccttccgtcgaggggactgaccttgagtttgaagacttcgaagataatggcgatcgaagccgacaccgggcaccccgaaacgctcgaatgtcagccccatcactagggaggtttgtccccaggcgcttcctgcttccagaatatctaccttatgccggaatcttccacgaacgaggccagccaggcctggccacacacagtagcgtgaatagggtgctggctggtgcagtcataggtgatgggcagtcagcagtcgcatcgaatatcgccaacactacatatcggcttcagtggtgggacttcacaaaatttgatctgcccgaaatttcgaacgctagcgtgaacgttttggttcaaaattgtaagatctataatgatgcctcctgtgatatttctgccgatggtcaactgctcgctgcctttattccctctagtcagcggggtttccccgacgaaggaattctcgcagtgtactcacttgcgccacataacctgggtgagatgctgtacactaaaaggttcggcccaaatgcaatttccgtcagcctctctcctatgggacgatatgtgatggtagggctcgcctcgcgccgaattcttctccatccaagcacagagcatatggtcgcgcaagtatttagactgcagcaggcgcacggaggcgagacttccatgcggcgagtctttaatgttctctatcctatgcctgccgaccaacgcagacatgtcagcatcaacagcgccagatggttacctgaaccgggtctcgggttggcctacggaaccaataagggggacctcgtgatttgtcgtccagaggccttaaatagcggggtagagtactactgggatcaactgaacgagacagtctttacagttcatagcaatagccgctcgtccgagcgcccaggaactagtagagccacctggcggacagatcgagatatggggttgatgaacgccattggactgcagccccgaaatccagccacctccgtcacttcgcaaggaacacagacactcgccttgcagttgcagaatgccgagacccagacagagcgtgaggtccccgaacctggcaccgccgcttcaggtccgggtgagggtgaggggagtgaatatggagcttctggagaggacgcactgagcagaatccaaagacttatggcggagggcggtatgacagccgtggtgcagcgtgagcagtccactaccatggcatcaatgggcggtttcggtaacaacatcattgtgagccatcgaatccacaggtcctctcagaccggtactgaacctggtgcggctcacacgtcctccccccagccctctacctcgagggggttactcccagaggccggacagctggcagaaaggggactgtctccaagaaccgcctcttgggatcagcctggaacccccggtcgcgagccaacacagcctactctacccagttcaagcccagtgcctatccccgtatctctgcccagcgccgaaggacctacattacactgtgagctgaccaacaataatcacctcctggacgggggatctagcagaggggatgccgcagggccaagaggagagcccaggaatcgttag

SEQ ID NO: 215535 - DNA, 1947 bp, synthetic construct
  misc_feature 1..1947: note = Description of Artificial Sequence: Synthetic coding sequence
  source 1..1947: mol_type = other DNA
atggaaaaggcgcgacggggtggagatggtgtcccccgtggacccgtgctgcacatcgtagtggttggtttccatcacaaaaagggttgccaggtggaattctcctaccccccattgatccccggagatggacacgactctcatacgctgcccgaagaatggaaatacctccctttccttgccctccccgacggtgcgcacaactatcaggaggatacagttttttttcatctgccacccagaaatggaaatggggctacagtctttggcatctcctgctacagacagatcgaagcaaaggcactgaaagtaaggcaggcggatattacccgtgagacagtccagaagtccgtgtgtgtgctgtcgaagctccctctgtacgggctgctgcaggcaaaacttcagctgatcacacacgcatactttgaggagaaggatttcagccaaatttcaatcctgaaagaactatatgagcacatgaactctagtcttggaggggcatctctggaagggagccaggtctatctaggcctgagtccgcgagacttggtgctgcacttccgtcacaaggtcttgatcctgtttaaactgatattactagagaagaaagtattattctatatttcccccgtgaataagttggtgggcgcactcatgaccgtactttccctgtttccaggcatgatagagcatggtctatccgattgctcccagtataggcccagaaagagtatgagtgaagacggcggtctgcaagagtctaacccttgtgcagatgactttgtatctgcatcgacagctgacgttagccatacaaatctaggcacaatcaggaaagtgatggcgggaaaccatggcgaggacgccgcaatgaagacagaagaaccactgttccaagtggaggactcctcaaaaggacaggaacctaacgatactaatcagtacctgaagccccctagtcggccatcccccgactcttctgagtccgattgggaaaccctggaccctagtgtgctcgaggaccctaaccttaaggagagggaacaactcggctctgatcagaccaacctgttcccaaaggactccgtgccctctgaatccttgccaatcaccgtgcagcctcaagctaatacagggcaggtggtcctgatccctggcctcatcagcggactcgaggaggaccagtacggcatgcctctggcaatcttcactaagggctacttgtgcctcccctacatggcgctgcagcagcaccacttgctgtctgacgtgaccgtcaggggctttgtcgctggagcaaccaatattctcttccgacaacagaaacacctgagtgacgctatcgtagaagtcgaagaagccctgatacagattcatgaccccgagttgcgtaagttgcttaatcccaccacagcagatttacgatttgccgactacctggtacgccacgtgaccgaaaacagggatgacgtgtttctggacgggactggatgggaggggggtgacgagtggatacgggctcagttcgccgtctacatccacgcattgcttgccgcaacccttcaacttgataatgaaaagatcctgtccgactatggcactaccttcgtcacagcatggaagaacacccataattatcgcgtatggaacagcaacaaacacccagcgctggccgagattaaccccaatcacccatttcagggccaatacagcgtttccgatatgaagctgcgcttcagccatagcgtacaaaacagcgagcgtggtaagaagattggaaatgtgatggtaaccacctcccggaacgtggtgcagacagggaaggctgttggtcaatcagtgggtggtgctttctccagcgcgaaaaccgccatgtccagttggctgtcaaccttcacaacatccacctctcaatccctgaccgaacccccagacgagaaaccctag

SEQ ID NO: 215536 - DNA, 1773 bp, synthetic construct
  misc_feature 1..1773: note = Description of Artificial Sequence: Synthetic coding sequence
  source 1..1773: mol_type = other DNA
atggagaaggctagacgtggaggcgacggagtgcccaggggacctgtgctgcacatagtagttgtgggatttcaccacaaaaaggggtgccaggtggaattctcatacccacccttaattcccggagatgggcacgattcccatacacttcccgaagaatggaaatatctaccctttcttgcactgccagacggagctcataattaccaggaggacacggtgttctttcatcttcccccaaggaacggcaacggcgcaaccgtgttcgggatttcctgttatcgtcagatcgaggccaaggcgctgaaagtgcgacaggccgatataaccagagagacagtacaaaaatcggtttgtgtcctatctaagcttcctctgtacggattgctgcaggccaagctacagttaattacacacgcatactttgaggagaaggacttctcacagatatccatcttgaaggaactatatgaacacatgaacagctctctagggggtgcctctctcgagggcagtcaggtttacctggggctgtcgcccagggacctggttctgcatttcagacacaaggtcctgatcttatttaaactgatcctgctggagaagaaagtgcttttctatatcagccccgtgaacaagctggttggcgctttgatgacagtcttatccctgtttccagggatgattgagcacggcttatctgactgcagtcagtacaggcccagaaagagcatgtcagaggacggtggacttcaagagtccaatccctgcgctgatgacttcgtgagcgcttcgacagcggatgtgagccatacgaatctgggaaccattaggaaagtgatggccggaaatcacggtgaggacgccgctatgaagactgaggagccgctctttcaagttgaggattcgagtaaaggacaggaacctaacgacaccaaccagtaccttaaacctcctagccggccttctccggacagcagcgagtctgattgggagacgctggacccatccgttctggaagatccaaaccttaaagaacgtgaacagcttggatcagaccagacaaacctgttcccaaaggatagcgtgccctccgaaagtctcccgatcacagtccagccccaggccaatacaggacaggtggtgttgatccccggattgatttcagggcttgaagaggaccagtatggtatgccacttgctatttttaccaaaggttacctgtgcctgccatacatggcccttcaacagcaccatctgctttctgatgtaactgtaaggggattcgtcgcgggagcgactaatattctgttcaggcagcagaagcatttaagcgatgcaatagtggaagtggaagaggccctgattcagatccatgatcctgaactacggaagctcttgaatccgactaccgccgatctacgctttgctgattacctggttagacacgtaactgagaatcgagatgatgtgtttttggacggaactggctgggaaggcggtgacgagtggatccgggcacaattcgcagtttatatccacgcgctgctggcggctacactgcagctcgttttgttcagaatcgttaatgtgaagaaaattggaaacgtcatggtcacaaccagccgaaatgtggtccagactgggaaggccgtgggccagagtgtaggtggagccttctcaagcgccaagaccgcaatgagcagttggctttccacttttacgacctctactagtcagtctctaaccgagcccccagatgaaaaaccctag

SEQ ID NO: 215537 - DNA, 1392 bp, synthetic construct
  misc_feature 1..1392: note = Description of Artificial Sequence: Synthetic coding sequence
  source 1..1392: mol_type = other DNA
atggaaaaagccaggaggggcggagatggcgttccgagagggccagtgctccatatagttgtggtcggctttcatcataagaaggggtgccaggtggagttctcataccccccactgatccctggggatggccacgattcccacacccttcctgaagagtggaaatatctgcctttcctggcactgcctgatggggcacacaactatcaggaggataccgtgttttttcatttgccgcctcgtaacggcaatggcgcaacagtcttcgggatcagctgttaccgccagatcgaggccaaggccctgaaggtcagacaggccgacatcaccagggagactgttcaaaagagtgtgtgtgtgctgtcaaagttgccactttacggcttgctccaggccaaattgcagcttatcacccacgcctacttcgaggaaaaagattttagccaaatctccattctgaaagaactctatgagcacatgaattcctctttaggcggtgcctctctggaaggcagccaggtgtacctgggcctgtcccctcgcgacctggtgctgcactttcggcacaaagtcctgatcttatttaagctgattttgttagagaaaaaggtgctcttctacatttccccagtgaacaagctggtgggcgcacttatgaccgttctgagcctttttccagggatgatcgagcacgggctctccgactgttcccagtatcgccctaggaagagcatgagcgaagatggaggcttacaggaaagcaacccctgtgccgacgattttgtgagtgccagcactgccgacgtttcacacaccaatctcgggaccatcaggaaggtcatggcaggtaaccacggagaagatgccgctatgaagaccgaggaacctctcttccaggtcgaggattcaagtaaaggacaggaacctaacgacactaaccagtacctgaaacccccaagcaggccatcacctgatagctccgagagcgattgggagactctggacccctcagtgctcgaagacccaaatttgaaagagagggagcaattgggctccgatcaaaccaatctgtttcccaaggacagcgtcccttccgagtccttgccaattaccgtacagcctcaggccaacacaggccaggtagtgcttatcccgggactgatttccggactcgaggaagatcagtacggcatgcccctggcaatcttcacaaagtgcacacaggatgttctgccacaggccaatcattccttcaaattcctcatcacagacagacggatcacgcccagaccactcaggcgacgcctggtcagcgccactctcacaaatatgctgcaggagaagtcgtgttggaagaagcatatcaaatgtcgcagaagagtccagaaatag

SEQ ID NO: 215538 - DNA, 2532 bp, synthetic construct
  misc_feature 1..2532: note = Description of Artificial Sequence: Synthetic coding sequence
  source 1..2532: mol_type = other DNA
atgagtagtgcgatgttggtgacctgtttacctgacccaagctcctcctttagagaggacgctccaaggcctcccgtgccaggcgaggagggcgaaaccccaccttgccaacctggtgtgggcaaggggcaagttacgaagcctatgcccgtgtctagcaatacgagaagaaatgaagatgggttgggtgaaccggagggcagagccagccccgattcgccactgacacgctggaccaaatcactgcacagcttactcggagatcaagatggtgcttacctgtttagaacctttttggagagggaaaagtgcgtggacactctggatttttggttcgcatgcaacggtttcaggcagatgaacttgaaggacaccaagactctgcgagttgcaaaagctatctacaagaggtacatagaaaataactcgatcgtgtccaagcagctgaagcctgccaccaaaacatatatcagggatggcatcaagaagcaacagatcgattcgattatgtttgaccaggcgcagacagagatacaaagtgttatggaggaaaatgcctaccaaatgtttttgacctcagacatttaccttgagtacgtccgaagcggaggggagaacacagcctacatgagtaacgggggactaggtagcctgaaagtggtgtgtgggtacctgcctacccttaatgaggaagaggagtggacctgcgcagactttaagtgtaagctgtcaccgactgtcgtgggcttgagcagcaaaactcttagggcaaccgcctccgtgcggagtaccgaaaccgtcgactctgggtatcggtcttttaaacgatcagaccccgtgaacccttaccatatcggttccgggtacgtgttcgccccagccacgtccgctaatgattccgaaatctcctctgatgccctgacggatgatagcatgtccatgaccgattcaagcgtcgatgggataccgccatatagagtcggtagcaaaaagcagctgcagcgagaaatgcatcgatctgtgaaggcaaatgggcaagtgtctctcccgcactttccgaggacccacaggcttcctaaggaaatgacacccgtggagcctgcaacgttcgcagctgagttaatctctagattggaaaagcttaagttagagctggaatcgcgtcactccctggaggagcgtttacagcagataagggaagacgaagagcgcgaggggtctgaactgaccttgaattcccgcgaaggtgccccaacacagcatcccttgtccttgcttccctctgggtcatacgaggaggatccccagaccattctcgatgaccatctctctagagtgctgaaaactcctggctgtcagagtccaggcgtcgggcgttattcaccacgatcacggtctcctgatcatcatcatcatcaccacagccagtaccacagtctcctgccacccggtggaaaactgcccccagccgctgcctctcccggtgcctgtcccctcctgggcggaaagggatttgtgacgaaacagaccacgaagcacgtccatcaccattacatacaccaccacgcagtccccaagacgaaagaggaaattgaagccgaagctacacaaagagtccattgtttctgcccaggtggctccgagtattactgttattccaagtgcaagagccatagcaaagccccagaaactatgccaagtgagcagtttggcggatctaggggctcaaccctccccaagaggaatggtaaaggaaccgagcctggcttagcactccccgcaagagagggcggagctcccggaggagccggtgcgctgcaattgccacgggaggagggcgacagatctcaggatgtgtggcagtggatgttggaatcagaacggcagagcaagccaaaacctcattccgcccaatcgaccaagaaggcgtaccccctcgagtcggcacggagtagtcctggagaacgagcatctaggcaccacctctgggggggaaactccggccaccccaggactacgccaagggcccacctcttcacacaggatcctgctatgcccccactcacaccacccaacacactcgcccaactcgaggaggcatgccgcaggctggcagaagtgtctaagccacctaagcagaggtgctgtgtcgcctctcagcaacgcgataggaatcatagcgctaccgtgcagacaggcgctaccccgttctctaacccaagcctggcacctgaagatcacaaagagccaaagaagctagctggcgttcatgccctgcaggctagtgagctggtcgtaacctatttcttttgcggagaggagataccataccggcgaatgctcaaggcgcagtccctcacactggggcactttaaagagcagctgtctaaaaagggaaactaccgttactattttaagaaggccagtgatgaatttgcctgtggggctgtcttcgaggaaatctgggaggatgaaactgtgctgccaatgtacgaaggccgaattctcggcaaggtcgagcgaatcgactag

SEQ ID NO: 215539 - DNA, 2337 bp, synthetic construct
  misc_feature 1..2337: note = Description of Artificial Sequence: Synthetic coding sequence
  source 1..2337: mol_type = other DNA
atgtcatcagccatgctggtaacctgcctgccagatccttcctcctccttccgcgaggacgcccctagaccacctgtgcccggtgaagagggggagacccccccatgccagccaggcgtgggcaaaggacaggtgacgaagcccatgccagtgagttccaatacaaggagaaatgaagacggactgggcgagcccgaaggcagagcaagtccggactcacccctgacgcgctggaccaagtccttgcattctctgctcggcgatcaggatggcgcttatctgttcaggacttttctggagagggaaaagtgcgtagatacgctcgacttttggtttgcctgcaacggattccggcagatgaacttgaaagatacgaagaccctgagagtcgccaaagcaatctacaagagatatatagagaacaacagcatcgtgtccaaacagttaaagccagcgacaaaaacttatatcagagacgggatcaaaaaacaacagatcgacagtatcatgtttgatcaagcacaaactgagatccaaagtgttatggaggaaaatgcttaccagatgttccttacctctgatatctatcttgagtatgtgaggagtgggggagaaaacactgcctatatgtcgaacggcggactcggctcactgaaagtggtctgcggctatcttcccacactgaatgaggaggaagagtggacctgcgctgattttaagtgtaagctgtcacccactgttgtcggcctttcatcaaagacattgagagctaccgctagcgtaaggtctaccgaaactgtcgacagcggctaccgttcctttaagcgctctgaccccgtgaatccctaccacattggatcaggctacgtgttcgccccagcaacaagtgccaatgatagcgaaatttctagcgacgcgctgactgatgacagtatgtctatgacggatagctctgtagacggcattcctccttaccgggtcggaagtaaaaagcaattgcaacgggaaatgcataggtccgtcaaggctaacgggcaggtgagtctgccacattttccccgaacgcaccgactgcctaaggagatgacacccgtggagccggctacatttgctgctgaactgatcagccgtctggagaagctgaagctggaactagagagcagacactctttagaggaacgattgcagcagattcgggaagacgaggaacgggaaggcagtgagctgacacttaactctagggagggtgcacccacccagcatcccctctcactcttaccctccggaagctatgaggaggacccgcagactatattggatgaccacctgtcgcgcgtactcaaaacgcccggatgccaatctcctggggtgggtcgatactcccctagatctcggtctccagatcaccatcatcaccatcactcccagtatcattctctgttgccacccggtgggaaacttccgcctgctgcggcaagtcccggtgcatgccctctgctcggcggtaaaggtttcgtgactaaacagacaacaaagcatgtgcaccaccactacattcatcatcacgccgtgcctaagacaaaagaggaaattgaagccgaagcaacccagagagtgcactgcttctgtcccggaggatctgagtactactgctacagcaaatgcaagtcacactcaaaagcgccagaaactatgccaagcgagcaatttggcgctcagagtaccaaaaaggcctatcctctggagtcagctagatcatcccctggcgaacgagcttctaggcatcacctgtggggaggaaatagcggacatcccaggactacccctcgggctcatctgttcactcaggacccggctatgccacccctgaccccgccaaatactttagctcagctggaggaggcatgccggaggctggctgaggtgtcaaagcccccaaagcaacgatgctgcgttgcatcccaacaaagggaccggaaccattccgccacagttcagacaggcgctacacccttcagtaaccccagtctggccccagaggaccataaagagcctaagaaactggcaggggtgcatgctctgcaggcctctgagctggttgtgacatacttcttctgcggggaggagattccgtacaggcgtatgttaaaggcacagagcctcacgctgggccactttaaggagcagttgtcaaagaaaggtaattacaggtactacttcaaaaaagcttcagacgagtttgcatgcggagctgtttttgaggagatctgggaggacgaaacggtcctgccaatgtatgaaggacgaatcttgggaaaagtcgagcgaattgactag

SEQ ID NO: 215540 - DNA, 483 bp, synthetic construct
  misc_feature 1..483: note = Description of Artificial Sequence: Synthetic coding sequence
  source 1..483: mol_type = other DNA
atgagctctgccatgctcgttacttgcctcccagacccttcaagctcttttagagaggacgcacccaggcccccagtaccgggagaggagggggagacccccccatgccaaccgggagtggggaaggggcaagtaactaagccaatgccggtgagctcaaatacacgtagaaatgaagacggtttgggcgagccggagggaagggcctcccccgactccccgctaacgcgctggacaaagagcctgcatagcctacttggcgatcaggacggggcatacctgttcagaacgtttctggaacgggagaagtgtgttgataccttggatttctggtttgcttgtaacggttttcgtcagatgaatctgaaggatacaaaaacactcagagttgtgaacgatttctgtcacgacattctcttctacctttattgcaaactgtgtattatcaaatcttctttcaaggaaaactatctggttcagtag

SEQ ID NO: 215541 - DNA, 921 bp, synthetic construct
  misc_feature 1..921: note = Description of Artificial Sequence: Synthetic coding sequence
  source 1..921: mol_type = other DNA
atgtctgaggtgacacggagcctgttgcagcgctggggtgcgtccttccggagaggcgctgatttcgactcatggggccagctcgttgaagctattgacgaataccagatactggctcgacatcttcagaaggaagcccaggcccagcacaacaactcggagtttacagaggagcagaagaaaacaataggaaagattgccacgtgtctggagctgcggagcgccgctctgcaaagcacacaaagtcaggaggagtttaaactggaagaccttaaaaaactggagccaatattgaagaacattctgacctacaataaagaatttccctttgatgtacaacctgtgcccctgagacggattttagctcccggagaggaagagaacctggaattcgaagaggatgaagaggaagggggtgcgggagccggttctcctgattccttcccagccagggtcccgggaaccctcctgcccagattgccttcagagccgggaatgacactgttaactatccgaatagagaaaatcggcctaaaggacgccggacaatgtatcgatccttacatcacagttagtgtgaaggatttgaacggaattgatctcactcctgtgcaggacacccctgttgcaagcagaaaagaagacacttacgttcatttcaatgtggacattgaactgcagaaacacgtggaaaagctgactaaaggagcagccatttttttcgagtttaaacattacaaacctaagaagcgctttaccagcactaaatgcttcgccttcatggaaatggatgaaatcaagcccggaccaattgttatcgagctatacaagaagcctactgactttaaacgtaagaagttgcagctcctgaccaagaaacctttatatttgcatctgcaccagacattacataaggagtag

SEQ ID NO: 215542 - DNA, 675 bp, synthetic construct
  misc_feature 1..675: note = Description of Artificial Sequence: Synthetic coding sequence
  source 1..675: mol_type = other DNA
atgtcggaggtgaccaggagtttactccaacggtggggcgcaagctttcggagaggtgccgattttgacagttggggtcagctggtggaggccatagatgagtaccagatcctggctcgtcacctacagaaagaagcgcaggctcagcacaacaactcagagtttaccgaggagcagaaaaagaccataggcaaaattgccacgtgtctggaactgcggtctgcggcattacagtcaacacagtcacaggaggagttcaagctggaggaccttaagaaacttgagccaatcttgaagaacattctcacctataataaggagttcccattcgacgtacagcccgtgccactgaggcggattttagcccctggcgaagaagagaatctggaattcgaagaagatgaggaagagggaggggcaggggctggaagcccagactcttttcccgcaagggtacctggcgctgccatattcttcgagttcaagcactataaaccaaaaaagcgtttcacttccacaaaatgttttgctttcatggaaatggatgagattaaacccggtccaatagtgatcgagctctacaagaagccaaccgacttcaaaagaaagaaactgcagttgctgactaagaaacccttatatttgcacctgcaccagactctgcacaaggaatag

SEQ ID NO: 215543 - DNA, 849 bp, synthetic construct
  misc_feature 1..849: note = Description of Artificial Sequence: Synthetic coding sequence
  source 1..849: mol_type = other DNA
atgatcgctacagaagctgtagttcgcgcagcccagggcctggcgaggcacctgcagaaggaggcgcaggctcagcacaacaatagcgaattcaccgaagaacaaaagaagacaatcggcaagatcgcaacctgcctggagttgcgaagtgctgcactgcagtccacacaatcacaggaggaattcaaactggaggacctcaaaaaacttgagcccatcttaaagaatattttgacctacaataaagagtttccatttgatgtacaaccagtgcccttgagacggattctggctcccggagaagaggagaaccttgaattcgaagaagacgaggaagagggcggagcaggcgctggcagccccgatagcttccccgcaagagtccctggaaccttgctacctcgcttaccgtctgaacccggtatgactctgctgaccattcgtatcgaaaagatcggactaaaggatgctggccagtgcatcgacccttatatcacagtgtctgtcaaggacctgaatggaattgacttgacccctgtccaggacacccccgtggcctcgcggaaagaagatacatacgtgcactttaacgtggatatcgagctccagaaacacgtggagaaactgacaaagggggcagccatttttttcgagttcaaacactataagcctaaaaagagattcactagtactaaatgctttgcattcatggaaatggacgagatcaaacccggacctatcgtgatcgagctgtacaagaagccaactgatttcaagcggaagaaactgcagttactgacaaagaaacctctgtatctgcatctgcaccaaactctccataaagaatag

SEQ ID NO: 215544 - DNA, 2685 bp, synthetic construct
  misc_feature 1..2685: note = Description of Artificial Sequence: Synthetic coding sequence
  source 1..2685: mol_type = other DNA
atggcctggcggtgccctcggatgggtcgcgtgccgttggcttggtgcctggccctctgcggatgggcgtgtatggcacctagaggaacacaggcagaagaatccccctttgtggggaacccgggaaatatcactggcgctcgtggtcttacggggaccctgcggtgtcaactgcaggtgcagggtgagcctcccgaggtccattggctgcgggatggccagatcctggagctcgccgacagcacgcagacacaggttccactgggcgaggacgaacaggatgattggatcgtggtgtctcaacttcgaattacttctttacagctgagcgacactggccagtaccagtgcttggtatttctcggacaccagacctttgtatcccagccgggatacgtgggcctcgagggccttccttacttccttgaagagcctgaggatcgcacagtggcagcaaacactcctttcaatctcagctgccaagcccagggccctcctgaaccagtggaccttctgtggctgcaggacgcagttcccctcgctactgcccctgggcacggccctcagcggtctttgcacgtgccaggcttgaataagacctcaagcttctcgtgtgaagctcacaatgccaagggcgtgacaaccagccgtacagccactataactgtattgccacagcagcccagaaatctgcatctggtgtctagacagcccaccgagctcgaagtggcttggaccccaggcctgtccggaatttaccccttgacacactgcacattgcaggccgtattatcaaatgacgggatgggtatccaggccggagaacccgaccccccagaagaacctttgacttcccaagcaagcgttccaccacaccaactgcgcctcggttccttgcatcctcatactccttaccacatcagagtggcttgtacttcttctcaggggccttcgagttggacccactggctgcccgttgaaactcctgagggtgtgccactgggacctcccgaaaacatctccgcaaccaggaacggctctcaggcttttgtgcactggcaggagcccagagcacccctgcagggaacattactgggctacaggctggcttatcaggggcaggacacgcctgaagtgctgatggacattggcttgagacaggaggtcaccctagagctgcaaggagatggcagtgtgtcaaaccttaccgtctgcgttgcggcatatacagccgcaggagatggcccttggagcctccctgtgcccttggaggcttggaggccgggacaggctcagcctgtgcaccagctcgtgaaagagccaagtacacccgcattcagctggccatggtggtacgttctactgggagcagtcgtcgccgcagcctgtgtactgatcttggcattgtttctggtgcacaggcgaaaaaaagaaactcggtatggcgaagtcttcgagccaaccgttgagcgcggtgagctggtcgtgcgctatcgcgttaggaaaagttattcacgcagaacgaccgaagcaacacttaactccctggggatcagcgaggagctaaaagaaaagctgcgtgatgtgatggtagatagacacaaagtcgccttggggaagaccctgggcgaaggggagtttggtgcagtgatggagggccagcttaatcaagacgacagcatcctcaaggttgcggtcaaaacaatgaagattgcgatttgtactagaagcgagttagaggattttctgtccgaggctgtttgtatgaaggaattcgaccaccccaacgttatgcggctcattggggtctgctttcagggctcagaaagggaatcgttcccagcaccagtggtaatcctaccgttcatgaagcacggcgatttacactcatttcttttgtattcacggctcggagatcagcccgtctatctgcccacccaaatgctcgttaagtttatggccgacattgcgtcaggaatggagtatctgagcacaaaacgctttattcaccgggatcttgctgcgaggaattgtatgctgaacgagaacatgtccgtctgtgtggcagacttcgggctgtccaagaaaatctataacggcgactactatcggcaggggcgaatagcaaagatgccagtgaagtggattgccattgagagccttgccgacagggtatatactagcaagagtgacgtctggtctttcggagttactatgtgggagattgcaaccagaggacagactccatatcctggagttgagaattctgaaatatatgactatctccgacaggggaacaggttgaagcagccggcagattgcctcgacggcctgtacgccctgatgtctagatgctgggagctcaatccccaggaccgcccaagtttcaccgaactgcgcgaagaccttgagaacaccctcaaagctcttcccccagcgcaagagccggatgaaatcctgtatgtgaacatggacgaaggaggcggatacccggagccccctggggcagcgggtggtgctgatccaccaacacagccggatccaaaagattcttgttcttgccttactgcagcagaagtacaccctgccggtaggtacgtactgtgcccatcaaccacgcctagccctgctcaaccggcagataggggaagcccagctgcacccggacaagaagatggggcatag

SEQ ID NO: 215545 - DNA, 2658 bp, synthetic construct
  misc_feature 1..2658: note = Description of Artificial Sequence: Synthetic coding sequence
  source 1..2658: mol_type = other DNA
atggcgtggaggtgcccgcgtatgggtagggtcccgctagcatggtgtttagccctgtgtggttgggcatgtatggctccaagaggcacacaggctgaggagtcgcccttcgtgggtaaccccggaaacatcacgggcgctaggggcttgactggcaccctgcgctgccagcttcaggtgcaaggggagcctccagaagttcattggcttcgggacggacagatacttgagctcgcggactctacgcagacacaagtgccactgggtgaagatgaacaggacgattggatcgttgtgtctcagctgcggatcaccagtcttcaactcagtgatacaggccagtatcagtgtctggtgtttctgggccatcaaacatttgtgagccagccaggttatgtcggactagaaggcctgccctactttctggaagaaccagaggatcgcactgtcgcggcaaacactcctttcaatctcagctgtcaggctcaaggtcccccagagccggtcgatttgttgtggctgcaagatgcagtgcccctcgccacggcgcctggacacggaccccaacggagcttgcacgtgccgggacttaacaagacatcctcattttcctgtgaagcccacaacgccaagggagttactacgagccgtaccgccacaatcacagtccttccgcagcagcccaggaacctgcatctggtctcccgccagcctaccgagctcgaggtcgcttggactcctgggctgagtggtatatatccacttacccattgcactcttcaggccgtgctctctaacgatggtatgggaattcaggccggagaacctgatccacccgaagaacctctgacaagccaagctagcgttcctccacaccaactgcgtttggggtcgctccatcctcataccccgtaccacatacgggtggcttgtacctccagtcaaggcccttcaagctggacacactggctcccagtcgaaacaccagaaggtgttcctcttggtccccctgagaatatttccgcgactcgaaacggctcacaggcctttgttcactggcaagaaccgcgtgcgcctttacagggcacgctgctgggctacagactggcctatcagggacaggacacaccagaagttctgatggacatcggtcttcggcaggaagtgacactcgagctgcagggcgacggctcggtgtctaatcttacggtgtgcgtggcagcatacaccgcagccggagacggcccttggtctctccccgtgccgttggaggcttggcgtccagtcaaggaaccctcaacccccgctttctcctggccctggtggtacgttctgctgggcgctgtggtcgcagcggcttgtgtgctcatccttgccttgtttctggtacaccggcgaaagaaagagactagatatggggaagttttcgaacccacggtcgagcgcggtgaactagtagtgaggtaccgcgtccggaagagttattctcgaaggacgacagaggctacacttaactcactgggcatatctgaggaactcaaagagaaactccgggatgtcatggtggatcggcacaaggttgccttaggcaagactcttggggagggagaattcggtgcggtcatggagggtcagcttaatcaggacgacagcattcttaaggtggccgttaagacaatgaagatcgcaatctgtacccggtctgaactggaagacttcctgtccgaggcagtctgcatgaaagaattcgaccaccccaatgtcatgcgattgatcggtgtgtgctttcagggtagcgaacgcgagtccttccccgctccagtggtgattcttccattcatgaagcatggcgatctgcacagctttctgctgtattcccgtctcggcgaccagcccgtgtacctgcctactcagatgctggtgaagttcatggccgatattgccagcggtatggagtacctgagcacgaaacgcttcattcaccgagatctggctgccaggaactgtatgctgaatgagaatatgagtgtgtgcgtcgcagactttgggctgagcaaaaagatctacaacggcgattattaccggcaagggagaattgctaagatgccagtcaaatggattgccattgagtctctcgcagatcgggtgtatacatccaagtctgatgtctggagcttcggggtgacaatgtgggagatagctacaaggggacagaccccctaccccggagtcgaaaactccgaaatatatgactacctgaggcagggcaataggctgaaacagccggcagattgtcttgacggattatatgctctgatgtctcgatgttgggaactgaacccccaggatcggcctagctttaccgagctgagagaggacctcgaaaacacattgaaggcgcttcctcctgcccaagaacccgacgagattctgtacgtgaatatggacgagggtggcggatatcctgagccgccaggggctgccggtggagcagatcctcctacccaacctgaccctaaagacagctgtagttgtttaaccgccgcagaagtccatcccgctggccgttacgtgttgtgcccaagtacaactccttctcccgctcagcccgctgaccgcggaagcccagccgctccagggcaggaggacggtgcctag

SEQ ID NO: 215546 - DNA, 2439 bp, synthetic construct
  misc_feature 1..2439: note = Description of Artificial Sequence: Synthetic coding sequence
  source 1..2439: mol_type = other DNA
atggagcctttgggaaattggcggagcttaagggccccacttccgcctatgctgcttctgctgctcctacaggtagctggtcctgtcggtgccctggctgaaacactgctgaacgctcctcgagcaatgggcacttcctcgagccccccttccccagcatcagtggtagccccaggaacgaccctgttcgaagagtcccgactgccagtgttcacactggactatccacacgtacagattccattcgaaatcacactatggatcctgttggctagccttgccaaaatcggctttcacctttaccacaaactacccaccattgttcctgaatcctgtttattgattatggtgggactgctgttggggggtattatcttcggagtagacgagaagagtcctcctgcaatgaaaacagatgttttctttctttacttgctgccacctattgtgttggacgctggctatttcatgccaacgcggccttttttcgaaaacatcgggactattttctggtatgccgttgtgggtacactgtggaactcaattggaatcggggtatcactctttggtatatgtcagatcgaggccttcggtctttcagacataacccttttacagaacctgttgttcgggtcactgatctctgctgtggatcctgtggcggttttggccgtgttcgagaacattcacgtgaatgagcagctgtacatcctggtgtttggcgaatccctcctaaatgatgccgtcaccgtggtgttatacaacctgtttaagtccttttgtcagatgaaaacaatcgaaacaatcgacgtattcgccggaatcgccaactttttcgtggtagggatcgggggtgtacttattggcatctttttaggattcatcgctgcgttcaccacccggtttactcacaacatcagggtcatcgagccgctgttcgtttttctgtattcctacctttcgtatattactgccgagatgttccatctgtcagggatcatggctattacagcctgcgccatgacaatgaataagtatgtggaagaaaatgttagtcagaagagttacaccactataaagtactttatgaaaatgctgtcatccgtaagcgaaacgctgattttcatatttatgggcgtgtcaacagtgggaaagaaccatgaatggaattgggcattcgtttgctttaccctggcattctgcttaatgtggagagccctgggtgtgttcgtgctgacacaggtgatcaataggttcagaactataccactgacttttaaagaccagtttattatcgcctacggaggactgagaggcgcaatctgcttcgccctggtgttcctgcttccagcggctgtatttcctcgcaagaagctgttcatcacagctgcgatcgttgtcattttctttactgtctttatcctcggtattacgatccgccctctggtcgaattcctggacgtgaaacgatctaacaagaagcagcaggccgtatccgaggaaatatactgccgactgttcgatcacgtgaagaccggcatcgaagacgtctgcggtcattggggccacaacttctggcgagataaattcaagaaatttgacgataagtatcttcggaaattgctgatccgcgagaaccagccgaagagcagtattgtgagcctgtataaaaagctcgagattaagcacgcaattgagatggccgagaccgggatgatctccactgtgcctacattcgcaagtctgaatgattgtagagaggaaaagattcgcaaggttacctcttccgagacagacgaaatacgtgaactgctctccagaaacctgtaccagattcggcaaagaacgctgtcttataataggcattccctcaccgctgacacgagtgagcgccaggccaaggagatcctgatccggagacgtcattctttgcgggaatctattcgaaaggactcttcccttaaccgagaacaccgagctagcacatccacctcccggtacctgtctttgcctaagaacactaaacttccggagaagctgcaaaagcgccgtactatatccatcgcagatggtaatagtagcgattcagatgcagatgccggtaccacagttctcaatctgcagccgagagcacgacggtttctgcctgagcagttttcaaaaaagagtcctcagagttacaagatggaatggaaaaacgaagtggatgtggactctggcagggatatgccctcaacgcctcccacacctcactccagggaaaaagggacccaaacttcaggcctactgcagcagccgctgctgtcaaaggaccaatctgggtccgagcgggaggattctcttacggagggaatccctccaaaaccgcctcctagattggtgtggagggcctccgaacccggttcccggaaagcgagatttggctccgagaagccctag

SEQ ID NO: 215547 - DNA, 681 bp, synthetic construct
  misc_feature 1..681: note = Description of Artificial Sequence: Synthetic coding sequence
  source 1..681: mol_type = other DNA
gcagaggggaagtggggcctggctcacggcagggcagaagctcacgtgtggcccggacagggcggatggcggttgggccctccccaagggaggtggaccggctccagccctctgcttgacattgtgggaggaagaaaagctaggccgagacagtttccctttctcgccagcattcagaaccaagggagacatttctgcggtggcgcactcatccacgctcgcttcgtaatgactgctgcatcttgctttcaaagtcagaatccaggggtgtccaccgtggtgctgggtgcctacgacctgagacgtagggagagacagagcagacagacgttttcaatatcttccatgtccgaaaacgggtacgacccacagcagaatctcaatgacctcatgctcctccagctggatcgagaggcaaatctgacaagttcagtcaccatacttcccctacccctgcaaaacgccaccgtcgaagctggcacgaggtgccaggtggctgggtggggctctcaacgttctggtggaaggctgtctcgtttcccaaggttcgtcaacgtgaccgtgacccctgaggaccagtgccgccctaataacgtgtgcacgggcgtgctgacgcggaggggtggcatttgtaacgtgtcagctccatgtgggggaaggcgcggtcccgaacgctactag

SEQ ID NO: 215548 - DNA, 7874 bp, synthetic construct
  misc_feature 1..7874: note = Description of Artificial Sequence: Synthetic coding sequence
  source 1..7874: mol_type = other DNA
atgtttcgccgagcgaggctgtcagtgaaacctaacgtgagaccaggcgtgggcgctcgcggaagtacggcctccaatcctcaacggggacgggagtcaccaagaccacccgacccagccactgattccgcttccaagccagcagaaccaacggacgtgcctaccgttgactttggcggagcagaaccacaagagaaggcaccacggtctagcacagagaagaccgggggtgataacgatgttgaagagtcaagtcggagcagtagtaccgtttctcaaagacgaaagcgcattagcagcacctcatcactcgttaagtctagtgtcagcgtaccttccgagtcacacccattgtcaacaattaatcaagaggcaccacagcctaccgccacctccacgaaggagaagcagccctgttccgacaggtacagaatatacaaggcacagaaactaagggagatgttgaaggaggagctgaggaaagaaaagaagcagtggaagaataagtacgctattaatgaatcacagcgaccccctgaccggtctaaaatgacgatgcgagattttatctattacctgccggacaataatcccatgacaagctctctggagcaggaaaaaaaaaccgaaaagccatcaacccccgtgcagacccgcgagcaggagggcaagagcacccctaatgccgaggataacgaaatggaggaggagaccgatgacggaccactcctggttccaagagtgaaggtcgcagaggatggatcaatcatccttgacgaggaaagcctgacagtggaggtcttgcgcactaaggggccatgtgtggtggaggagaacgatccgatctttgaacgaggatccactactacttatagttccttccgtaagaactattacagcaaaccctggtccaataaagaaacagatatgttttttttggcaatcagcatggtcggcactgatttctctatgatcggccagctcttcccacacagagctcggattgaaattaagaataaatttaagagggaagagaaaaccaatggttggcgcattgataaagcttttcaggagaagagacctttcgattttgacttctttgctcacctgcttcagaaagtgttggctgaggaagagaagaggaaacaaaagtccgtgaagaaccattccctcaaagaaaagaagagcaccaaacctcggaagaatgtgaaggtgaagaaggtcgcgtgtgagggagtgaataatgacccagacgagagtatgtcttccaggatctcagacaccgaacgaagccagaaagatgcgcagacggttgaggaggagtcattgactttgtcccgcgaagatgccgaacaggtcgccctggaggtggaccttaaccagaagaagcgcaggaggaagaaacaagacggggctaatgagctcggagtcaataatctgttggagaacgcgaccgtccaggctggaccgtctaagggggaaaaacacaaaaacaagtgccaggctatcaggcccgaactcaaggaaggagaatgcagcaaggagcagatgctctcatgtacccagaatattgatgggattgtgggattcgccagcacggaaaaggtggaaaagagaaccgaccccatcctttctctttccaaccagcaggacgcaacatcggttgcaacggaatctagtgaatcgtccaccagtgacctgccttcttttgaggtgggaatccgggctctgtgtgaagtgaacaacgctgagggatcgtgtatcgaggaacgaaacgtcgacctgaaaaataactccctcgaaattgaccagaccgaaaacgtgaagcccatgttgagggggaggtttcagagaccaaagccaaacttaagccgggcagggaaaaaaagcgttctgtcccaggggaaaaccgagtctgaatctaaaaactctcacagcaagacttcggtggagaaaaaccacgtcgaaaaagacaaaatgaataccctcgatatccttcgcatggaaaccaccgaacgggaaaatcctgaggcagagacagtctccgtccttggagagaagaactgtctgcaggaggggagccagttgaaggcactccgccctgtgcaggtaaggggtcgactccaaaaaccaaaacctaatgccggaaaggctgcagagcgaaaagaaatactgatcagccaggaggagattggtgctaatgtcgaaaaaaatgaaaatgagagctgtgccgaccgagataccccccagcacatggaagatcaatcgaggaaagatttcgaggaggaagatgtgatcctgcagccagaaaaaaatgacagctttcaaaacgttcagccagatgagccgaaggtattgaatgaatgtctatccgtgcaagagaataacaaggcaaacaaactcaatcaggtacctatactgcgaacacggtttcagaagccaaagccaaacattggccgaggcactgggaggcgcgaaattagttccaaagaggaggtgcttgagaagatccttgtgagcggagagatggcagccgcactgagagagaccgtccgcttggacacttcacccaaggaaatggtgccggcagaaataaacaccaaagaaatgcagtctgatttgaaagagacaggcaggcgggctatctccccgcgtgagaaaatcttggatgtaatcgacgataccattgaaatggaaacaggcctgaaagccatgggcagagaaatctgcttacgcgaaaaaacccctgaagttattgacgcaaccgaggaaattgacaaagatctagaggaagccggtcggagagagatctccccccagaaaaacggcccagaggaagtgaaacctttgggggaggtggaaactgatctgaaagcaactggaaacgaatcgtcaccgagggagaaaacgcctgaagtgactgatgctactgaggaaatcgataaaaacttggaagaaactggccgtaggaagattagtccacgggagaacgggcctgaggaggtaaagccagtggatgagatggagactgatctgaatgccaccgggagagagagttcacctcgcgagaagacgcccgaagtgattgatgccaccgaagagattgatctggaagaaactgagcgcgaggtctccccccaggagaatgggctcgaggaagtcaagcccctgggcgaaatggagacagacctaaaagctacggggagggattcctttcctaggggaaaaaccccagaggttattgacgccatcgaagaaattgagatcgatcttgaagaaacggagcgggaaatttcccctcaggaaaacggcctggaggaggtaaaaccgttaggtgagatgcagacagatctgaaggctaccggtagagagatctcccctagagagaagacccctgaagtcatcgatgctactgaagagatcgataaggatctagaagagaccggtagaagggaaatttcccccgaggaaaacgggccagaggaggtgaagccagtggatgagatggagacagacctgaagacaacaggtcgggaaggaagctctcgcgaaaaaacaagggaggtgattgatgccgctgaggtgattgagacggatctggaagagacagagagggagattagcccccaggagaacggcccagaggaagtgaaacctgtggggaaaatggagaccgatctcaaggagatcagggaagagatttcccagagagagaaggtcttggcggagtttagtgctatccgagagaaagagattgacctgaaggagactggcaaaagagatatcccgattatggaaaaagtgtcaggcaagatggcagtggttgaagaaatggaagcagatttgaaagagacggggaaagaaaacttcagagagcgcggaagcgaggagatctgtgtcaccgaggagaaggtcgccgagctgaagcagactggaaaaaccgacatatccccgagggaaaatgagttagaggaaaccagcacctcacggcagacagatactcatctcatgcaaagtggctccaacgacttttctgccgtccctagtctggacatccagaacatctcttccgaggtcttgagtatgatgcacacgcccgttgaggagaaaagaaattccgagaaagaggtaagctcacacttttctcacttcaagatatcctcccaaactcacgaaagcgacaagacagaggttcaaggaattcagtctcctgatgtgcctgagcagttctccgatatcaatctctcaaagagcctgccgcaggagcaaaagccactggagattaaaccagccccattcgttagatccagattcaagaggcccaaaccgaacctggctagagcagctctgaaacgcgaaactacagagagtgaaaagtatatctatgagaaaaagtccgaaacgaagaagatggagacaatcgtcatgcaggaaaataacgagcagaccgatacactaccctcccagcacgatgaagcgagcctgatgatctcaagagagaaagatacgctcggacacagaaacgaggaagccgtgattttgccctgcacacaaaccgaacggaacctatctccaagcaacagttgtgagcccaaagaggagtctcagtcagccccagtacaaaagaacgattctgtcgtgtcggtgggaaccaacaacgtgaacaccttccagcaggaaatgaaagagagcgtgattcagacagccagacaggtgcgcggtcgtctgcagcgcccacgccctaatattcggaagaccggacagagacagattgtggacaagggggaggccaaaggtatcattaaagagggaaggacaatactgccgaaagacgagactgaaaagaaggtgctgactgtctcgaattcccagatagaaactgaaattgaagtgccatctagtgccgtgcccgagcataggatgtacgaaaaccaatcccaggttgtgttggtagaaaatttgcatgtgaataagacaaatgaaacaattaggcacgagaataaaccatatgtaccatcgagtgcgcaaatgactagacgaaaattccaaaaggcaaagccaaatctggggagagctcactcaaagaaggaggagcccgtcctggaaaaagtgacaactgaccagtctaaggagggtaagcctgaagatcacctgctccagaaaggcgcttccaatactcagctgcttttgaaggagaaggccgagctattaacaagtttggaggtttcggcccgtaaggattgtgtgggtagtaaggaatcggccctggctaagatcgatgcggagctagaagaagtggggcctagccgccgagtgggtgaggaaactgttggtgacaactctccctctagcgtcgtggaggaacagtatctcaacaagctcacctcttgcccccagccactgaacgagacgagctactctaaaatagccttggacggcaagaccacaatctcaagcacatcagaatacgagcgcaataggggggaacggagatcccacaagaagttcaaaccaaacgtaacccggggacgagggagtaagagagtgagggggaaaacctctaaaaaagagccaagggccagtaaggcaatgctcgtcacccttcgggcttctcaggaggaggacgatgacgctgacgactttgaatccgattacgaggaagaaagctatcatcttgctccagaggaggtaaataaggcccctgtctttgtgcccgtgggcttacggtcaccggagcctgtgagcgcccagattgaggagacgatggaagaactagaaatcactgtaaacgttcctgatgtgggctgcatcgctgttgtggagcatgagctacccaataccgacgtgacaaccgaggaaatgaaacaggaggaaaacctctctgtgccatttgagatgacaactagcgagcacatccaagacgagcccggaacgaatgatggatccacggaggcggcaattacccttctcacaatgggggacctggttctgcagtctgagatcagctctgaacagggagatgtgggcgtgtgcatcatccctcacgtccacagcaaagataaatctcacattccctctagcctggacaacgtgaaccacaagatcgtccatgagtgccaggagctgtcatcacccgtcatcactactagtcctgcaagctttgaggagaataagattgtacttgaggaacagtcttcgcgggaagagataagtctgatggaaaaggtgaaagaaaatgcaactcctactaggaataccatttctaaggtgacaagcaaccttagaattcgttctaggttggcgaaacctaagcctaacctggaaaaaactctcggaacaaataggttggatgactaccaagaggtgtccagcttatgcgtaacaaagggtgcagagatggaaacacaacgtgaaacagaaaagaacgcttcaaaagccactgagctggagaacaaaaatctcggccctgtaaccactgccgaaaacaaagatcagagcaagctggcttgcgtccatgggatcaagggaaccagtatctccagcgaagtgaacttaacagaaaggaacgagaatcaggaagaatctagccaggaggtgcacatgctgagtgtggcccctgtggcttcaagcgagaccgggccatgcactctggggctcgaccggggactgggcgagaactctgttgaggaaccacagatcaaggacagcaaaggtgactccgtccttactctccccgtcccagagtacactcctaccagcattcccgaagtgcagcaggagaacataatcaatcctcaggaccttacggtgaacttagtggccaacgttccccaagacggggaggatgaacaggccttcatcctcactttggtcgaaattcccgctaatgccgtggaggagtttaccgacgccacagcacagttcatgccaaaccccctgttgccggcaccaattcttgtgaaaagtgtgaatacggaggagcgcggtgatatgtccatctgccttccggctacgtcagtgggtcaggacgcgatgggcctgtctatctccggcagggataattctaagaaacccccagacaatttggacctggttagcagaaaacgatttcagtgtagacttgataagaatgatcatatcccgccagccaaaaaacggagcttaaccctgcgcgatgattgccaagagtacaccaccgaagttcattcaaaggaactaacaaatgttttcgaagagacgggagagtcacataaaggccaagatattttcctcacatcagggagtactctcaccacacccgagccccagcggcaacaggtagaagcagccttccagtccagaggatcgcgttcccctgacgcctgtatggataaaaatgtgcctcaacttcctcaggatgaaatgatcgtgagcgataaagaggagaggacagacgccgcacctaagagccagcagatggacagccgaaccagctcgtcaaaagcatcgctctcgagacctggacggcgaccgctgggattcttgtcgctgatatgctctaagaactccctcgagagcgatgaaccaatgcaggtgcattctaagaagaggttaaaacccctgatccctgggttgcggaaaaagctaaagcgcagtaatccatttaacgagtcccaggaaaaaaacagggagagctctgatctgcttcctagcccaagtgttattaccactcagtctgagaacatctccagtagcgctacgcaggttagctgcgatcagccgctgcttaaagaaggatataaatccgcacagaagcgtgctccccaaggcgaagcgacgacggtgagcgagtacttttttaatgatatatttatagaggtggacgaaacggaata

SEQ ID NO: 215549 - DNA, 1392 bp, synthetic construct
  misc_feature 1..1392: note = Description of Artificial Sequence: Synthetic coding sequence
  source 1..1392: mol_type = other DNA
atgctagttaccttaagggcaagtcaggaggaggacgacgatgctgatgatttcgagtccgactacgaggaggaatcttaccacttggcaccggaagaagtaaacaaagcccctgtgtttgtgccagtcgggttgcgatcaccagagcccgtgtctgctcagattgaggaaacaatggaagagctggaaattacggtcaatgtgcctgatgtggggtgtatcgctgtggtcgaacatgaactccctaacactgatgttacaacggaggagatgaaacaggaggagaacttaagcgttccatttgaaatgactactagcgagcacattcaggacgagcctggtactaatgacggtagtaccgaagccgctattactttgttgacaatgggcgatctggtcctccagtccgaaatttcctccgaacagggagatggagtttgcatcattccacacgtgcatagtaaagataagtctcacatcccttcaagcctggataatgtcaaccacaaaatcgtccacgagtgccaggaactcagctcacccgtgattacgacctcccctgcctcatttgaggagaataaaatagtattagaagaacagtcctctagggaagaaatctcgctcatggaaaaagtgaaagaaaatgccactcccaccaggaacacaatatccaaagttacctcaaacctgaggatacgcagtaggcttgccaaaccgaagcctaatctggagaagaccctcggcaccaaccggctggacgactaccaggaagttagtagcttgtgcgtcacaaagggggctgagatggaaacccaaagagagacagaaaaaaatgcctccaaagcaacggagctcgaaaacaaaaatttgggccctgtcacgactgctgaaaacaaggatcaatccaagcttgcatgtgtgcatggcatcaagggcaccagtattagctcagaagtgaatttgaccgagcgaaacgagaaccaggaggagagtagccaggaggtgcacatgctgagcgtcgccccagtggcctccagcgaaaccggcccatgcactctcggactggaccgcggtctgggcgaaaactctgtagaggaacctcagatcaaggattctaaaggtgactctgtgctcacactcccagtgccagagtatacccctacgtccatcccagaagtgcagcaagagaacatcatcaatcctcaggacctcactgtctttgtttaccaacagctccagctagtaaagatgccatgggtgtatctcttcctcgaggaaattatcctgaagtctaggctcatcatttggatcttgtatctgggcagagactttaatgctggtcttattaagatgaccacctttcttcttcctaaaaacgtccactctttgtag

SEQ ID NO: 215550 - DNA, 2445 bp, synthetic construct
  misc_feature 1..2445: note = Description of Artificial Sequence: Synthetic coding sequence
  source 1..2445: mol_type = other DNA
atgtttcgtcgagcaagactctccgtgaagccgaacgtcagaccaggtgtgggcgctagaggtagtacagcctcaaatccccagcggggacgcgaaagccctaggccaccagacccggctacggactcagcaagcaaacctgctgagcccaccgacgtccccacagtcgacttcggcggagccgagccacaggagaaggcacctcggtcaagcacggagaaaaccggcggagataacgatgtggaggaaagttctcgaagcagctctacagtaagtcagcggagaaaaaggatctcctctaccagctccctcgttaagtcttcagtgtcggtaccaagcgaatctcacccactcagcactattaatcaagaagctccacagccaaccgccacctccactaaagaaaagcaaccatgctccgacaggtaccggatttacaaggcccaaaagctcagggaaatgctgaaagaagagttgcgcaaggaaaagaagcaatggaaaaacaaatatgcaataaatgagagccagcgcccacctgataggagtaagatgactatgagggattttatctactatctcccagataataatccgatgacatccagcttggagcaagagaagaagaccgagaagccaagtacgcccgttcagacgagggagcaagagggcaagtctactccaaatgccgaagacaacgagatggaggaggaaactgacgacgggcctctcttggtcccgcgagtgaaggtggcggaagacggctccatcattttggatgaggagagcctaactgtcgaggtcctgaggactaagggcccatgcgtggtagaggaaaatgacccaatttttgagcgcggaagcaccactacctattcttcattcagaaaaaactactactccaaaccttggtcaaacaaagaaacagacatgttctttctggcgatatccatggtagggacagacttcagtatgatcgggcagctgtttccgcacagagccagaatcgagattaaaaataagttcaagcgcgaagagaagacaaacggatggcgaatagacaaagcctttcaagagaagagaccctttgacttcgacttcttcgctcatttgctgcaaaaggtactcgccgaagaagagaagagaaagcagaagtccgtcaagaaccattcactcaaggaaaagaagagcacaaagccaagaaagaacgtcaaggtaaagaaagtggcatgtgaaggtgtgaataacgaccccgacgaatccatgtctagtcgaatttccgataccgaacgcagtcagaaggatgctcagacggtcgaagaagagagtctgaccctgtcacgcgaggacgccgagcaggtcgcgctagaggtggacctgaaccagaaaaagagacgacgcaagaaacaggacggcgcaaatgagctgggcgtcaacaatttgcttgaaaacgccactgttcaggcagggccttctaagggagagaaacacaagaacaagtgtcaggccatccgacccgaactcaaagagggggaatgtagcaaggagcagatgttgtcttgtacccagaatattgatggcatcgtcgggtttgccagcaccgagaaggtggagaagaggactgatcccatcctgtctctgtctaatcagcaagacgccacttctgttgcaacagagtcctcagaaagctcaacaagcgatttgccatcgttcgaggttggtattagagccctctgtgaagtgaacaacgctgaaggatcctgtatagaggaaagaaatgtggatcttaaaaacaactctctagaaattgatcagacagagaatgtgaagccaatgctgcggggacgctttcaacgccctaaacccaatctcagcagggccggtaaaaagtctgtgttgtctcagggtaaaacggagagtgagtctaaaaattcgcattctaaaacttcggtcgaaaaaaatcatgtcgagaaagataaaatgaacactctggacatcctccgaatggagactactgagagggagaacccagaagccgaaaccgtctcagttctaggagagaagaattgtttgcaagaaggatcacagcttaaagcactccgccctgtgcaggtgaggggtagactgcagaagccaaagcctaacgcagggaaggccgctgagcgaaaggagatcctgatctcgcaggaggagatcggcgctaacgtagagaaaaatgaaaacgaaagttgtgccgaccgggatacaccacagcatatggaagaccagagccggaaggatttcgaagaggaggacgttattctccagccggaaaagaatgattcatttcagaacgtccagcccgacgagcctaaagtcctgaacgagtgccttagtgtccaggaaaataacaaagctaacaaactgaaccaggtacctatcctcagaacacggttccagaaaccctag

SEQ ID NO: 215551 - DNA, 2541 bp, synthetic construct
  misc_feature 1..2541: note = Description of Artificial Sequence: Synthetic coding sequence
  source 1..2541: mol_type = other DNA
atgttccggagagccagattgtccgtcaagcctaatgttagaccgggagtgggcgcacgaggaagtactgcttccaatcctcagagaggaagggagagtcccagaccccctgacccagcaaccgattccgctagtaagcccgcagagcctacagacgtgcctactgttgactttggcggagctgagccccaggaaaaggctccacgatcttctacggaaaagactggaggagataacgatgtggaagagtccagccgctcctcaagcacagtatcacagagacgcaaacgcataagctccacttccagcctcgtcaaatcaagtgtttcggtacccagcgaaagtcacccactcagtacgattaaccaagaagcaccgcagccaacagctacctccactaaggaaaagcaaccctgctcggataggtatcgcatctacaaggcacagaagctgcgcgaaatgttgaaggaggagctacgtaaggagaaaaagcagtggaagaataagtatgcgattaacgaatcccaaagaccgcctgacaggagtaagatgactatgagggactttatttactacctgcccgacaataatccaatgacctcttctctggagcaagaaaaaaaaacagaaaagccttccacgccagtccagacccgagaacaggaaggaaagtctacaccgaatgccgaagataatgagatggaagaagagactgatgacggaccgctgctcgttcccagagtcaaggttgctgaagatggatcaattatcctcgacgaagagtctcttaccgttgaagtgctaagaaccaaaggaccctgtgtagtagaagaaaacgacccaatctttgaacgcggatctaccacgacatactcctcttttagaaaaaactactatagcaaaccatggagtaataaggaaactgatatgttctttctcgcaatctctatggtcggaacagatttctctatgataggacagttgttcccccaccgggctcgcattgaaataaaaaacaaatttaagcgagaggagaaaacaaacggctggcgaattgataaggcgtttcaggagaaacgcccatttgacttcgacttctttgcccacctgttacagaaagttctggcggaagaggagaagcgaaaacaaaaatccgttaagaaccatagtcttaaggagaagaaaagtacaaaaccaagaaaaaacgtgaaagtcaaaaaggtggcatgtgagggggtcaacaacgaccctgatgaatctatgtcatcacgcattagcgacaccgaacggtctcagaaggacgctcagaccgtcgaggaagaatcactgaccttgtcacgggaggacgcagagcaggtcgccctggaagtcgacctcaatcagaagaagcggaggagaaaaaagcaggacggcgctaacgagctgggcgttaacaatctcctcgagaacgcaaccgtccaagccggaccgtcaaagggggaaaagcataagaataagtgccaggccatccgccctgaactgaaggaaggagagtgttccaaggagcagatgctgagctgtacccagaatatagacggcatcgtgggatttgccagcaccgagaaagtcgagaagcggacagatcccatccttagcctgtcaaatcagcaggacgccacttccgtcgctactgagtcctcagagtcctctacaagcgacctcccctctttcgaagtcggtataagggctctttgcgaagtgaataacgctgaaggaagttgcatcgaagaaagaaatgttgatctgaagaacaattccctggagattgaccagacagagaatgtgaaacctatgcttcgagggaggtttcaaagaccaaaaccaaacctgagccgcgcaggcaaaaaatccgtactgtcccagggaaagactgaaagcgagagcaagaatagtcatagtaagacaagcgtggagaaaaaccacgtggaaaaagacaagatgaacacacttgacatactgcgcatggagactaccgagagagaaaatcccgaggctgagacagtctcggtgctgggagaaaagaactgcctgcaggagggcagccaattgaaggccctacggccagtccaggttcgaggacgtcttcaaaagcctaagcccaatgccggaaaagcggcagagagaaaagaaatcctgatttctcaggaggagattggagctaacgtggagaagaatgagaatgagagctgtgccgatcgggacacccctcagcatatggaagaccaaagtcgaaaggatttcgaggaggaagacgtgatcctccagcctgagaagaacgattccttccagaatgtccagccagacgaaccgaaagtgctgaatgaatgcctgtctgttcaggaaaacaataaggctaacaagcttaatcaggtgcccatcctccgcacacggtttcagaaacctaagccaaacataggcaggggcacaggccgtagagagatttctagtaaagaagaggtgctggaaaagattctttcactcggcaaatggcgccagcactag

SEQ ID NO: 215552 - DNA, 6398 bp, synthetic construct
  misc_feature 1..6398: note = Description of Artificial Sequence: Synthetic coding sequence
  source 1..6398: mol_type = other DNA
atgagcagccgtatcagtgacaccgaaagatcacagaaggacgcccagacagtggaggaagagagtctcacactctctcgtgaagacgcggaacaggtggctttggaagtcgacttgaatcagaaaaaaagacggaggaaaaaacaggatggagctaacgagctcggtgtaaataatctactggagaacgcaaccgtccaggctggtcctagtaagggcgaaaaacacaagaacaagtgtcaggcgatcaggcctgagctgaaagaaggagaatgctcgaaagaacagatgctaagctgtacacagaatattgacggcattgtgggattcgcatccacagagaaggtagaaaagaggactgacccaattctgtctctgtcaaatcaacaagacgctacttccgtggcaaccgagtcctccgagtcttccacttctgatttaccctcttttgaggtgggcatcagagccctctgcgaagtgaataacgcagagggatcctgtatagaggagagaaatgttgacctaaagaacaacagtctggagatcgaccaaacggaaaacgttaagccgatgctgcggggtcgattccaacggccaaaaccgaacctgagtcgtgcagggaagaaatctgtgctgtcccagggaaaaaccgagagtgagtctaagaatagccacagcaaaacaagcgtcgaaaaaaatcacgttgaaaaggataagatgaacaccctggacattctccggatggagacgacagaaagggaaaatcccgaagccgagactgtgagcgtgcttggcgagaaaaactgcctgcaggagggcagccaacttaaggctctgcggccagtgcaggtaagaggcagactccagaagccaaagcccaacgccggaaaggcagcagaacgtaaggaaattcttatatcccaggaagagattggtgccaacgtggagaagaacgagaacgaatcctgtgcggaccgggatactccccagcatatggaagatcagtcacgtaaagattttgaagaagaggacgtgattctgcagcccgagaagaatgacagctttcagaatgtacaacctgacgaaccgaaggtcctgaacgaatgcttgagcgtgcaagagaacaataaagcgaataaattaaatcaggtgccgatcctgagaaccaggttccagaaaccaaagcccaatatcgggaggggaacaggacgtcgggaaatctccagtaaagaagaggtcctcgagaagattttagtctctggcgaaatggctgcagctctgagggagacagtgaggctggacacatcccccaaagaaatggtgcccgcagagatcaacaccaaagaaatgcagtctgaccttaaggagacgggcaggagggccatttcccctcgagaaaagattcttgatgtcatagatgacaccatcgagatggagaccggtctgaaggccatgggaagggaaatttgcctgagggaaaaaacacccgaggtgatcgacgcaaccgaggagatcgacaaagatcttgaggaagccggacgaagagagatctcgccccagaagaacggccctgaggaagtcaagccattgggcgaggttgaaacagatctgaaggcgactgggaatgagtcatcgcctcgtgagaaaactccggaggtcacagacgcaaccgaggagattgacaaaaatctggaagagaccggacggagaaagatctctccccgagagaacggccctgaggaagtcaagccagttgatgaaatggagacagatctcaacgccacgggcagagagtcttctccgagggagaaaactccagaagtgattgatgcgacagaagaaatcgacctcgaggaaaccgaacgggaggtgtcccctcaggagaacggtttagaagaagttaagcccctgggggaaatggagaccgacttgaaagccactggtcgggactccttccctcgcggaaagactccagaagttatcgatgccatcgaagagatcgaaattgacctcgaggagacagagcgcgaaattagtccgcaggaaaacggtctcgaagaagttaaacccctgggggagatgcaaactgacctgaaggctaccggcagggaaatcagcccaagagagaagaccccagaagtcatcgacgccactgaagagattgacaaggacctagaagagacgggtaggagagagatcagccctgaggaaaacggcccagaggaagtaaagccagtggacgaaatggagacagacttgaagacgaccgggagggaggggtcaagccgcgagaaaactcgtgaggttatagacgctgctgaagtgatcgagaccgatctggaagaaacagagcgggagatcagtccacaggagaatggaccagaggaggtaaaacccgttgggaagatggaaaccgacttgaaggagattcgggaggagatttcacagcgcgagaaagttctggctgaattttccgccataagagagaaagagatcgacctgaaggagaccggaaaacgtgatattccgatcatggagaaggtgagtggcaagatggccgttgtcgaggagatggaggctgatctgaaagaaactggcaaggaaaactttagagagcgaggcagcgaagagatctgtgttaccgaagaaaaagtggccgaactcaaacagaccggtaagactgatattagtccaagggaaaatgaactggaagaaacttctaccagtaggcagaccgatacccatcttatgcagtcgggttctaatgatttttccgcagtgccctccctcgatatccagaatatcagttctgaagtcctgagcatgatgcacaccccggtggaggagaagcggaattccgaaaaagaggtatcctcacatttcagtcactttaagatctcctcccaaacccatgagagcgataaaacggaggtccaggggatccagtcccctgacgtacctgagcagttttcagacatcaatctgtctaagtcactcccacaggagcaaaagcccctggaaataaagcccgcaccattcgtcagatctagatttaagcgacctaaaccaaatttggctagggcagcactaaagcgtgagactaccgaatcagagaagtacatctatgagaagaagtctgaaactaagaagatggagactattgtaatgcaggagaacaacgaacagactgacacactgccgagtcagcatgatgaggcttcactaatgatcagccgcgaaaaagatactctgggccacaggaatgaggaggcggtgatcctcccttgcacacagaccgaacggaatctgtccccatccaatagctgcgaacccaaggaggagtcccagagtgcgccagtccagaagaacgactctgtggtttctgtgggaacaaacaatgtaaatactttccagcaggaaatgaaagagtcggttattcaaaccgctagacaggtgagaggccgtctccagcgccctaggcctaacataagaaagacgggacaacgccagatcgtagataaaggagaagcgaaaggaatcatcaaagaaggtagaactatcctgcctaaggacgagacagaaaagaaggtgcttactgtgtccaattctcagatcgagaccgaaatcgaggtccctagtagcgccgtgccggaacaccgcatgtatgaaaaccagagtcaggtcgtgctcgtagagaacctgcatgtgaacaagacaaacgagacaatcaggcacgagaacaaaccttacgtgccatcctctgcccagatgacccgaagaaagtttcagaaggcaaagccaaacctggggagagctcatagcaagaaggaggaaccggtcttggaaaaagtcaccacagatcaaagtaaggagggtaagcctgaagaccatctgttgcagaagggcgcatctaatacacagcttctcctgaaggagaaggccgagctgctgaccagcctggaagtgtctgcgagaaaggactgtgtcggctccaaggagtctgcattggccaagattgacgccgagctggaggaggtcggcccttctaggagggtcggtgaagagaccgtgggcgacaacagccctagctccgtggtggaagagcagtacttaaataagctgaccagctgtccccagccccttaacgagacaagttacagtaaaattgcactggacggcaaaacaacgataagctctaccagcgagtatgagcggaaccgtggagaacgtagaagtcataaaaaatttaagcccaacgttaccagaggcagaggctctaagcgggttagaggcaaaacgtccaagaaggagccaagggcatccaaggccatgttagtgaccctgagggccagccaggaagaagacgatgatgctgatgatttcgagtcagattatgaagaagagtcgtatcatctggcacccgaggaagtcaataaagctcctgtcttcgtcccggttggcttgagatccccagagccagtgtctgcacaaatcgaggagacaatggaggagctcgagatcaccgttaatgtacctgacgttggctgtattgcagttgtggagcatgagcttccaaacactgatgtgactaccgaggagatgaagcaggaggagaacttgagcgttccttttgagatgacaacttctgagcatatccaggacgagccgggagtgtgcatcataccccacgttcactccaaggacaagagtcacatcccatccagcctggacaacgtaaaccataaaatcgttcatgagtgccaggagctttccagtcccgtgatcacaacatctcccgctagcttcgaagaaaacaagattgtcttagaggagcagtcttcgcgggaagagatatctctaatggagaaggtcaaggaaaacgcaacccccacccgcaacactatttctaaagtgacgtcaaatctccgcatcagaagtcggttggccaaacctaaacctaacctcgagaagacactcggaactaatcgcttagatgattatcaggaggtaagcagcctttgcgtcacaaaaggcgctgagatggagacccaaagggagactgaaaagaatgcctcaaaggcaacagagctagaaaacaagaacctgggcccagttacaaccgctgagaacaaagaccagtcaaagctggcctgtgtacacgggattaagggcaccagcattagctcagaagtcaacctgaccgaacgcaatgaaaatcaggaagagtcaagtcaggaggtgcacatgcttagtgtggctccagtggctagctctgagaccggcccatgcacacttggcttggatcgcggactgggcgaaaactccgtggaggagccccagatcaaagatagcaagggcgatagcgttcttaccctgcccgtccccgagtatacaccaacctctatacccgaagtccagcaggaaaacattattaaccctcaggacttaactgtgaacctggtggcaaatgtgccccaagacggagaggacgaacaggctttcatcctcactcttgtggagattccagccaatgccgtggaggaattcacagacgccaccgcccagttcatgcctaaccctttgctgcccgctcccattctggtgaagagcgtgaatacagaagaaaggggggacatgtcgatctgccttcctgccacttccgttggtcaggatgctatgggcctgagtatctccggcagggataacagcaagaagccccctgacaacctggacctggttagtcgaaagaggtttcaatgcaggctggataaaaatgaccacattcctcctgccaaaaaaaggtcactcactctgagggacgactgtcaggagtacaccacagaggtacatagtaaagagctgacaaatgttttcgaggaaacaggcgaatcccacaaaggtcaggacattttcctcaccagcggctcgactctgacaaccccagagccccagcgccagcaggttgaggccgctttccagagccgcggttctcgttctccagacgcttgcatggataaaaatgttcctcagctgccacaggacgaaatgatagtatctgataaggaggagcgaaccgatgccgcacctaagagtcagcagatggattctcgtacaagttccagtaaagccagtctgtctagacctggtcgtagacccctggggttcttgtcactgatctgttccaaaaactctctggaaagcgacgaacctatgcaggttcatagtaagaaacgccttaagccacttattccgggtctgagaaagaagctgaagaggtccaacccatttaacgaaagtcaggagaaaaaccgcgagtccagtgacctgctcccatccccttccgtgatcactacccagtccgagaatatcagtagcagtgcaacacaatctccttttta

SEQ ID NO: 215553 - DNA, 1392 bp, synthetic construct
  misc_feature 1..1392: note = Description of Artificial Sequence: Synthetic coding sequence
  source 1..1392: mol_type = other DNA
atgttggtaacactacgcgcttctcaggaagaggatgatgatgcagacgacttcgaatcagactacgaagaggagtcctaccacctggccccagaagaggttaacaaggcaccagtgtttgtgccagtggggctgcgctcccccgaacccgtgtctgctcagattgaagaaaccatggaagaattagagataaccgtcaatgtgcctgacgtgggatgtatcgccgttgtggaacatgagctcccgaatacggatgtgactactgaggagatgaagcaggaggaaaatttgtctgttcccttcgagatgacaactagtgaacacattcaggatgaacccggaaccaacgacggtagcactgaggctgctattactctgctgaccatgggcgacctagtcctgcagagcgaaatcagctcggaacagggcgacggcgtgtgcattatcccacacgtgcactcgaaagacaaatcccacatcccctcctccctggataatgtgaaccacaagatagtccatgagtgccaagaattatctagcccggtgataacaacaagccccgcttcgtttgaggagaataagatcgtgcttgaggaacagtcctcacgagaggagatctccctaatggaaaaagtgaaggaaaacgccactccaaccaggaataccatctccaaagtgacgagcaatctcaggatccggagcagactggcaaagcccaaaccaaacctcgagaaaacattaggtactaatagactggatgactatcaggaggtgtccagtctttgtgttacaaaaggcgctgagatggagactcagcgggaaacggaaaagaatgcttccaaggctactgagctggaaaataagaacctcggaccagttaccacagccgaaaataaagaccagagtaaattggcatgtgtgcacgggattaaaggaacctctatatccagtgaagtgaatctgaccgagcgcaatgaaaaccaagaggaaagctcccaggaagtccatatgttatctgttgcaccggtcgcgtcgagtgagaccggcccttgcacactgggcctcgaccgcggattgggcgagaacagtgtcgaggagccacagatcaaggacagcaagggagattcagtgctgacgctgccggttcccgaatacacccctacctccatccctgaagtgcagcaggagaacattatcaacccccaggacttaacggtcttcgtctatcagcaactgcagctggtcaaaatgccttgggtctaccttttcctcgaggagatcattctgaagtcgcggctgattatttggatcctctacctgggcagggactttaacgcgggtctgattaaaatgaccacctttttgctgcctaagaacgtacatagtctgtag

SEQ ID NO: 215554 - DNA, 1518 bp, synthetic construct
  misc_feature 1..1518: note = Description of Artificial Sequence: Synthetic coding sequence
  source 1..1518: mol_type = other DNA
atgggactggtatcctctaagaagcccgacaaagaaaaaccgattaaggaaaaagacaagggacagtggagtccactaaaagtttctgcgcaggacaaggatgctccacctttgcccccattggtcgtattcaatcatctgacccccccacctccagacgagcacctggatgaggacaagcacttcgtggtggctttgtacgactacactgcaatgaatgatagagacctgcagatgctgaagggcgaaaagcttcaagtgcttaagggcactggcgattggtggttggctcgttcactggtgaccggaagggaaggatacgttccaagcaactttgttgcgagagtggaatcactggaaatggaaaggtggttttttaggagtcagggccgtaaggaggcggaaagacagctcctagccccaatcaacaaggccggaagctttcttattcgcgagtcagagaccaataagggcgcattttccctcagtgttaaggacgtgactacacagggagaactgattaagcactacaagattcgatgcctagacgaaggaggatactatatcagtccccgaattaccttcccttccctgcaagccctcgtgcagcactatagcaagaaaggggatggcctgtgccagcggctgaccttgccatgcgtcagacctgcccctcagaacccatgggcccaggatgaatgggaaattcctagacagagcctgcgcctagttcgtaagctcggcagcggtcagttcggcgaggtctggatggggtactataaaaacaacatgaaggtggccataaagacgttgaaggagggcactatgagtccagaggcttttctgggagaggctaacgtcatgaaggcactgcagcacgaaaggcttgtgcgcctttacgctgttgtgaccaaggaaccaatctacatcgtgacagaatatatggcacgcggatgcctgctcgattttcttaaaactgatgagggcagcaggctgtccttgcctcggctcattgacatgtccgctcagatagcggagggcatggcctatattgaaaggatgaattctatccatagggatctgcgggcagccaatattctggtgtcggaagcgctgtgctgcaagatcgcagacttcgggctcgccagaattatcgattctgagtataccgcccaagaaggggcaaaatttcccatcaagtggaccgcacctgaggcgattcacttcggagtgtttactataaaggccgatgtttggtccttcggcgtcctcttgatggaggtggtgacatacggtcgggtcccatacccagggatgtcaaaccccgaggtgattagaaacctggagagagggtatcgcatgccacgaccagacacgtgtcctcccgagctctatcggggtgtgattgctgaatgctggagatcccgcccagaggagcggcctacgttcgagttcctccaaagcgttctcgaagacttctacacagcaacggagcggcagtatgagctacaaccatag

SEQ ID NO: 215555 - DNA, 1773 bp, synthetic construct
  misc_feature 1..1773: note = Description of Artificial Sequence: Synthetic coding sequence
  source 1..1773: mol_type = other DNA
atgggactggttagcagcaaaaagcctgataaggagaaacccatcaaggagaaggataagggacagtggtctccactaaaagtcagtgctcaggacaaggacgccccaccgttgcccccactcgtggtttttaaccatctgacaccaccccctccagatgaacacctagacgaagacaaacactttgtcgtagccctctacgactatactgccatgaatgaccgggacctgcagatgttgaagggggagaagctgcaggttctaaaaggcacaggggattggtggttggctcgatccctggttactggtagagaagggtacgtgccgtccaatttcgtggcgagagtggagtcacttgaaatggagagatggttttttagaagccagggtaggaaagaggctgaaaggcagctgttagctcctataaataaggccggttctttcctgattagggagagtgagacaaataagggtgcattcagtctatccgtcaaggatgtaactacacaaggtgagctgatcaagcattacaagatcagatgcctagacgaggggggatattacatttcacccaggattacattcccgtctctgcaggctctggttcagcattatagcaagaaaggagacgggttgtgtcagagattaacactcccttgcgtccgcccagctccccagaacccctgggcccaagacgagtgggaaattccaaggcagtctctgcgcctcgtcaggaaactggggagcggacagtttggggaagtctggatgggatactataagaataatatgaaagtggccatcaagaccctgaaggagggtaccatgagccctgaagcttttctgggtgaggccaacgtaatgaaagctttgcagcacgagcgcctggtgcggctgtatgcagtggttacaaaagagccaatctatattgtcacggaatacatggcgcgaggttgcctgctggatttcctcaaaacggatgaaggcagtcgcctaagcttgcccaggctaatcgacatgtcagcccaaatcgctgaagggatggcttacattgaaagaatgaatagcatccacagagatctgcgagccgcaaatatccttgtgtccgaggcgctgtgctgtaaaattgcagactttggactggcgcgtatcattgattctgagtacacagcccaggagggggcaaagttccctatcaaatggaccgcccctgaggccatccacttcggggtgtttactataaaagccgatgtctggtcatttggggtgctcctgatggaagttgttacttatggcagagttccctaccccggtatgtccaatcctgaggtgataaggaatctggagcgcggataccgaatgcctagacccgacacctgcccccctgagctctatcgaggcgttatcgctgaatgctggagaagtcgacccgaagagagacccacctttgactgcacacccggaagagtgacccgacctctctgcgcagcttcatttgttgagggctgcaactccgatttagcccgatcctctggagtgttatctccatcaaaagtgttccgaaccggcaagcggctctctagcagcaaggcccctgtgctcggcacacctcgggcagggagagtccctgcgagtgcgccttgtgttgaccccgctctccccagatacaggtcacagactggaagccgcggacgacaacagggacagccacaacccagactgcggagttcaacagccggactcttttgtaataaggtaaccagcgtgcgatag

SEQ ID NO: 215556 - DNA, 615 bp, synthetic construct
  misc_feature 1..615: note = Description of Artificial Sequence: Synthetic coding sequence
  source 1..615: mol_type = other DNA
atggcaactgcatcacctagtgtgtttcttttaatggttaacgggcaagttgagtcagcccagtttccagaatatgacgatctgtactgtaagtactgcttcgtgtacggtcaggattgggccccaactgccggtctcgaggaaggaatttctcagattacctctaagagtcaggacgtacgacaggccctagtgtggaacttcccgatagacgtgacattcaagtcaactaatccttacggttggccccagattgtcctgtcggtctatgggccagacgtgttcggtaacgacgtggtcagaggttatggcgctgtgcacgtgccttttagcccaggaagacataaacgcaccattcccatgtttgtacccgaaagcacaagcaagctccagaaatttacttcatggttcatggggagaaggcctgagtacactgaccctaaggtggtcgcgcaaggggagggtcgcgaggtcacaagagtccgcagccagggcttcgtcactctgcttttcaacgtagtcacgaaagacatgcgtaagctgggctatgacacgggcccatccgacactcagggtgtcctgggaccctcgccgccacagtcattcccacagtag

SEQ ID NO: 215557 - DNA, 462 bp, synthetic construct
  misc_feature 1..462: note = Description of Artificial Sequence: Synthetic coding sequence
  source 1..462: mol_type = other DNA
atggccacagcctcaccatcggtattcctgctgatggtaaacggtcaggtcgagtccgctcagtttcctgagtacgacgacctgtattgcaaatactgctttgtctatggccaagactgggccccaacggcaggcctggaggaagggattagccagatcacaagcaagtctcaggacgtccggcaggctctagtgtggaatttcccaattgacgtgactttcaagagcaccaacccttatggttggcctcagattgtgctgtccgtgtatggaccagacgtcttcggaaatgacgtggtacgtgggtatggcgctgtgcacgttccgtttagccctggacgacacaagcgcaccatccccatgtttgtccccgagtcaacgagcaagctccagaaattcacttctctctgccttgtagcctcttccgacttacaggccgctcctcccacggaagataagtag

SEQ ID NO: 215558 - DNA, 486 bp, synthetic construct
  misc_feature 1..486: note = Description of Artificial Sequence: Synthetic coding sequence
  source 1..486: mol_type = other DNA
atggctactgccagtccctccgtgttcttactcatggtcaatggacaggttgagagcgcccagtttcccgaatatgatgacctctattgcaagtattgcttcgtgtacggtcaggattgggcccctaccgcagggctggaggagggaattagtcagattacaagcaaatcacaggacgtgcgtcaggccttagtgtggaacttccccattgacgttacctttaaaagcaccaatccgtacggatggccacagatcgtgcttagcgtttatggcccagacgtgttcggaaatgatgtcgtgcgcggatatggcgcagtgcacgtgcctttcagccctgggagacacaaacgcaccattcctatgttcgtccccgagtcaacatcaaagctccagaagttcacgagctggttcatggggaggcggcctgaatacactgatcctaaggtagtcgcccagggggaggggagggaggcccagccaggatag

SEQ ID NO: 215559 - DNA, 564 bp, synthetic construct
  misc_feature 1..564: note = Description of Artificial Sequence: Synthetic coding sequence
  source 1..564: mol_type = other DNA
atggccacagccagccctagtgtttttttactgatggtgaacggacaagtcgagtcggcacaattcccggaatacgatgacctctattgtaaatactgttttgtgtatgggcaggactgggcgcctacagccggactcgaggaaggcattagccagatcaccagcaaatcccaggatgtgcggcaagctctggtatggaacttcccgattgacgttacctttaaatcgaccaatccatacggctggccacagatcgtgctcagcgtgtacgggccagatgtgtttgggaacgacgtcgtgcggggttatggcgctgtgcatgtaccattcagtccagggcgtcacaagagaactattccaatgttcgtcccagaaagcaccagcaaactgcagaagtttactagctggttcatgggtagaagaccggagtacaccgaccctaaagtcgtggctcagggggagggcagggaagacgagaacgcagaggcggaaatccccagatcaacttgggtgtctctgtgtcctagccccgcatggctgatgttgcctttctgccctcaatag

SEQ ID NO: 215560 - DNA, 402 bp, synthetic construct
  misc_feature 1..402: note = Description of Artificial Sequence: Synthetic coding sequence
  source 1..402: mol_type = other DNA
ctcctgatggtcaatggtcaggtggagtctgcgcagttcccagagtacgacgacctttattgcaagtactgcttcgtatacggtcaggactgggctcccactgcgggtctagaggaagggatctctcagattactagcaagagtcaggacgtgcggcaggcgctcgtgtggaattttcccatcgacgtcacttttaaatctacgaatccctacggctggccacagatcgtgctctcagtgtacggcccagatgtgttcggcaacgacgtggtgcgaggctacggagcagtccacgtcccatttagtcctggacgacacaaacgcacaattcctatgttcgtgccagaatccacaagcaagctgcagaagttcactcgttcagcatcatgcagtacacactag

SEQ ID NO: 215561 - DNA, 615 bp, synthetic construct
  misc_feature 1..615: note = Description of Artificial Sequence: Synthetic coding sequence
  source 1..615: mol_type = other DNA
atggctaccgcctcaccatcagtgtttttgctgatggtgaacggtcaggtggaatccgcacaattccccgaatacgatgacctgtactgcaaatactgcttcgtttatgggcaggattgggcacctactgctgggctggaggaagggatctcacagattacgtccaagtcacaggatgtgagacaggctttggtatggaattttcctatcgatgtaacctttaaaagcactaatccctatggatggcctcagatcgttctgagtgtatatggccctgatgtcttcggaaacgatgtagtacgcggatatggcgctgtccatgtgcccttttcccccggaagacataaaaggacaattccgatgtttgttccagaaagcacctctaaactgcagaagttcacatcctggtttatgggacgcagaccggagtatacggacccaaaggttgtcgcgcagggcgaaggaagagaggtgacgcgagtgagatcccagggtttcgtgacgctccttttcaacgtggtcactaaagacatgcgcaagttaggctacgatacaggccctagcgatacgcagggtgtgcttggccctagccctcctcagagctttccccagtag

SEQ ID NO: 215562 - DNA, 444 bp, synthetic construct
  misc_feature 1..444: note = Description of Artificial Sequence: Synthetic coding sequence
  source 1..444: mol_type = other DNA
atgatgacttccaccgcctctacagctctgtgcacggccagaaccggacctccacagcgggtgtggagacggggttcgcaccgatcacacccacgcgctaagatgtgcggcaaacactggtgcggcacttccccactgatgtcccccctgaaagctcccacacccacagcaggccataggtcatgcagcgcctgcatggatcagatgtgctcaggtacaatgtggttcgaagccatgggaccatgtacctgtccgtcacacctggcaggcaccaaggggccaagtccgtgcctaagccagaatctgagactgaactgtaggtccctccaggcgggatcttggggaggaggcccaagcacacagacacctaggtggtggctgcgcgtgaaggccggaaagccaccatcaggactgtctgtaaaggacagcagcgtatcgaggtag

SEQ ID NO: 215563 - DNA, 528 bp, synthetic construct
  misc_feature 1..528: note = Description of Artificial Sequence: Synthetic coding sequence
  source 1..528: mol_type = other DNA
atggcagaagttcacgtaatcgggcaaattattggagctagcggcttcagtgaaagttcactgttctgcaaatgggggatccacaccggggctgcttggaaattactgtccggcgtgagagaaggacagacgcaagtggatactccgcagatcggggacatggcctactggagccatccaattgacctccacttcgccaccaaaggtcttcagggttggcccagattgcattttcaagtctggagccaggattcttttggacgatgccagttggccggatacggtttttgtcacgtcccttcaagccccggtactcatcagctggcgtgtcccacctggcgccctttgggttcctggagggagcagcttgcccgagcctttgtgggaggtgggccacagttgttgcacggcgatacgatctacagcggagccgatcgataccgtctgcacacggcagccggagggaccgtccatcttgagatcggcctgctgttgcgaaactttgaccgatatggagtggaatgttag

SEQ ID NO: 215564 - DNA, 1452 bp, synthetic construct
  misc_feature 1..1452: note = Description of Artificial Sequence: Synthetic coding sequence
  source 1..1452: mol_type = other DNA
atgactgaagtagagtacacccagctccaacatattctctgcagtcatatggaggcggctgcggacggcgaattggagactcgattgaacagtgcgctgctcgcagccgctggccctggagctggtgccggaggcttcgctgcagggggacagggaggggctgctcctgtgtatcccgttctttgcccctcagcactggccgcagatgccccttgccttggccatatagatttccaggagctccgcatgatgctgctcagcgaagctggcgctgcggagaaaacttctggcggaggggacggtgctcgggctcgcgcagacggggctgctaaagagggagccggagccgcagcagctgctgctggacccgacggtgcacccgaagcaagggctaaacccgctgtgagggtcagattggaggatagattcaattctatacctgccgagcctccccctgccccaagaggccctgagccccctgagcctggcggagcgctgaataatttagtaaccctcattagacatccttctgaacttatgaacgttcccctgcagcagcagaataaatgcaccgctctggttaagaataagaccgcggctacgaccacagccctacagtttacatatccgctatttacgaccaatgcttgcagcacctctgggaactctaatctcagtcagactcagagctcttcaaattcctgctccgtccttgaagcggcaaagcaccaagatataggcttgcccagggccttctctttttgttatcagcaggagatcgaaagcaccaaacagaccctcgggtccagaaataaagtgcttcctgaacaagtttggattaaagtgggggaagcagcgctttgtaaacaagccctgaaacgtaatagaagccgcatgagacagctggacaccaacgtcgagcggcgagcactgggggaaatccagaacgtgggagagggggcaaccgcaacacagggtgcttggcagtctagcgagagcagccaagcaaacctgggcgagcaggcccagagcggccctcagggtggcaggtcccagcgtagggaacggcataaccggatggaacgagataggaggaggaggatacgaatctgttgtgatgaactgaatttgttggttcctttctgtaacgcagagaccgataaggctactacgctacaatggaccaccgctttcctcaaatatatccaagaaaggcacggcgactcgttgaagaaggtattgtcaacaaacagtcggtatgttatgctttggacatgtttcctgaagatgaagtcagccgtggatggaaagaaccctcagcacgcataccgcacagctaatcacaagtggctttgcctgcacgaggccagatctttcgcattcgaggtgagcatctgggctcactttcagctgtttcgggttcgcatccctgaaggatttcttagtatttag

SEQ ID NO: 215565 - DNA, 843 bp, synthetic construct
  misc_feature 1..843: note = Description of Artificial Sequence: Synthetic coding sequence
  source 1..843: mol_type = other DNA
atgggccctaaagacagcgccaagtgccttcatcggggtccccagccctcacactgggctgcaggtgacggcccaactcaggagcgctgtggcccaaggagcctgggtagccccgtgctgggcttagatacttgtagggcctgggatcatgtcgatggacagatcttgggccagttgcggccactaacagaggaggaagaggaagagggcgcaggcgcaacactgtcccgcggtccagccttcccagggatgggctcagaggagttaaggctcgcctcgttttacgactggcccctgaccgcggaggtcccgcctgaactgttggccgctgctggattcttccatactgggcaccaagataaggtgagatgttttttttgttacggtggcttacagtcgtggaagaggggggacgacccctggacagagcatgcaaagtggtttcccagctgtcagtttctgctccgctccaaaggcagagatttcgttcattctgtgcaggagacacattcacagcttttggggtcctgggacccttgggaagagcctgaagatgccgctcccgtggccccttccgtgcctgcctctggttatcccgaactaccaactccacgcagggaggtacagagcgagagcgcacaggagccgggtgcacgtgacgttgaagcccagcttaggcggctgcaggaggagcgtacctgtaaggtgtgcctggaccgggctgtgtccatcgtttttgttccatgtggccaccttgtgtgcgccgagtgcgcgccaggtctgcagctctgtcctatatgccgtgccccagtaagatcccgcgtccgtacattcctgtcttag

SEQ ID NO: 215566 - DNA, 3564 bp, synthetic construct
  misc_feature 1..3564: note = Description of Artificial Sequence: Synthetic coding sequence
  source 1..3564: mol_type = other DNA
atgcggcctcgtggagcagctttcgctgcaggccctccaggggacctgcatctggggacggccatcggcttcgctggagcgatctggagaagccgctctcccgcaatgagcactctgctcgacattaaatccagtgttctccgacaagtgcaggtgtgtccgagtttccggaggaggaccgagcaggatcctggttcagcctccgctgatcctcaggagcctgccacgggagcgtggaagccaggcgacggtgtggagttctttgcgcatatgcgcctgatgctcaaaaagggagaaggtagacagggactcccatgtctggaagttccactccgatcgggctcacccgcacctccggaaccagtggacccaagtcttgggcttcgtgccctggctccagaagaagtggaaatgctgtacgaggaggctctttacaccgtcctctacagagccggaaccatgggccctgatcaagtggacgatgaagaagctctgttgagctacctccagcaggtctttggaacatccctagaagagcacactgaagccattgagcgggtgagaaaagcgaaggcccctacctatgcattgaaggtctctgtgatgcgggcaaagaacctcttggccaaggaccccaatggcttctccgatccctactgtatgctcggaattctgcccgcttcagatgcgacgagggaaccaagagcacagaaagagcagagattcggttttagaaagggatcaaaaagggggggacccctgccagcaaagtgcatccaggtcactgaagtgaaaagctctaccctcaatccggtttggaaggaacatttcttgttcgagattgaggacgtgtcaacagatcagctgcatttggacatctgggatcatgatgatgatgtgtccctcgtggaggcgtgtagaaagctgaacgaggtgatcgggctgaaaggcatgggtagatacttcaaacagatcgtgaagagtgcaagggcaaacggaaccgctggcccaacagaggatcatactgatgactttctcgggtgcctcaatattccagttcgagaggtgcctgtggcaggagtggacagatggtttaagctggaaccgagatcatctgcctcccgagtgcagggacactgtcacttggtgctcaagcttattacaacccagcgggacaccgccatgtcccaacggggtaggtccgggttcctaagccacctgctcctcctgtctcatctgctaaggctcgaacattctgccgaggaaccaaacagctcttcatggcggggagagctgagtacccccgcagccacgatactttgcctgcatggagcacagtcaaatctcagccccctgcagctggccgtgctacactggcaggtcagttcaagacatcatcagacttgcactctagattattcatatttactgggcctcctggaagacatgcaagcacactgggaagaagctccctccctcccacaagagcaggaagagagccttgccgattccttgtcagccttcagtgagttcggcctccagctcctcaggcagctgcgtgactactttcccgctactaacagtaccgcagtccaccgcttagagctactgcttaaatgcttaggcaaattgcagctcttccagccttcctttgaaatctgtccattcgagagcgaattgaatatggacatagcggctgcgctcaaaagaggaaatcgcgagtggtacgatagaattcttaatgacaaatcacctcgcgagcagcccggaccacaacgactgccgggtctcgtggtattggccgacgcggtgtatgatgacctgcagttctgctattctgtgtacgcaagtttgttccactctattctgaatgtggacgtgtttactctcaccttccgtcaactggaaagacttgtcgcggaggaggcatgggtactgaccgaggaactttcacccaagatgactctcgaagtggcatccggcctctttgaactgtatcttacactggctgatctgcagcgtttctgggactccatcccaggaagggactcgcggtccttggcgctagcaggcatccacgcaccttttttgccagccgttaaactatggttccaggtccttagggatcaggccaagtggcggctacagggagctgtcgatatggatactctcgagcccgtggacgcctccagccggcattcatccagcgccgcaacagcgggactgtgcttgagccatatccaagaactgtgggtcaggctcgcctggcccgaccccgctcaagctcaggggctgggtactcaattgggccaagacgtttgtgaagcaacccttttttacaccgagctgcttcggaagaaagtggacactcagcccggagctgcgggagaagccgtctctgaggccctatgcgtcgtactgaataacgtcgaactggtgcgaaaagccgcagggcaggccctgaagggccttgcgtggccagaaggtgccactggtccagaaggggtcctgcctcggccacttctgtcatgtacccaggcgttggacgatgatctccagagagaggcccatacagtgacagcccatctcaccagtaaaatggtgggcgacattagaaaatacgtacagcacatcagtctgtcacccgacagtatccagaacgatgaggcggtagccccactaatgaagtacctagacgaaaagctggcgttgctcaatgcgagcctggtgaaagggaatttatctcgcgtcctcgaagctctgtgggagctcttactgcaggcaatactccaggccctgggagcaaatagagacgtatcggccgatttttactcccggttccatttcactctcgaggctctggtcagctttttccatgccgaagggcagggactcccgctcgagagcttaagagacggctcatataagcgattaaaggaggagctgagactccacaaatgttctacacgcgagtgtattgagcagttttatctggacaaactgaagcaaagaacacttgaacagaaccggttcgggcgactgtcagtaaggtgtcattacgaggccgcagaacagagattggctgtggaagtgctacatgccgcagatttgctgcctctcgatgctaatggtctctctgatccctttgtcatcgtggaattaggccctccacacctttttcccctcgtgcgatctcagagaacgcaggtgaaaacacgcaccctacacccagtttacgatgaattgttctactttagcgtgccagctgaagcatgcaggcgccgagctgcatgtgtcctgtttactgtaatggaccacgattggctaagtaccaatgatttcgccggtgaggccgctctgggcctggggggagtaaccggcgttgctcggccacaagttggcggaggcgctagagccggtcaacccgtgacgctgcacttatgtcgcccacgggctcaggttagaagcgccctgcgcaggttggagggacggaccagcaaggaggcccaggaattcgtcaaaaagctgaaagaattggaaaagtgtatggaggcagatccctag

SEQ ID NO: 215567 - DNA, 3510 bp, synthetic construct
  misc_feature 1..3510: note = Description of Artificial Sequence: Synthetic coding sequence
  source 1..3510: mol_type = other DNA
atgtccactctgttagatattaagtcatctgtactccggcaagtgcaggtttgccctagcttccgccgtcggactgagcaggaccctgggtccgccagtgctgacccccaggagccagccacaggcgcttggaagccaggggacggcgttgaatttttcgctcatatgaggctgatgctcaagaagggcgagggtcgccagggtttaccgtgcctggaggcttggggctcaccatgccgccagtctccccaccccggaccacacactcaggtgcccctccgcagtgggagccctgccccaccagaaccagtggacccatcacttggcttgcgagccctcgctccagaagaagttgaaatgctctacgaggaagctctctataccgtgctgtatagagcagggactatgggtccagatcaggtcgacgacgaagaggctcttctgtcgtatctacagcaggtgttcggcacatctttggaagagcatactgaggcaatcgagcgagtcaggaaggcaaaagctcctacttatgccctgaaggtaagcgtgatgagagcaaaaaatctgctggctaaggatccaaatggcttcagcgacccttactgcatgctgggcattttacccgctagcgacgcgacgagggagccacgggcacaaaaggagcagcggttcgggtttagaaaaggaagcaagcgcggaggacctctcccggctaagtgcatacaggtgacagaagtcaagtcctctactctcaacccagtctggaaggagcacttcctgttcgagatcgaagatgtttctaccgatcagttgcacctcgacatctgggatcacgatgatgacgtgtcactggtggaggcttgccggaagttaaatgaagtgattggcctgaaagggatgggcaggtattttaagcagatcgttaaaagtgcaagggcaaacgggactgctggacccacagaggaccacacggacgattttttgggttgtctaaacattccggtgcgggaggttcctgtcgccggtgtcgatcggtggtttaagctggagccacgtagttcggcaagcagggtgcagggccattgtcatctggtgcttaaactcattaccacacaacgagacaccgctatgtctcaaagagggcgatcaggattcctctcgcacctgttgctattgtcacatcttctgagattggagcattctgccgaggagcccaacagcagctcatggagaggtgagctgtcaaccccagccgctacaatcttatgcctccacggcgctcagagtaatctgtccccactgcagctcgcagtgcttcattggcaagtgtcgtcccggcaccaccagacctgtaccctcgattattcttacctacttggtcttttggaagacatgcaggcccattgggaggaggccccatccctgccccaggagcaggaagaatctctggccgacagcttgagcgcttttagcgagtttggcctccaactgctccggcagttgcgcgattatttcccagcaaccaactctaccgccgtgcaccgcctggagctgctgctcaagtgcctgggtaagctgcagctgttccagccatcatttgagatttgtcctttcgaatccgagctaaacatggacattgcggctgcactgaagagaggcaatcgagagtggtatgataggatcttgaacgacaaatcacctagagaacagcctggacctcaaaggttgcccggtcttgttgtactggccgatgcagtctatgatgacctgcagttctgttacagcgtgtacgcctccctgttccacagcatcctgaacgtggatgtgttcactctgacttttaggcagctagaaagactcgttgccgaggaagcctgggttctgaccgaagagctctctcctaaaatgaccctggaagtcgcttcagggctatttgaactgtatctaactctggcagatctacagagattctgggactcgataccgggtagggacagtcgttctctagcactcgccggtatccacgctcctttcctacctgcagtgaaactatggtttcaggtgttaagggatcaggcaaagtggagacttcaaggcgcagttgacatggatactcttgagccagtcgacgcaagttcccgtcactccagtagcgctgcaacagcagggctttgcctgagtcatatccaggagttgtgggttaggctcgcctggcccgaccccgctcaggcacaggggttggggactcagcttgggcaagacgtctgcgaggctactttgttctacaccgagctcctgaggaagaaagtggatacccaaccaggggctgcgggagaagcggtatcagaagctctgtgtgtggtcctgaacaacgttgaactcgtacggaaggccgcaggtcaggctctaaaagggcttgcatggccggaaggtgccacagggccagaaggggtgctgcccaggccattactgtcctgcactcaggctctggacgacgacctgcagcgtgaagcgcacaccgtgaccgcccacttgaccagcaagatggtcggtgatattcgaaaatacgttcagcacatctctctgtcacccgattctatccaaaatgacgaagcggtcgcacccctgatgaaatatctcgacgaaaagttagcgctgctcaacgccagtctcgttaaaggcaacttgagcagggtgctggaagccctgtgggaacttctgctccaggccatcctccaggccctcggcgctaatcgcgatgtatctgccgatttttatagccgcttccatttcactcttgaggccttggtttcattcttccatgcggaaggacaggggctccctctggagagcctgcgcgacggttcttataagagactgaaagaagagcttcgtcttcacaagtgtagcacgagagaatgtattgagcagttttacctggataaactgaagcaaagaaccctggagcaaaacaggttcggacggctcagcgtgcgctgtcactatgaagcagcggagcagagattggccgttgaagtgctgcatgctgccgatcttttgcctcttgatgctaatgggctgtcagatccatttgtgattgtggaattgggcccaccacatctgtttccgctggtgaggagccagcgcacccaagtcaagacaagaactcttcaccctgtttacgatgagctcttttacttctcagtacccgctgaagcttgtcgtcggagagccgcatgtgttctttttaccgtgatggaccacgactggctgtcaaccaatgacttcgcgggtgaagcagcgctcggcctcggaggcgttacaggggtcgccaggcctcaggtcgggggaggagccagagccggacagcccgtcacactacatttgtgcaggcccagggcccaggtccgtagcgcactccgtcgattagagggacgtacctctaaggaggcccaggaattcgtgaaaaaactaaaggaattggagaagtgcatggaggctgacccatag

SEQ ID NO: 215568 - DNA, 3510 bp, synthetic construct
  misc_feature 1..3510: note = Description of Artificial Sequence: Synthetic coding sequence
  source 1..3510: mol_type = other DNA
atgagtacactgctcgacataaaaagctccgtcctccgccaagtgcaggtctgccccagctttcgcaggagaacggaacaggaccccggttcggcatccgcagacccacaggagccagctaccggtgcttggaaaccgggagacggagttgagttttttgcccatatgcgcctaatgctcaagaaaggggagggacgtcaagggttaccctgcctagaagcctggggcagcccatgccgacaaagtccccacccgggtccacatacacaggtcccattaaggtccggaagtcccgcaccgccagagcctgtggatccatccctgggcctccgcgcactagctccagaagaggtggagatgctgtacgaagaagctctgtacactgtgctgtatcgagcaggcacaatgggacccgatcaggttgacgatgaagaagcattgttaagctatctccagcaggtgttcggcacatcactcgaagagcacactgaggcaatcgagcgggtgagaaaggctaaggcaccaacctacgctttgaaggtgagtgtcatgagggccaagaacctgctggctaaagatcctaatggcttttccgatccttactgtatgttgggcatcctgcccgcttccgacgccacacgggagcccagggcgcaaaaggagcaacgtttcgggttccggaagggctccaaacgcggaggccctctgcctgccaagtgcatccaggtgaccgaagttaaatcaagcactctcaaccccgtttggaaagagcatttcttgtttgagattgaggacgtgtcaactgaccagctgcacctcgatatttgggatcacgacgacgatgtctcacttgtggaggcctgcaggaagcttaacgaagttatcgggctgaagggaatgggacggtatttcaagcagatcgtgaaatcggcgcgtgccaatgggacagccggacctactgaggaccatacagacgactttctcgggtgcctgaacatccctgtgcgcgaagtacccgtggccggtgttgatcgctggttcaagcttgaacccaggtcctctgccagccgggtgcaaggacattgccatctggtgctgaagttaatcactactcagagggacaccgccatgtctcagagggggcgaagcgggttccttagtcatttgctgctgctcagtcatctgctccgcctggagcatagcgctgaggagcctaattccagctcttggaggggagagctgtccacacctgccgcaactatcctatgtctgcatggggcacagtcaaaccttagcccactgcaactggcggtcctgcattggcaagtgtccagccgccatcaccaaacttgcacgctcgattactcctaccttctagggctacttgaagatatgcaagctcattgggaggaggccccaagtctaccgcaggagcaggaggaatcactggctgatagcctgagtgcattttcggaattcggattgcagctgctgcgccaactccgcgattacttcccagccacaaacagcacggctgtgcatcggctggagttactcctaaaatgcctcgggaagttacagctgtttcagccatcctttgaaatctgcccattcgagtctgagctgaacatggatattgccgcagcgctgaagcgcggaaaccgcgaatggtacgataggattcttaacgataagagcccgcgagaacagcccggaccacagcggctgcctggactggtagtgctagcggatgcagtctacgatgatctccagttctgctactcggtgtatgctagtctgttccattcaatcctaaatgtggatgtgttcacactgacgttccgtcagttggaaaggctggtggccgaggaagcatgggtgctgaccgaagaactgtctcccaaaatgaccttggaggtagcgtcaggactttttgagttgtatctcaccctggcagaccttcagagattctgggacagcatccccggtcgcgactctcgtagcttggccctggcgggaatccacgctccttttctccccgctgtgaaactctggttccaggtgttgcgggaccaggccaagtggcggctgcagggagcagttgacatggataccctcgagcctgttgatgcctcctcgagacatagttcttcagcagcaaccgctgggctgtgtctgtcgcatattcaggagctgtgggtccgcctcgcatggcccgaccctgctcaagctcaagggctggggacacagctcggccaggatgtatgtgaagcaaccctcttctataccgagctgttgaggaagaaggtggacactcagcctggagcggcaggcgaagcagtgtctgaggccttatgcgttgtgctgaataatgtcgagcttgttcgcaaagctgccggtcaggctctgaaggggctggcctggcccgaaggcgcaaccggacctgaaggggtattgcccaggccgcttttgtcatgcacccaggctctggatgacgacctgcagagggaagcacatacagttaccgcccacttgactagcaagatggtaggcgatattcgtaagtatgtgcagcacatttccctttccccagatagtatccagaacgatgaggctgtggccccactaatgaagtatctagatgagaaactagcattactcaacgccagccttgtaaagggcaacctcagtcgtgtcctcgaagctctgtgggagctcttgttgcaggccatcctccaagccctgggcgcaaacagagatgttagcgcagacttctattctagattccattttaccctggaagctctcgtttcattttttcacgccgagggccagggactaccacttgagagccttagagacgggagctacaagcggctgaaggaggagctgagactgcataagtgtagtaccagggagtgcattgaacagttttacctggataagctaaagcagcggactttggaacagaataggttcggccgactctccgtccgctgtcactatgaggctgcagaacagagactcgcagtagaggtacttcatgccgctgacttactgcccctagatgctaacgggctgagtgaccctttcgtcattgtggaacttggacctccacacctttttccactggttaggtcccagaggacccaggtcaagaccaggaccctgcaccctgtttatgatgaactgttttattttagcgtaccagccgaggcttgtcggagaagggcggcatgcgtgctctttacagtgatggaccacgactggttgtccaccaacgactttgctggagaggctgctctggggctcgggggagtgactggagtggctcgaccacaggtgggcggaggggcaagggctgggcagccagtgacactgcatctgtgcaggccgagggcccaggtgcggagtgccctacgacgccttgagggtagaacaagtaaagaggcccaggaattcgtcaagaaactgaaagaactcgagaagtgtatggaggcagatccatag

SEQ ID NO: 215569 - DNA, 3351 bp, synthetic construct
  misc_feature 1..3351: note = Description of Artificial Sequence: Synthetic coding sequence
  source 1..3351: mol_type = other DNA
atgtctactctgctggacataaaaagcagtgtgctgagacaggtgcaggtgtgcccctccttccgcaggagaacagagcaagatccagggtctgcaagtgccgatccacaggagcctgcaacgggcgcttggaagccaggggacggcgttgagttttttgcgcacatgagacttatgctaaaaaaaggcgagggaagacagggtctgccatgcctggaagtgcccctgaggagcggtagtcctgcgccacctgaacctgtggatccatcgctagggctgagagctctggcccctgaagaggtagagatgctctacgaagaagccctttacacagtgctctaccgggcaggaacaatgggccctgatcaagttgacgatgaagaggcactgttgtcatacctccagcaggtatttgggacgtctctcgaagaacatacggaggcaattgagcgcgtccgcaaggctaaggccccaacgtatgcgttgaaggtgagcgtgatgagagccaaaaatctgctggcgaaggacccaaacggcttctcggatccttactgtatgctcggcatccttccagcaagtgacgcaactcgggagccaagagctcagaaggagcagcgttttggcttcagaaaggggtccaagcgtggtggtcccttacccgctaagtgcatacaagtgaccgaagtcaagtcctcaactctaaatccagtatggaaagaacactttttgtttgagattgaggatgtgagcaccgaccagttacatttggacatttgggatcacgatgacgatgtgagcctcgtcgaagcctgcagaaaactgaacgaggtgatcggcctgaaaggtatgggacgctatttcaagcaaatcgtgaagtcagcaagggcaaacgggaccgccggacctaccgaagaccatactgacgacttcctaggatgtctgaatataccagtgagaagagataccgcaatgtcccagagaggaagatcaggtttcctgtctcatctgctcttattgagtcatctgttgcgcctggagcactccgctgaagagccgaatagcagcagctggcgcggagagctgtcaacccctgctgcaacaatcctttgcttacatggagcgcaaagtaatctaagtccacttcagttggccgtgctccactggcaggtgtcatcgagacatcaccagacctgcaccctggactactcgtacttgctggggctgcttgaggacatgcaagcgcattgggaggaggcaccatcactgccgcaggaacaggaggaatcgctggctgatagtctgtctgcattttccgagtttggcctccagctgctaagacaactccgggattacttccccgctaccaattccacagccgttcacagactagaacttcttctgaagtgtttggggaaactgcaactattccagccctcattcgagatctgtccttttgagagtgagctcaacatggacattgcagccgctctcaagcggggtaaccgggagtggtatgatcgaatcttgaatgacaagagtcctcgagagcagcctgggcctcaacgactgcccggtctggtcgtgttggctgacgctgtgtacgacgacctacagttctgctattctgtgtacgcttctcttttccactcaatcctgaatgtcgacgtgtttaccctgacgtttaggcagttagagcgcctggtggctgaagaggcctgggtattgaccgaggaactgtctcccaagatgacccttgaagttgcatccgggttgtttgaactttatttgaccctggcagacttgcaaagattttgggactctatcccagggagagattctaggtccctcgcattagcagggattcatgctccattcctacccgcagtgaaactctggtttcaggtgctgcgtgaccaggctaaatggcgccttcaaggcgcagttgacatggacaccctggagcccgttgatgctagctcccggcattcatccagcgccgctaccgcaggcctatgcctctcgcatatccaggaactatgggtgcggctggcctggcccgatccagcccaggcgcaaggactcggcacgcaacttggtcaagacgtctgcgaggccacccttttctataccgagttgttgaggaagaaagtggacacgcagccaggggcagcaggcgaggcagtgagcgaagcgctatgcgttgttctgaacaacgtcgagctcgtgagaaaagctgcagggcaggctctgaagggacttgcttggccagaaggtgcgacagggccagaaggcgtactgccacgcccacttttgtcctgcacccaagcgttggacgatgatctccagcgcgaagcccatacagtcacagctcatcttaccagtaaaatggtgggagatatcagaaagtatgtgcagcatatttcattaagccctgattctattcagaacgacgaagccgtggccccactcatgaaataccttgacgagaagttggccctgctgaatgctagcctggtgaaaggaaatttgagtagggtgctagaagctctttgggaacttctgctccaggcaatcctccaggcgctaggcgctaatagagatgtgtccgccgacttttactcgcggttccactttaccttagaggctcttgtgtcatttttccacgccgagggccaggggctgccactcgaatccctgcgtgatgggagctacaagcgcctcaaggaggagctccgtctgcacaagtgctccacaagagagtgtatcgaacaattctacttggacaaactcaagcaacggaccctcgagcagaaccgattcggcagactgagcgtgcgctgccactatgaagccgctgaacaaagactggccgtcgaagtgctgcacgctgcagacctgcttccactcgacgcgaatggtttatcagacccctttgtcattgtcgaactcggtcccccacacttgttcccattagtccgctcccaaaggacccaggtcaaaacccggaccctgcatcctgtctacgacgagctgttctacttctcagttcccgctgaggcctgtcggaggcgagcagcctgcgtactttttactgtgatggatcatgactggctgtcgactaatgacttcgctggggaagctgctcttggccttggaggcgtaaccggcgtggctagacctcaggttggcggaggtgcacgcgctgggcagccagtcacactgcacctttgccgcccaagggcgcaagtcagaagcgcgttgcgtcgtctggagggcagaacctctaaggaagcccaagaattcgtcaaaaaattgaaggagctagaaaaatgcatggaagccgatccttag

SEQ ID NO: 215570 - DNA, 3459 bp, synthetic construct
  misc_feature 1..3459: note = Description of Artificial Sequence: Synthetic coding sequence
  source 1..3459: mol_type = other DNA
atgtcgactctgctagacatcaaatccagcgtactgcgacaggtgcaggtgtgtccgtcttttcggagaaggactgaacaggaccccggaagcgcctctgccgatccccaggagccggcaaccggagcatggaagcctggagatggggtggagttcttcgcccatatgagactcatgttgaaaaaaggggaagggaggcaaggactgccctgcctggaggtgccacttcggtctggttctccagcgcctccagaacccgtggatccttccttaggcctgcgggcattggcccctgaggaagttgagatgctctacgaagaggctttgtacactgtactctacagggctggcaccatgggcccagaccaggtcgatgatgaagaggccctcctcagctatttgcagcaagtgttcgggacctccttggaagaacacaccgaggcgattgagcgcgtacggaaggcaaaggcacctacatacgctctgaaggtgagtgtgatgcgcgcaaagaacttgctggcgaaagaccccaacggcttttccgacccatattgcatgctgggaattctgcctgcaagtgatgccacgcgagaaccgagggctcaaaaggagcaaaggtttgggtttaggaaaggcagtaagcgtggcggtcctcttcctgcaaagtgtattcaggtcaccgaagttaaatcaagcaccctgaatccggtttggaaagagcactttctgttcgagatcgaggacgtttctaccgaccagctgcacctggatatctgggaccacgacgatgatgtaagtctggttgaagcatgtcgcaagttaaatgaggtcatcgggctcaagggcatggggcgatactttaagcagatcgtcaaatccgcgagagctaacggaactgctggacccactgaggaccatactgatgatttcctgggctgtctgaacatccccgtcagggaggtgccagtggcaggcgtcgaccgctggttcaagctcgagccacgctccagcgcaagccgtgttcaggggcattgccatctggttctgaaactgatcactacacagagggataccgcaatgtcccaaagggggaggtcggggttcctaagccatcttctgctcctgtctcatttgctgcgactagagcactccgccgaggagcccaactcttctagctggaggggcgagctgtccacccctgccgcaactattctgtgcctgcacggagctcagagtaatctgtctcctcttcaactggccgtgcttcactggcaggtgtcgtcccgacaccatcagacgtgcacgcttgactattcttaccttctcggactcctggaggatatgcaagcacactgggaggaggctccatctctgccgcaggagcaggaggagagccttgccgactctctgtcagcctttagcgaattcggtctacaactgctgaggcagctgagagattatttccccgcaacgaacagcactgcagtgcataggctcgagttgctcctgaagtgcttaggaaaactacagctgttccagccatctttcgagatctgcccgtttgagagtgagttgaacatggacattgcggcagccctcaagaggggtaatcgcgagtggtatgataggatcctgaatgacaaatcccctagagagcagccaggccctcaaagactgcccggactcgtggtgctcgccgacgctgtctacgatgacctgcagttctgctactccgtctacgcgtcgctgttccattctatactgaatgtggacgtgttcaccctgactttcaggcaactggagcgactagtggctgaagaggcctgggtgcttactgaggaattgtctccgaaaatgacactggaagtggcgagcggcctgtttgagctgtatctaactctggctgacctccaacgcttctgggattccattcctgggagagattctcgctctctcgcccttgccggaattcatgcaccgttccttccagcagtgaagctgtggtttcaagtgttgagagatcaggccaagtggcggttgcagggcgcagtggatatggatacccttgagcccgtggacgcctcttcccgacattctagctctgctgccaccgccggactttgccttagccacatccaggagctgtgggtgcgcctcgcctggccagatccagcacaggcacagggcctggggacacagctagggcaggacgtttgcgaggcgacactgttctataccgaactcctgcgcaagaaagtggatactcagcccggagctgctggcgaggccgtgagcgaagcgctgtgcgtggtcctcaataacgtggagctggtgcgtaaggctgccggtcaggcgcttaagggactggcctggccggagggggcaactggacctgagggggtcctcccgagaccattgctttcttgcacccaagctctagatgatgacctacagcgagaggctcacactgttactgcccacttgacaagtaaaatggttggagatatccgtaagtatgttcagcacatatcactgagccctgattcgatccagaacgatgaggccgtagcccctctcatgaagtacttggatgagaagttggcactcctcaatgcaagcctggtaaaaggcaatctttctcgagtactcgaggcgctgtgggagttgcttctgcaggccatattgcaggccttgggagccaatagggacgtgtctgccgatttctacagtcggttccattttacactcgaggcgttggtgagttttttccatgccgagggacaaggccttcccttggagtctttgagagacggtagctataagcgcctcaaggaggagctgaggctccataagtgctccaccagggagtgcatagagcagttctatctggataagctgaagcagagaacccttgagcagaatagatttggcagactatcagttagatgccattacgaagctgctgagcagagactcgcagtggaggtcctacatgcagccgacctattgcctctagatgctaacggcctgagtgaccctttcgtgattgtagagctgggaccccctcatctattcccacttgtccgatctcagaggacccaggtgaagacacggactttgcatcctgtgtatgatgagctgttctattttagtgtgcctgctgaagcctgcagaaggcgtgccgcatgtgtcttgtttaccgtaatggaccatgactggctgtctactaatgacttcgctggcgaggccgcattgggactcggtggagtaaccggggtagctcggcctcaagtgggaggaggagcaagagccggtcaacccgtaacacttcatctgtgccgacctagagcccaagtccgatcggcccttcggaggctggaagggcgaacgtcgaaagaggcacaggaatttgttaaaaaattaaaggagttggagaagtgcatggaggccgatccctag

SEQ ID NO: 215571 - DNA, 537 bp, synthetic construct
  misc_feature 1..537: note = Description of Artificial Sequence: Synthetic coding sequence
  source 1..537: mol_type = other DNA
atgtcacaacgtggtagaagcgggttcttgtctcacctcctccttctatcacacctgctcaggctggaacattctgccgaagagccaaactcctcctcctggcgaggcgagctgtcaactcccgcagcaactatactttgccttcacggagctcaatctaacctgtcccccctgcagttagcagtcctgcactggcaggtctcctccagacaccatcagacttgtactctcgactattcctatctactcgggttactggaagacatgcaggcccattgggaagaagctccctctctgccacaggagcaggaggagtcacttgcagacagtctgtccgcctttagcgagttcggtcttcaactcctccgtcaactccgcgactattttccagccaccaactccaccgccgtccacagactggaactccttctgaagtgcctcggaaagctccagctatttcagccaagcttcgaaatatgcccccgagtcggggcagagcatggtcactgctgcgggcctgaagaaaggcagccctag

SEQ ID NO: 215572 - DNA, 1782 bp, synthetic construct
  misc_feature 1..1782: note = Description of Artificial Sequence: Synthetic coding sequence
  source 1..1782: mol_type = other DNA
atggcggctgcgtcctcgtccgacagtgacgcttgtggtgctgaaagcaacgaggccaatagtaagtggctcgacgcccactacgatccgatggctaacatccacacattcagcgcctgccttgcactggccgacctgcatggcgacggcgaatacaagctcgttgtcggggatctgggccctgggggacagcagcccagactgaaagtcctcaaaggacccctggtgatgaccgaatcgcctctgccagccctgcctgctgctgccgcaactttccttatggaacagcacgagcctagaactcctgctctcgctctggcatctggcccttgcgtctacgtgtataagaatctgcgtccgtatttcaagttctccctgcctcagcttccccctaatccactcgagcaagatctgtggaaccaggccaaagaggatcggatcgatcccttaacactgaaagaaatgctggaatccatccgtgaaacagcggaggaaccactaagcatccagtccctgagattccttcagttggagctgtcggagatggaggcattcgtaaatcagcacaagagcaactctattaagcggcagaccgtcatcaccactatgacaacgctaaagaagaatctcgccgacgaggacgcagtgagttgtctggtactgggaaccgaaaacaaggagcttctggtcttggaccctgaagccttcactattttggctaaaatgtcactgcccagtgtacctgtgttcctggaggtaagcggacagttcgatgtcgagtttcgactcgcggctgcatgtcggaacgggaatatctacatcctgcggagggacagcaagcacccgaaatattgtattgagctgagcgcccagcctgtcggattaatcagggtccataaagttctggtggttgggtcaactcaggactctttgcatgggttcacccataaggggaagaagctatggaccgtgcagatgcccgctgccattctgactatgaatcttctggagcaacacagcaggggtctccaggccgttatggcgggactcgccaacggcgaggtgcggatctaccgggacaaggcgctgctgaacgtaatacacaccccggatgcggttacaagtctgtgctttgggcgttatgggagagaggacaacactctgattatgacaacgcggggtgggggtttgatcatcaagattctgaaacgaaccgcagttttcgttgagggagggtctgaagtggggccaccaccagcccaggccatgaagctgaatgttcctcgcaaaacacggctgtacgtagatcagaccctccgggagcgcgaagctgggactgcgatgcatcgggcatttcaaacagacctatacctccttcggctgcgggctgccagggcctatttgcaggcactggagtctagtttgtctccgcttagcaccaccgcgcgtgagcctttgaagcttcatgccgtcgtccagggtttagggcctactttcaagcttaccctgcacttgcagaacacatccacaacccggcctgtgctgggtctgcttgtgtgttttctctacaacgaagctctttacagcctccccagggcttttttcaaagtgcctctgctggtgccaggcctcaactaccctctcgagacttttgtggagtctctcagtaacaagggcatttccgacattatcaaggtactcgtgctgagggaaggacagtcagctcctctgttgtcagcccacgtcaatatgcccggtagcgaggggctggccgcagcctag

SEQ ID NO: 215573 - DNA, 498 bp, synthetic construct
  misc_feature 1..498: note = Description of Artificial Sequence: Synthetic coding sequence
  source 1..498: mol_type = other DNA
atgtccccaggcccacagctttggcacctgttgcaggccttagtgtctatgtgcataagaatttctgacccgacctcttcgagcgcttgtccgaattgcctccagatattgtggaataaaaccttcgggaccaggccaaaaagggaaaccgcagaagagccacttagtattcaatcgttgaggttcctgcagcttgaactgtcagagatggaggcatttgtgaaccagcataagtccaacagtatcaaaaggcagaccgtgattacaacaatgactacgttaaagaagaatctggcggatgaagatgccgtctcgtgcctcgtcctggggactgaaaataaagaactcttggtactagaccctgaagcgtttactattctggcgaagatgtctcttccctccgtccccgttttcctggaggtgtctggccagttcgacgtggagtttaggctggcagcagcgtgtagaaatggcaatatctacatcttgaggagatag

SEQ ID NO: 215574 - DNA, 2172 bp, synthetic construct
  misc_feature 1..2172: note = Description of Artificial Sequence: Synthetic coding sequence
  source 1..2172: mol_type = other DNA
atgctttcaagtatggctgcagccggttccgtgaaggctgctctgcaggtagctgaagtgctcgaagctatagtgagctgctgtgtgggccctgagggacggcaggtgctctgcactaaaccaactggtgaggtgttgctcagccgcaacggagggaggctgctcgaggccttgcaccttgagcaccccatcgctaggatgattgtggactgcgtttcaagccaccttaagaagacaggtgacggcgctaagacattcatcatctttctgtgtcatctgctgagaggacttcatgctatcaccgatcgcgagaaggaccctctgatgtgcgaaaatatccagactcacggacgacattggaaaaactgcagccgctggaagttcatatcccaggccctccttacattccagacccagatactcgatgggatcatggaccaatacctcagtcggcattttcttagtattttctcctcagccaaagaacgaaccctatgtcgtagctccttggagctcctcctggaggcttatttttgcggtcgagtcggcaggaataaccataaattcatcagtcagctgatgtgtgactattttttcaaatgtatgacttgcaagagtggaatcggcgtctttgaattggtggatgaccactttgtcgagctgaatgtcggggtgacaggcctgcccgtaagtgattctcgcatcattgccggattagtcttgcagaaggattttagcgtttaccgtccggcagatggtgacatgcgaatggtgattgttactgagactatccagccattattcagcacctccgggtccgaatttatcctgaacagtgaggcccagttccaaacctctcaattctggatcatggagaaaaccaaggctatcatgaagcacttgcactcacagaacgttaaactgcttatttccagcgttaagcagccagacttggtgtcatactatgctggggtgaacggcatatctgttgttgaatgcctgtcctccgaggaggtgtctctcatcaggcgcattataggactgagtccgtttgttccaccacaggctttttctcagtgcgagatccctaatacagctctggtgaagttttgcaaaccactgattctccgtagcaagagatatgttcatctgggactcatttcaacatgtgccttcattcctcactccattgtgctttgcggtccagtgcacggcttaattgaacagcatgaggacgcgctgcacggcgcacttaagatgctgagacagctcttcaaggacctggatcttaattatatgacccagactaatgaccagaacggaacctcatccctctttatttacaagaattctggagagtcctatcaggcaccggatcctggtaatggtagtatccagcggccatatcaggatacggtcgccgagaataaggacgccctcgaaaaaacacagacatatctaaaggtccacagcaatctggttattcccgatgttgagctggaaacttacattccctactctacccccacactgacaccgaccgacacatttcagactgtagagaccctgacctgtctgagcctggaaaggaacaggttaacagattactatgagcctctcctgaaaaacaattccaccgcgtactccacgcgcggtaacagaatcgagatctcatacgaaaacctacaggtgaccaacataactaggaaaggctccatgctccccgtctcttgcaagttgcccaacatgggaacttcccagtcatatctcagcagttccatgcccgcaggctgtgtccttcctgtcgggggtaactttgagatcctgctccattattacctcttgaattatgcaaaaaaatgtcaccagtcggaagagacaatggtaagcatgattattgctaacgccctgctcggcattcctaaagttttatataagagcaaaaccgggaaatattcatttcctcacacgtatataagggcggtgcacgcgctccagacgaatcagcctttagtgtccagccaaacaggcctcgagtccgtgatggggaagtaccaattattgacgtccgtgctgcagtgcttaaccaagattttaacgatcgatatggtcattactgtcaagaggcatccccaaaaggtgcacaaccaggattccgaagatgaattatag

SEQ ID NO: 215575 - DNA, 2133 bp, synthetic construct
  misc_feature 1..2133: note = Description of Artificial Sequence: Synthetic coding sequence
  source 1..2133: mol_type = other DNA
atggtcatggcctgtcgcgtggtgaataagcgtcgtcatatgggcctgcagcaattatcaagctttgctgagacgggtcggacattcctgggaccactaaagtctagcaagttcataatcgacgaggagtgtcacgagtctgtcctgattagcagcaccgtccggctgttggagtcgctcgatctgacatctgccgtgggccagctactcaacgaagcagtccaagcacagaataatacatacaggaccggaatctctaccctgctgtttctggtgggcgcttggagcagtgcggtcgaggaatgtctgcatcttggggttcctatttccattattgtcagcgtgatgtctgaggggctgaatttctgttcagaagaggtggtatctctccatgtccccgttcacaacattttcgattgcatggattccaccaagacgttctcccagctagaaacattttctgttagcttatgtccctttttgcaggtccctagcgacactgatttgatagaagagctgcacggactgaaagacgtggcgtctcagaccctgactatctccaatctgagcggaagacccttaaagtcttacgaattgttcaaacctcagactaaagtcgaggccgacaataacactagccgcaccctaaaaaattcactgttggctgacacctgttgtaggcagtcaatcttgattcacagtcgacacttcaatcgcaccgataacacagagggcgtgagcaagccagatgggtttcaggagcatgtgacggcgacccataaaacctaccgctgcaatgatttggtggagcttgctgtcggtttgtctcatggagaccacagctcaatgaaactcgtggaggaagccgtgcagctgcagtaccagaatgcatgcgtccagcaggggaactgcacaaaacctttcatgttcgacattagtagaatctttacttgctgtctgcctggacttcccgagacctcctcctgcgtgtgcccaggctacataaccgtcgtgagtgtaagtaataatcctgtgatcaaggaactgcagaaccagcctgtacgaatagtgctgattgagggggatctcaccgaaaactatcgccatttgggcttcaacaaatccgccaatatcaaaactgttcttgactccatgcgcctccaagaagactcctccgaagaattatgggccaaccacgtgctccaagtccttattcagtttaaggtgaacctggtgctggtgcagggcaacgtgtccgaacgcttgatcgaaaagtgtattaatagcaagagactggtcattggtagtgtcaatggatccgtgatgcaagcattcgcagaggccgcaggggcagtgcaggtggcatacataacccaggttaatgaagactgcgtgggcgacggtgtctgcgtgactttctggaggtctagtcccctggatgtggtggatcgtaataacaggatagcgatcttactcaagactgaggggataaacctggtgacagctgtgctgaccaatccagtgactgctcagatgcagatcaaggaggaccggttctggacatgtgcctataggctttattacgccctgaaggaggagaaagtattcctgggaggcggagccgtggaattcctctgcctgtcttgtcttcatatcctcgccgagcagtcactgaaaaaagagaatcatgcttgtagtgggtggctgcataacacaagtagttggctggcatcttcactcgctatttaccgccctacagtgctgaagttccttgctaatgggtggcaaaaatatctgtcgacactgttatacaataccgccaactattcatcggagttcgaagcttccacctatattcagcatcacctgcaaaatgcaaccgacagcggcagtccatcttcatacatactcaacgagtactcaaaacttaactcccggatttttaactctgacatctcaaataaattagaacaaattcccagagtatacgatgtcgtcactcccaagatcgaggcctggaggcgagccctagacctggtccttctggtgctccagaccgattctgaaattatcaccggacatgggcatacacaaatcaatagccaggagttaacaggctttctttttctgtag

SEQ ID NO: 215576 - DNA, 576 bp, synthetic construct
  misc_feature 1..576: note = Description of Artificial Sequence: Synthetic coding sequence
  source 1..576: mol_type = other DNA
atggttatggcctgccgcgtggtgaataagagacgtcacatgggactacagcaactcagcagcttcgccgaaaccggacgcacgttcctaggccctctgaagtcaagcaaatttataattgacgaggaatgccatgagtcggttctgatttcttctacagtgagactgctggagagtctcgatctgacttctgccgtggggcagctattgaatgaagcagtccaggcccagaacaacacatacagaaccggcatcagcacgctcctcttcttggtgggggcatggtccagtgccgtagaggagtgtctgcatttaggcgtacctatctcgatcattgtgtccgtcatgtccgagggtctgaatttttgtagcgaagaggtggtctccctccacgtgccagttcacaacattttcgactgcatggatagcacaaaaacgttttctcagttagagacattttcagtctctctgtgcccctttcttcaagtgccaagcgatactgacctgattgaggagctacatggcctgaaggatgtggcatctcagacattaacgattagtaacctttccggctag

SEQ ID NO: 215577 - DNA, 2133 bp, synthetic construct
  misc_feature 1..2133: note = Description of Artificial Sequence: Synthetic coding sequence
  source 1..2133: mol_type = other DNA
atggtcatggcttgcagggtcgttaacaagcggagacacatgggtttacagcaattaagctcgttcgctgaaacaggccgaacatttctcggaccactgaagagttctaagttcattatcgacgaggagtgccatgagtcagtgctcatttcttctacagtgagactgcttgagagcctcgacctgacttcagccgtcgggcagctgctgaacgaggccgtgcaggcccagaacaacacctatcgaaccggcatttcaacgttgctctttttggttggtgcctggagcagtgcagtggaagaatgcttgcatttgggggtgcctatctcgatcatcgtgagcgtaatgagcgagggcctgaatttttgttccgaagaagttgtttctctgcatgtcccagttcacaacatcttcgattgcatggatagcaccaagacattctctcaactcgagacgttctccgtttctctttgcccattccttcaagttcctagcgacaccgacctgatcgaggagcttcatggacttaaggacgttgcatcgcagacactcactatcagcaatctctcaggtagacccttaaaatcctatgaattgttcaaacctcaaaccaaggtggaagctgacaataatacctcccggactctgaaaaacagtctacttgctgacacatgctgccggcagtccattctcatccattcccgccattttaacagaaccgataatacagaaggcgtctctaagccggatggctttcaggaacacgtgaccgccacacacaagacgtatcgttgcaatgacctggttgagctggcagttggactgagccacggagaccatagcagtatgaagctcgtggaggaagccgtacagctgcagtatcagaatgcctgcgtccagcagggaaattgcacgaagccttttatgttcgatatctcacgcatatttacctgttgtctgccgggtctgccagaaacgtcaagttgcgtctgtcctggatatatcactgtggtctctgtgagcaacaatcctgtaattaaggagcttcaaaaccaacctgtcagaattgtgctgattgagggggacctgaccgagaattatagacatctgggatttaataagtcagccaacattaaaacggtgctggattccatgcgactgcaagaagactcaagcgaggagctctgggcaaatcatgtgctccaggtgttgattcaatttaaggttaacctcgtactcgtacagggcaatgtgtccgaaagactgatagagaagtgcataaattctaagcgtctggtcatcggttcagtgaacggcagcgtgatgcaggcgttcgccgaggccgctggtgcggtgcaggtagcctacatcacccaagtgaacgaggattgcgtgggggacggcgtttgcgtgaccttctggaggtcctcgcccctcgatgtggtggacaggaacaatcgcatcgccattctcttgaaaactgagggaattaacctagtcactgcagttctaacgaaccccgtcacagcgcagatgcagattaaggaggacaggttttggacttgtgcgtacagactctattacgccctcaaggaggaaaaagtcttcctggggggtggagctgtggagttcctctgcctgtcatgtctccacatactggcagagcaaagccttaagaaagagaatcatgcctgctcaggatggctgcacaatactagttcctggcttgccagctcattggccatttacaggcctacggtcctgaaattcctggctaacgggtggcaaaagtacttgtctaccctgctgtacaacacagctaactactcatccgaattcgaagcttcgacctatatccagcatcaccttcagaatgctaccgacagtggctctcctagctcctacatcctcaatgaatactcgaagctaaattcccggatctttaacagtgatataagcaacaaactggagcagattccgagggtgtacgacgtggtcactcccaagatcgaagcctggaggagggccttggacctggtgctgctggtgctgcagactgacagcgagattattaccggacatggccatacacagatcaattctcaggaactgactgggttcttgtttttgtag

SEQ ID NO: 215578 - DNA, 2166 bp, synthetic construct
  misc_feature 1..2166: note = Description of Artificial Sequence: Synthetic coding sequence
  source 1..2166: mol_type = other DNA
atgctactccctgtcttcacactgaagctgcgtcataaaatctcaccaagaatggtggctattggtagatacgatgggacacatccctgcctggctgcagctacccaaaccggcaaagttttcattcataacccgcatacccgcaatcagcatgtgtctgcttcacgcgtcttccagagtcccctcgagtccgatgtttctttgctctctatcaaccaggccgtcagttgtcttacagcaggagtgcttaaccccgagctaggctatgatgcactgcttgtggggacacagacaaatttactggcgtacgacgtgtacaataatagcgatctcttttaccgcgaggtggcagacggagccaatgccatcgttctgggcacgcttggcgacatcagtagccctctggccataattggcggaaactgcgcactccagggcttcaaccacgagggatccgatctgttttggaccgtcaccggcgacaacgttaactctctggcgttatgcgactttgacggtgacggaaagaaagaactactagttggctcagaagactttgatatcagagtgttcaaagaggatgaaatcgtagcggagatgaccgaaacagaaatcgttaccagcctgtgcccgatgtatgggtccagatttggctatgcactgtccaacggcaccgtgggcgtatacgataaaacgtcccgctattggaggatcaagtccaagaaccatgctatgagtattcacgcatttgaccttaactccgatggagttaacgaattgattaccggatggagtaacggcaaggtggatgctcgttctgatagaacaggtgaggtgattttcaaagataattttagcagcgctattgcgggagtggtagagggcgactataggatggacggacacatccagctcatctgctgctctgttgatggggagattcgaggttatctgcccggaactgccgagatgcgcggtaacttgatggacaccagcgccgaacaggatctcattcgggagctctctcagaagaaacagaatctgctgctggagttgcgcaattatgaagagaatgctaaggcagagctggctagcccccttaacgaagccgacgggcatagaggcatcatccctgccaatacaagattgcacaccacactgtctgtttctctgggaaacgagacccaaaccgctcatacagagctccggatatctacctccaatgataccatcatccgggctgtgctgattttcgctgaggggatctttacaggcgaatcacatgttgtacacccttcgatccacaacctatcgtctagcatctgcatccccattgtgcctccaaaagatgtgccggtagatctgcacttaaaggctttcgttggatatcgtagcagcacacagttccatgtgttcgaaagtaccaggcagctgccacgatttagtatgtacgcactgacctcgctggatcctgcgtcggagccgatcagctacgtgaactttacaatcgccgaaagggcacagagggttgtggtttggctaggtcagaattttttgctaccggaagacacgcatatccaaaatgccccttttcaggtgtgtttcacctccctgcggaacggcggacatctacatatcaagatcaagctctccggggagattaccatcaacaccgatgatattgatctggcgggagatatcatccagtcaatggcgtcatttttcgctattgaggacctgcaggtcgaagctgactttcctgtgtactttgaggagcttcgtaaggtgctggtgaaagtggatgaatatcactccgtgcatcagaaactctcggctgacatggcggatcactccaacttgatcaggtctcttctggtcggggctgaggacgcccgactgatgagggacatgaagactatgaaaagccgttacatggagttgtatgatcttaatagagacttactcaacggttataaaatccgttgcaacaatcatacagaactcctgggcaacctgaaagcagtgaaccaagcaatccagcgcgcagggaggctgagagtagggaagcccaaaaatcaggtaattacggcttgcagagatgccattcgtagcaataacatcaacacccttttcaagatcatgagggttggcaccgcttccagctag

SEQ ID NO: 215579 - DNA, 1560 bp, synthetic construct
  misc_feature 1..1560: note = Description of Artificial Sequence: Synthetic coding sequence
  source 1..1560: mol_type = other DNA
atggctgaggagcgcgtagcaactagaacccagtttcctgtgtcaactgagagccaaaaacccaggcagaagaaagcccctgagttccccatcttagagaagcagaattggctaattcacctccactatattagaaaagactacgaggcctgcaaagctgtaattaaagagcagctgcaggaaacccaggggttgtgtgagtacgcaatttatgtgcaggctcttatttttaggttagaaggtaatatccaagaatctctggagctctttcagacctgtgcagtgctctctccacagtcggccgacaatcttaaacaggtcgcacggtccttgtttctgctggggaaacacaaggcagcaatcgaggtgtataacgaggcagcaaaattaaaccagaaggattgggaaatatcacacaacctcggcgtctgttatatttatttaaaacagtttaataaagcccaggaccagcttcacaatgccctgaatttgaaccgacacgatctaacttacatcatgcttggcaagattcatctgctggaaggagatctcgataaagctattgaggtctacaagaaggctgtcgagttttcccctgagaacacggaactgctgacaaccctgggactgctttaccttcagctcggtatttaccagaaagcgtttgagcaccttggcaatgccctgacctacgaccccaccaactacaaggccattctggccgcagggtctatgatgcagactcacggcgactttgatgtggcactcacgaagtaccgtgtggtcgcgtgcgccgtaccggagtcacctcctctgtggaataacattggcatgtgctttttcggtaagaagaagtacgtggccgcaatatcctgtcttaaaagagcaaactaccttgcgccatttgactggaaaattctgtacaatttaggcctcgtgcacctcacaatgcagcagtacgcctcagcatttcatttcctgagtgccgcaataaacttccagcccaagatgggcgagctgtacatgttgctggccgtggccttgactaacctagaagacatagaaaatgcaaaaagagcctacgccgaagcagtgcatcttgataagtgcaatccccttgttaacctgaactatgcagtgcttctgtataaccagggagagaagaagaatgccctggcccagtaccaggagatggaaaagaaagtgagtctgctaaaggataattccagcctggagtttgacagtgagatggtggaaatggctcagaagctgggagctgcgctccaggtgggagaggcccttgtttggaccaagcctgtgaaggacccaaaatctaaacaccagacaactagcacttccaaaccagcctctttccagcaaccgctagggagcaaccaggccctcgggcaggccatgtcttcagctgccgcttacagaactctgccaagcggggctggaggaactagtcagttcactaagccaccgtctctcccgctggaaccagagccggcagtggaatcctcaccaaccgagacatctgagcagattcgtgagaagtag

SEQ ID NO: 215580 - DNA, 1584 bp, synthetic construct
  misc_feature 1..1584: note = Description of Artificial Sequence: Synthetic coding sequence
  source 1..1584: mol_type = other DNA
atggccttgaccgtcgtgccctccttttctgtgtctggcgtctggaaacgcacccagtttccagttagcacagagtctcagaagcccaggcagaagaaagcacccgaattcccaatcctggagaagcagaactggctgatccatctacattacattaggaaagactatgaggcttgcaaagccgttatcaaggaacagcttcaagagacacagggactatgtgagtacgccatctatgtccaggccctgatctttagactcgagggtaatatacaagaaagcctggagttgtttcagacctgtgccgtgctgtcaccacagagtgccgacaatctgaaacaggtggcccgttctctgttccttttgggcaaacacaaggctgctattgaggtctacaacgaggcagccaagctgaaccagaaggattgggagattagtcataatctaggggtgtgttacatctacttgaagcagttcaataaggcacaggatcaactgcataacgcactgaatctgaaccggcatgatctgacttacatcatgctggggaaaatccacctgctggaaggcgacctggacaaggctatagaggtctacaagaaagccgttgagttctcccccgaaaatactgaactcctcaccacacttgggttactatatctgcagctcggaatctaccaaaaagcttttgagcatctgggaaacgccctgacatacgatcctaccaactataaggctattttggccgctggctcgatgatgcagacccacggggatttcgacgtggcgttgacaaagtatcgggtggtcgcttgcgctgtgccagagtccccccctctctggaacaacattggcatgtgctttttcggaaaaaagaagtatgtggctgccataagctgcctgaagcgggcaaactaccttgctcctttcgattggaaaatcctgtacaatttgggcctggtccaccttactatgcaacagtatgcgagcgccttccacttcttgtccgcagctattaatttccaacctaagatgggcgagctctacatgttgctagctgtcgctcttaccaacctggaagacattgagaatgccaagcgggcttatgccgaagcagtccacttggacaagtgtaacccgcttgtgaaccttaattacgctgtgttgctgtacaaccagggagaaaagaagaatgccctggcccagtaccaggagatggagaaaaaagtcagcctcctcaaagacaactcatccctggagtttgacagtgaaatggtcgaaatggctcaaaaactcggagccgctctgcaggtcggcgaggccttggtttggacaaaaccagtgaaggaccctaaatcgaagcatcagactacaagcactagcaaaccagctagttttcagcagccacttggctccaatcaggctctgggccaggccatgagctcagccgctgcctatcgtaccctcccctccggagcagggggtactagtcagtttactaagcctccgagccttcctctggagcccgagcctgctgttgaaagtagccctacagagacgtcggagcagattagagaaaaatag

SEQ ID NO: 215581 - DNA, 1524 bp, synthetic construct
  misc_feature 1..1524: note = Description of Artificial Sequence: Synthetic coding sequence
  source 1..1524: mol_type = other DNA
atgatatggaacactcggaactctacttacatcttcactgcccctgaattccctattctggaaaagcagaactggctcatccacctgcattacatccgcaaggattacgaggcctgcaaagcggtgataaaagagcagctgcaagagacgcagggcctctgtgaatatgcaatttacgtccaagcactcatttttaggctggaagggaatattcaggagagcctggaactgttccagacatgcgctgttctgtctccccagtcagccgacaacctcaagcaggtggcacgctctctatttttgcttggcaaacataaagctgcaattgaggtctataacgaggctgcaaaactcaatcagaaagattgggaaattagccacaatctgggcgtttgttacatttatctcaagcaattcaataaggcccaggatcaactacataacgccctcaatctgaacagacatgaccttacttatataatgttaggcaaaatacacttgctggagggcgaccttgacaaggcaattgaagtgtacaaaaaggccgtcgagttttctcctgaaaacactgagctcctgacaaccctgggcctgttgtatcttcagttggggatttaccagaaggcatttgaacacctgggcaacgctctgacctacgatccaactaactataaagctatccttgcagccggatctatgatgcagacacacggtgattttgacgtagcgctgacaaagtaccgggttgttgcctgcgccgtgcccgaatcacctcctttgtggaataacatcggaatgtgcttcttcgggaaaaaaaagtatgtggctgcaatttcttgtcttaaacgggctaactacctggccccattcgattggaagatcctgtacaacctgggactggtgcatctcaccatgcaacagtatgcttccgcatttcacttcctctccgcagcaatcaactttcagcctaaaatgggcgaattgtatatgctgctggccgtagctcttacaaatctggaggacatcgagaacgcaaagagagcatacgcggaagccgtgcatctcgacaagtgcaaccctctggtaaacctcaactacgccgtcttgctatataatcagggcgaaaagaagaatgccctcgcccagtaccaggagatggagaaaaaggtgagtctcttgaaggacaattcatctctcgaattcgactcggagatggtggaaatggcacagaaactgggcgctgccctgcaggtgggcgaggctctagtgtggacgaagccggtgaaggacccaaaatctaaacatcagactactagcaccagcaaacctgcgtccttccaacagcccctcggatcaaaccaggccctcggacaagccatgtctagtgccgctgcttaccgaactcttccttcaggtgcaggcggtacatcgcaattcacaaagccgccatcactccctcttgagccagaaccagccgtagagagttctccaaccgagaccagtgaacagatccgggagaaatag

SEQ ID NO: 215582 - DNA, 1044 bp, synthetic construct
  misc_feature 1..1044: note = Description of Artificial Sequence: Synthetic coding sequence
  source 1..1044: mol_type = other DNA
atgttggggaagatccacctgctggagggcgatctcgacaaggcaatcgaggtttataaaaaagcggtcgaattctctcccgagaacaccgaactgttaacaactctcggcctgctgtacctgcaactaggtatttaccagaaagctttcgagcatctgggcaatgccctgacctacgacccgaccaattataaggccattctcgctgccggtagcatgatgcagacccatggtgacttcgacgtagctttgaccaagtatcgagttgtggcatgcgccgttccggaaagtcctccactctggaacaacatcggaatgtgtttttttggtaagaagaaatacgtggccgcaatttcatgccttaagcgggctaattacctggcacccttcgattggaaaattctttacaacctgggcctggtgcaccttaccatgcagcagtatgcctcagcctttcattttctgtcggctgccattaatttccagccaaaaatgggagaactgtacatgctcctggccgttgccttaacaaatctggaagacatcgagaacgctaagagggcttacgcagaggccgtgcatctggataagtgtaatcccttggtgaacctgaactacgcggttctgctgtataatcaaggcgagaagaaaaacgctctggctcagtaccaggagatggagaagaaagtgtcactgcttaaggacaatagttcactcgagtttgactctgagatggtcgaaatggcccagaagttaggagctgctctccaggtcggcgaggcactggtgtggacaaagcctgtgaaagatcccaagtcaaaacatcagaccacctcaacttccaaacccgcttctttccagcagcctttggggagcaaccaggcccttgggcaggctatgtcaagtgccgctgcctataggacactcccctccggggcaggtggaacatcacagtttacaaagccacccagtctgccactggaaccagagcctgccgtcgaatcgtcccccacagaaacgagcgagcaaattagagagaaatag

SEQ ID NO: 215583 - DNA, 1026 bp, synthetic construct
  misc_feature 1..1026: note = Description of Artificial Sequence: Synthetic coding sequence
  source 1..1026: mol_type = other DNA
atgtctgtactagacgctttgtgggaagatagggatgtcagatttgacctttccgcacagcagatgaaaactcggccaggggaagtccttattgactgcctggacagcattgaggacaccaaaggcaataacggagatcgaggtagactcctagtaactaatcttagaatcttgtggcattctcttgccctatcacgggtcaacgtctccgtcgggtataattgtatcctcaacataaccactcgcactgccaattcgaagctgaggggtcagactgaggccttatacattttaacgaaatgtaactctaccaggttcgaatttattttcactaacctggtgcccggttcaccccgtttgtttacaagcgtaatggccgtgcacagagcatacgagacttcaaaaatgtaccgggatttcaagttacggagcgcactcatacagaacaaacagctccgtctcttaccccaggaacatgtatacgacaaaatcaatggtgtgtggaatttgtcctctgatcaggggaacttagggacattctttataaccaatgtccgcatcgtgtggcatgccaatatgaacgacagtttcaatgttagtatcccgtacctccagattagatctataaagattcgcgattccaaatttggactagctcttgtcatcgaaagttctcaacagtccggcggatacgttcttggattcaagatcgaccctgtggagaagctgcaggagtcagtaaaggaaattaactccctgcataaagtgtattccgcctcaccaattttcggggtggactatgagatggaggagaagccacagccgctcgaagccttgactgtggagcagatccaggacgacgtcgaaatcgactccgacggtcatactgatgccttcgtggcgtatttcgctgatggcaataaacagcaggatcgcgagccagtcttttctgaagagctagggctagccattgagaagctgaaggacgggttcactctacagggcctctgggaagttatgagttag

SEQ ID NO: 215584 - DNA, 963 bp, synthetic construct
  misc_feature 1..963: note = Description of Artificial Sequence: Synthetic coding sequence
  source 1..963: mol_type = other DNA
atgtccgttctggacgctctctgggaggacagagacgtcagattcgatttgtccgctcagcagatgaagacccgcccaggcgaagtgttgatcgattgcctggactcaatcgaggatactaaaggcaacaacggagaccgcggtcgcctgcttgtgaccaatcttaggatactgtggcactctctagcattaagtagagttaatgtgtctgtcgggtataactgtattcttaacattaccacccgtacagcaaattccaagctgcggggacagaccgaagcactttacatcctgaccaagtgtaacagcacaaggtttgagttcatctttactaacctcgtcccaggctctccccgactcttcaccagcgtaatggccgtgcacagagcatacgaaacttccaagatgtaccgcgattttaagctgaggtccgcactgatccagaacaagcagctacggctactgccccaggaacacgtttacgataagataaatggtgtttggaacctcagctcggaccaggggaacctggggaccttctttataactaatgtcagaattgtatggcacgctaatatgaacgattcttttaacgtgtccattccatatctccagatttctgggggttatgtcctcggtttcaagattgatcccgtggagaaattacaggagtccgtcaaggaaatcaacagcctgcacaaggtctactccgcctctccaatctttggagtggattacgaaatggaagagaagccccagcctctcgaagcccttaccgttgaacagatacaggacgatgtagagattgattccgatggccatacggatgcattcgtcgcctattttgcagatggcaacaaacagcaggatcgcgaacccgtattctctgaagagctgggcctggcaattgagaagctgaaggatggatttaccctccaggggctctgggaagtcatgtcgtag

SEQ ID NO: 215585 - DNA, 1635 bp, synthetic construct
  misc_feature 1..1635: note = Description of Artificial Sequence: Synthetic coding sequence
  source 1..1635: mol_type = other DNA
atgtctgtactcgacgccctgtgggaggatcgcgatgtgcgatttgacttgtcagctcaacaaatgaagacaaggcctggggaggtccttatcgattgcctcgattctatcgaagataccaagggcaacaacggagaccgtgggaggcttcttgttaccaatttaaggattctgtggcactccctcgctttaagtcgggtgaacgtgagcgtaggttacaactgtatacttaatatcaccaccaggacggccaactccaaactgcgcggacagaccgaagccctgtatatcttaaccaaatgcaattctacccggtttgagtttatattcaccaacttggtccctggctctccgaggctgttcacctctgtaatggccgttcatagggcttacgagacttccaaaatgtaccgcgattttaagctgaggagtgccctgatccagaataagcaactcagactgctgccacaggaacatgtctacgataaaatcaacggagtgtggaatctcagcagtgatcaaggaaacctgggtacttttttcattactaatgtaagaatcgtatggcacgccaacatgaatgatagctttaacgtttctattccctacctgcaaatcaggagcattaaaatcagagactctaaattcggtctcgctcttgtgatcgagagttcccagcaatccggagggtacgtgctggggtttaaaattgatcctgtggagaagctgcaggagtccgtgaaggagattaattccctgcataaggtgtattccgcttctccgatcttcggggtcgattacgaaatggaggaaaagcctcaacccctagaagccctgactgttgagcagatccaggatgacgtggagatagactcagacgggcacactgacgcttttgtcgcctactttgctgacggtaacaaacttgattccattgccagcgaatgggtgggcctgccccctctgcctagcgcccgttgcctttttgggctgggagaagtggatgacaagatatatgtggtcgctggaaaagacctgcagaccgaagccagccttgattccgtcctttgctatgacccagttgcggcaaagtggaatgaagtgaaaaagctacctatcaaagtatatggtcacaacgtgatatctcacaaagggatgatttactgcttgggcggaaagacagacgacaagaagtgcaccaaccgtgtgtttatcttcaaccccaaaaagggcgactggaaagatcttgccccaatgaaaatccccaggtcaatgtttggcgtggccgtgcataagggtaaaatagttattgcgggtggcgtgactgaggatggtctgtctgcctccgtcgaggcctttgatcttaccacaaataaatgggatgtgatgaccgaatttccccaggagagaagttcaatctctcttgtgtctcttgctggtagcctgtacgcaatcggaggattcgcaatgatccagcttgagtcaaaggaatttgctccaaccgaagtcaacgatatttggaaatatgaagacgataagaaagagtgggccggtatgctcaaagagattcgctatgcaagtggtgcaagctgccttgctacacgcttaaatctgtttaagctatccaaactgtag

SEQ ID NO: 215586 - DNA, 2148 bp, synthetic construct
  misc_feature 1..2148: note = Description of Artificial Sequence: Synthetic coding sequence
  source 1..2148: mol_type = other DNA
atggatttgattctgaaccgcatggactatctacaggttggcgtgacatcccagaaaaccatgaagctcatccctgcctcgcgacaccgcgcaactcagaaagtggtcataggggaccacgatggggtagtgatgtgtttcggcatgaaaaagggtgaagccgctgctgtgtttaagactctgcctggacccaaaatagcacggcttgagctgggaggcgtgatcaacaccccgcaagagaagattttcattgcagcagctagtgaaatccgagggttcactaaaagaggtaaacaattcctcagctttgagaccaacctgacagaatccattaaagctatgcatatttccggaagtgacctcttcctttccgccagctacatctacaatcactattgtgactgtaaggatcaacactactacctcagcggtgataaaattaatgacgtgatttgtctgcctgtagagaggttgtctcggattacacctgtcctcgcctgtcaggacagagtcctaagagtcctgcaggggagcgacgtcatgtacgccgttgaagttcctggcccacctacggttctggctctccacaatgggaatggcggagatagtggtgaagatctcttgtttgggacaagtgacgggaagttagcgctgatacagatcaccactagcaagccggtgcgtaagtgggaaatacagaatgagaagaagcgcggtggcatactgtgtatcgattcctttgacatcgtgggcgatggagtaaaagatctgctggtgggtcgagacgacggcatggtggaagtgtattcctttgacaacgctaacgagcccgtgctaagatttgatcagatgctgtctgaatcagtgactagtattcagggaggctgcgtggggaaggattcctacgacgaaatcgtggtctccacctacagcggctgggtgaccggcctcactacagagcctatccacaaggagagtggcccaggtgaagagttaaagattaatcaggagatgcagaacaagatttcaagtctcaggaatgagctggagcatctccagtataaggtcctgcaggagcgcgagaattaccagcagtcttcacagtcaagcaaagctaagtccgccgttcccagtttcggcattaatgataagtttacactgaataaagatgatgcctcttattccctgatcctggaagtccagacggctatcgacaacgttcttatccaatctgacgtgcccatagatctcttggacgtggacaaaaactcagcagtcgtgagtttttcctcctgtgacagtgaaagcaacgacaactttctgctcgccacatataggtgccaagctgataccacccggctcgagctgaaaatacggagtatagaggggcagtacggcactctccaggcctatgttactcctcggatacaaccaaaaacatgtcaagtaaggcagtatcatattaagcccctgtccctccaccagcgcacccacttcattgaccacgatcgccctatgaacaccctgaccctgaccggccagttttcttttgctgaagtgcatagctgggtggtattctgccttcctgaggtgcctgaaaaaccgcctgctggcgaatgtgtgactttttacttccaaaacaccttcttagacactcagctagagtccacctaccggaaaggcgagggcgtgttcaaatctgataatatctctactatatccatccttaaggacgtgctctctaaggaagcaacaaaacggaagatcaacctgaacatatcctatgagatcaacgaggtcagcgtgaaacacaccttgaagctcatccatcccaagttggagtatcagctcttgctggctaagaaagttcagctgatcgacgcactgaaagaactgcagattcatgagggcaacaccaattttcttatccccgagtaccactgtatcctcgaggaggccgaccatctccaggaagagtataaaaaacagccagctcacctggaaaggttgtacgggatgattacagatctcttcatcgacaaatttaagttcaaagggacaaatgtgaaaactaaggttccactcctgttggagatcctcgactcctacgaccaaaacgccctgatctcctttttcgacgccgcatag

SEQ ID NO: 215587 - DNA, 2019 bp, synthetic construct
  misc_feature 1..2019: note = Description of Artificial Sequence: Synthetic coding sequence
  source 1..2019: mol_type = other DNA
atggacctgatattgaacagaatggattatttacaggtgggagttacaagccagaaaaccatgaagttgatccctgcctctcgccacagagccacacagaaggtggtaatcggggaccatgacggggtagtgatgtgcttcggcatgaagaagggggaggcagctgctgtgtttaaaactctgccgggtcccaaaattgctcgtttggaactgggaggtgttatcaatactccccaggagaaaatctttatcgctgcagccagcgagatacgcggattcaccaagagagggaaacaattcttatcctttgagacaaatctgaccgagtccattaaggccatgcatatctccgggagcgacctgttcttatcagccagctacatatataaccactattgcgattgtaaggatcaacactactacttgtctggagataaaattaatgacgtcatatgtctgcccgtggaaagattgtcccggatcacaccagtgctggcctgtcaagatcgggtgctgcgagttttgcaggggtctgatgttatgtacgcagtggaggtgcccggaccacctacagtattggccttgcacaatgggaacggaggcgattccggcgaggatctgctttttgggacctccgacggtaaactcgcgctcattcaaatcactacctctaaaccagtccgcaaatgggagattcagaacgagaagaaaagaggcggaatcctgtgtattgactccttcgatatagttggcgatggcgtaaaggacctgctggtcggcagagatgacggaatggtcgaggtgtatagcttcgataatgcgaacgaaccggtgttgcggttcgaccaaatgctcagtgagtccgtgacatcaatacagggtggttgcgtgggaaaagattcttacgatgagatcgtagtgagtacctattctggctgggtgaccggcttgaccacagagcccattcataaagagtcaggcccaggagaggaactcaaaataaaccaggaaatgcaaaataagatatccagcctacggaacgagttggagcacttacaatacaaagtactgcaggaaagagaaaactatcagcagagcagtcagtcttctaaagccaaatcagcagtgccctctttcggcatcaacgacaagttcacactcaataaggacgacgcctcttattctctaatcctggaagttcaaaccgctatcgataatgtcctgatccagagtgatgtccctatcgacctgttggacgtagacaagaattcagctgtcgtgtctttttcgagttgcgacagtgagagcaatgataatttcctgctggccacttaccgatgccaagccgataccacacgtctggagctgaagatcaggtcaatagagggtcagtatggcacattacaggcctacgtcaccccgaggattcagcccaagacatgtcaagttcggcagtatcatataaagcccctcagcttacatcaacgaacacacttcatcgaccatgaccggccaatgaacactctaaccctgacgggccagttctcctttgccgaggtacattcgtgggtcgtattttgtctcccagaggtccccgagaagccgccagctggagaatgcgtgaccttttatttccaaaataccttcctggacactcagctcgagtcaacctaccgtaagggcgagggcgtctttaagtccgataacatatcaactatatctatactcaaggatgtgctttccaaagaagccaccaaacgcaaaatcaacttgaacattagctacgagatcaacgaagtgtccgtcaaacatacgttgaagctgatccacccaaagctggagtatcagttactgctggccaaaaaggtgcaactgattgatgctctgaaagaacttcagatccatgaggggaacaccaattttctcattccagagtaccactgtatcctggaggaagctgatcatctgcaagaagaatataagaaacagcctgcacaccttgagcgcttgtatggatag

SEQ ID NO: 215588 - DNA, 417 bp, synthetic construct
  misc_feature 1..417: note = Description of Artificial Sequence: Synthetic coding sequence
  source 1..417: mol_type = other DNA
gacgtactgtcaaaggaagctacaaaacggaagattaaccttaatatctcttatgagattaacgaggtgtctgtgaagcataccctgaagctcatccaccctaagctggaataccaactgctgttggctaaaaaagtgcagctgattgatgcactgaaggaactgcagatacatgaggggaatactaatttcttaattccagaatatcattgtattctggaggaggccgaccatttacaggaggagtataaaaaacagcctgcccacttggagaggctgtacggcatgattaccgaccttttcatcgacaaattcaaattcaagggtacgaatgtcaaaactaaggtacccctgcttctggagattctggattcatatgaccagaacgcgctgatcagcttttttgacgctgcctag

SEQ ID NO: 215589 - DNA, 2664 bp, synthetic construct
  misc_feature 1..2664: note = Description of Artificial Sequence: Synthetic coding sequence
  source 1..2664: mol_type = other DNA
atgtcactcttcaaggccagggattggtggagtacaatcctcggggacaaagaagaatttgatcaaggctgcctgtgcctggcaaacgttgataattcaggcaatggtcaggataagattatagtgggaagctttatggggtacctgcgcatattcagcccgcaccctgctaagaccggtgacggtgctcaggccgaggacctccttctggaagtcgacctaagagacccagtacttcaagttgaagtcggaaagtttgtgtccggtaccgaaatgctgcacttggcagtcctccattctagaaaactgtgtgtgtacagcgtgtctggaacattaggcaacgtcgagcatggaaaccagtgccagatgaagcttatgtatgaacacaatttgcagcggactgcctgcaacatgacctatgggagttttggcggtgtgaaaggaagggacctgatttgcatccaatcaatggatggaatgctgatggtgttcgagcaggagagctatgcgtttgggcgattcttgccagggtttctcctgcccggtccactcgcctatagctctcggacagacagttttctgacggtgtcatcatgccagcaagttgagagttacaagtatcaggttctggcctttgccacagatgccgataaaaggcaggaaacagaacagcagaagttggggagcgggaagcgcttagtcgttgattggaccctcaacattggcgagcaggctttagatatctgcatcgtctcctttaaccagtctgcctcctcggtcttcgtactaggcgaaagaaactttttctgccttaaagataacggtcaaattcggtttatgaaaaagctagattggtcacctagttgtttcctaccttattgtagcgtgtccgaggggacgatcaatactctaattggaaaccacaataacatgctccacatctatcaagacgtgactctgaaatgggccactcagctccctcatatacccgtggcagtgcgcgttggctgcttacatgatttgaagggggtgatcgtaacactcagtgatgacgggcacctgcaatgcagttatctcggtacggatccatcactgttccaagctcccaatgtgcagagcagggagctcaactatgacgaactggacgtggaaatgaaggaattacagaagatcataaaagatgttaataagagccagggagtgtggccaatgaccgaacgtgaagatgatctgaatgtgagtgtggtcgtttcccctaactttgatagcgtaagtcaggcaaccgacgttgaagttgggacagacctggtgccaagtgtgactgtaaaggtgaccttacagaacagggtcatcttgcagaaggccaaattatccgtgtatgtgcagcccccattggagctcacatgtgatcaattcacatttgagttcatgaccccagatctgacaagaactgtcagcttcagcgtgtatttaaagaggagctacacgccgagtgagctcgaaggtaatgcagtagttagctactctaggcccactgatcgtaaccctgatggaattccccgagtgattcagtgcaagtttcggctgcccctgaagctgatatgcctgcctggacagccgagtaaaactgccagtcacaagattaccattgatacaaataagtctcccgtctcactgttaagcctgtttccaggcttcgcctctcagtccgacgatgaccaggtcaacgttatgggatttcacttcctgggaggggctcggattacagtgctggcttccaaaacttcccagagatatagaattcagtccgagcagttcgaagatttgtggttgatcactaatgagttgatcttacggctgcaggaatattttgagaagcaaggcgttaaggactttgcgtgctctttctcagggagcatccctctgcaggagtatttcgagcttatcgaccaccactttgaactccgaattaatggtgagaagctggaagaactgctaagcgagcgagcagttcaattcagggccatacaacggcgactgctggccaggttcaaggacaaaacacccgctcctcttcagcacctggacacgctgctggacggtacctataagcaggtgatagccctcgccgacgctgtggaggagaatcaggggaatctttttcaatcgttcacacgcctgaaaagcgccactcatctggttatccttttaattgccctctggcaaaaattgagcgcagatcaagtcgcaattctggaagccgctttcctaccattgcaggaggatacccaggaactgggctgggaagagacggtcgacgccgcaatatcacacctgctaaagacctgtctgagcaagagtagtaaggagcaagccttgaacttgaactctcagttaaatattcctaaggatactagtcagttgaagaagcacataacactgctgtgcgacaggctgtcaaagggaggtaggctgtgtttgagtactgatgctgcagcgcctcagacaatggtgatgccaggaggctgcaccacgatccccgaaagcgatctggaggaaaggtccgtggagcaggactcaaccgagctgtttactaatcaccgtcacttgactgcagagaccccccgacccgaagtctccccgctccagggtgtctccgagtag

SEQ ID NO: 215590 - DNA, 2544 bp, synthetic construct
  misc_feature 1..2544: note = Description of Artificial Sequence: Synthetic coding sequence
  source 1..2544: mol_type = other DNA
atgtctctctttaaagctcgtgattggtggtctactatactaggcgacaaggaggagtttgaccagggatgtctctgtctggcgaacgtcgacaatagcggcaacggccaggacaaaatcattgtcggaagctttatggggtacctcagaattttctcccctcacccggcaaagactggcgatggcgcacaggcagaggaccttcttctagaagttgacctgcgggaccccgttctgcaggtggaggtgggaaaatttgtcagcggaaccgagatgctccacctagctgtcctccactcaagaaaactgtgcgtgtactccgttagtgggactcttggaaacgtagaacacggcaatcagtgtcaaatgaagctgatgtatgagcataacctgcagagaacggcctgcaacatgacctatggttcattcgggggtgtgaagggccgagacctcatatgcattcaatctatggacggcatgctaatggttttcgagcaagaatcttatgctttcggacggtttctcccaggtttcctcctgcccggtcccctagcatattcctctcggaccgactcatttttaacagtgagtagctgccagcaagtggagtcctacaaatatcaggttctggcatttgccaccgacgctgacaaacgacaggagacagaacaacagaagctcgggagcggaaaacgtctagtcgtggactggacccttaatatcggcgagcaggctttggacatctgcatcgtgtccttcaatcagtcagcgtcctctgtattcgtgctgggagagaggaatttcttctgtctgaaggataatggacaaatccgattcatgaagaagcttgactggagcccctcttgctttctgccctactgttctgtgtcagagggcacaataaatacgctgatcggcaaccacaacaatatgctgcacatctaccaagacgtgaccctgaaatgggcaacccaactgcctcatattccagttgccgtgagggtggggtgtctgcacgacttaaagggagttatcgtgaccctgagcgatgacggacatctgcagtgcagctacctcggaaccgacccttctttgtttcaagcgcctaatgttcagtccagggagctgaactatgatgagcttgatgtcgaaatgaaagaactgcaaaaaatcattaaggatgtcaataagtcccagggcgtgtggccaatgaccgaacgcgaggacgatctcaacgtgagtgtggtggtttctccaaacttcgattcagtatcccaggctaccgacgtggaagtgggcacagatctagtcccttccgttaccgtcaaagttactctgcagaatagagtgatcctccagaaggcaaaattgtccgtctatgtccagccaccactcgaacttacatgtgaccagtttacatttgagtttatgtcaatcccacgggtcatccagtgcaaatttagattgcctctgaaactgatctgtctgcctggtcagccctcaaagactgccagccataagattaccattgacacaaataagtcaccggtctctcttctgtccttatttcccggatttgcgagccaatccgatgatgatcaagttaacgtcatgggattccattttttggggggtgcaaggataaccgtactggcctccaaaacatcccagcgttaccggatccagtctgagcaattcgaggatctgtggctaatcaccaacgagttgatcctgcgcctgcaggagtacttcgagaagcaaggcgtaaaagacttcgcttgcagtttttccggatccatccctctgcaggaatacttcgaactcattgatcaccactttgaactgcgaatcaatggagagaagctcgaagagctgctgagcgagagagccgtccaatttcgcgctatacaaaggaggctcctcgccaggtttaaggacaagacccccgcacctctgcagcacctggacaccttgctggatgggacctacaaacaggtgatcgcactagcggatgctgttgaggagaatcaagggaatctgtttcagtcttttacgcgtctgaaaagcgccactcatcttgtgattctgctgattgcattgtggcagaagctgtctgcagaccaggtggctatccttgaagctgccttccttcctctccaggaagacacccaggagctgggctgggaagagacagtcgacgccgcaataagccatcttctcaagacttgtctgtcaaagagttctaaagagcaagcccttaacctgaatagccaattgaacattcctaaggacacaagccagctgaagaagcatattactttgctttgcgacagactgtccaaaggcggacggctgtgcctatccacagacgccgcagcccctcagacaatggtgatgcccggtggctgtactaccattcctgagtccgacctcgaggaaaggagcgtagaacaggacagcacagagctcttcaccaatcaccgccatttaacggctgaaactccgaggccagaggtgtctccactacagggagtctcggagtag

SEQ ID NO: 215591 - DNA, 2559 bp, synthetic construct
  misc_feature 1..2559: note = Description of Artificial Sequence: Synthetic coding sequence
  source 1..2559: mol_type = other DNA
atgagcctgtttaaggcccgagactggtggtctactatcctgggggacaaagaggagttcgaccagggttgcctgtgcctggctaacgtggacaactccggcaatgggcaggataaaatcatagtcggatcatttatgggatacctccggatattctctcctcaccccgctaaaaccggtgacggcgctcaggcagaggacctgctgctggaggtggatctccgggaccccgtgctgcaggtcgaggttggaaagtttgtcagcgggactgaaatgttacacctcgccgtcttgcatagtcgcaagctatgtgtttattccgtgtcggggaccctgggaaatgtggaacacggtaaccaatgtcagatgaaactgatgtacgagcacaatctccagagaaccgcctgtaacatgacctacggctcctttgggggtgtcaaaggccgagacctgatctgtattcaatcaatggacggcatgctgatggttttcgaacaagaatcatatgccttcggaagatttctgcccggattcctcttgcctgggccactggcctactcgtccagaaccgacagtttcctcaccgtgtcttcctgtcagcaagtcgaatcctataagtatcaggtgttggcattcgcaacggacgcagataagcggcaagagactgaacagcagaagctggggagcggcaagagactggtggtagattggactctgaacatcggcgaacaagccctggatatctgtatcgtaagcttcaatcagtccgcatcttcagtgtttgtcttgggggagagaaactttttctgtctgaaagacaacggacagattaggtttatgaagaagttggattggagcccaagttgtttcctgccttactgctccgtttcagaaggaactatcaacactctcatcggcaaccacaataacatgctgcacatttaccaggacgtgactctgaaatgggccacccagttgcctcacatcccggtcgcggtccgtgttggttgcctgcatgacctcaaaggtgtgatcgtgactcttagcgacgacggacatttgcagtgcagctacttgggaacagacccatccctcttccaggctcctaatgtgcagagcagggagctgaactatgacgagcttgatgtggaaatgaaggaattgcagaaaattataaaagacgtgaacaaaagtcagggggtgtggccgatgactgagagggaggacgaccttaatgtctctgttgttgtgagtcctaacttcgattcagtttcccaggcaaccgacgtggaagtgggcaccgatctggtgccatccgtcaccgtcaaggtaactctgcaaaatcgcgtcatcttacagaaggccaaactgagtgtgtatgtgcagcctccactggaattgacctgtgaccagtttacattcgaattcatgtccctcaatgtgttagggattcccagagtgatccagtgtaaattcagactcccactaaagctgatctgtcttcctggccagccctccaaaactgcctcacataagataactattgataccaacaagagccctgtcagccttttgtctctatttccgggattcgccagtcagtcagatgatgaccaggtcaacgtcatggggttccactttctaggaggcgctcgtataactgtcctggcatccaaaacatctcagcgctatagaattcagtcagagcagttcgaagacctgtggttgatcactaatgaactcatcctgcggctccaggaatactttgaaaaacagggagtgaaggattttgcttgctcattctcagggtccattcctctccaggagtatttcgagctgattgaccatcactttgaactgagaattaacggtgagaagttagaagagctgctaagtgaacgggcagtgcagtttcgcgctattcagaggaggcttctggctaggttcaaagataaaacaccagcgccacttcaacacttggacaccctgcttgacgggacttataagcaggtcattgccctcgccgatgctgttgaggaaaaccagggtaatctgttccagtccttcactaggttgaaaagcgccacccacctggtgatccttctaatcgctttgtggcaaaaattgagcgcagatcaggttgctatcctggaggccgcattcctgccactccaagaggacactcaagagctagggtgggaagagacagtcgatgccgcaatctcacacctgctgaaaacatgcctcagtaagagttctaaggagcaggccctaaacctgaactcacagctcaacatccccaaggatacctcccagttaaagaagcacatcaccttgttgtgcgatcgtctcagcaagggaggtcggctctgcctgtccaccgatgccgcagcacctcaaacgatggtcatgcctggaggttgcactactatccccgagtcggatctagaggagcggtcagttgaacaggactcgaccgagctcttcaccaatcataggcatctcactgccgagaccccccgtcctgaggtctccccgcttcaaggggtgtccgagtag

SEQ ID NO: 215592 - DNA, 2649 bp, synthetic construct
  misc_feature 1..2649: note = Description of Artificial Sequence: Synthetic coding sequence
  source 1..2649: mol_type = other DNA
atgtctttatttaaggcacgcgactggtggagtactatactgggagataaggaggaattcgaccagggctgcctttgcttggccaacgtcgataattctggaaacggccaggacaagattattgttgggtccttcatgggctatctccgtatattctctccccatcccgctaaaactggtgacggagctcaggctgaggacctgctgctcgaggtggaccttagggatccagttctgcaagttgaagtcggaaaattcgtgagcggaacagagatgctgcacctggccgtgcttcattctcggaagctgtgtgtctactctgtgtcgggaaccttaggcaatgtcgagcacggcaaccagtgtcagatgaaactgatgtatgagcacaatctccagcgcaccgcctgcaatatgacctacgggtcttttggtggagtgaagggtcgagacttaatttgtatccagtcgatggacggcatgctgatggtcttcgaacaggagagttatgcttttggacggtttctgccaggcttcctattgcccggaccactggcttactcttccagaactgactcgtttctgactgtgagtagttgtcagcaggtcgaatcttataaataccaggtgctggcttttgccacagacgcagacaagagacaggaaaccgaacagcaaaagctgggcagtggcaaaaggctggtggtggactggaccttaaatattggcgagcaggctttggatatctgcatcgtttcatttaaccaatccgcttcgagcgtgttcgtactgggcgagagaaattttttctgcttgaaagataacggacaaatcagattcatgaagaagctcgattggagtccttcttgttttcttccctattgttcagtgtcagaaggcacaattaatacattgatcggaaatcataataatatgctgcatatttaccaggacgtaacgctgaagtgggccacacaactgccccatatccccgtggctgtgcgcgtaggatgtttacatgacctaaaaggcgtgatcgttacactgtccgatgatggccacttacagtgctcgtatctgggcaccgacccttctctctttcaagctcctaatgtgcagagcagagaactgaattatgacgaactcgacgtcgagatgaaggagcttcagaagattataaaggatgtgaacaagagccagggggtgtggcctatgactgagcgtgaggacgaccttaacgtatctgtggtggtatccccgaattttgacagcgtttctcaggctactgacgtagaggtaggcactgacctagtgccgtccgtgacagtgaaggtgactttgcagaatcgtgtgattctccagaaggccaaattgtcagtttacgtccagcctccactagagctgacctgcgatcaattcactttcgaattcatgaccccggatttgacgagaacagtgtcatttagcgtgtatctgaagcggagttataccccatctgagcttgagggaaatgcggttgtctcttactcccgaccaacgggtatccccagggtcatccagtgcaaattccgccttccactcaagttgatttgcctgccgggacaaccaagcaagaccgccagtcacaagatcactatcgatacaaataaaagccccgtcagcctcctgagtctctttccaggatttgctagccagagtgatgatgaccaggtgaatgtgatgggcttccattttctgggaggcgcaagaatcacagtgctcgcaagcaaaacgtcccagaggtatagaatccagtcagagcagtttgaggatttgtggctgattaccaatgagctgatcctccgtttacaagagtattttgagaaacaaggagtaaaggacttcgcttgcagcttctccggatctatcccattacaggaatatttcgagctgatcgaccaccactttgagctgaggataaacggcgaaaaactggaagaactgctgtccgagcgcgcagttcaatttagagctatacagaggcggctcctcgctcgcttcaaagataaaactcctgccccactgcagcatctggatacactcctggacgggacttacaaacaggttatagctcttgctgacgccgtcgaggaaaaccagggcaatctgttccagagcttcacccgactcaagtcagccacacacctcgtgatactactgattgcattatggcagaaactgagcgcagatcaggttgctatcctggaagcggcttttcttcctctgcaggaagatacccaggaactcggttgggaggagactgttgatgcagctatttcccatctgctgaagacatgcttgtccaaaagttccaaggagcaagcccttaatttgaatagccagctgaatatccctaaggacacgtcacagcttaaaaagcacatcaccttgctgtgtgacaggctgtctaagggaggcagactttgtttgtccacagatgccgcagcccctcagaccatggttatgcccggtgggtgtacgacaatccctgaatctgacctggaagagcgctccgtagagcaggatagtactgagctgtttactaatcatcggcacctgaccgcagagacaccacgacctgaggtgtcaccattgcaaggcgtgagtgagtag

SEQ ID NO: 215593 - DNA, 1446 bp, synthetic construct
  misc_feature 1..1446: note = Description of Artificial Sequence: Synthetic coding sequence
  source 1..1446: mol_type = other DNA
atgagtctattcaaagccagggactggtggtctaccatcctcggagacaaggaggagtttgatcagggctgtttatgtctggctaacgtggataacagtgggaatgggcaggataagatcatcgttggcagcttcatgggctatctgaggattttttctcctcatccagcgaagacgggggatggcgcacaggccgaggatttgcttctggaggtcgaccttagagatccagtgctacaggtcgaagtggggaaattcgtgtccggaaccgagatgctacacctcgctgtgctccattcccggaagctttgtgtctatagcgtgtcaggaaccttgggtaacgtggagcatggcaaccagtgccaaatgaagctcatgtatgaacacaatctgcaacgaacagcctgtaacatgacctacggctctttcggaggggttaagggaagggaccttatttgtatccagagcatggatgggatgctcatggtttttgagcaagaatcatacgcctttggtcgctttttgccaggcttccttctgcctgggccacttgcatatagctcaaggacagactcttttttgacagtcagctcatgtcaacaggtcgagtcttacaaataccaagtgctagcctttgctacagacgcagataagcggcaggaaactgaacaacagaagctggggtctgggaagaggcttgtggtggactggacactcaatataggggaacaggccctggatatctgtattgtgtctttcaaccagtccgcgagctctgtgttcgtgctgggagagcggaattttttctgtctgaaggacaatgggcagatcagattcatgaagaagctggattggagtccgtcgtgcttcctaccatactgtagcgttagcgaagggacaatcaataccctcattggaaaccataataacatgctgcacatctatcaggacgtgaccctgaagtgggctacccagctccctcacatccctgttgctgtgcgcgtcggatgtctgcatgacctaaaaggcgttattgtcaccctgtcagacgacgggcatctgcaatgctcctacctgggcactgacccaagtcttttccaggccccaaatgttcagagtcgcgagctcaactatgatgaattggacgtggagatgaaggaattgcaaaaaataatcaaagacgtcaacaagagtcaaggggtgtggcctatgacggagcgggaggacgatctgaatgtcagcgtggtcgtgagtcccaacttcgattctgtctcccaagcgacagacgttgaagtagggaccgacttggtgccatcggtgacagttaaggtgactctgcagaacagagtcatattacagaaggctaagctgtctgtgtacgtgcagcctccattagaactgacgtgtgaccaatttaccttcgaattcatgaattttcccagctag

SEQ ID NO: 215594 - DNA, 2559 bp, synthetic construct
  misc_feature 1..2559: note = Description of Artificial Sequence: Synthetic coding sequence
  source 1..2559: mol_type = other DNA
atgtcattgtttaaggcaagggactggtggtccacgattttaggggacaaagaggaattcgatcaagggtgcctgtgtctcgctaacgtggacaacagcggcaacgggcaggacaagatcatcgttggcagcttcatgggctatctgaggatcttcagtcctcatcctgctaaaaccggcgatggcgctcaggccgaggatctgctcctcgaggtggatctgcgtgaccctgtcctacaggtggaagttgggaagtttgtgagcgggacagagatgcttcatctcgcggtgcttcatagtagaaagctatgtgtctactccgtctccggcactctgggcaacgtggagcatggcaaccagtgccagatgaagctcatgtatgagcacaaccttcagcgaacggcatgtaacatgacttatggctcttttgggggagtgaagggtagagatctcatatgcatccaatcaatggacggcatgttgatggtgtttgagcaggaatcatacgcgtttggtcgatttctcccagggttcctactgccaggccctctagcgtacagctcccgtacagatagctttctaaccgtctccagctgccagcaagtcgaaagctacaagtatcaagtcttggcattcgcaaccgacgcagataaacggcaggaaacagaacagcagaaactgggaagcggcaagcggctggtagtggattggacactgaacattggtgaacaggctctggatatctgcatcgtcagtttcaatcagagtgctagcagtgtgttcgtgctcggagagagaaactttttttgtctgaaagataacggtcagattcgcttcatgaaaaaacttgattggagcccaagctgttttctcccctactgtagtgtgtctgagggcaccatcaatacgctgattggtaaccacaacaacatgctccacatttaccaggacgtaacattaaagtgggccacgcagcttccacatatccctgtggcggtacgggtgggatgccttcacgatctgaagggtgtgattgtcacactgagcgatgacggtcatctgcagtgttcctatctcgggaccgaccctagtttgttccaggccccaaatgttcagtcgagggagctgaactatgacgaactggatgtggagatgaaggaacttcagaaaatcatcaaagatgtaaataaaagccaaggcgtatggcccatgacagagagggaggatgatctcaacgtgagcgttgttgttagcccgaacttcgatagtgtctcccaggcaacagatgtggaggtgggaacagacctggtgccaagtgttaccgtcaaggttacgctccagaatcgggtaatactgcagaaggccaagctctccgtgtatgtgcaaccacccctggagttgacttgcgatcagtttaccttcgaatttatgaataggaatccagacgggattccaagagtcatccaatgtaagtttaggctgccgctgaagttgatctgcttgcccggtcagccctccaagactgcatcacacaagattaccatcgacaccaacaagtctcctgtttccctgctgtctctttttccaggattcgcctctcagtccgacgacgaccaggtcaatgtcatgggtttccatttcctggggggagcccgaataactgtgctcgctagcaaaacatctcagagatatagaatccagtctgagcagttcgaggatctctggttaatcaccaacgagttgatattgagactccaggaatacttcgagaaacagggggtgaaggatttcgcttgcagcttttcaggatccattcctctgcaggagtactttgaactgatcgaccatcacttcgagcttcggatcaacggggagaagttagaagagcttctgtccgagcgagctgtgcagttccgagctatacagcggagacttctcgcgcgattcaaggataaaacccccgctcctctgcaacatctcgacactctcctggatggtacttataagcaggtgatcgcacttgcggatgctgtggaagaaaaccagggaaatctttttcagtctttcaccagactgaaaagtgccacgcacttagtgattctgctaattgcactgtggcaaaagctgtccgcagaccaggtggcaatcctggaggcagccttcctgccgctccaggaggacacacaggagttgggatgggaagagacggtcgacgctgctataagtcacctcttgaaaacatgtttgtccaagagcagcaaagagcaagctctgaacctcaattcacagctcaacatacctaaggatacaagccagctgaagaagcatatcacactgctttgcgaccgacttagtaagggtgggagattatgtctgtcaacagacgcagctgccccacagactatggttatgccagggggttgcaccaccattcctgagtctgatctcgaggagcgttcggttgaacaggattctaccgagctatttaccaaccatcgccacctgacagccgaaacccccaggcccgaggttagtcctcttcaaggagtgagtgaatag

SEQ ID NO: 215595 - DNA, 2664 bp, synthetic construct
  misc_feature 1..2664: note = Description of Artificial Sequence: Synthetic coding sequence
  source 1..2664: mol_type = other DNA
atgtcgctctttaaggcgagggactggtggagtacaattctgggagacaaggaagagttcgaccaaggctgcctttgcctggcaaacgtggataatagcggaaatggccaggacaaaatcatcgtaggctcattcatgggttacctccgcattttcagtccccatccagctaagaccggggacggcgctcaggccgaggacctgctcttggaggtagacctccgcgacccagtcttgcaagtggaagtcggaaagttcgttagtgggaccgagatgctgcatctagccgtcctccatagcagaaagttgtgcgtgtactccgtgtctgggactctcgggaatgtggagcacggtaatcagtgtcagatgaaactgatgtacgagcacaatctgcaacgcacagcatgtaatatgacttacggttcttttgggggtgtaaaagggcgagatctcatatgcatccaaagcatggatggaatgctgatggtgttcgagcaggagagttacgccttcggccgtttccttccgggattcctgctccctgggccactagcttacagtagccggactgactcattcctgactgtcagctcatgccagcaggtggagtcgtataagtatcaggtccttgccttcgcaaccgatgcagacaagagacaagaaaccgagcagcagaaacttggctcgggcaaacggctggtggtagattggacattaaatattggagagcaagctttggatatctgcattgtttccttcaaccagtcggcttccagtgttttcgtgcttggcgaacgcaactttttttgtctgaaggacaacggacagatcagatttatgaagaaactggattggtcgccctcatgctttctgccatattgctcagtttccgagggaacaatcaatacactgattggtaaccataataacatgctgcacatctatcaggacgtcaccctgaaatgggcgactcaactacctcacatacctgtggccgttcgcgtagggtgtcttcacgaccttaaaggcgtaatagtgactctaagcgacgatgggcacttacagtgtagttacctcggaaccgaccccagcttgtttcaagctcccaatgtgcagtccagagagctgaactacgacgaacttgacgtggaaatgaaagaactgcagaagattattaaagacgttaataaaagccagggtgtttggccaatgaccgaacgggaagacgatttgaatgtgtccgtggttgtgtctcccaactttgatagcgtttcacaggcaaccgacgtcgaggtgggaaccgacctagtgcccagtgtgactgtgaaagtgactctgcagaaccgagtcattctccaaaaggccaagctctccgtctacgtacaaccgccattggagctcacctgcgaccagtttacgttcgagttcatgacaccggatcttacccgtacagtctctttctccgtctacctaaaacgaagttacactccatccgaattggaaggtaacgccgttgtgagttatagcagacctacggtgcagaactcactcgggatccccagggttattcaatgcaagttccgcctacctttaaaattaatttgcctgcctggccagcccagcaaaaccgccagtcataagattactatagatacaaacaagtctccagtatctctcctttccctgttcccgggatttgcctctcaatctgacgacgaccaggtcaacgtgatgggctttcactttttgggcggtgctcgcattaccgtactagctagcaagacgtctcagaggtatagaattcaatccgaacagttcgaagacctgtggttaataacaaatgagctgattctccggctgcaagaatactttgagaaacaaggcgttaaggactttgcctgctctttctctgggtctatcccactgcaggagtactttgaacttatcgatcatcattttgagctccgaatcaacggagaaaagctggaagagcttctgagtgagagggccgtgcagtttcgcgctatccaacgacgccttctggccagattcaaggacaagacacccgctcctttgcaacacttagacacacttctggacggcacatacaaacaggtgatcgcactggccgacgcagtggaggagaatcaaggcaaccttttccagtcttttaccaggcttaagagcgctacccatctggtgatactgctgatcgccctgtggcaaaagctgtctgccgatcaggtggctattttggaggcggctttcctccccctacaagaagacacacaggaactcggttgggaggagaccgttgacgccgctatcagccaccttctgaagacatgcctaagtaagagctcgaaagaacaagctctgaatctgaactcccagctgaatattcccaaagacacttcccagctgaagaaacatatcaccctactatgtgaccggctgtctaagggcggacggctgtgtctatccacagacgcagccgcaccacagaccatggtaatgcctgggggatgcacaaccattccagagtccgatctggaagaacggtccgtggaacaagactctaccgagttgtttacgaaccaccgacatttgacagccgagactcctcgacctgaagtgagtcctcttcaaggagtgagcgaatag

SEQ ID NO: 215596 - DNA, 933 bp, synthetic construct
  misc_feature 1..933: note = Description of Artificial Sequence: Synthetic coding sequence
  source 1..933: mol_type = other DNA
atgggttatctgaggatctttagtccccatcccgctaaaactggcgacggtgcacaagcagaggaccttctactggaagtggatctgcgggacccggtattgcaggtggaggttgggaagtttgtgtccgggacagagatgctgcacctggctgtcttacattccaggaagttatgcgtgtactccgtgagtggaacactgggcaatgtggagcacgggaaccagtgtcagatgaagcttatgtatgagcataaccttcaacgaaccgcctgcaatatgacgtacggctcctttggcggtgtcaaaggcagggatctgatttgcatccaatccatggatgggatgctgatggtttttgaacaggagagctacgcctttggtaggtttctaccaggttttctgctgccaggcccactggcatactcttcacggaccgattcatttctgacagtgtctagctgtcagcaggtggagtcttataaatatcaggtcctcgcctttgcgacagatgcagacaagcgccaagagaccgaacagcagaagctcggttctggcaaaaggttggtggtggattggaccctcaatattggcgagcaggcactggacatatgcatcgtgagctttaatcagtccgcttcaagtgtcttcgtcttgggcgaaaggaatttcttttgtctcaaggataatggccagatacgcttcatgaagaaactcgattggtcaccctcttgcttcctgccctactgcagcgtctccgaggggacgatcaatacgcttatcgggaaccacaataacatgctgcacatttatcaagatgtcactcttaaatgggccacccaacttccgcacattcccgtagctgtacgagtcggatgtctgcagttctccctgtggaagcatctcctgcccagatcgagcacactggaaaagtag

SEQ ID NO: 215597 - DNA, 294 bp, synthetic construct
  misc_feature 1..294: note = Description of Artificial Sequence: Synthetic coding sequence
  source 1..294: mol_type = other DNA
atgagtctgttcaaggcccgtgattggtggtccacaatcctgggagacaaggaggagttcgaccagggctgtttgtgccttgcgaacgttgataacagtggtaacggccaagacaagatcatagtcggttcattcatgggctatctcagaatcttcagcccgcacccagcgaaaacgggagacggcgcacaggctgaagatcttctgctcgaagtcgacctcagagacccggtgcttcaggttgaagttggaaagttcgtttccggaactgagatgctgcacttggccgtctag

SEQ ID NO: 215598 - DNA, 1365 bp, synthetic construct
  misc_feature 1..1365: note = Description of Artificial Sequence: Synthetic coding sequence
  source 1..1365: mol_type = other DNA
taagatttagtgcctagcgtaaccgtcaaggtcacactgcagaatagagtgatattgcagaaggctaagctctccgtctacgtgcagccaccgctggagctgacatgcgaccagtttacctttgagtttatgacacccgacctgacgaggacggtcagtttctcagtgtacctgaagaggagctacacaccaagcgaactggaaggtaatgccgttgtcagttatagtagacctaccgatcgaaaccctgacggaattccccgtgttattcaatgtaagttcagactacccctgaaattgatttgtctgccaggacagccttctaagacagcaagtcataaaattaccatcgacacgaataagtctcctgtgtccctgttaagcttgttcccaggattcgctagccaaagcgatgacgatcaggtaaacgtgatgggcttccactttctgggcggagccagaatcacagtgctagcttccaaaacttcgcagcgctatcgcatccagtccgagcagttcgaagatctgtggctaatcacaaatgagctgattcttagactgcaggaatatttcgagaaacaaggggtaaaagactttgcctgttcctttagtggctcaatccctctgcaagagtatttcgagcttattgaccatcatttcgagcttcgtataaatggagaaaaacttgaggaactgttgtctgagcgcgctgtgcagttccgcgcaattcagagacggctcctggcccgttttaaagataaaactcctgccccactccagcatctggacacactgcttgatgggacgtacaagcaagttattgccctcgccgacgccgtggaagagaaccagggcaatctcttccaatcctttacccgcctgaaatctgccacccacctggtgatcttactaatagccctctggcagaaattaagtgcagatcaggtagctatcctggaggccgcattcctccccctccaagaggacacccaggagctcggttgggaggagactgtggacgccgcaatctcgcatctcctgaaaacgtgcctgtccaaatcttcgaaagagcaagccctcaacctgaactcacaactaaacattccaaaagatactagccagttaaaaaagcacatcacattactgtgcgaccgcctatcaaaagggggacgattatgcctgtctactgatgcagctgcacctcagaccatggtgatgccaggaggatgtaccaccattcccgagtctgatttggaggagcggagcgttgagcaggatagtactgagttgttcaccaatcaccggcatctcaccgcagaaaccccccgtcctggcaagcgcttggacgggctgcacaagcggtag

SEQ ID NO: 215599 - DNA, 1227 bp, synthetic construct
  misc_feature 1..1227: note = Description of Artificial Sequence: Synthetic coding sequence
  source 1..1227: mol_type = other DNA
atgaagttaatgtacgagcacaacttgcagcggaccgcatgcaatatgacatacggctctttcggaggagttaaagggagagatcttatatgcattcagtccatggacgggatgttaatggtttttgaacaggagtcctatgccttcggccgtttcttgccaggctttctcttacctggcccactggcatacagtagtcgcacagattcctttctcaccgtgtcctcctgtcagcaggtggagtcttacaagtatcaggtgcttgccttcgcaactgatgctgataagaggcaagaaactgaacaacagaaactgggcagtggaaagcgactcgtcgtggattggactctgaacatcggagagcaggctttggacatttgcattgtgtcatttaatcaaagtgccagcagtgtcttcgtgctgggagagcggaactttttctgtcttaaagacaatggtcagattcggttcatgaaaaagctggactggtccccctcttgttttctgccttactgcagtgtgtctgagggaacaatcaatacgcttattggcaaccacaacaacatgctgcacatctaccaggatgtcacactcaaatgggctacacagctgccccatatcccggtcgccgtaagagtgggatgcctgcacgacctgaagggtgttatcgttacactctcggatgatggtcacctgcagtgcagctacctcgggactgaccctagtctcttccaggctcccaacgtacagtctagagaactgaattatgacgagctcgatgttgagatgaaggaattgcagaaaatcatcaaagacgttaacaaatctcagggtgtgtggcctatgactgaacgcgaggacgacctcaacgttagtgtcgtggtgtctcctaattttgatagtgtgtcgcaggctaccgacgttgaggtcggcactgacctggttcccagtgtcactgtgaaagtcacactgcaaaacagggttatccttcagaaggccaagttgtcagtttacgtgcaaccacctctcgagctgacttgtgatcagttcacttttgaatttatgacacctgacctcactaggaccgtgtcgttctccgtatatcttaagaggagtatccatcaccagaattggaaggaaatgctcctgttccttattccagatcaacagattgagatcctgatggcttttagagagttgagtaacgtgaatcttgactttccatag

SEQ ID NO: 215600 - DNA, 984 bp, synthetic construct
  misc_feature 1..984: note = Description of Artificial Sequence: Synthetic coding sequence
  source 1..984: mol_type = other DNA
atggaaggctctaacggtttcgggatcgatagtatcctgtcccaccgggctggatctcccgctctccccaagggcgacccgctgctgggtgactgccgcagccccctggaattgtcacctcggtcagagagcagtagtgactgctcatcacccgcttctccaggcagggactgtttagagacgggaacaccccgacctggaggcgctagtgggccaggactagatagccatctgcagcccggtcagctgtcggctcctgcccagtctcgcaccgtgactagctcatttcttattagagatatcctggctgattgcaaaccattggccgcatgcgctccatatagtagctcggggcagccagccgcacctgagcccggtggcagactggccgctaaagcggctgaagacttccgcgacaaactcgataagtcgggatccaacgccagttctgatagcgaatacaaggtgaaggaggaaggcgatagagaaatttcgtcttcaagggacagtcctcccgtgcgcttgaagaagcctaggaaggctcgaactgcattcacagaccaccagctggcccagctggaaaggagcttcgagagacagaaatacttgagcgtacaggacagaatggagctggccgctagcttaaacctaactgacactcaggttaaaacatggtaccaaaaccgacgaaccaaatggaagcggcagaccgccgtgggactggaactgctggccgaggcgggtaactacagcgctctgcagcggatgtttcccagcccgtatttttatcctcagtcactggtctctaacttggatcctggcgctgcattgtatctgtatagaggcccttcagccccaccaccggctctgcagagacccttggttccaagaattctgatccatggattgcagggggcatccgagccaccaccccctcttccccctctagccggagtcctgcccagggcagcacagccgagatag

SEQ ID NO: 215601 - DNA, 984 bp, synthetic construct
  misc_feature 1..984: note = Description of Artificial Sequence: Synthetic coding sequence
  source 1..984: mol_type = other DNA
atggagggttcaaacgggtttggtattgatagcattttatcccaccgtgctggcagtcctgcgctgccaaagggggatccactgctgggagattgtcggagtccgctggagctgagtccaaggagcgagtcctctagcgattgctcatcaccggcatccccgggtcgcgactgtctggaaactggcacaccgcgtccgggtggagcatccggcccaggcctggattcgcatctgcagcctggccagctatccgccccagcccagtctcgcactgttacctcttcctttcttatccgggatattcttgcagactgtaagcccctggccgcttgcgctccctacagctcctccggacagccagcagccccagagccaggaggaaggttggcagctaaggcagctgaggacttccgcgacaaacttgataagtccggcagcaatgcttcgtctgactccgagtacaaagtgaaggaagagggggaccgcgagatatcctcatccagggactcaccacccgtgcgactgaagaagccacgaaaggcacgaaccgcattcaccgaccaccagctggcccagcttgaacgctcgtttgagaggcagaaatacctttccgttcaagatcgcatggagctggcagcttctctgaacctgaccgacacccaggtaaagacatggtaccaaaatcgaagaacgaaatggaagagacagacagctgtggggctggagctgctggccgaagccggaaattattccgcgctccagcgaatgttcccgtctccatatttctatccacagtccctggtctcaaacttagatccaggcgcagccctctacctgtaccggggaccatctgcccctcctcccgcactgcagcgtccgttggtaccacgcatactgatacatggcctacagggagcctctgaaccgccacccccattaccccctctggccggagtgctgcctcgcgctgcccagccacgctag

SEQ ID NO: 215602 - DNA, 270 bp, synthetic construct
  misc_feature 1..270: note = Description of Artificial Sequence: Synthetic coding sequence
  source 1..270: mol_type = other DNA
atgaccactagtcagaagcaccgggacttcgtggccgagccaatgggggaaaaaccagttggctcccttgccggaattggcgaggtattagggaaaaagctggaggaacgcggattcgacaaggcctatgttgttctggggcagttccttgtcctgaaaaaggacgaggatctcttccgggagtggttgaaagacacctgcggggctaacgctaagcagtctcgggattgctttggctgcctgcgcgagtggtgcgacgccttcctctag

SEQ ID NO: 215603 - DNA, 270 bp, synthetic construct
  misc_feature 1..270: note = Description of Artificial Sequence: Synthetic coding sequence
  source 1..270: mol_type = other DNA
atgacaacatcccagaaacatagggatttcgtggccgagccgatgggagagaagcctgtcggctcccttgcaggtatcggagaagtactcgggaaaaagttagaagagagggggtttgacaaggcttacgtagtgctggggcaattccttgtgctgaagaaggacgaagatctgtttagagaatggctcaaggatacatgtggtgcaaatgctaaacagagtcgggattgtttcggctgtctaagggagtggtgtgatgcatttctgtag

SEQ ID NO: 215604 - DNA, 270 bp, synthetic construct
  misc_feature 1..270: note = Description of Artificial Sequence: Synthetic coding sequence
  source 1..270: mol_type = other DNA
atgacaacatctcagaaacaccgcgatttcgtcgccgagccaatgggcgaaaagcctgttggctctctggcaggcatcggcgaggtcctcggcaaaaagctcgaggaacgaggcttcgataaggcatatgtggtcctgggtcagttcctcgtgctgaagaaggacgaagacctgttccgtgagtggttaaaggacacctgcggcgcaaacgctaagcagagccgggattgcttcggctgtctccgcgagtggtgcgacgctttcctttag

SEQ ID NO: 215605 - DNA, 87 bp, synthetic construct
  misc_feature 1..87: note = Description of Artificial Sequence: Synthetic coding sequence
  source 1..87: mol_type = other DNA
atgactactagccagaagcacagggactttgttgcagagccaatgggggagaagcctgtcggaagcctggctggaatcggtgaatag

SEQ ID NO: 215606 - DNA, 270 bp, synthetic construct
  misc_feature 1..270: note = Description of Artificial Sequence: Synthetic coding sequence
  source 1..270: mol_type = other DNA
atgacaacctcgcagaagcatcgggatttcgtagctgaaccgatgggagaaaagcccgtgggaagtctggccggtattggggaagtgttggggaagaagctggaagagcgaggattcgataaagcttatgtggtcttaggccagttccttgtgctgaaaaaggatgaagatttgttccgtgagtggctaaaagacacatgcggagctaacgctaagcaaagcagggattgtttcggctgtttgagggagtggtgcgatgcttttctgtag

SEQ ID NO: 215607 - DNA, 963 bp, synthetic construct
  misc_feature 1..963: note = Description of Artificial Sequence: Synthetic coding sequence
  source 1..963: mol_type = other DNA
atggccgatgaaaaaactttcagaatcggatttatagtgctcggcctctttctactggccttgggtacttttctgatgagtcacgatcgtccgcaggtctatggtaccttttacgccatgggcagcgtgatggtgattgggggaatcatctggtcaatgtgccagtgctatcccaagatcacttttgtccccgctgactccgactttcagggtatcctctctccaaaagcaatggggctccttgagaacggtctcgctgccgagatgaaatccccatctcctcagcctccatacgtcagactgtgggaagaagctgcctacgaccagtccctccccgacttctcccacattcagatgaaagttatgagctatagtgaagaccacaggagccttctggcaccggagatgggacagccaaaactgggtacttctgacggtggcgagggtggccctggcgacgtgcaggcttggatggaggctgccgtggttatccacaaaggttccgatgaatcagagggcgagaggagacttactcagtcctggcccggtccccttgcatgcccacaggggcctgcaccactcgcctcatttcaggatgatttagatatggactcgtccgagggctcgtcccccaacgcttcaccacatgacagggaggaagcatgttctccacagcaggagcctcaggggtgtaggtgtcctctggatcgctttcaggacttcgcgctcatagacgcgccaactcttgaagacgaacctcaagaaggccagcaatgggagatcgccctgcccaataactggcagcgctatccacgtacaaaggtggaggaaaaagaggccagcgatacagggggtgaggagcccgagaaagaggaggaagatttgtattatggcctgcccgacggggctggcgacctcctgcccgacaaggagctggggttcgaaccagatacccagggttag

SEQ ID NO: 215608 - DNA, 765 bp, synthetic construct
  misc_feature 1..765: note = Description of Artificial Sequence: Synthetic coding sequence
  source 1..765: mol_type = other DNA
atgcagagacccggagaacccggtgccgctcggtttggaccgcctgaaggctgtgctgatcatagaccgcacaggtacaggtcgtttatgatagaggagattctaacagaaccgccaggaccgaaaggtgcagcccctgctgcagcagctgcggctgcgggagaactgcttaaattcggggtccaggctcttctcgctgcgaggccttttcacagtcatctggctgtgttgaaagccgagcaggcagccgtgttcaagttcccacttgccccattgggctgctctggactaagctccgcgcttctggctgcaggcccagggttgccaggagctgccggtgcaccacatcttcccctagagctccagctgcggggtaagctcgaagccgcaggacccggtgagcccggtaccaaggccaaaaaggggaggcgctcacgcaccgtctttaccgagctgcagctgatgggattggaaaagagattcgaaaagcagaaatacctgtccacaccagacagaatagacttggccgagtctctgggtttgagtcagcttcaggtgaaaacttggtaccaaaatcgaagaatgaaatggaagaagattgtactgcaaggcggaggcctggagtcaccaacaaagcctaaggggagacctaagaaaaattccatccccacgtcagaacagctgaccgaacaggagcgggcaaaggatgcagaaaagcccgctgaggtccccggtgagccatctgaccgcagccgggaagattag

SEQ ID NO: 215609 - DNA, 303 bp, synthetic construct
  misc_feature 1..303: note = Description of Artificial Sequence: Synthetic coding sequence
  source 1..303: mol_type = other DNA
atggggcttgagaagaggtttgagaaacagaaatatctctctactcctgataggattgacctggccgagtccctgggcctgtcccaactgcaagtgaaaacttggtaccagaatcgtcggatgaagtggaaaaaaatcgtgttgcagggtggagggctggagagcccgaccaagccaaaaggacggccaaagaagaattccattcccacatctgaacagctgaccgagcaggagcgggctaaagatgctgagaaacccgcagaagttcctggagagccgtccgatcggagtagagaggactag

SEQ ID NO: 215610 - DNA, 840 bp, synthetic construct
  misc_feature 1..840: note = Description of Artificial Sequence: Synthetic coding sequence
  source 1..840: mol_type = other DNA
atgcattgtcacgccgagttgcggttgagcagcccaggtcaattgaaggctgccagaaggaggtacaaaacttttatgattgacgaaatcctatctaaggagacctgcgattatttcgaaaagctgtcactgtatagcgtctgtccaagcctcgtcgtgcggcctaaaccacttcactcatgcacaggctcaccgtcactgcgagcctacccactactgagtgtgataactagacaaccaaccgtgatatctcacctagtgccagcaacgccagggatcgcacaggccctctcatgccatcaggtgaccgaagcggtttccgccgaggctcccggaggcgaggcgctggcaagctcagaatctgaaactgaacagcctactcccaggcaaaaaaagcccagaaggtccagaacgatattcaccgagcttcagctgatgggactggagaaaaagttccagaaacagaaatatctcagtacaccagaccgcctggaccttgcccagagcctgggtctgactcagttgcaagttaaaacctggtaccaaaatagacgcatgaagtggaagaagatggtgctgaaggggggacaggaagctccaacaaagcctaaaggccgaccaaaaaaaaatagtataccaacatcagaagaaatagaggccgaagagaagatgaatagccaagcacagggccaggaacagctggaaccaagccagggacaggaggagttgtgcgaagctcaggagcctaaagccagagatgtgcctctcgagatggccgaaccccctgatcctccgcaagagctgccaatcccgagcagtgagcccccacctctgtcatag

SEQ ID NO: 215611 - DNA, 1887 bp, synthetic construct
  misc_feature 1..1887: note = Description of Artificial Sequence: Synthetic coding sequence
  source 1..1887: mol_type = other DNA
atggaacctccagacgctcccgctcaggccaggggtgcccctcggctgctgcttctagccgtgctgctcgcagcccacccagacgctcaggccgaggtgcggttgtctgtgcccccactggtcgaggtgatgagggggaagagcgtgatcctggattgcacccccacaggaacgcacgaccactacatgttggaatggttcctcaccgaccggtcaggggctcggcctcgcttggcgtccgccgagatgcaggggagcgagctgcaagttactatgcatgacacccggggaagatcccctccctatcagttagattctcagggaaggctggtactcgccgaggcccaggtgggagatgaacgggactatgtgtgcgttgtccgcgcaggagctgctggtactgcagaagctactgccaggttaaatgtgttcgccaagcctgaggccacggaggtgtctcctaacaagggtacattgtcagtgatggaggattcagcacaagaaatagccacctgcaattcgaggaatgggaaccccgctccaaagataacctggtataggaacggccagagacttgaagtgccagttgaaatgaaccctgaaggatatatgacatctcgtactgtcagagaggcttctggtctcctctccctgacctcaaccctgtaccttcgtctgcgcaaagatgacagagatgccagctttcactgcgctgcccattattcccttcccgaggggcgtcacgggaggttggacagtcctaccttccatcttaccctccactatccaacggaacacgtgcagttttgggtaggttctcctagtaccccggctggatgggtgagagagggcgacaccgtccagttattgtgtcgcggagacggaagtccatcgcccgaatacaccctttttcgacttcaagacgagcaggaggaagttcttaacgtgaacctggagggtaacctgacccttgagggcgtgacccgcggtcaatcggggacctacggatgtagagtagaagattacgatgcagccgacgatgtacagctgagcaagacactggaactccgtgtggcctacctggatcccttggagttaagcgaggggaaggtgctttctctgccgctcaactcttccgccgttgttaattgcagtgtccacggcctccccacacccgcactccgctggaccaaagattccacccctcttggcgatggacccatgctgtcgttgtcttcgattacatttgactccaacgggacctatgtatgtgaggcaagcctgccaactgtgccagtattgtctcgtacacagaatttcaccctcctcgtgcagggcagtcctgagctgaagactgctgagatcgagcccaaagcagacggaagctggcgcgagggggacgaggtcaccctcatttgcagtgccaggggacatcccgaccccaagctgtcatggagccaactcggtggaagtccagccgagccaataccagggagacaggggtgggtgtcttcaagcttgacacttaaagtcacatctgcgctcagccgggatggcatatcttgcgaagcatccaatcctcacggaaataaacggcacgtttttcattttggtaccgtgtcacctcagacctcccaggcgggagtcgccgttatggcagtggctgtcagcgtgggactactcttgctagttgtggcagtgttctactgcgtgagacgaaaaggcggaccttgctgtcggcagaggagggagaaaggagcccctcctccaggagagccaggtctttctcattccggctccgagcagcctgaacagactggtctcctgatgggtggagcctccggcggagcacggggaggctccggcggattcggggatgagtgctag

SEQ ID NO: 215612 - DNA, 1767 bp, synthetic construct
  misc_feature 1..1767: note = Description of Artificial Sequence: Synthetic coding sequence
  source 1..1767: mol_type = other DNA
atggaaccccctgacgccccagcccaggctcgtggcgctcccaggctgctgctactggccgttctcttagccgcacacccagacgcacaggccgaggtgcggcttagtgtccctccccttgtggaggtcatgaggggcaaatcagtcattctggactgcactcccaccggaactcacgaccactatatgctggaatggttcctaacagataggagcggcgcaaggccaagactcgcctccgctgaaatgcagggttccgaattacaggtgacaatgcatgatacccgcggaaggtcaccaccctatcagctggattcacagggcaggttggtgctggccgaggcccaggtcggcgacgaacgagattacgtgtgtgtggtcagagccggagccgctggaacagccgaggccactgcacgcttgaacgtgtttgccaagccagaagcaactgaggtgtcaccaaataaggggaccctttctgtgatggaagactccgcccaggaaattgctacctgtaattcgaggaatggcaaccctgccccaaaaatcacatggtatagaaatggacagagactagaggtaccagtcgaaatgaacccggagggatacatgactagcagaaccgtgcgcgaggcgtccgggttattgtctttaaccagcactctctacctccggctgcgaaaggacgacagggatgcatcgttccactgcgctgcccactactctctcccagaaggcaggcatggcagattggattctcccacattccatcttaccctacattatcctacagagcatgtgcagttctgggtggggtccccctccactcccgctgggtgggtccgggagggtgatacagtacaactgctgtgccgcggagatggcagcccgtccccggaatataccctgtttaggctgcaggacgaacaggaggaggttctcaacgttaacctggagggtaatttaacattggagggcgtaaccagaggccagtccggcacttacggctgtcgcgtcgaggactacgacgctgcagacgacgtccagctgagtaagacactcgaactcagggtggcgtaccttgatccgctggagctctctgaagggaaagttctctctcttccactgaatagttcagcagtcgtcaattgttcggtccatgggctgccaacgccagctcttcggtggacaaaggacagcactccactcggagacgggccaatgctgtccctgtctagtatcactttcgactccaacggaacttatgtgtgtgaagcgagtctcccaacggtgcccgtcctcagtaggacgcagaactttaccctgctggtgcaaggttcacccgaactgaaaacggccgagattgaacccaaagctgacggttcttggcgcgagggagacgaggtcacacttatctgcagtgcacgcggacatcccgatccaaagttaagttggtcccaattaggaggatctcccgctgaaccaatcccaggacggcaggggtgggtctcctctagcttaaccctgaaggtcaccagtgcattatcgcgagatggaatctcatgtgaggctagtaaccctcacggaaataagaggcatgtgttccacttcgggaccgtgtctccacaaacctctcaggccggtgtggctgtcatggctgtggccgtcagtgttggcctgctgctcttagtagttgccgtcttctactgcgtacgccgaaaggggggtccttgctgtcgccagcggcgagaaaagggggctccttag

SEQ ID NO: 215613 - DNA, 321 bp, synthetic construct
  misc_feature 1..321: note = Description of Artificial Sequence: Synthetic coding sequence
  source 1..321: mol_type = other DNA
atgatgacacttgtccctcgagctcggacacgtgccggtcaggatcattacagccacccttgccccaggttctcacaggttctgctaaccgaaggcattatgacatactgcctaaccaagaatctgtcagatgtgaatatccttcaccgcctgcttaaaaacggcaacgtgcggaatactctattacaatcaaaagtgggacttctgacttactatgtgaagttgtacccaggcgaggtgactctgctcaccaggccttctattcaaatgcgcctttgctgtattacaggcagtgtgtcaaggccccgatcacagaagtag

SEQ ID NO: 215614 - DNA, 321 bp, synthetic construct
  misc_feature 1..321: note = Description of Artificial Sequence: Synthetic coding sequence
  source 1..321: mol_type = other DNA
atgatgacactggttccacgggcacgcacaagagccggacaggatcactattcgcatccatgtcccagatttagtcaggtgcttttgaccgagggcataatgacatactgtcttacaaaaaacctcagtgatgtgaacattctgcatcgcctgctcaagaacggtaatgtgcgcaatacgctgttgcagagcaaagtgggattgctcacgtactacgtgaaactgtatcccggagaggtgaccctgctgactcggccttccatacagatgcggctgtgttgcattaccgggtctgtaagtcgtccccgatcgcaaaagtag

SEQ ID NO: 215615 - DNA, 1146 bp, synthetic construct
  misc_feature 1..1146: note = Description of Artificial Sequence: Synthetic coding sequence
  source 1..1146: mol_type = other DNA
atggagcgcggaatgcatctgggtgccgcagccgctggcgaggacgacctctttttgcataagtccctgtccgcctctactagcaagcggctcgaagcggcttttagatcaacaccccctggcatggatctgtctctcgcacccccaccgagggagagacccgcatcaagttcttctagccctcttggttgttttgagcccgcagatcccgagggggctggattgctcctgccacccccaggtggcggaggcggtgggagcgctggatccggaggaggaggcggaggcggagtcggcgtgccaggtctgctggtagggtctgctggggtagggggagacccaagcctatcgtccttacctgccggagctgccctctgtctgaagtatggagaaagtgcaagccgaggatccgtcgcggaatctagcggcggagagcagagtcccgacgacgacagcgacggtcggtgcgagctggtgctccgggctggcgtggctgaccccagagcctcacctggggcaggtggtgggggagcaaaagccgcagagggctgctccaacgcccatttacatggtggcgcaagcgtccccccaggcggattgggcggtgggggtggtgggggatccagcagcggttcctcggggggtgggggtggcagtggtagcggatcaggtggcagcagctcctccagcagctcctctagtaaaaagtccaaagaacagaaggctctgaggctgaatatcaatgctagagagcggaggcgtatgcatgacctgaacgacgccctcgacgagctccgggctgttattccttacgcccactctccctcggtgagaaagttatccaaaatcgcaaccctgctgcttgccaaaaactacattttgatgcaggcccaagcccttgaagagatgcggcgactcgtcgcttacctaaatcagggccaggcaatttccgctgccagccttccaagctcagcagctgcggctgctgcggctgccgctctgcatcccgctcttggggcatacgagcaggccgctggctatccattctcagccggtttgcccccagctgcatcttgtcctgagaaatgcgccctctttaatagcgtgtcctcgtctctgtgtaagcagtgtacggaaaagccttag

SEQ ID NO: 215616 - DNA, 678 bp, synthetic construct
  misc_feature 1..678: note = Description of Artificial Sequence: Synthetic coding sequence
  source 1..678: mol_type = other DNA
atggctgaactgaagtctctcagcggagatgcatatttggccctttctcacggatatgccgctgcagctgcagggctggcgtacggggcagcacgggagcccgaagcggcaaggggctacgggacaccgggacctggcggtgacctgccagctgctcctgccccacgtgcacccgcacaggcagctgaaagttcgggggaacagtctggcgatgaagacgacgcgtttgaacaaagaagaagacgccgaggtcccggtagtgcggcagatggacgcagaagaccgcgtgaacagcgctcactccggttgtccattaacgctcgcgaaagaaggcggatgcacgacctcaacgacgctctggacggcctgcgtgccgtgatcccctatgctcatagccctagcgtgaggaaattgtccaagatagcgactctgctgctggccaaaaattatatcttgatgcaggctcaggccctggacgagatgaggcgattggtggcctttcttaatcagggtcagggcctcgccgctcccgttaacgccgctcctctgacccctttcggccaggcgactgtgtgtcccttttcagccggagccgctttaggcccatgccctgataaatgtgctgcattttccggcactccttcagctctgtgcaaacactgtcacgagaaaccatag

SEQ ID NO: 215617 - DNA, 1239 bp, synthetic construct
  misc_feature 1..1239: note = Description of Artificial Sequence: Synthetic coding sequence
  source 1..1239: mol_type = other DNA
atggagaggattccctccgcccagccccctcccgcatgtctgcctaaagcacccggtcttgagcatggggacctcccaggtatgtatcccgcacatatgtatcaagtgtacaaatctagacgcggaatcaagaggagcgaggattcgaaggagacctacaagctaccccaccgtctcatcgagaagaagcggagggatcgcattaatgagtgcatcgcacagttaaaagacctgctacccgagcatttgaagttgaccactctaggccacttggaaaaggccgtggtcttggaattaaccctgaagcacgtgaaagccctgaccaaccttatcgatcagcaacaacaaaagattatcgccttacaatccggtttacaggctggagaactgtctggcagaaacgtcgaaaccgggcaggagatgttttgctcagggttccaaacctgtgctagggaagtgttgcagtacctggcaaagcacgaaaacacccgtgacctcaagtctagccaactcgtcactcacttgcatcgcgttgtcagcgagctactgcagggcggtacatcccgaaagccatcagacccagcccctaaggttatggattttaaagagaagccatccagcccggcaaaaggatctgagggtcctgggaagaattgtgtgccagtaatccagcggaccttcgcccactcgagcggcgagcaatcagggtccgacaccgacacagactccggctatggaggtgagtctgagaagggcgacttaagatcggagcaaccatgctttaaaagcgatcacgggcgtcgatttacaatgggggaacgtatcggggcaatcaaacaggagtctgaggaaccacccactaagaagaataggatgcagttgtctgatgatgaggggcatttcacctctagcgatctcatttcctccccatttctgggcccacacccgcaccagcctccgttctgcctgcctttttacctaattcctccctccgccaccgcatacctcccaatgctcgagaaatgttggtaccctacatcggtgcccgttctgtaccccggacttaacgcatccgcagcggctctgtcatcatttatgaacccagacaagatttcggcccctctgctcatgccccagcgcctgcccagcccactgcctgcacacccctccgttgatagcagcgtgcttttgcaggcacttaagcccatcccacctctgaatcttgaaacaaaggattag

SEQ ID NO: 215618 - DNA, 378 bp, synthetic construct
  misc_feature 1..378: note = Description of Artificial Sequence: Synthetic coding sequence
  source 1..378: mol_type = other DNA
atgcctcattcttcagactcttctgattcaagcttcagccgttcgcctcccccaggaaaacaggacagttcggacgacgtgcggagggttcagcggagggagaagaacagaatcgccgctcaaaaatcgcgccagagacagacccagaaggccgacacactccacttagaaagtgaggatctcgaaaagcagaatgcggcacttaggaaggaaatcaaacaactaacagaagaactcaagtactttactagcgtgcttaattcccatgagccactgtgtagcgtgcttgctgcatccaccccttcaccccctgaagtggtgtatagtgcgcatgcgttccaccagccccatgtcagctcaccaaggttccagccgtag

SEQ ID NO: 215619 - DNA, 384 bp, synthetic construct
  misc_feature 1..384: note = Description of Artificial Sequence: Synthetic coding sequence
  source 1..384: mol_type = other DNA
atgagtcaggggcttcccgcagccggttcagttctgcagcgttctgtcgccgctcccggaaatcaaccgcagccccaaccacagcagcaatcgccagaggatgacgaccggaaggtgagaaggagagagaaaaatcgagtcgctgcgcagcgaagtcgcaaaaaacaaactcagaaagcagacaagcttcatgaggagtatgagtcactggagcaggagaatacaatgctgcgcagagaaatcggcaagctgacagaagaactgaaacacctcacagaagccctaaaagaacatgagaagatgtgtcccttattactatgtcccatgaacttcgtgccggttccccctaggcccgatccagtggctggttgcctgccccgatag

SEQ ID NO: 215620 - DNA, 489 bp, synthetic construct
  misc_feature 1..489: note = Description of Artificial Sequence: Synthetic coding sequence
  source 1..489: mol_type = other DNA
atgaaagagaccatcatgaaccaggagaagctggctaaactccaggctcaggttagaatcggcggaaaaggcaccgctcgccgtaagaagaaggtggtccataggacggccacggcagacgataagaaactccagttcagcctgaagaaactgggcgtcaataacatttctggaatcgaggaggttaatatgtttaccaaccagggtactgtcatccacttcaataatccaaaggtgcaggcatcattggccgctaacactttcaccattactgggcatgcggaaaccaagcagctgactgagatgctgccttcgatcctgaatcaactaggcgctgattccctgacatctctccggagactggcagaagcattaccaaaacaaagcgtggacggcaaggcacctctcgctaccggagaggatgatgatgatgaggtgcccgatctggttgagaacttcgatgaagcttctaaaaatgaagcaaactag

SEQ ID NO: 215621 - DNA, 621 bp, synthetic construct
  misc_feature 1..621: note = Description of Artificial Sequence: Synthetic coding sequence
  source 1..621: mol_type = other DNA
atgaggaggaccggagcccctgcacaggcagattctcggggtagaggcagagcaagggggggatgtccgggaggcgaagccaccctgtcgcagcccccaccgagaggtgggacaagagggcaggagcctcagatgaaagaaacgatcatgaaccaggagaaactggcaaaattgcaagcccaggttaggatcggcggaaagggcaccgcaagaagaaagaagaaggtggtccataggacagcaaccgcagatgacaagaaactacagttttctctgaaaaaactgggcgtcaacaatatctccggaatagaggaagtgaacatgttcaccaaccagggaaccgtgatccacttcaacaatccgaaagtccaggcaagcttagccgcaaataccttcacaatcaccggccatgcggagaccaagcagcttaccgaaatgctccccagcatcttgaaccagttgggagcagactccctgacatcgttgagacgcctagcagaggccctgcccaaacagtcggtagatgggaaggccccactggctaccggcgaggatgacgacgatgaggtgcccgacctggtggagaacttcgatgaggcaagtaagaacgaggccaattag

SEQ ID NO: 215622 - DNA, 1158 bp, synthetic construct
  misc_feature 1..1158: note = Description of Artificial Sequence: Synthetic coding sequence
  source 1..1158: mol_type = other DNA
atggccgcagccttgttcgttctgttgggctttgccctcctcggcacccatggagcgtccggcgctgcaggctttgtacaagcccctctaagtcagcagcgctgggtgggaggatccgtcgaattgcattgtgaagctgtgggttcacctgtgccagagatacagtggtggtttgagggccaggggcctaacgacacatgctcacagctatgggacggcgctcgactggatcgcgtccacatccatgccacctatcaccagcacgccgcttccaccatcagcattgacaccctggtggaggaagacacagggacctatgagtgcagggcctccaatgatcccgatagaaatcatcttacccgcgctcccagagtcaaatgggtgcgagcccaggccgttgtgctggtattagaaccagggacggtgttcaccacagtggaggacctcggatccaagatcctcctgacgtgctctctgaatgattccgctacagaggtaactggtcaccggtggttgaagggcggtgttgtactgaaggaggacgctctgcctggccagaaaaccgagttcaaggtcgactctgacgaccaatggggagagtacagctgtgtctttttaccggagcccatggggactgcgaatatccaactacacgggccaccgagggtcaaagcagttaagtcctccgagcacatcaacgagggggagaccgctatgctggtttgcaagtctgagagcgtacctcctgtgacagactgggcatggtacaaaattacagattcagaggacaaagcactgatgaatggcagcgagagccggttctttgtgagctccagccagggcaggagcgagttacacatcgagaacctcaacatggaagccgatcccggacaataccgttgtaacggcaccagctcaaagggatctgatcaggccatcatcactctgcgtgtccggtcccacttggcagctctatggccttttctgggaatagtggcagaagtccttgttctcgttacaattatattcatctacgaaaagcggcgaaaaccagaggatgttcttgatgatgacgatgcgggtagcgccccactgaaaagttccgggcagcatcagaatgataaaggtaaaaatgtcaggcaacggaactctagctag

SEQ ID NO: 215623 - DNA, 618 bp, synthetic construct
  misc_feature 1..618: note = Description of Artificial Sequence: Synthetic coding sequence
  source 1..618: mol_type = other DNA
atgaagcagtccgatgcatcacctcaagagagagttgattccgatgatcaatggggggagtattcctgcgtgttcctgcctgagccgatgggcactgcaaatattcagttacacggcccacccagggtaaaagcagtgaaatcaagtgagcacatcaatgagggagaaaccgcaatgcttgtgtgtaagtcagagagcgttccgcctgtgacagactgggcttggtataagataactgacagtgaggataaagccctgatgaacggaagcgagtcgcgcttcttcgtgagctcctctcaaggtcgctccgagctgcatattgaaaatttaaatatggaagccgatcctggccagtataggtgcaacgggacttctagtaaaggatccgaccaggctatcatcaccctgcgggttcgttctcacctggctgcactctggccattcctcggcatcgtggccgaggtactggtgctggtcacgattatctttatctacgaaaagcgacgcaaacccgaggatgtccttgacgatgacgacgctggatctgctcccctgaagtcctcagggcagcatcagaacgataaaggcaaaaatgtaaggcagaggaacagctcatag

SEQ ID NO: 215624 - DNA, 810 bp, synthetic construct
  misc_feature 1..810: note = Description of Artificial Sequence: Synthetic coding sequence
  source 1..810: mol_type = other DNA
atggctgccgctttgttcgttctgctggggttcgccctgcttggtacccacggagcatccggtgcggcaggaacggtgtttaccacggttgaggacctaggcagtaaaatcctgctcacttgcagcctgaatgattccgcgaccgaagtgaccggacacagatggctcaagggaggagttgtcctcaaagaagatgctctgcctggtcagaagacagagttcaaggtggattcagatgatcagtggggggaatacagttgcgtattcctccccgaacctatggggaccgccaacatacaactgcatggccctcccagggttaaggcagtaaagtccagcgagcatataaatgagggagagaccgcgatgctcgtgtgcaagagcgagtccgtccctccagtaacagactgggcctggtacaaaataactgattccgaagataaggctctgatgaatggcagcgaatcgaggtttttcgtcagttccagccagggcagaagtgagctccatatcgaaaacttaaacatggaagccgaccccggtcagtaccgatgtaatggaactagttcgaagggatccgatcaagcgatcataacactgcgggttcgatcccacctagccgctctgtggcctttcttggggatcgtggcagaggtgctagtgctagtgactataatctttatctacgagaaacgtaggaaaccagaagatgtcctcgatgacgatgacgcaggatcggctccactgaaaagttccggacagcatcagaacgacaaaggcaagaatgtgcgtcagcggaatagttcatag

SEQ ID NO: 215625 - DNA, 531 bp, synthetic construct
  misc_feature 1..531: note = Description of Artificial Sequence: Synthetic coding sequence
  source 1..531: mol_type = other DNA
atgggaacagccaacatccagctccacgggccacctcgggtgaaagccgttaaaagctcagagcacatcaacgaaggtgagactgcaatgctcgtgtgcaagtctgaaagcgttcctcccgtgaccgattgggcttggtataaaattaccgactcagaggataaggccctgatgaatggatctgaaagccgattctttgtatcctcttcgcaaggaaggagcgaactccatattgagaacctgaatatggaggcagatcctggccaatatcggtgcaatggtaccagctccaaaggttcagatcaggcaatcatcaccctgagggtgcgatcacaccttgcagccttatggccattcctgggaattgttgccgaagtgcttgtactggtcaccattatcttcatttatgagaaacgtcggaaaccggaggatgtcctcgacgacgatgatgctggcagcgctcccctcaagtcctctggacaacatcagaacgataagggcaagaacgtgagacagcggaacagctcctag

SEQ ID NO: 215626 - DNA, 2985 bp, synthetic construct
  misc_feature 1..2985: note = Description of Artificial Sequence: Synthetic coding sequence
  source 1..2985: mol_type = other DNA
atgcgccgtagaccgccttctcgcggtggcaggggagcggctcgagcccgagagacaagaaggcaacctcgacatcggagcggtagaagaatggctgaggctatatcatgtaccttaaactgtagttgtcaaagcttcaaaccgggaaaaattaatcatcgccagtgcgatcagtgtaagcatggctgggtggctcacgccctgtctaagctccgcattccacctatgtatccgaccagccaagtcgaaatcgtgcagtcaaacgtggtgttcgacataagctctctgatgctgtacggtactcaggccatccccgttcggcttaagattttgttggacagattattttcagtcctgaaacaggatgaggtgttgcaaatcctgcacgctctagactggaccctgcaggactatattcgtggctacgtcctgcaggatgccagtggcaaggtgctcgaccactggagcatcatgacctcagaggaggaagtggccacattgcagcagttcctacgcttcggagagacaaagtctattgttgaactcatggccatccaggagaaggaggagcagtcaattatcatcccaccgtctacagccaacgtggatataagggctttcattgaaagttgttcacaccgatccagctcattacccacccctgtggacaaaggcaacccaagctccatccaccccttcgagaacctgataagtaatatgaccttcatgctcccgtttcagttttttaaccccctaccaccagctctcataggctcattgccagagcaatatatgctggagcaagggcatgatcagagccaggacccaaaacaggaggtgcatggcccatttcccgattcctcgtttctgactagttcctctaccccttttcaggtggagaaggaccagtgcctgaactgcccagacgccataacaaagaaggaggattctacacacctgagcgattcttcctcatacaatattgttactaaatttgaacgcactcaactgtccccggaggcaaaagtgaaaccagaaagaaacagcctaggaaccaaaaagggcagggtgttctgtacagcttgcgaaaagacattttatgataagggtacactgaaaatccactacaatgcagtccaccttaaaattaagcacaagtgtaccatcgaagggtgtaacatggtctttagttcactgcgttctcgcaaccgccactctgctaaccctaatcccaggctacacatgcccatgaatcgaaataatcgagacaaggacctgagaaactccctgaatttagcctcatcagagaactacaagtgcccgggttttaccgtgacatcgcccgattgccgccctccaccgtcctatcctggtagcggggaggatagtaaaggacagccggcatttcccaatatcggccagaacggcgtactatttccgaatctgaaaactgttcagccggtgttacctttctatcgctccccagctacgccagctgaagtggccaacaccccaggtattttgccttctcttccactgctgtcctcttctattcctgagcagctgatcagtaatgagatgccatttgatgcactgcctaaaaaaaaaagccgcaaaagcagtatgccaattaagattgagaaggaggctgttgaaatcgccaacgaaaaaaggcataacctgtcctctgacgaggacatgcccctgcaggtcgtctccgaagacgaacaggaggcgtgttcaccccagagtcatcgagtctccgaggaacaacatgtgcagtccggcggacttgggaaacccttccctgagggcgagaggccgtgccaccgcgagtcagtaatagagtcatcaggcgctatatcccagacccccgagcaagccacacacaattcagagcgggaaaccgagcagactcctgccctgatcatggtcccacgcgaggtcgaagatggcggacatgagcattactttacccccggaatggaacctcaagttccattttctgattatatggagcttcagcagagactgcttgccggagggctcttctccgcactgagtaaccgcggaatggcatttccatgtttggaggatagcaaggaactggagcacgtcggacagcacgctcttgcaaggcaaatagaagaaaacaggttccagtgtgacatatgtaagaagacgtttaaaaacgcatgcagcgttaagattcaccataaaaatatgcacgtaaaagagatgcacacctgtaccgtggagggctgtaatgccaccttcccttctcggagatccagagatagacactccagcaatttgaatctgcaccagaaggcactctcacaggaagctctcgaatcctccgaagatcacttcagggccgcatatttactgaaggacgtggcaaaggaggcttatcaagatgtggcttttactcagcaggcatcccagacgagcgtgattttcaaggggacatctaggatgggatccctggtctatcccatcacacaggtgcatagcgcatcactggagtcctataacagcggccctcttagtgagggcacaattttagacctctccacaactagcagcatgaaaagcgaatccagctcacacagttcctgggactcagacggtgtaagcgaggagggaacggttctgatggaggattctgacgggaactgcgaaggtagttctctagtgcccggagaagatgagtaccctatctgtgtcctcatggaaaaggccgaccaatctttggcttccctgccgtccggactccctattacttgccatttatgccaaaagacatattcaaataagggtacgttccgggctcactacaagacggttcacctgcgccagctgcacaaatgcaaagtccccggatgcaataccatgttctccagcgtcagatcaaggaacagacattcccagaatccgaacctgcataagagcctcgcaagttctccctcgcatctgcagtag

SEQ ID NO: 215627 - DNA, 2964 bp, synthetic construct
  misc_feature 1..2964: note = Description of Artificial Sequence: Synthetic coding sequence
  source 1..2964: mol_type = other DNA
atgagatgcaggaacatgttcttttctttcaaggccagtctttgtggctgcggagcggctactgccccaagtctgaccgccattagttgtactctcaactgttcttgccagtcattcaagccagggaagataaatcataggcagtgtgatcagtgtaagcatggctgggtggcacatgccctctcaaagctgagaattcctcccatgtatcctacttcccaggtcgagatcgtacaatctaacgtggtatttgacatttccagtcttatgttgtacggaacacaggctatccctgtgcggctcaagatactgctggacagactgttttcagtgttgaaacaagacgaggtgttacagatactccacgctctggactggaccctgcaggattatattaggggatatgttttacaggacgcttccggcaaagtcctggaccattggtccattatgacatccgaggaagaggtagctacactccaacagttcttacggttcggcgagacgaaatctattgttgagttgatggcaattcaggaaaaagaggagcagagcattattatcccaccttctaccgccaacgtggacatcagagccttcatagaatcttgcagccacagaagcagtagtttgccaactcccgttgataagggaaatccatcatctattcatccgttcgaaaatctcatttccaatatgaccttcatgcttccttttcagtttttcaatcccctccctcctgccctgattgggtccctgcctgagcagtacatgctggagcagggacacgatcagtcacaggatcctaaacaggaggtgcatggcccttttccagactcaagttttctgacctcatcaagcacaccgtttcaggtggagaaagatcagtgcttgaactgccctgatgccatcaccaagaaagaagattccacccacctgtccgattcctcttcctacaacattgtcaccaaattcgaaagaacccaactgagccccgaagctaaggttaagcccgagcggaattctctgggaactaaaaaaggccgagtgttctgtacagcctgcgagaaaaccttctacgataagggaacgctcaaaatacattataatgctgtgcacttaaaaattaagcacaagtgtactatcgaaggctgtaacatggtgtttagtagccttagaagcagaaatcgccactccgccaaccccaaccctcgccttcacatgcctatgaaccgcaacaatagggataaggatctaaggaacagcctgaatctggcatcctcagaaaactacaagtgcccaggatttaccgtcacttcaccggattgtagacctcctcctagctaccctggatcaggggaggattccaagggccagcctgctttcccaaatattggacagaacggggtgctgtttcctaacctgaaaacagtgcaaccagtgctaccgttttacaggagcccagctacacctgctgaggtggccaacactccaggtatcctgccttctcttcccttactttctagctctatacctgaacaattgatcagcaacgagatgcctttcgacgccctgccaaaaaagaagtctcgtaagagcagtatgcccatcaaaatcgagaaggaggcagttgaaatcgcgaacgaaaagcgacacaacctcagttccgacgaagacatgcccttgcaggttgtttccgaggatgagcaggaggcctgctcacctcagagccacagggtaagcgaggagcagcacgtacaatctggaggattaggtaagcctttcccagagggtgagaggccatgccaccgggagtctgtcatcgagagctctggagccatcagccaaaccccggagcaggccactcataactccgagcgtgagactgagcagacacctgctctgataatggtgcctcgagaagtggaggacggaggacatgagcattatttcacccctgggatggagccacaggtgccctttagtgactacatggaacttcaacaaagacttctggccggagggctgtttagcgcactgtctaaccgtggaatggcattcccttgcctggaagactctaaggaacttgaacatgtgggtcagcatgccttagccaggcagatcgaagagaatcgcttccaatgtgacatatgcaaaaaaacgtttaaaaacgcatgttctgttaagatccatcacaagaatatgcatgtgaaggaaatgcacacttgtactgtcgagggttgcaacgctacgttcccgagcaggagatcaagggacagacattcttccaatctcaatctgcatcagaaggcgctgagccaggaggctctcgagtcttcagaggaccactttcgcgctgcatatctactgaaagacgttgccaaagaagcgtaccaagatgtagctttcacccaacaagcctctcagaccagtgtgattttcaagggcacttctaggatggggtccctggtatatccgattacccaagttcactcggcctccctcgaaagttacaactctggaccactgtctgaaggaacaattctggatctctccacaacctccagtatgaaaagtgaatcttcttcacacagctcctgggactccgatggcgtgtcagaggagggcaccgtgcttatggaggatagtgacgggaactgtgagggctcctcgctggtgcctggggaggatgaatacccaatttgcgttctcatggagaaagccgaccagagtctggcaagcctcccatctggtttgcctatcacatgccatctttgccagaaaacatattcaaacaaggggacatttcgagcacactataaaactgtgcacctccgccaattgcacaagtgtaaggtccccggatgcaacaccatgtttagtagcgtccgctccagaaaccgtcatagccagaacccaaatctccataaatccctggcctcatccccgtcgcacctgcagtag

SEQ ID NO: 215628 - DNA, 2712 bp, synthetic construct
  misc_feature 1..2712: note = Description of Artificial Sequence: Synthetic coding sequence
  source 1..2712: mol_type = other DNA
atggcgcatttggggcctacaccccctccccatagcctcaattacaaatctgaggatcggctgtctgagcaggattggccagcatacttcaaggtgccttgttgcggcgtagatacgtcccagatcgaaagcgaagaggctgaggtggatgtgcgggagcgcgagacacagcgcgacagggagccaaagagagctagagacctgactctgcgggactcttgtacagacaactcaatgcagttcgggacccgaactaccaccgccgagccaggcttcatggggacatggcagaacgctgacacaaatctactctttcgaatgagccaacaggctatcagatgtactctagtgaattgcacatgcgagtgctttcagccaggtaagatcaacctgcggacatgcgaccagtgtaagcatgggtgggttgcccatgccttggataaactgtccactcagcacttataccaccctacacaggtggagatcgttcagtctaatgttgtgttcgacatcagctcactgatgctgtatggaacacaggccgtccctgtgcggctaaagatactattagatcggttgttttctgttctcaagcaagaggaagttctgcacattctgcacggcctcgggtggaccctgagagattacgtaagaggctatatcctccaagacgctgccggtaaagtcctcgatcgatgggctatcatgtctagggaagaggaaataattacactgcagcaatttctcaggttcggtgaaaccaaatctatcgtggagctgatggccattcaagagaaagagggccaggccgtcgcggtacctagtagcaaaaccgactctgatatccgcaccttcatcgaatcgaacaaccggacccgaagcccatctctgcttgctcacctagaaaattctaatccatcttctatacaccactttgagaacatccccaattccctcgcatttctcttacccttccagtacatcaatcctgtgtccgccccacttttgggcctccccccaaatggccttctcctagaacagccaggcctccgattacgcgagcctagcctgagtacccagaacgaatataatgaaagctcagagtccgaggtatccccaaccccctataaaaatgaccagacccctaatcggaatgctctgacaagcattaccaatgtggaacccaagacggaaccagcttgcgtaagtcccatccagaactccgcacctgtgagtgacctcacaaagactgaacatccaaaaagctcatttcgcatccataggatgcggagaatgggttccgcttctcgaaaagggcgtgtcttctgtaacgcttgcgggaaaactttttacgacaagggtaccctgaaaattcattacaacgcggtacacctgaaaataaagcatcggtgtacgatcgagggctgcaacatggtgttctccagcttgaggtctcggaatagacactctgctaacccaaaccccaggttacacatgcctatgctgcgtaacaaccgggataaggaccttatccgggcaactagcggagctgctaccccggtgatcgcaagtacaaagtcaaacctagcactgacttccccaggtcgtcctccaatggggtttacaactcctccacttgacccggttctgcaaaatcctctgcctagccagcttgttttcagtggactcaagacggtccagccggtcccgcctttctataggagtctcctcactcctggcgagatggtttccccacccacttcgctcccgacgagtccaatcatccctacgtccggtacaatcgaacagcaccccccacccccttccgaacccgtggtgcctgccgtcatgatggctactcacgaaccatccgcggatctggcccctaagaaaaagcccaggaaatcctctatgcctgtcaagattgagaaagaaatcatagacacagccgatgagtttgacgacgaagatgacgatcccaatgacggcggtgcagtcgtgaacgatatgtcacatgacaaccactgtcattcccaggaggaaatgtcccccggtatgtcagtcaaggatttttcaaagcataaccgaactcgatgcatctcacgaactgaaattcggcgagctgattcaatgaccagcgaggatcaggaacctgaaagagactatgagaatgagtctgaatcaagtgagccaaagctgggtgaggaaagtatggagggggacgagcatatccacagtgaggtgagcgagaaggtgctgatgaacagtgagaggcccgatgagaaccatagcgagccctctcaccaggacgtgattaaagtgaaggaagagttcaccgatccaacttacgacatgttctatatgtcacaatacggactttacaacggcggtggcgcttccatggcagccctccacgagtccttcacttctagtctcaattatggaagcccccaaaagtttagccccgagggtgatctttgcagttctccagatcctaaaatatgctacgtgtgtaagaaaagctttaagagcagttatagcgtcaagttacattaccgtaatgtgcatctgaaggaaatgcacgtgtgcaccgtggctgggtgtaacgctgcctttcccagtcggagatccagagacaggtattgggagaaatcaaacgagcaaaacggactactcgttagctggggggagacactcagcagtttgaagtag

SEQ ID NO: 215629 - DNA, 3099 bp, synthetic construct
  misc_feature 1..3099: note = Description of Artificial Sequence: Synthetic coding sequence
  source 1..3099: mol_type = other DNA
atggcccacctgggccctactcctccacctcactcactcaactacaaatccgaagataggttgtcagaacaggattggccagcgtacttcaaagtaccatgttgtggcgtggatacttcacaaatcgaggccattcgctgcacactcgttaattgcacttgcgagtgttttcaaccaggaaagatcaaccttagaacatgcgaccagtgcaagcatgggtgggtcgcgcacgctctggataaattgagcacgcagcatctttaccatcctacccaggttgagattgtacaaagcaacgtggtgttcgacattagctctctcatgttgtatggaacgcaggccgtcccagtgagactgaaaatactgcttgaccgtctgtttagcgtactcaaacaggaagaagtgctacatatcctgcacggtctcgggtggacccttagggactacgtgcgagggtacatcctgcaagacgccgcagggaaagtactggatagatgggcgatcatgtcccgcgaggaagagatcattacattgcagcagttccttcgattcggtgaaactaagtccatcgtagagctcatggctatccaggagaaggaaggccaggcagttgcagtgccaagcagcaaaactgattctgatatccgaacattcatcgaaagcaacaacaggactcggtccccgtcactgctagcccatctggaaaacagcaaccctagctcgatccaccacttcgaaaatattcccaactcgctcgcattcctgctgccgtttcagtacataaaccctgtgtccgcaccactcctcgggctgccacccaacggactgctcttggagcaacccggacttagactacgggagccatctctgtctacgcagaatgagtacaatgaaagcagtgagagcgaagtgtctccgactccctacaaaaacgatcagacacccaaccgcaatgctctgacaagtatcactaacgtggagcctaaaaccgagccagcctgtgtctctccgatccagaattccgcaccagtatcagacctgaccaaaaccgaacatcctaagtctagctttagaatacaccggatgcgcagaatgggctcagcatccaggaaaggacgagtgttttgtaatgcatgcggcaagaccttctacgacaagggtacactcaaaatccattacaacgcagtgcatctgaaaattaaacatcgctgcactattgaagggtgtaatatggttttctccagtcttcggtcccggaaccgccactcagcaaaccccaaccctcggctccacatgcccatgctccggaacaatcgggataaagatctcataagagccacatcaggagcagccacaccagtgattgcctcgacaaagtctaatcttgcccttacttcccccggacgcccacccatggggtttacaacacctcccttggaccccgtcttgcagaaccccttaccctcgcagcttgtgttctccgggctcaaaacggtccagcctgtccctcctttttaccggtcactgctgacccctggtgaaatggtctccccccctaccagcctgcctacctcaccaatcattcctacctccgggacaatcgaacagcaccctcctccaccgtctgagcccgttgtgccagcagtgatgatggctacccatgaaccaagcgctgacttggctcctaaaaagaagccaaggaagtcatcaatgcctgttaagatcgagaaagaaattatcgacactgctgacgagttcgacgatgaggatgacgatcccaatgatggcggagccgtggtaaacgatatgagccacgataaccattgtcactcacaggaagagatgtcgcctggcatgagtgtgaaggatttcagcaaacataaccggactaggtgcatttcaaggacggaaattcggagggctgatagtatgacttctgaggaccaagagcctgaacgcgactatgagaatgaatcagagtcctcagaacccaaactgggcgaggagtcaatggagggcgacgagcacatccattcagaagtaagtgagaaagtgttgatgaactccgagagacctgatgaaaatcactcagagccatctcaccaggatgtcattaaggtgaaagaagaattcactgacccaacctacgatatgttttacatgagtcagtacggcctttacaatggaggcggagcatccatggctgctctacacgagagctttaccagctctttaaattatggcagcccacagaagttttcaccagagggtgacctatgcagctcccccgacccgaagatctgctacgtctgcaagaaaagtttcaagagttcttatagtgtgaaattacactatcggaatgtacatttgaaggagatgcacgtatgtacagttgcaggttgcaatgctgctttcccctctcggaggagtcgggaccggcactccgccaatatcaacttgcaccggaagctgttaactaaagagctggacgatatgggtttggattccagccagccttccctgtcgaaagacttgcgggacgagttccttgtgaaaatctacggcgcacagcatccaatgggcctggacgtccgggaggatgcatcaagcccagctggcacagaagacagtcacttgaacggatacggacggggaatggcagaggactatatggtacttgacttgtctaccacatcctcccttcagagcagctcatccatccactccagcagggaatcagatgccggaagcgacgaggggattctgctagatgatatagacggcgcttccgacagtggagagagcgcccacaaggcagaggcccctgcactgcctggatcgctgggcgcagaggtgtcaggctctctcatgttctcatcactgtctggatccaatggcggaatcatgtgtaacatttgtcacaagatgtattcaaataaggggactctgcgcgtacactacaagacggtgcacctgcgagaaatgcacaagtgtaaggtccccggatgcaatatgatgttctcatccgttagatccagaaataggcacagtcagaaccctaatctgcacaaaaatattccattcacaagcgtcgattag

SEQ ID NO: 215630 - DNA, 3300 bp, synthetic construct
  misc_feature 1..3300: note = Description of Artificial Sequence: Synthetic coding sequence
  source 1..3300: mol_type = other DNA
atggcccacttgggtcccactccgcctcctcacagcttaaattataagagcgaagaccggctgtctgaacaggactggcctgcttacttcaaagttccatgctgcggagtggacacatctcagatcgagtctgaagaggccgaggtcgacgtaagagagagagagactcagcgtgacagggaaccgaaacgggcacgtgatctaacactgcgagatagctgcacggacaactcaatgcagttcggcaccagaaccacaacagccgagccaggctttatgggaacttggcaaaacgcagacactaatctgctgtttcgcatgagccagcaggccatccgctgcactttggtgaattgcacgtgcgaatgctttcaacccggaaagattaacctgcgcacttgcgatcagtgtaagcacgggtgggtagcccacgccctggacaagctgtctacccaacatctataccacccgactcaggtagaaatcgtacagtctaatgtcgtattcgatataagctcgttgatgctgtacggtacacaagcggtgcccgtgagacttaagattctgttggaccgcctcttttctgtgcttaaacaggaagaagtgctgcacatcctgcacggtttaggttggactctgagggattacgtgcgagggtatattctgcaggacgctgcgggaaaagtcctagataggtgggcgattatgtcccgggaggaggagatcattacgctccaacaatttttgaggtttggcgagaccaagagcatcgtagagctgatggccatccaggagaaggaggggcaagctgtggctgtgcccagcagcaagacggattcagacatccgaacctttatcgaatctaacaacaggacaaggagtccgagcctcctggctcaccttgagaactccaacccctcatccatccaccatttcgaaaacatcccgaacagcctcgcgttcctattgccctttcagtacatcaatccggtttccgcgccattactagggctcccacccaatggattgctactcgagcagcctgggctgagactgagggagcccagcctgagcacccaaaacgaatacaacgagtccagcgaatccgaggtgtctcctacgccctacaaaaatgaccagacaccgaataggaatgcactgacgtccatcacgaatgtcgaacctaaaaccgagccagcatgcgtttctccaatccaaaattccgcaccggtgtctgatctgacaaaaaccgagcatccaaagtcatctttccggatacatcggatgagaagaatggggagcgcctccagaaaaggtagggtcttctgtaacgcgtgcggcaagaccttttatgacaaagggacactgaagatccattacaatgccgtgcatcttaagatcaagcacagatgcaccatcgaagggtgtaacatggtcttcagcagtttaagatccagaaacaggcactctgcaaacccaaacccccgactgcatatgcccatgctgcgcaataacagggacaaggatctaattcgagccacgtccggagccgctactcctgtgatagcatccacaaaatctaacttggcccttacgtccccagggaggccccctatgggattcactacccccccactagatcccgtacttcaaaacccgttgccttctcaactggtgtttagcgggctaaaaactgtacagccggtgcccccattttacaggagcttgctaacaccaggggaaatggtctctccccctacgtcgttgccaacatcaccaattatccctactagcggaactatagagcagcacccccctccgccatcagaacccgtggtccctgccgtgatgatggctacacatgaacctagcgccgatttagctccaaagaaaaaacccaggaagtctagcatgcctgttaaaatcgagaaagaaattatcgataccgccgacgaatttgacgatgaagacgatgaccccaacgacggcggtgccgtcgtcaacgacatgtctcatgacaatcactgccactctcaggaagagatgagccctggcatgtctgttaaggatttctcaaagcacaacaggacccgctgcatttcccggactgagataaggagagcagactcaatgacaagtgaggatcaggagcccgagcgcgactatgagaacgagagcgagtccagtgaacccaagctgggcgaagaatcaatggaaggggatgaacacattcactccgaggtgtcagagaaagtgttaatgaacagtgaacgccctgatgaaaaccatagtgagccgtcccatcaggatgtgatcaaggtgaaggaggaatttaccgatcccacctacgatatgttttacatgtctcagtatggtctttataacgggggaggcgctagcatggccgctctccacgagtcctttaccagtagtcttaactacggaagccctcaaaagttttccccagagggtgacctctgcagctcccccgacccaaaaatttgttacgtgtgcaagaagagcttcaaaagttcctacagcgttaaactacactaccgtaacgtccatttgaaagaaatgcatgtctgcaccgtggctggctgcaacgcagcctttccctcaagaaggtcgagggatcgccacagcgctaacatcaacttgcatcgtaagctccttacaaaggagctggatgatatgggacttgactcctcccaaccgtccctgtcaaaagacctgagggacgaatttctggtaaaaatctacggggcacagcaccccatgggattagatgtccgtgaggacgccagttcccctgcaggaacagaggatagtcacctcaacggatatgggaggggaatggccgaggactacatggttctggatctgtctacgacttcgtcgctgcagagttcaagcagcatccatagcagccgagagtccgatgccggatcagatgagggtattctgctggacgatatcgacggtgccagtgatagcggagagtctgctcacaaggccgaagccccagccctgcccggtagcctgggcgctgaggtcagcgggtccctcatgttcagctcactttctgggtctaacgggggtatcatgtgcaacatttgtcacaagatgtacagtaataaaggcacactccgcgtacactacaaaactgtacacctgcgggaaatgcataagtgtaaggttcccggatgtaacatgatgttctcatccgtgagatcacgcaacagacatagccagaatcccaacctgcataaaaatattcccttcacctcagtagattag

SEQ ID NO: 215631 - DNA, 984 bp, synthetic construct
  misc_feature 1..984: note = Description of Artificial Sequence: Synthetic coding sequence
  source 1..984: mol_type = other DNA
ccatctgaacctgttgtgccagcggtgatgatggctacccatgagcccagcgcagatctcgcacccaaaaagaaacccaggaagtcctctatgccagttaaaatcgaaaaagaaattattgacacagcagatgagttcgatgacgaagacgatgatccgaacgatggtggagccgtggtgaacgatatgtcccacgacaatcattgccatagtcaggaagagatgtcacctggcatgtccgtcaaagactttagcaaacacaatcgaacgaggtgcatctctcggaccgaaatccgcagggccgattcaatgaccagcgaagatcaagagcctgaacgggattatgagaatgagtcagaatcatctgagccgaagctcggcgaagagagtatggaaggtgacgagcacatccacagcgaggtctctgagaaagtgttgatgaattcagaacggccagacgaaaaccatagtgagccgagtcaccaggacgtaattaaggttaaggaggaattcaccgaccctacctacgacatgttctatatgtcacagtatggactatacaatgggggaggtgcctctatggctgccttgcatgaatcttttacttctagcctcaactacggatcccctcagaaattctcacctgaaggggatttatgttcatccccagatccaaagatatgctacgtctgcaagaagagcttcaagtcatcttactctgtaaagctccactatcggaacgtgcacttgaaagaaatgcatgtgtgcacagtcgccggatgcaacgccgcttttccttctcgtcgctctcgtgaccgcaatcgtaacttaaggatggaacggaccattggccctggacaccgggactcacttcacttgcgaagaggcaacagtaatcgacctggcacttgttgtcttcatacgggcgactcacttgaggaaagtgtgatcgttagaatcagttgcaagcgactggaaagctag

SEQ ID NO: 215632 - DNA, 2583 bp, synthetic construct
  misc_feature 1..2583: note = Description of Artificial Sequence: Synthetic coding sequence
  source 1..2583: mol_type = other DNA
tctgaggaagccgaggtagatgtgagggagcgggaaacacagcgtgatcgggaacctaagagagccagggatctgacactcagggacagttgtaccgataactccatgcagttcggtacccggacaaccactgcggagccaggttttatggggacttggcaaaacgctgatacaaacctcctgtttcggatgagccagcaggctatcaggtgcactctggtgaactgtacttgtgagtgctttcagccaggcaaaattaatctcaggacatgcgaccagtgcaagcacggctgggtagcccatgcgctggataaactgagcacacagcacttataccatcccacacaggtggagatcgtacagagtaacgtcgtgttcgacatatccagcctcatgctttatgggacccaggcagtgcctgtgaggttgaaaatcctcttggacagactctttagtgtccttaagcaggaggaagtgctgcacatactccatggcctgggatggacccttagggattacgtccgcggatacatcttgcaggatgctgccggaaaagtactggatcggtgggccattatgtccagggaagaagaaatcattaccttacagcaattcctgaggtttggcgagaccaagtcaatcgttgaactgatggctatccaggaaaaagaaggacaggcagtcgctgtaccctccagcaagacagactcagatatacgcacgtttatcgaatcgaataaccggacaaggagccccagtctgctggctcacttggaaaattccaaccccagttctattcatcactttgaaaatatcccaaacagtctggcatttctacttcccttccagtatataaaccctgtatctgctcctctgctgggcctgccgccaaacggactgctgctcgaacaacccggtctgagactgcgggagccaagcctctccacgcagaatgagtacaatgaaagctccgaatccgaggtctctcctaccccctataagaacgatcagacccccaaccgaaacgccctgacctctataactaatgtcgaacctaaaacagagcccgcttgcgtctcacccattcaaaattctgctcccgtttctgacctgacgaagacagagcaccctaaaagcagctttaggattcatagaatgcgcagaatgggttccgcgagccgcaaaggacgtgtcttctgtaatgcgtgcggaaagacgttctacgataagggtacgctcaaaatacactataacgccgtgcacctgaagatcaaacaccggtgcactattgaagggtgtaacatggtcttctcaagtctacgctcccgcaacaggcacagtgccaacccgaaccctaggctgcacatgccaatgttgaggaataatcgtgataaagatctcattcgggcaacttccggggcagctacacctgtgatagcgtccacaaaatccaacctggcgttgacttctccgggtagacctccaatgggcttcaccacgccccctctggatcccgtactccaaaaccccctgcctagccagttagttttcagtggtctcaaaacagtgcagcctgtgcccccattttatcgaagcttgctcacgccaggcgaaatggtgagcccaccaacatctctccccactagcccaattattcctacctccgggaccatcgaacagcatcctccacccccttccgaacccgttgtaccggcagtgatgatggccacccacgaaccttcagcggacctggcaccaaagaaaaaacccaggaaatcttctatgcccgtgaaaatagagaaggagatcattgataccgcagatgaattcgatgatgaggacgatgatccaaatgacggtggcgctgtggtaaacgatatgagtcacgataatcactgccatagccaggaggaaatgtccccagggatgtctgtcaaggatttctcgaaacacaataggactcggtgcataagcagaacggagattcgcagagctgactcaatgacaagcgaggaccaggaaccagaaagagattacgagaatgagtccgaaagcagcgaaccaaagctcggcgaagagtcaatggagggggacgagcacattcactctgaggtttctgagaaagtcctgatgaattctgagaggcccgatgagaatcattcagagccaagtcatcaagacgtaatcaaggtgaaagaggaattcaccgaccctacctacgatatgttttacatgagccaatacggattatacaacggcggaggggctagcatggcagccctgcacgagtcgttcacaagttctctgaactacggctctccccaaaaattctctccagaaggcgatctctgctctagcccagaccccaagatctgctacgtatgcaagaaatcttttaagtcatcctactctgtcaagctacattaccgcaacgtgcatctgaaggaaatgcatgtttgcacagtggccggttgtaacgcagcattccccagtaggcgcagtcgagaccggaaccgcaatctcagaatggagcgcaccattggcccagggcatcgagattcactccacctactgcctacatag

SEQ ID NO: 215633 - DNA, 1206 bp, synthetic construct
  misc_feature 1..1206: note = Description of Artificial Sequence: Synthetic coding sequence
  source 1..1206: mol_type = other DNA
atggctcacttgggaccaacgcctcctccccattccttgaattacaaatctgaggatagattgtcagaacaggactggccggcatattttaaggttccgtgttgtggcgtcgatactagccagattgaatctgaggaagccgaggtggacgtgagagagcgcgaaactcagagggaccgcgagcccaagagggctagggatttgaccttacgcgatagttgtacagacaattcaatgcagtttgggacgcggacaaccacagcagagccgggttttatgggaacatggcagaacgcagataccaacttattgtttcgcatgtcacagcaggtcccactagcttgcacagggagagtgctgggcgctgacttctgcccaaacttggaagagccttatcatagactagaagtgcaggctatcagatgtaccttggtgaactgcacctgcgaatgctttcagcctgggaaaattaatctgagaacttgtgatcagtgcaaacatgggtgggttgcccatgccctggataagcttagcacacagcatctgtaccacccaacacaggtcgagatcgttcagtctaacgtggtctttgatatcagcagtctgatgctatacgggactcaggcagtgcctgtaaggctgaagatactgctggaccgactgttcagcgtgctcaaacaggaggaggtgctgcacatcctacacggcctgggctggacactgcgggattatgtgcgaggttatatcctgcaagatgccgctgggaaagtcctagatcggtgggcaattatgagcagggaggaagagattatcacattgcaacagttcttgagattcggggagaccaaaagtatcgttgaactaatggccatccaagagaaggagggacaggcagtagcagtacccagcagtaagactgacagtgacattcgaacgttcatcgaatccaataataggacaagatctcccagcttgctggcacaccttgagaattcgaatcctagcagcatccatcatttcgaaaatattcccaattccctggccttcctgcttccgtttcagtacatcaatcctgtgagtgctccgctgttaggtttgcctcccaacgggctgctactagagcagcctggccttcgcctccgcgaaccgagcctaagcacgcagaacgagtataatgagagctcagaatcggaagtatcaccctag

SEQ ID NO: 215634 - DNA, 306 bp, synthetic construct
  misc_feature 1..306: note = Description of Artificial Sequence: Synthetic coding sequence
  source 1..306: mol_type = other DNA
atgtgtagattgctggtgccactcgcttgtaccggacgcgttctgggagcagatttctgccccaacctggaggagccctaccatcgcctggaggttcaagctattaggtgtactctggtgaattgtacctgcgaatgcttccagcctggaaaaatcaacctgagaacctgcgatcagtgtaagcacggatgggtggcccatgccctggacaaactgtccacccagcacttgtaccatcctacccaggtggaaatcgtccagtctaatgttgtctttgacatcagttctcttatgctctacgggtag

SEQ ID NO: 215635 - DNA, 1233 bp, synthetic construct
  misc_feature 1..1233: note = Description of Artificial Sequence: Synthetic coding sequence
  source 1..1233: mol_type = other DNA
atggcgcatctgggaccgacaccccctcctcactcactcaattacaagagtgaggatcgactttcagaacaagattggccagcctattttaaggtcccgtgttgcggagtggacacctcacagatcgaaagcgaggaggcagaagtggacgtgcgggagcgggagacacaaagggacagggaaccaaagagagcccgtgacctcacccttcgtgattcctgcacagacaattccatgcagttcggcaccaggaccaccaccgccgaacctggattcatgggcacatggcagaacgccgacacaaacctgctctttcgcatgagtcaacaggccggactgaaactgctcacctcaggggatccgcctgtgctcgactttcagtccgcaggtatcaccggcgttagccattgtacaagactgaaggttgcaatgatcagtaaggctattagatgtacgttggtaaactgcacgtgcgagtgctttcagccaggcaaaatcaacctgcggacttgcgaccagtgcaagcacggctgggtcgcccacgcactggacaagctgtccactcagcacttgtatcacccgacgcaggtggagattgtgcagtccaatgtcgtgtttgatatcagcagtctgatgttgtatgggacacaggcagtgcccgtgcggctgaagatccttttggatagactatttagtgtgctgaaacaagaggaagtgctgcatattttacacggcctcggatggaccctgcgggactatgtccggggatacatcctgcaggacgctgcgggaaaagtgctggatcggtgggccattatgtcaagggaggaagagatcatcactctgcagcaatttctgcggttcggtgagactaagtcgatagtggaactgatggccatccaggagaaggaaggtcaagcagtggccgttccttcctccaagacggacagcgacattcgcaccttcattgagtccaataaccggacaaggtcacctagtctgctggcccaccttgaaaacagcaacccctcaagcatccaccatttcgagaacatccccaattctctcgcattcctgctaccctttcagtacattaaccccgtgagtgcacccctgttggggttaccaccgaatggacttctgcttgaacagcctggcctgaggctcagggagccttctttatcgactcagaatgaatataacgaatccagtgagagtgaggtaagcccgtag

SEQ ID NO: 215636 - DNA, 2712 bp, synthetic construct
  misc_feature 1..2712: note = Description of Artificial Sequence: Synthetic coding sequence
  source 1..2712: mol_type = other DNA
atggcacacctcggcccaactccgcctccccacagtctcaattataagagcgaggatagactcagtgagcaggactggccagcctatttcaaggtgccctgctgcggagtcgacacatctcagattgagtccgaggaagctgaagtcgacgtaagagaaagggaaacccagagggatcgggagcctaaacgggcacgtgatctgaccctgagagacagctgcaccgataatagcatgcaattcggcaccagaactaccaccgccgagccagggtttatgggaacctggcagaatgctgacacgaacttgttgttcaggatgtcccagcaggctatccgttgcacacttgtcaactgtacctgcgaatgctttcagccgggaaaaattaatcttaggacttgtgatcagtgcaagcacgggtgggtggcacatgccttagacaagctatcgacccaacacctctaccatccaactcaggtcgagattgttcagagcaatgtcgtcttcgatatatccagtcttatgctttacggaacgcaagctgtgccagtgcggctgaaaatcctgctggatagattattttccgtgctcaagcaggaggaagtgctgcacattttacatggcctgggctggaccctacgggattacgtgagagggtacatccttcaagacgcagcaggcaaagtgctagatcgttgggccataatgtcccgcgaggaggagatcattacgctgcagcaatttctccgctttggggaaaccaagagtattgtggaactgatggccattcaggaaaaggagggccaggccgtcgctgtgcctagtagcaaaactgactcagatatccgaacattcattgaaagtaacaatcggactcggtctccctcgctgcttgctcatttggaaaacagtaacccgagttcaatacaccattttgagaacatccctaattcattggctttcctgcttccttttcagtacatcaacccagttagtgcccctcttcttggcttaccaccaaacggcctgctgctggagcaacctggtctaaggctcagggaaccctccctcagcactcagaatgaatataacgaaagtagcgagtctgaggtgtctcctaccccctacaaaaatgatcaaacccctaaccgtaatgccctgacaagtatcacaaacgtcgagccaaaaaccgaacctgcatgcgtctctccaatccagaactctgcaccagtaagcgacctcacaaagaccgaacatcctaagagttccttcagaatccatcgtatgaggcggatgggaagcgcctctcgaaaaggcagagtcttttgtaatgcctgtggcaaaacattttacgataaaggaaccctgaaaatccactacaacgccgtccacctcaaaatcaagcatcgctgcacaatcgaggggtgcaacatggtcttctcaagtctccggtcccggaacaggcatagtgctaaccctaatcccaggctgcacatgcccatgttacgcaacaacagggacaaggacctgattcgggctacaagtggtgccgcaacgcccgtgattgccagcacaaagtccaacttagccctcacatctcctgggcgaccacccatgggattcacaacaccccctttagatccagtgttgcaaaatcccctgccatctcagctagttttcagcgggctgaagactgtgcagcccgtcccacccttttataggtcacttttgacgccaggagagatggtcagtccccctacttcattgccaacgtctcctattatccctacttctggaactatagagcagcacccaccacccccatctgagccggtggtgcccgcagtaatgatggcaactcatgaaccaagcgctgatttagctccaaagaaaaaaccacggaaaagctccatgccggtgaaaatagagaaggaaatcatcgatactgcggacgaattcgatgatgaagacgacgatcccaacgatggaggagccgtcgtgaatgacatgtcgcatgacaatcactgtcatagccaggaggagatgtctcccggaatgagcgtgaaggacttcagcaaacacaacagaacgcgatgcatctctcggaccgagatcaggagagctgactccatgacttccgaagatcaggaaccagagcgcgactacgagaacgagtcagaatccagcgaaccaaagctgggagaagaaagcatggagggcgacgaacacatccattccgaagtatccgagaaggttcttatgaactccgagcggccagacgagaatcacagtgagccttctcaccaggatgtcatcaaagtgaaggaagagtttaccgatccaacctatgatatgttttacatgagtcagtatggcctctataacgggggaggagcctccatggccgcactgcacgaatcctttactagctccttaaattacggcagcccccaaaaattcagccccgaaggggatctgtgtagcagtcccgacccaaagatttgctacgtttgcaagaaatcattcaaaagttcatatagcgtcaagctacattacagaaatgttcatcttaaagaaatgcacgtttgtacagtcgccggatgcaacgccgctttcccctcgagaagatctcgggacagatattgggagaagtctaatgaacaaaatgggctgctggtgagttggggtgagaccctctcaagtctgaagtag

SEQ ID NO: 215637 - DNA, 2712 bp, synthetic construct
  misc_feature 1..2712: note = Description of Artificial Sequence: Synthetic coding sequence
  source 1..2712: mol_type = other DNA
atggcacatctggggccaacaccaccgccacatagccttaattataagagcgaagataggctttcagagcaggactggcccgcttactttaaggttccatgctgcggcgtggatacttcccagatcgagtcagaagaagcggaagtagacgtgcgagagcgtgaaacacagcgagatagggagcctaagcgcgcaagggaccttactctgagggactcctgcacggacaactctatgcagttcggcacaaggacgaccacagctgaaccaggattcatgggcacttggcagaacgccgatacgaatttgctctttcgtatgagccagcaagcaattcgctgtaccctggtaaactgcacgtgcgagtgcttccaacccggaaagattaatttacgtacctgtgatcagtgcaagcacggttgggtagctcacgcacttgataaactgtccacacagcacctgtatcaccccactcaggtagagatcgtccagtcaaacgtcgtgttcgacatcagctcacttatgctgtatggtacacaggcggtacccgtgcgcctgaagatcctgttggaccggctgtttagcgtcctgaaacaggaagaagtcctccatattctccatggactaggatggactttgcgtgactacgtaagaggttacattctgcaggacgctgccggtaaagtgctcgatcggtgggctattatgagtagggaagaggagatcataacactacaacagttccttcgttttggagagactaagagtattgtggagctgatggccatccaggaaaaagaagggcaggccgtcgccgtgcctagctcgaagaccgattccgatattcgaacgttcatagagtcgaataatcgtacacgctccccctccctgctggcccatctagagaattccaatccttcatctattcaccactttgaaaacatccctaatagtcttgcctttctgctgccattccagtatataaatcctgtgtctgcaccccttctgggtctgcctccaaacggccttctgttggagcaacccggactgcgccttcgagagccctccctttctacacaaaacgaatataacgaatcttctgagtcagaagtgagccctaccccttataaaaacgatcagacccctaaccgaaacgcactgaccagcataactaacgtcgaaccgaagactgagccagcctgcgttagcccaatccaaaactcggcccctgtgtctgaccttaccaagaccgagcatcccaaatcaagttttagaattcatcggatgcggcgaatgggttccgcatctcggaagggcagggtcttctgtaacgcctgtggcaagacattttacgacaagggcactctcaagatacattacaatgcggtgcatcttaaaataaagcatagatgcacaattgagggatgtaacatggttttctcatcgctgcggagcaggaatagacacagcgcaaaccccaacccacgtctgcacatgcctatgcttagaaacaaccgtgataaggatttgattcgcgcaacgagcggtgccgctacaccggttatagcaagcaccaagtcaaacctcgccctgacctctccaggaaggcctcccatgggattcacgacacctcccctggaccccgtcctgcagaacccgctgccttctcagcttgtgttcagtgggctgaagaccgtccagcctgtaccccctttttatcgttcgctgctcacaccaggagagatggtgtccccacccacgtctctgccgacctcacccatcattccaaccagtggcacaatcgaacagcatccaccgcctccatctgagccggtcgttcctgctgtgatgatggcaacccacgaaccaagcgctgatctggcccctaaaaaaaaacctaggaaaagcagcatgccagtgaagatagagaaagaaatcattgacacagcagatgaatttgacgacgaagacgatgacccaaacgatgggggtgcggtagtgaacgacatgagtcacgataaccactgccactctcaggaagaaatgtctcctgggatgagtgtcaaggattttagcaagcacaacagaacaaggtgtatctctcgaactgagatccgccgtgccgactccatgacgagcgaagaccaagagccagaacgtgattatgaaaatgaaagtgagagttccgaacctaaactgggtgaagagagcatggaaggagatgaacacatacattcagaggtgagcgagaaagtgctcatgaatagcgagcggccagacgaaaaccacagcgaaccgtcccaccaggatgtgattaaggtaaaggaagagtttacggatcctacatacgacatgttttacatgtcccagtatggcttgtataatggaggaggtgcctctatggccgctctgcatgagtccttcacgtcctcactgaactatggatcaccacagaaattctcccccgaaggggacctatgctcttcgcccgatccaaaaatttgctatgtatgcaaaaagagcttcaagtccagctattcagtgaaactccattaccgcaatgtgcatctgaaagaaatgcatgtctgtaccgtggctggatgcaacgcggctttcccgtcccgccgatcgagagatagaaacagaaatttgcggatggaacggactatcggccctggtcaccgggatagtctacaccttagaagtacttag

SEQ ID NO: 215638 - DNA, 1950 bp, synthetic construct
  misc_feature 1..1950: note = Description of Artificial Sequence: Synthetic coding sequence
  source 1..1950: mol_type = other DNA
atgctgtacggtactcaggcagtcccagttcgtcttaagatccttctcgaccgcctgttcagcgtcctgaagcaggaagaagtgttacatatcctgcatggtcttggctggacattgagggactacgtcagaggttatatcctacaggatgccgcaggcaaggtgcttgaccgatgggcaattatgtctcgggaagaggaaataataacgctgcagcaattcttgcgtttcggcgagaccaagagcatcgttgagctgatggccatccaggaaaaagaaggtcaggctgtggctgtgccttcctccaaaacggactccgacattcgaaccttcattgagagcaataatagaacgagaagtccctcactgctcgcacacctggagaacagtaatcccagctcgatccatcactttgagaatatccccaactccctcgcctttcttctcccctttcaatatattaatcctgtttctgcccctctacttgggctccccccaaatggcttgctactggaacaacctggcctgcgattgagagaaccctccctttctacccagaacgagtacaatgaatcctccgagtcagaggttagtcctacgccctataagaacgatcagaccccgaacagaaatgcattgacctcaattaccaatgtcgaacccaagacagagccggcatgcgtctcccccatccagaactcagcccctgtaagcgatcttactaaaacggaacatccaaaatcttcttttaggattcataggatgaggcgtatgggatccgccagtcgaaagggcagggttttttgcaacgcctgcggcaaaacgttctatgataaaggcactctcaagatccactacaacgccgtccacctgaaaattaaacatcgatgcaccatagaggggtgtaatatggttttttcctcactaagatctagaaatcgccactcagccaatcccaacccacggttacatatgcccatgttacggaataatagggacaaagaccttatacgcgcaaccagtggggcagcgacacccgttatagcctctacaaagagcaacttggccctgacatcaccaggaagacctcctatgggttttactactccccctctagaccctgtgctccaaaatcccctcccatcacagcttgtctttagtggtctgaaaactgtgcagcctgtaccccctttttaccggagtctcctcacccctggagaaatggtgtcaccaccaacttccttaccaacgtcacccattattcccacgtcagggacaatcgaacagcacccccctcctccatctgagcctgtcgttccagctgtgatgatggccactcacgagcctagtgccgatctggcgcctaaaaaaaagccccgaaaatcttctatgcctgttaaaatcgagaaggagatcatcgacactgctgatgagttcgatgatgaggacgatgatccaaacgacggaggggcagtggtcaatgatatgtcgcatgacaaccactgtcattcccaggaggagatgagcccaggaatgtcagtgaaggacttcagtaagcataaccgaactaggtgtatttctcggaccgagatccgccgtgccgacagcatgacctctgaagaccaggagccagagcgtgactatgagaatgaatcggaatccagcgaacccaagttgggtgaggaatcaatggagggtgacgagcacatacactcagaggtgagcgaaaaagtcttgatgaacagcgagcgcccagacgaaaatcacagcgaaccatctcatcaggatgtaataaaagtcaaagaggaattcactgaccccacctatgatatgttctacatgtctcagtatgggttatacaacggtggcggagcttccatggccgctctccatgaatctttcactagctcacttaactatggatcacctcaggttttgcccagacgctag

SEQ ID NO: 215639 - DNA, 3015 bp, synthetic construct
  misc_feature 1..3015: note = Description of Artificial Sequence: Synthetic coding sequence
  source 1..3015: mol_type = other DNA
atgaccgacgacgtcaaagagccatcgcggttcagccttctattagcgataaggtgcaccctggttaactgtacttgcgagtgtttccagccaggcaagatcaatctacgtacgtgtgatcaatgcaagcatggctgggtcgctcatgccctggacaagctgagcacccaacatctctaccaccccacccaggttgaaatagtgcagtccaatgtcgtcttcgacatctcctccctgatgctgtatggcacccaagccgtcccagtccgtctaaaaatactgctggaccgtctgttctctgttctcaagcaggaggaggttcttcatattctgcatggtctcggatggaccctccgcgactatgtccgtggttatattctgcaggatgccgctggcaaagtgcttgatcgttgggccatcatgtcccgagaagaagaaataatcacactccagcaattcctcaggtttggggaaacaaaatcgattgtagaactaatggccatccaggaaaaggagggacaggccgtcgctgttccctcatcaaagaccgatagcgatatcaggacatttattgaatccaacaatagaacacgctccccttctctgctggcccatctcgagaactccaacccgagttccatccatcacttcgagaatattcccaacagcctcgccttcttgctgccattccagtacattaatcccgtaagcgctcctctactgggccttccacccaatgggctgttactcgagcagcccggactcagactccgagaacctagccttagcacacagaacgaatacaacgagtcttccgagtcggaggtgtccccgaccccctacaagaacgaccagacccctaacagaaacgctctgacgagtattactaacgtggaacccaagacagaaccggcatgtgtgtcacccattcagaatagtgcacccgtttcggatctcacaaaaaccgaacaccctaagtcgagcttccggattcatcgaatgagacgaatgggttctgctagccgcaaggggcgtgtgttttgtaacgcttgtgggaagacattctatgataaagggacacttaaaatccattacaacgctgtgcacttgaagatcaaacaccggtgcacaatagaaggttgtaatatggttttctcctccctgcggtcccggaacagacactctgcaaatcctaaccccaggctgcatatgccaatgttgaggaacaatcgggataaggacctaattagggctaccagtggagcagcaacgccagtgatcgccagcaccaagtctaacttggctctgacatcccccggaagacccccaatgggtttcaccacacctccgctcgaccctgtgctccaaaacccactgcctagccagctcgtgttttcaggcttgaaaaccgtccagcctgttccaccattttaccggtcactgctcacacccggagaaatggtctccccaccaaccagcctgcctacttcacccattatacctacatccgggaccattgagcaacaccctcccccacctagcgaacctgttgtacctgctgtgatgatggctacccatgagccatcggccgatttggcacctaagaagaagccccgaaaatcgagcatgccggtgaaaatagaaaaggagattatcgacacagcggacgagttcgatgacgaggacgacgatccaaatgacggaggcgctgtcgtaaacgatatgagccatgataatcattgccacagccaggaagagatgagccctggcatgagcgttaaagacttcagcaaacataatcggacccggtgtataagccgcaccgaaatccggagggccgattcgatgacaagtgaggatcaggaaccagagcgtgactacgagaacgagtcggagagcagtgagccaaaactgggagaggaatcaatggaaggggacgagcatattcactctgaggtgagtgagaaggtactgatgaatagcgagaggccggatgaaaatcacagcgagccttctcaccaggatgtgatcaaggtgaaggaagagttcaccgaccctacttacgacatgttttatatgtcccagtacggcctctataatgggggaggggcaagcatggcagcactgcacgaatccttcacttcctcattgaattacggatctccccaaaaattctcccccgagggggatctctgcagctcaccagacccgaagatctgctatgtgtgcaaaaaatctttcaaatcctcgtacagcgtcaagctccattatcgcaatgtacacctgaaagagatgcatgtgtgtaccgtggctggctgcaatgccgcattcccgtctagaaggtctagagataggcattcagccaacatcaacctgcatagaaagcttctgaccaaggagctcgatgacatggggctggacagcagccaaccatcgttgtcaaaagacttacgagacgagttccttgtgaaaatttacggagcgcagcatccaatgggtctcgatgtcagagaagatgctagctctcccgcaggcaccgaggattctcacctgaatggctacggcagaggcatggccgaggactatatggtcctggatctctctacgacgagcagcctccagtcctccagctccattcattcttctagggagagcgatgccggatccgatgagggaatacttctggacgacatagacggcgctagcgactcaggtgagagcgcccataaagccgaagcccctgctctgcccggatctctcggggcagaggtttctggatcgttgatgttcagcagtctatctggctccaacgggggaattatgtgtaacatctgccataagatgtatagtaataagggaactctgagagtgcactacaaaacagtgcaccttcgggaaatgcacaagtgtaaagtgccgggatgcaacatgatgttttccagcgttaggtccagaaatcgacactcgcaaaacccaaacttacacaaaaacattcccttcaccagtgtcgattag

SEQ ID NO: 215640 - DNA, 11781 bp, synthetic construct
  misc_feature 1..11781: note = Description of Artificial Sequence: Synthetic coding sequence
  source 1..11781: mol_type = other DNA
atgggaaatgaggtctcgctggagggaggggctggagatggacccctacctccgggaggtgccggtcccggtcccggtcctggtcctggacctggcgcagggaagcccccatccgccccagccggaggaggtcagctccccgcagctggtgccgcacgaagcaccgctgtaccccctgtcccagggccagggcctggcccaggcccagggcctggcccaggctcaacttcgcgtaggctcgaccctaaagaacccctgggcaaccagcgggcagcatcacccacacctaaacaggcatcagccacgacaccgggtcacgaatccccccgagagactcgcgcacagggacctgctggccaagaggccgacggccctcgtaggactctacaagtggattccaggactcagagaagcgggagaagtccgagtgttagtcccgaccgcggaagtactcctactagcccctactccgttccccagatcgcgccattgccatcaagcaccttgtgccctatctgcaaaacctcagacttgaccagtactccctctcagccaaattttaatacctgcacacagtgccacaacaaggtgtgtaaccagtgcggctttaacccaaacccccacctgacccaagtgaaggagtggctctgcttgaattgccagatgcagcgcgctctcggcatggacatgacaaccgctcccagatcgaaaagccaacagcagttgcactctccagccctgtccccagcccattctcccgctaagcagcctctggggaagcccgaccaggaacgtagccgaggtcccggaggaccccagccaggcagccgccaagccgagacagccagggcgaccagtgtcccaggtcccgcacaggctgctgctcctcccgaggtggggagggtgtcaccgcagccacctcaacctactaagccgtctacggccgagccaaggcctccagctggtgaagctcccgctaagtcagcgactgccgtaccggctgggttgggcgcaaccgagcaaactcaagagggccttactggaaaactttttgggctcggtgcgtcattgcttacccaggcttccactttgatgtccgtacagcccgaggccgatacacaagggcagcccgcaccatctaaggggacacccaaaatcgtctttaatgacgcttcaaaagaggccggtccgaagcccctcggcagcgggcctggtcctgggccagcccctggggctaaaacagagccaggcgcaagaatggggccagggagtggcccaggcgctctgcctaagacaggcggaactacttcgccaaagcacgggcgtgccgaacatcaagcggcttcgaaagcagccgcaaagcctaaaacaatgccaaaggagagagccatatgcccactgtgccaagctgagctcaacgtgggctccaaatcgccagccaattataacacctgtacgacctgtagactgcaggtttgcaatctgtgcggattcaaccctactccacatttggtggagaaaaccgaatggctgtgccttaactgtcaaaccaagcgactgcttgagggtagtttgggcgagccaacgccactccctccacccaccagccagcagccaccggtgggagctccacatcgcgcatcaggcacaagcccacttaaacaaaaagggcctcaggggcttggacaaccatccggcccactgccagctaaggcctctccactgagcaccaaggcctcacctttgccaagcaaggcaagtccgcaggctaagcccctgcgtgcctccgaacctagtaaaaccccttcttcggtgcaggaaaaaaaaacaagagtccccaccaaggccgagccaatgcctaaacctccacccgagaccaccccgacccctgcaacaccaaaagtcaaatccggggttcgtagagctgaacccgctactccagtggtgaaagcagtgccagaagcaccaaagggaggagaagcagaggatctcgtgggaaagccatactctcaggacgcatccaggtctccccagtccctttccgacacggggtactcctccgacggcatcagtagcagccagagcgagataaccggggtcgtccagcaggaagtcgagcagctcgactctgctggcgttaccgggccacacccgccaagcccctcggaaattcacaaagtgggctcttctatgcgccctctgctccaagctcagggtcttgcccctagcgagcgctcaaaacccttgagctccgggacaggcgaggagcaaaaacagagaccacacagcctgtcaattacaccagaggccttcgacagtgacgaggaactggaagatatcttggaggaggacgaggactcagccgaatggcggagacgcagagaacagcaggacacagccgagtccagcgatgactttggctcacaactgcgccacgactacgtggaggactctagcgagggaggtctctccccgctacccccacagccccctgcccgagcggctgagctaactgacgaagacttcatgaggcgacagattctcgaaatgtcagcggaggaggacaatctggaagaggatgatacggccaccagcggcagaggcctggccaaacatgggacccagaagggagggcctagaccacgacccgagccctcacaggaaccagccgctctcccaaagcgaagattgcctcacaacgcgacaaccggttatgaggagctccttcccgaggggggttcagctgaggcaaccgacgggtccgggactcttcaagggggactcagaaggttcaagacaattgagctgaactccacaggcagctacggccatgagctcgatttgggccagggacccgaccctagcctggatcgcgagccggaactcgagatggaaagtctgaccggttcgcccgaagaccgcagtcgaggagaacacagctccacgttgccagcttctacacccagctacacatcggggaccagcccgacctccctcagcagcctggaagaagatagtgactcttctccatcgcgacggcaacgtttggaggaggccaaacagcaaagaaaagctagacaccgatcacatggcccactgctgccaacgattgaggacagttcagaagaggaagagctgcgcgaagaagaggagctcctgcgtgagcaggagaaaatgagggaggtcgagcagcagaggattcgctctaccgcgcgaaaaaccaggcgggataaggaggagctgcgcgcacagcggagaagggaacggtctaaaactccgccatcaaatctgtctccaatcgaagatgcctcccccacagaggaactgaggcaagcagccgagatggaagagcttcaccgctcctcttgctccgaatacagccctagccccagcttggactccgaggccgaggcactggatggaggaccctccaggctgtataaaagtggaagtgagtacaaccttcctacctttatgagtctctacagtccaacagaaacaccaagcggatcttctacaaccccttctagcgggcgacccctgaagtccgccgaggaagcctacgaagaaatgatgaggaaggctgaacttctgcaacgccagcaaggacaggctgcaggagctcgcggaccacacgggggacccagccaacctaccggaccgaggggactaggcagcttcgagtaccaggatactactgacagagagtatggccaggcggcacaacccgcagcagagggtactccggcatctctgggcgcagctgtatacgaggagatcctccagacctcacagtctatagttagaatgcgccaagcaagttcccgcgacctggcattcgccgaagataaaaagaaagaaaaacagttcctgaacgccgaatctgcatacatggaccccatgaagcagaacgggggaccactcactccagggacgtcccccacacagcttgctgcgcctgtgtccttcagcacccccaccagctcagattcaagtggaggcagagtaatcccggacgtgagagtgacacagcactttgccaaagagacccaggaccctttgaagcttcattcttctcccgcaagtccaagcagtgcgagcaaagaaatcggtatgcccttcagtcaggggcctgggactccagccacaacggcagttgccccttgtccagctggtttgcccagaggttatatgacccccgcttccccagctgggtcagagaggtccccatcgccctcttctacagcacacagctacgggcactccccaaccacagccaactatggcagccagaccgaagatctgcctcaggcacctagcggcttggccgcagcaggtcgcgcagccagggaaaaaccactctccgcatctgacggcgagggcggaaccccccagccttcaagggcttactcctactttgcctcgtcttctccacctcttagccccagttctccgtccgaatcccctactttctcgcccggaaagatggggccacgggctaccgcggaatttagcacacaaacgccatcaccagcccctgcgtccgacatgcctcgtagcccaggcgcacccacaccgtcacctatggtcgcccaggggacacagacaccccacaggcctagtacaccaaggctggtgtggcaagagtctagccaggaagcaccctttatggtgattacattggcttctgacgcctcctcccaaacgcggatggtgcacgcttccgcttctacatcccctctgtgttcccccacagagacacagcccaccactcacggatacagtcagaccacacccccatctgtgagccagctgccaccagagcctccgggaccccctggattccctcgcgtgccttctgcgggtgcagatgggcctcttgccctctacggctggggtgcacttcctgcagagaacatcagtctgtgtaggatatcctcagtgcctggtacttcaagagtggaaccaggccctaggaccccgggaacggcagtggtcgacctccggaccgcggtgaagcctacacctataatcctgacagatcaaggcatggaccttacctctttggcagtggaggctaggaaatatgggctcgcacttgacccaatccccggtcgccagtcaacggccgttcagccactcgtgatcaatctgaatgcccaggagcacaccttcctggcaaccgctaccactgttagtattaccatggcgtcaagcgtgtttatggcccaacagaaacagcctgtggtgtacggtgacccttatcaaagccggttagattttgggcagggtggcggatcccctgtgtgccttgcacaggtgaagcaggtcgaacaagctgtgcagacagcaccataccggtccggcccacggggacggccacgcgaggctaagttcgcgcgttataatctccccaaccaggtcgctcctctcgcccgtcgcgacgtgctaatcacccagatgggtactgcgcagtcaattggtttaaaacccggaccagtgccagaaccaggcgcagagccccaccgcgcaacacctgcagaactgaggtcacacgccctgcccggtgcaaggaagcctcacacagtggttgttcagatgggagagggtaccgctggtacagtgacaactcttctccctgaagagccagcgggagcacttgacctgacagggatgaggcctgagtcacaactggcatgctgcgatatggtgtacaagctgcccttcgggagcagctgtacaggcaccttccaccccgcaccatctgtccctgagaagtctatggcagatgccgctccacccggacagtcctcatctccgttctacggccctcgggaccccgagccaccagaacccccaacataccgcgctcaaggggtggtaggaccagggcctcacgaagaacaaaggccatacccacaggggctgcctggtcgactgtactcaagtatgtccgacaccaacctggctgaggccggattgaactatcacgcccagcgcatcggccaactattccagggcccagggagagatagcgctatggatctttctagtctgaaacattcctactcccttggctttgcagatggacgctacctcgggcaggggctgcagtatggctctgtgaccgacctgaggcatccgacagaccttctggctcatcctctccctatgagacgatactcctcggtcagtaacatctattcagaccacaggtacggtcccagaggcgatgccgttgggttccaggaggccagccttgcacagtactcagcaactaccgctcgagagatttcgcgaatgtgtgcagccttgaacagcatggaccagtacggcggtcgccatggatctggcggaggaggaccagacttggtccagtatcagcctcagcatgggccaggtctgagtgcccctcagtcactggttcccctccgtcccggtttgcttggtaatccaacattccccgaaggccaccccagtcctgggaatcttgcccagtacggaccggcagccggacagggcacagcggtgagacagctcctgccctctacggctaccgtacgagcagcagacggcatgatttattcgaccattaacacaccaattgccgctacgcttccaattaccacgcagcccgcaagtgtgctcagacccatggtgcgcggaggaatgtacagaccctatgcctctggtggcattactgcggtgcccctgaccagcctgaccagggtgccgatgatagccccaagggtccctctcgggcctacgggcctgtaccggtaccccgctccctcgcggtttcccatcgcctctagcgtgcccccagcggagggtccagtctatttgggtaagccagccgctgccaaggccccaggagcaggcggtccctctagacctgagatgcctgtcggtgccgctcgcgaggagcccctgcctactaccacccccgctgccattaaagaagccgctggggctcccgctcccgcaccactcgcgggacagaagccacccgctgacgctgctccgggtggcggttcaggggctcttagccgaccgggattcgaaaaggaagaagccagccaggaggaacgacagcggaagcagcaagaacagctgctgcagctcgaacgcgagcgcgttgaactcgagaagctgaggcagctgaggctgcaggaagagctggagcgggaaagagtggagctgcagcgacaccgcgaggaagagcagctactggtgcagagagagctgcaagaactccagacgatcaagcaccatgtgctgcaacagcaacaggaggagaggcaggcccagtttgcgcttcaaagagaacaattggcccaacagagactccagttagagcagatccaacagctccaacagcagttacagcagcagcttgaagaacaaaaacagcgacagaaggccccattcccggctgcttgcgaagcccctggcagggggcctcctcttgcagccgctgaattagcccaaaatggtcagtactggccgccactgacacacgctgccttcattgcgatggccggtcctgaagggctcggacaaccccgagagccagtgctccacagaggcctgccttcatcggcttcggacatgagcctgcagaccgaagagcagtgggaggcctctagaagcggcattaaaaagaggcactccatgccaaggctgcgagacgcctgcgagctggaatccggaacggagccttgtgtagttcgccgtatcgctgattcatccgtgcagacagacgacgaggatggtgagtcacggtacctcctgagccgtagaagaagagctcgacgttcagcagactgtagtgtccagactgatgacgaagactccgccgagtgggaacagcctgtgagacgcagaagaagccgattgccaaggcatagtgatagcgggtccgattccaaacacgacgcaactgcgtccagcagctcggcggctgccactgtcagagccatgagctccgtgggcatccagactatatcagactgctcagtgcagaccgaacccgatcaattacccagggtctctccagccatccacatcaccgccgctacggacccgaaggtggaaatcgtgaggtacatctccgccccagaaaagactggccgaggggagagcctcgcttgtcaaacagaacctgatggccaggctcagggcgtggcaggccctcagctggtaggccctacggctattagcccctatctgcctgggatacagatagtgacacccggaccacttgggagattcgagaaaaagaagcccgaccccctcgagattggctatcaggcacacttaccacctgagagtttgtcacagctggtgagccggcaaccaccaaagagtccgcaagttctctattcccctgtttctcctctatcccctcatcggctattggatacaagctttgccagctccgagcggctcaacaaagctcacgtcagccctcaaaagcacttcaccgccgactctgcgctccggcagcagaccttgcctcgcccaatgaagactcttcagcggtccttgtccgatccaaagcccctcagtcccactgccgaggagtcggccaaggagaggttctcactgtaccaacatcaggggggtctcggtagccaagtgagtgctctcccacctaattctctggtccgcaaggtcaagaggacactaccttccccacctcctgaggaggcacatctgccactggctggccaggcatccccccagctgtatgccgctagcctgctgcagcggggtctgaccggacctaccaccgtgcccgctaccaaagccagcctgctccgggagctggaccgtgatttgcgactagtggagcatgagagtacgaagttgcgcaaaaagcaggctgagttggacgaggaagagaaggagatcgacgccaagctgaagtacctggagctgggcattacccagcgcaaggagagccttgccaaagatagagggggacgcgattacccacctcttcgcggactgggtgagcacagggattacctgtcggactcagagctgaaccagttgagattacaggggtgtaccacacccgctggccagtttgtggactttcccgctaccgccgctgcaccggctacaccctccgggcctactgctttccaacagcccagattccagcccccagccccacagtactctgccggatcaggaggaccgacacagaacggttttcctgcccaccaggccccaacttatccgggaccctcaacgtatcccgcacccgcattccccccaggggcatcctatcccgcagaaccaggtttacccaatcagcaggcttttcgacccacaggccattatgccggtcagaccccgatgccaaccacccaatcaacccttttccccgtgcccgctgactcacgggctccacttcaaaagccgcgtcagacgtccctggccgatctggagcagaaggtgccaaccaattatgaggtgatagcctcacccgtcgtgcccatgtccagcgctccctcggagacatcttacagtggcccagcagtatcttcggggtacgagcaggggaaggtgcccgaagttccaagggctggagacaggggttcggtcagccagagccctgcaccaacctacccatccgacagccattatacatccctcgagcagaacgtccctcggaattatgtcatgattgacgatataagcgagttgactaaagatagcacctctaccgccccagattctcagaggctggagcctcttggccctggcagcagtggcaggccaggtaaggagcccggagagccaggcgtccttgacgggcctaccctgccttgttgctacgctcgaggtgaggaagagtccgaagaggatagttatgaccctagagggaaaggaggtcacctcagatctatggagtccaacggacggccagccagcacacattactacggggacagtgactaccgtcacggagctcgagtagaaaaatacggaccgggtccgatgggaccaaagcatccatctaagagcctggcacctgccgcaatctcatcaaagagatctaagcacagaaagcagggaatggagcagaaaatatcgaagttcagtcctatcgaagaagccaaggacgttgagtccgacctcgctagttatccaccgccagctgtgagcagttcactggtgtcaagggggaggaaatttcaagacgagattacatatggcctgaagaagaacgtgtatgaacaacagaagtattacggaatgtcctctcgtgatgctgttgaggacgacaggatatacgggggttcttccagatcccgggctccttccgcttatagtggggagaagttgtccagtcacgattttagtggctggggcaaggggtacgaacgagagagagaagcagttgagagattgcagaaagctggccctaaacctagcagcctgtcaatggctcactcccgagtgcggcctccaatgcggtcccaggcctccgaagaggaatcacccgtgagcccacttggacggccaagaccagccggtggccctcttcctcctggcggagatacttgtcctcaattctgctcatcccactccatgccggacgtccaggagcacgtcaaagatggtcctagagctcacgcttataagagggaagagggatatattctggacgactcacactgtgttgtgtctgatagtgaagcttatcacttaggccaggaggagaccgactggtttgataaaccgagggacgctcggtcagatcgcttccgccatcacggaggtcacgctgtttcctcttcaagccagaagcgagggcctgcacgacactcttaccatgattatgacgagccacctgaagaaggcctttggcctcacgacgaaggcggacctggtagacatgcaagcgctaaggaacacaggcacggcgaccacggcagacactcggggcgtcacacaggagaagagcctgggaggcgcgctgctaagccgcacgcaagagatcttgggaggcatgaggcacgaccccacagtcagccaagctccgctcccgctatgccaaagaaggggcagccaggatatccttcctccgcagagtatagccagccgtcccgggcatcttccgcgtaccatcacgccagcgatagtaagaagggtagtcgccaggctcactctggtcccgcagctctgcaatctaaggctgaacctcaggcccaacctcagttgcagggcagacaggctgcacctggccctcagcaaagccagagtccgtcgagtcgacagattcccagcggcgcagcctctcgtcagcctcaaacacagcaacagcaacaggggcttggcctgcagcccccacagcaagccctgacgcaggcccgacttcagcagcaaagccaaccaactaccaggggatccgcgcctgccgcttctcagcccgctggcaagccacagcccggtcctagcactgcgacaggcccacagcccgcagggcctcccagagctgagcaaactaatggaagtaaaggcactgcaaaggcgccacagcagggacgcgctccccaggcccaacctgcccctggtccaggcccagcaggcgtcaaggctggcgctcgcccagggggtacacccggagcccctgctgggcagcccggtgccgatggagagtctgtcttctccaagattctcccagggggtgcagcagagcaagccggaaagctgacagaagctgtgtcagctttcggcaaaaagttttcatccttttggtag

SEQ ID NO: 215641 - DNA, 702 bp, synthetic construct
  misc_feature 1..702: note = Description of Artificial Sequence: Synthetic coding sequence
  source 1..702: mol_type = other DNA
atggagcctaccgcaccatcgttaacagaagaggacctgacggaggttaaaaaggatgctcttgagaacttgagagtgtatttgtgcgagaagattattgcggagaggcactttgatcacctgcgcgcaaaaaagattctctcgcgagaggataccgaggagatcagctgtcgcactagctctcggaagagagccggaaaactcttagattacttgcaagaaaatccgaaagggttggacacactggtcgaatcaattaggagagaaaaaacacaaaatttcctgatccagaaaattaccgatgaggtactgaaactgcgcaatatcaagctcgaacatctgaaagggctcaagtgtagttcatgcgagcccttccctgacggtgctaccaataacttaagccgcagcaactctgacgaatccaatttcagtgaaaagttgcgggcatctactgtcatgtaccaccctgagggcgaatcctccacaactccttttttctcaaccaactcctccctaaacttgcccgtgctcgaggtgggtaggacagaaaacacgattttttcaagcactacgctgccacgccctggcgatccgggtgcaccgccactgccccctgacctgcagttggaggaggaagggacctgcgccaactcatcggaaatgttcctgcctctgcggagccgtacagtgtcgaggcagtag

SEQ ID NO: 215642 - DNA, 702 bp, synthetic construct
  misc_feature 1..702: note = Description of Artificial Sequence: Synthetic coding sequence
  source 1..702: mol_type = other DNA
atggagcccaccgcaccatccttgacagaagaagacctgacagaggtgaaaaaggacgcactggagaacctgagagtgtacctgtgtgagaagataatagcggaacgccatttcgaccacctgagggctaagaagatactgagcagggaggatacagaggagatctcgtgtcgaacatcaagtagaaaacgggcaggcaagcttctggactacctgcaggaaaatccgaagggcctggataccctcgttgagagcattaggcgcgaaaagacacagaattttctcatccagaagataacggatgaggtgctgaaacttcgcaatatcaagctggagcacctcaagggattgaagtgtagctcttgtgaaccattccctgacggggcaacaaataacctgtctcgcagcaattccgatgagtcgaatttctcagagaagctgcgcgctagcactgtgatgtaccatcctgaaggggaaagctcaactacccccttcttctccacaaattctagcctgaatttgcccgtgttggaggtggggcgtactgagaatacaatttttagcagcacaacccttccaagacctggagatcccggtgctcctccattgcctccagaccttcaactggaggaagagggcacatgtgccaacagcagcgagatgtttcttcccctcaggagtcggactgttagtaggcagtag

SEQ ID NO: 215643 - DNA, 471 bp, synthetic construct
  misc_feature 1..471: note = Description of Artificial Sequence: Synthetic coding sequence
  source 1..471: mol_type = other DNA
atggaacctacggctccgagcctgacagaagaagaccttacagaggtgaagaaagatgccctcgaaaacctgcgagtgtatctctgcgagaaaatcatcgcagaacggcacttcgaccatttgagagcgaaaaaaattctgtctagggaggacactgaggaaattagctgtcggaccagtagccgaaagagggccggaaagctgctggactacttacaggagaacccgaaggggctagatactttggtcgagtccatcagaagagagaagacgcaaaactttcttatccagaagattactgacgaggttctcaagctcagaaacatcaagctggaacacctgaaagatggggcaactaacaatctgtctcggtccaattctgacgaaagtaacttctctgagaagttgcgggctagtactgtaatgtaccacccggagggcgagagttcgaccactccgtttttttattag

SEQ ID NO: 215644 - DNA, 2508 bp, synthetic construct
  misc_feature 1..2508: note = Description of Artificial Sequence: Synthetic coding sequence
  source 1..2508: mol_type = other DNA
atgtcccggaggaaacaaggaaaaccgcagcatttgtccaagcgggagttctcacccgaaccgctggaggcaattctgacagacgacgaacccgaccatgggccacttggggcacctgagggtgatcacgacttacttacctgcggtcagtgtcaaatgaatttccccttaggggatatccttatctttattgagcacaagcggaaacagtgtaatggctccttatgcttggagaaagccgttgacaagccccctagcccctctcccatcgaaatgaagaaggccagcaatcccgttgaagtgggcattcaggtaacccctgaggatgatgattgcctgtccacttcatcaagggggatatgcccaaaacaggagcatatcgcggataaactgctccattggcgtgggctcagttctcctcgttccgcccacggggcactgatccctacgcctgggatgtccgccgagtacgctccccaggggatatgcaaggatgaaccctccagctacacctgtaccacatgtaagcagcccttcacctcagcttggtttctgctgcagcacgcgcaaaacacccacggactgagaatttatttggagtctgagcacggctctcccctgacacccagggtgggaataccttccggcctcggtgctgaatgcccttcccaaccaccccttcacggcattcacatagccgataacaatccctttaatctcctccggattccagggagcgtgtctcgcgaagcttccggcctggccgaaggacggttcccgccaacaccaccactgttcagccctcctccaagacaccatctagatccccaccgtatcgaaagactcggcgctgaggagatggccctggcaacccaccacccttccgcctttgaccgcgtgctcaggctgaatcccatggcaatggagcctcccgcaatggacttttctagaagactgcgtgagctagctggcaacacctcttcaccaccgctgagcccagggagaccctcacctatgcagaggctgctgcagccttttcaacctggctccaagcctccctttctggccactccccctctgcctcctctgcagtctgcgcctcctccatcacagcccccagtgaaaagtaagtcctgcgagttctgcgggaagacattcaaattccaatcaaatctggtcgtgcataggagaagccacactggtgagaagccttacaaatgcaatttatgtgatcatgcctgtacccaggcaagtaaactcaaacgccacatgaaaacacacatgcacaaatctagcccaatgacagtgaaatcagatgacggcttaagcacggctagtagtccagagcccggtacatcggatctggttggttctgcatcctccgccttgaaatccgtggtggccaagttcaaaagcgaaaacgacccaaatctaattcccgagaacggggatgaggaagaggaggaggatgatgaggaagaggaagaagaagaggaggaagaggaagaggaattgaccgaatctgaaagggtagattacggctttggactgagcctggaagcagctagacaccacgagaactccagcaggggagccgtagtaggcgttggtgacgagagccgcgcactgcccgatgtcatgcagggaatggtgctttccagtatgcaacatttttcggaagcgttccatcaagtattgggggaaaagcataagaggggtcacctagccgaggccgaaggtcaccgagacacctgtgacgaggattccgttgcaggcgaatcagaccgtattgatgacggtaccgtgaacggtagaggttgctcaccgggtgagtccgcttccggaggcctgagtaagaagctactcttgggctcacccagcagcctgtcccctttttctaagcgcattaagttagagaaagagttcgatttgcccccagctgccatgcccaatacagaaaacgtctatagccaatggcttgcgggatatgctgccagccgtcagctgaaggatccattcctctcttttggggatagtcgtcagagccccttcgcatcctccagcgagcatagtagtgagaatggatccctcaggttctctaccccgccaggcgaattggatggcggaattagcggcaggtcaggcactggcagcgggggtagtacaccccatatctctggtcctggaccgggaagaccatcgtccaaagaggggcgaagaagcgacacttgtgaatactgtggcaaagtgttcaagaactgctctaatttgaccgtacacagacgttcacacactggagagcgtccatataaatgcgaactctgtaactatgcttgcgcccaaagctcaaaattaaccagacatatgaagacccacgggcaggtcggcaaagatgtttataaatgtgagatatgtaaaatgccgttttcagtgtacagcactctggaaaaacatatgaaaaaatggcattctgacagggtactgaataacgacatcaaaaccgagtag

SEQ ID NO: 215645 - DNA, 2322 bp, synthetic construct
  misc_feature 1..2322: note = Description of Artificial Sequence: Synthetic coding sequence
  source 1..2322: mol_type = other DNA
atgagccgtcgcaagcaaggaaaaccacagcatctgtctaaaagggaattcagcccagaacctctggaagctatcctcaccgacgacgaacccgatcatgggcctctcggagcgccagagggggatcatgatttattgacctgcggccaatgccagatgaacttccctttgggggacattctcattttcatcgaacataaacggaagcagtgcaatggatctctgtgcttagaaaaggcagtcgacaagcctccctcaccgtcacccatcgagatgaaaaaggccagcaaccctgtcgaggtgggcatccaggtgacgccagaagacgatgactgtttaagtacatctagtagagggatatgcccaaaacaggagcacatcgcagacaagctgctgcactggcgcggattgagcagtcccagatccgcccatggcgcactgattccaacaccgggaatgtccgccgagtacgcccctcaggggatctgcaaggatgaaccttcctcctacacttgtactacatgtaaacaaccattcacctccgcctggtttctgctgcaacatgcccagaatactcatggcctcagaatctacttggagtccgaacatggatctccacttacgccaagggttggcattcccagtgggcttggagctgagtgtccaagccaaccgccacttcacggaattcacatagcagacaacaacccctttaatctgctacggattcctggcagtgtgagcagagaagcctctgggctcgcagaaggcagatttcccccaacacctcccctatttagcccgccacctcgacaccacctggatcctcaccgcattgaacggctgggggcagaggagatggccctcgccacacatcacccatctgccttcgaccgagtgctccggcttaatcctatggctatggagccaccggctatggacttctccagaaggctgcgggagctggccggtaatacttcgtcacccccactgtcgcccggaagaccgagcccaatgcagcgcttgcttcagccctttcagccaggctccaagccgccattcctggcaaccccccctctgccccctctccagtcagcgcctcctccctcccagccccctgtgaagagcaagtcctgcgagttctgcgggaagaccttcaagtttcagagtaaccttgttgttcatagaagatcccacaccggcgaaaagccttacaagtgcaacttgtgcgaccacgcttgcactcaggcttctaaactgaagcgacatatgaaaactcacatgcacaagagctcaccaatgacggtgaagtccgacgacgggctcagcaccgccagttccccggagcctggcacaagtgatctcgtggggagcgcatctagcgcattgaagtctgtggtggccaagtttaagtccgagaacgatccaaatcttattccagagaacggtgacgaggaggaggaagaggacgacgaggaggaggaagaggaggaagaggaagaggaggaagagttaaccgagagcgagcgagttgactacggattcggactctctcttgaggcggcacgccaccatgaaaacagctcacggggtgccgtggtgggcgtcggtgatgagtcaagggctttgcccgacgtcatgcagggtatggtcctgtcttccatgcaacatttctctgaggcctttcaccaagttttgggcgaaaagcataaacgcggacacctggcagaggccgagggccatcgcgacacatgcgacgaggatagcgtggctggcgagtccgatagaattgatgatggcactgtgaacgggagggggtgtagcccaggtgagtctgccagcgggggactttccaagaagctgctgttagggagccccagcagcctgagcccattcagtaagagaatcaagctggagaaagagttcgacttgccccctgccgctatgccgaatacggaaaacgtttattcacagtggctcgccggatatgccgctagcagacagttgaaggatccatttctgtcttttggcgactcgaggcagtctccctttgcaagcagctccgagcacagctcagagaatggaagtctacgcttttcaactccccctggagagcttgacgggggtatcagtgggagaagcggcaccggatcaggaggttcgaccccccacatcagtgggccaggtccaggaaggccaagttcaaaggagggccgtcggagcgacacatgttcttctcacactcccatccgtcggtccacacagagagcgcaggatgtgtggcagttctcggatgggagtagccgcgcactgaagttctag

SEQ ID NO: 215646 - DNA, 2406 bp, synthetic construct
  misc_feature 1..2406: note = Description of Artificial Sequence: Synthetic coding sequence
  source 1..2406: mol_type = other DNA
atgtctagacgcaagcagggcaagccacagcacctgagcaaacgggagttcagccctgagccccttgaggccatccttacggacgatgagcctgatcatgggccacttggggcaccggaaggagaccatgacctactaacatgtggacagtgtcagatgaattttcctctgggagatatactcatttttattgagcataagcggaaacaatgcaacggatcactttgtcttgaaaaggccgtcgataaaccaccaagcccatctcccatcgagatgaaaaaggcatccaatcccgtcgaggttggaatccaagttaccccagaagatgacgactgcttgtctacttcaagccgcggaatctgccccaagcaagaacatatcgcgggtaaggatgaaccctcaagctatacctgcacaacttgcaaacagcccttcacatctgcctggtttcttctccagcacgcccagaatacacatggactgaggatttatctggagtccgaacatggatcccctcttacaccccgtgtaggaataccatccggcctcggagccgaatgcccttcacagccccctctccacgggattcacatagctgacaacaatccttttaacttactccgaatccccggatcagtaagccgggaggcctctgggcttgctgagggtcggtttcctcctactccacccctgttcagtccaccacctcgacaccacctcgatccccaccggatcgaacggcttggagccgaagaaatggctctggctacacaccacccttctgcatttgatagggtgctcaggctcaaccctatggctatggaaccgccagcaatggatttcagtcgaagattgcgagagttagcagggaacacctcgagcccccctctctctcccggtcgcccttcaccaatgcagcggttgctccaaccatttcagccaggatccaagcccccattcctcgctacacccccactgcccccactgcagtcagcccctcccccttcgcaaccacctgtaaagtcaaaatcttgcgagttttgcgggaaaacctttaagttccagtctaatttagtggtgcacagacggagtcatacgggagagaagccctacaagtgcaacctctgcgatcacgcatgcacccaggccagtaaactgaaacgccacatgaagacacacatgcacaaaagcagcccaatgacagtgaaaagtgatgacggcctgtcaacggcatctagccccgaacccggaacctccgacttggtgggctccgcatcttccgcactgaagtcagtggtggcaaagtttaagtctgagaacgaccccaacctgatccccgagaatggcgatgaagaagaggaggaagacgacgaagaggaagaggaggaggaggaggaggaggaggaggaacttacagagagtgagagggtagactacggattcgggctcagtctagaggcggcacgccaccacgaaaatagcagccgcggagctgtggtgggtgtcggtgatgagtcaagagctctgccagatgtcatgcagggcatggtgctgtccagcatgcagcatttcagcgaagccttccatcaggtcctcggcgagaagcacaagcgcggacacctggccgaggctgagggtcatagagacacttgtgatgaggactccgtagcaggtgagtccgacagaatcgatgacggcactgtgaatggacgcggatgcagccctggcgagtcagctagcggtggacttagcaaaaagcttctgctcgggtctcccagttccttgtcccctttttccaagagaattaagctggagaaagaatttgatttacccccagctgcaatgcccaacaccgaaaacgtctattcgcagtggctagctggctacgctgcctctaggcagcttaaagacccattcctaagtttcggcgacagtcggcagagtccattcgctagcagttccgagcattcgagcgagaatggatctctgaggttttcgacccctcccggtgagcttgatggcggtatcagtggcagatccggcaccggctctgggggttccaccccccacatcagtggcccaggtccaggccgacctagcagcaaggaaggcaggcgctctgatacatgtgagtactgcgggaaggtgtttaaaaactgttccaacctcactgttcacaggagaagccataccggagagcgcccatacaaatgtgagctgtgcaactacgcatgcgcacagagttctaagctcacaaggcatatgaagactcacgggcaggtgggcaaggatgtgtacaagtgcgaaatatgcaagatgccattcagtgtttactcaaccctcgagaagcatatgaagaagtggcactccgacagagtgctaaacaatgatatcaagaccgagtag

SEQ ID NO: 215647 - DNA, 732 bp, synthetic construct
  misc_feature 1..732: note = Description of Artificial Sequence: Synthetic coding sequence
  source 1..732: mol_type = other DNA
atgagtcgccgaaagcagggcaagccccagcatttatctaagagagagttcagccccgagccactggaggccatcctaacagatgacgagccagatcacggcccactaggtgcccctgagggagatcacgaccttctaacttgtggccagtgtcagatgaacttccccctaggtgacatcctaattttcatcgaacacaagcgcaaacaatgcaacggatccctatgcctcgaaaaagcagtcgacaaacctcctagtccttcacccattgagatgaagaaggcctctaacccggtggaagtgggaatccaggtgacaccagaggatgatgactgtttgagtacatcttccagagggatctgtcctaagcaggaacatatcgctgataaactgctccactggcgaggactgtcctcccccaggtctgctcacggcgctctcataccaacacctggaatgtcagccgagtacgcccctcaggggatctgtaaggacgagccctcttcatatacatgcaccacttgtaaacagccctttacaagtgcctggttcctgctccagcatgctcagaatacccacggacttcgaatttatctggaaagcgagcacggaagtcctcttacacctcgcgtgctccacactcccccttttggcgtggtccctagagaacttaagatgtgtgggagttttagaatggaagctagggagcctctgagtagcgaaaaaatttag

SEQ ID NO: 215648 - DNA, 2397 bp, synthetic construct
  misc_feature 1..2397: note = Description of Artificial Sequence: Synthetic coding sequence
  source 1..2397: mol_type = other DNA
atgagcaagggcacagacgaggacattttctccggggtgagtttttttctgactcgcctgtcaaggtgcgaaccatcaaggcgtccaccacctgcccctcaacctactatgtcccgtagaaaacaaggaaaaccacagcatctttctaagcgagaattcagcccagaacctctagaggctatattaactgatgacgagccagaccacggccctcttggagcgcctgagggtgatcacgatctgctgacgtgcggccagtgtcagatgaatttcccccttggagacatactgatctttatcgaacacaagagaaagcaatgtaacgggtctctctgtctggagaaggccgtagataagcctccgagcccatccccaatcgaaatgaagaaagcatctaatcccgtcgaggtggggattcaggtgactccggaagatgatgattgcctctccacatctagccggggaatttgcccaaagcaggaacacatcgctgataagctgctccattggcgaggattatcctcccccagaagcgcccacggcgcactgatacctaccccgggaatgtcagctgagtatgctccacagggcatttgtaaagacgagcctagctcatatacctgtacaacctgcaagcagccatttacctccgcttggtttctgttgcagcacgcccagaacacacacggcctgcgaatatatctagagtctgagcacggaagccctctgaccccaagagtgggcattcctagcggccttggggcagaatgcccaagccagcccccacttcacggtattcacattgcggataacaatccttttaatcttctcaggatcccaggatccgtatcacgcgaagcaagtgggctggcagaaggacgcttcccccctacacccccactgttttcaccgcctcccagacaccatctagacccacataggatcgagaggttgggagccgaagagatggccctggctactcaccacccttcagccttcgatcgcgtgttaaggcttaaccccatggcaatggagccccctgcaatggacttctcgaggcgcctccgggaactcgcgggtaacacttcaagtccaccattgtcacctggaagacctagtcccatgcagagacttctccaaccgtttcaacccggatccaagcccccatttttggccacccctccactgcccccattgcagagcgcaccaccaccctctcagccccctgttaagtcaaagtcttgtgagttttgtggcaagacgtttaaatttcagtccaacctggtcgtacaccggaggagccataccggtgagaaaccctacaagtgcaacctgtgtgatcatgcttgcacccaggcgagcaagctgaagaggcatatgaaaacccacatgcacaagtcaagccctatgacagtgaaatcggatgacgggctttctactgcctctagtcccgagcctggaacgtctgacctcgtggggagcgcgtcctccgctttgaaatcagtggtcgctaagttcaaatcagagaacgatccaaacctgatccctgaaaacggcgacgaggaggaagaagaggatgacgaggaagaagaagaggaggaggaggaagaagaggaggaacttaccgagagcgagcgagtagattatggtttcggcctgagcctggaggccgtcgtcggggtgggggatgaatctcgggcactccctgatgtcatgcagggcatggtactgtcgagtatgcagcacttctccgaagccttccatcaagtgctgggtgagaagcacaagcggggacatcttgctgaggctgagggccaccgcgatacttgcgacgaggactctgtggcaggcgaaagtgataggatcgatgacggcacggtcaacggcagaggatgttctcctggcgaatcagcctccgggggtctcagcaaaaaactcctgctcggatccccgtcctcgctcagtccctttagcaagcgtatcaagctggaaaaggaattcgatctgccccctgctgccatgcccaacaccgaaaatgtgtattcccagtggctcgccggttacgctgcttccaggcagctcaaagatcctttcttgagcttcggtgacagtcgccagagccctttcgctagcagctctgagcattcaagcgaaaacggatcactgaggttttccaccccccctggcgaactggacggaggcatctccgggcgttcaggcaccggatctggcggaagtacaccacatatctctggaccaggcccaggcagacccagctcaaaggaaggtcgtagatccgatacctgcagctcccacaccccaatcagacgctcgactcaaagagcccaggacgtctggcaattctctgatgggtccagccgagcacttaagttctag

SEQ ID NO: 215649 - DNA, 1329 bp, synthetic construct
  misc_feature 1..1329: note = Description of Artificial Sequence: Synthetic coding sequence
  source 1..1329: mol_type = other DNA
atgtctgccgagtacgcgccacaaggaatctgtaaagacgagccctcctcttacacttgcaccacctgtaagcagcctttcacatcggcgtggtttctccttcagcacgctcagaatacacatgggctgaggatttatttggaatcggagcacgggtcccccttgaccccccgaagcaacctcgtggtgcatcgcagatctcacacaggcgagaaaccctacaagtgtaacctttgcgatcatgcttgtactcaggcttcaaagctgaagcgacacatgaagacacatatgcacaaatccagtcccatgaccgtaaagtccgatgacggtttgagcacggcatcatcaccagagccaggcaccagtgatttagtcggctccgctagctctgccctgaagagcgttgtcgcaaaatttaagagtgagaatgacccaaacctaatccccgagaatggcgacgaggaggaggaggaggacgatgaggaggaagaagaagaggaggaggaggaagaggaagagctgacggagagcgagagagttgactatggctttggcctaagcctcgaagctgccaggcaccacgagaattcatcccgcggagccgtcgtcggtgttggcgatgaaagccgcgctctccccgatgttatgcaaggcatggttctgtcctcaatgcagcatttcagtgaggcttttcatcaggtgttaggggagaagcataaacgcggtcatctagcagaggccgagggccacagggatacctgtgatgaggattccgtcgccggagagagcgatcggatcgacgacggcaccgtcaatggccgtggctgcagtccaggggaaagtgcctctggcggactgtctaaaaaactgttgttagggtctcctagcagtctcagtcccttctcaaaaaggattaagctggagaaggaatttgacttgcctcctgccgcaatgcctaacaccgaaaatgtatacagccagtggttagcaggatacgcagcatccaggcagttaaaagacccctttctgagtttcggagacagcaggcagtcaccctttgcaagctccagcgagcactcttcagagaacggttccctccgcttctcaacaccccctggagaattagacggaggaatttccgggcgaagtggaactggctcgggcggatccacaccccacatcagcggccctggcccaggtaggccttccagtaaagagggcagacgctcagacacctgtagttcccacacccctatccgccgtagcacacaaagggcacaagatgtgtggcagttttcagatggcagctcccgagccctcaaattctag

SEQ ID NO: 215650 - DNA, 2382 bp, synthetic construct
  misc_feature 1..2382: note = Description of Artificial Sequence: Synthetic coding sequence
  source 1..2382: mol_type = other DNA
atgtcccgcagaaagcaaggaaaaccgcagcacttgtccaagcgcgagtttagcccggagccccttgaagccatactgactgacgacgagcctgatcatggcccactgggggctccggaaggcgatcacgacctcttaacatgtggtcaatgtcagatgaatttccccctgggcgacattttaattttcatcgagcataaacggaaacaatgcaatggttccctgtgcttagaaaaagcggtggacaagccaccctctcccagcccaatcgaaatgaagaaggcctctaaccctgttgaggtcggcatccaggttacacctgaggacgatgactgtcttagcacgtccagccgaggaatctgtcctaagcaggagcacatcgctggtaaggatgaaccttcttcttatacctgcacaacatgcaagcagcctttcacatctgcctggttcctgctccaacatgcccaaaatacacacggactgcgcatttacctggagagtgagcatggcagtccactcaccccgagagtagggattccatctggcttaggggcagagtgcccgagccagcctcccttgcatggaatacacatagctgataacaacccattcaatctgcttaggatcccgggatccgtgtctagagaggccagcggacttgccgagggcagattcccacccacccccccactattctcccctccacccagacaccatctggacccacaccgcatcgagcgtttgggagcagaggagatggctctggccacacaccacccttcggcctttgacagggtacttaggctgaacccgatggccatggagcctccagcgatggattttagccggcgactgcgagagctagctgggaacacaagctctcctccactgagtccaggtagacctagtccaatgcagagacttttgcagccatttcagcctggctccaaacccccattcttggccacacctcctctaccacccttgcaaagtgccccaccaccgtcgcagccccctgtgaagtccaagagctgcgagttctgcggtaaaactttcaaattccagtcgaatctggtcgttcacagacggtcccacacgggcgagaaaccttataaatgcaatctgtgtgaccatgcttgtactcaggcaagcaagttaaaaagacacatgaagacccacatgcacaaaagcagtcccatgacggtgaaatcagatgacggcctgagcactgcatcaagcccagagcctggaacgtctgacttagtgggttcagccagctcagccttaaagagcgtcgtcgccaaattcaagtccgagaatgaccctaatcttatcccagagaatggagacgaggaggaggaggaggatgatgaggaggaggaggaggaggaggaggaggaggaagaggagctaaccgaatctgaaagagttgactatggctttgggcttagcctggaggctgccaggcaccatgagaattctagtcgaggggcagttgtgggcgtcggagatgagtcaagagccctgcctgatgtaatgcaggggatggtgctgtccagcatgcaacactttagcgaggctttccaccaagttctgggggagaagcacaagagagggcacctggccgaggctgagggccacagagacacatgtgatgaagactcagtcgctggggaatcagataggattgatgatggaactgtgaacggcagaggttgctctcccggtgaaagcgctagcggaggactgtccaaaaagctcctgcttggctctcctagctctctcagcccttttagtaaacgcattaaactcgaaaaagaatttgacctgcccccagccgcaatgcctaatactgaaaatgtatattcccagtggcttgcaggctatgccgcaagccggcagctcaaggacccattcctgtcgtttggcgactccagacagtccccatttgcgagcagttctgagcactcctcagagaatgggagtctccggttctctacccctccaggcgaactggatggaggcattagtgggagatctggaactggatccggcggatccacaccccatatctctggaccagggccaggcagaccgtcaagcaaggaggggagacggagtgacacgtgcgagtattgtgggaaggtcttcaaaaactgcagcaacctgacagtgcaccgccgatcccataccggagagcggccttataagtgcgaattatgtaattatgcatgcgcccagagctctaaactgacaagacatatgaagacacacggacaagtacttcataccccgcctttcggcgtggtccccagagaactaaaaatgtgtggctcattcaggatggaagcgagagagcccttgtcttctgagaaaatctag

SEQ ID NO: 215651 - DNA, 2472 bp, synthetic construct
  misc_feature 1..2472: note = Description of Artificial Sequence: Synthetic coding sequence
  source 1..2472: mol_type = other DNA
atgtcgcggaggaagcagggcaacccccagcatctgtctcagagagagctgattacacccgaagcggatcacgtggaggctgccatcctcgaggaggatgagggtctggagattgaggaaccatccgggttagggttaatggtaggcggtcccgacccggacctgctgacatgtggtcagtgccagatgaattttcctcttggcgacatccttgtctttatcgagcacaagagaaagcagtgtggagggagcctgggcgcatgttacgacaaggccctcgataaagattcccctccgccatcatcccggtccgagctcagaaaagtttcggagcctgttgagatcgggatacaggtgacaccagatgaggacgatcatctactgtcccccaccaaagggatttgcccgaagcaggagaacatcgctggaaaggatgagccttctagttatatatgtactacttgtaagcagccttttaattcagcttggtttctgctgcaacacgcccagaacacgcacggcttccggatctatctagaaccgggacccgcaagctcctccctaactccacgtctcacaataccacctccactgggacccgaggctgtggcacagagtcctctgatgaacttcttgggtgactccaatccctttaatctgctacggatgactggacctatcctgagagaccaccctggcttcggagagggtaggctacctggcaccccgcctctgttcagtccgccacctcgccaccacctggaccctcacagactgagcgctgaagaaatggggctggtggcccagcatcccagtgccttcgacagggtgatgaggctgaaccccatggccatcgactcccctgctatggacttttcccgcaggctgcgggagctggcagggaattcgagcaccccacccccagtttccccagggagaggcaacccgatgcaccgtctgctgaaccccttccagccatcccctaaaagccccttcctgtcaactcctccgttaccacccatgcctcctgggggtacaccacctccccaaccccctgcgaagagcaaatcgtgcgagttttgtggcaagacctttaagtttcagtccaacttgatagttcacaggagatcccacaccggtgaaaagccctacaaatgtcagctctgtgatcatgcttgctctcaggcttcgaaacttaaacggcacatgaagactcacatgcacaaggcaggatctctcgctggccgatctgacgacgggttatccgccgcaagctctcccgaacccggaacatcggagctggctggtgaaggactcaaggccgcagacggtgactttaggcatcatgagagcgacccttccttaggacacgaacccgaagaagaagatgaggaggaggaggaggaagaagaggagctgctgctggaaaacgagtcaagacccgagagctctttcagtatggacagcgagttatctagaaatcgggagaacggcggaggtggtgtcccaggtgtgcccggagctgggggaggcgcagctaaagcccttgcagatgagaaggccctggttttaggaaaagtgatggagaacgttgggctcggggcactacctcagtacggagagctgctcgctgataagcagaaacgaggagctttcctaaagcgggctgcgggtggtggggacgcaggagatgacgatgatgctggcggatgcggcgacgctggggcaggaggtgccgttaacgggcgtggagggggatttgcccctggcactgaaccattcccaggcctcttccctcgtaaacccgcacctctcccctcccccggtttaaactccgctgccaaacggattaaggtggagaaagatctggagctgccccctgccgcactaatcccatcggagaatgtctactcccaatggcttgtcgggtatgcagcttcccgccacttcatgaaggacccgttcctcggctttacagacgcgaggcagtcgccattcgctacttctagcgaacactcaagtgagaatggatctctaaggttcagcacaccccctggcgatctcttggacgggggactttctggtcgctcaggcaccgcctccgggggatcaacccctcatctgggtggacccggaccaggcaggccctcgtccaaggagggcagaagaagcgatacgtgtgaatactgcgggaaggtgttcaaaaattgttcgaacctcacagtccaccggagaagccacaccggagagcgcccatacaagtgtgaactgtgtaactatgcttgcgcccagagctcgaaattgacccgacatatgaagacacacggacaaattggtaaggaggtgtaccgctgtgatatatgccaaatgccattttcagtgtatagcaccctggagaagcatatgaagaagtggcatggcgaacacctgcttaccaatgatgtaaaaatcgagcaggcggagagatcatag

SEQ ID NO: 215652 - DNA, 2685 bp, synthetic construct
  misc_feature 1..2685: note = Description of Artificial Sequence: Synthetic coding sequence
  source 1..2685: mol_type = other DNA
atgagtagaagaaagcagggaaacccgcagcacctgtctcagcgcgagctgattacccccgaggctgatcacgtggaagctgcaattctggaagaagatgagggactggaaatcgaggaacctagtggcttaggtctgatggtaggtggccctgacccagatctgctcacatgcggccagtgccagatgaacttccctttgggtgacatactggtgttcattgaacataagagaaagcagtgcggcggtagccttggagcatgctacgataaagcactggataaagacagcccacctcctagctccagatcagagctgcgcaaggtgtcagagcctgtcgaaatcggcatccaggtgaccccagacgaagacgaccacctactctccccaactaaaggcatctgcccaaagcaagaaaacatcgctggtccttgcagaccagcacagcttcctgcagttgccccaatcgcagcgagttcccacccccactcaagcgtcattaccagccctctgcgcgctctcggcgcactgccaccctgcctgccattgccatgctgctcagccagacccgtgtccggagacggaacgcagggcgaagggcaaaccgaagccccttttggttgccagtgccagctttccgggaaggatgaaccgagctcttatatctgcaccacctgtaagcagccttttaactcagcttggtttctgctacagcatgcacagaacacccacggctttcgcatctatctcgagccagggccagcctcgtcaagtctgactcctaggctcaccatcccccctcccttggggcctgaagccgtggcgcagagcccactcatgaatttcttgggggactcgaaccccttcaatctgctgcgtatgaccggtcccatcctgcgggaccaccccggattcggggagggaagactgccgggaacacccccactgttttcaccgcctcccagacatcacctggatcctcatcggttatctgcagaggaaatgggcctggtggcccagcacccgagcgcattcgacagagtcatgcggctgaacccaatggctatcgattcccccgcaatggatttctcacgcagactgagagagcttgcagggaatagttctactcccccacccgtgagtcctgggagagggaatccaatgcataggctgctgaatcccttccagccatctccgaaaagcccttttctgtcaaccccacccctcccacctatgccccctggcggaacccccccaccacagccacctgctaaatcaaagagttgtgagttctgtggcaagacgttcaaattccaatctaacctgattgtacatcgtcgaagccacaccggggagaagccttacaagtgtcagctgtgcgaccatgcgtgcagtcaggcaagcaaacttaagaggcatatgaaaactcatatgcacaaggcgggaagcctggccggacgaagcgacgacgggttgagtgccgcttcaagccccgagcccggtaccagtgaactggccggtgagggcctgaaagccgctgatggtgactttcgacaccacgaaagtgatccctccctcggacacgagcccgaagaggaggatgaggaggaagaggaagaagaagaagaactcttgctggagaatgaaagccggccagaatcatctttttctatggactctgaactgagtcgcaatagggaaaacggcggaggtggggtgcccggagtccccggagctgggggaggtgctgccaaagcactcgcagacgagaaggccctcgtcctgggtaaagtgatggagaatgtagggctcggagcccttcctcaatacggagaactgctcgcggataagcaaaagcggggagcttttcttaaacgggcagccggaggaggtgacgctggtgacgatgacgatgctggcggatgcggagacgcgggagcaggtggggctgtcaacgggcgaggtggcggattcgcgccaggcaccgagccctttcctggattgttcccgcgaaagcccgcaccgcttccctccccaggcctgaattccgccgctaagaggattaaggtcgaaaaagaccttgaactgccacccgctgcccttatcccttccgaaaacgtgtattctcagtggctggtgggatacgccgcttcgcgccacttcatgaaagacccatttctcggctttaccgacgccagacagtcaccttttgccacttctagtgaacattccagcgagaacggatcactgcggttttctacaccaccaggggacctgctcgacggaggtctgagcggcaggtcgggcacggcttccggcggatctacacctcacttggggggaccaggtcccggtaggccttcatctaaagaggggcgtcgttccgacacctgcgagtattgtggaaaggtgttcaaaaattgttccaatctgaccgttcatagaaggtctcacaccggcgagcggccttacaaatgcgaactgtgcaactacgcgtgcgcccagtccagtaaactcaccagacatatgaagacgcacggccagatcggtaaagaagtctatcgatgtgacatatgccaaatgcccttctctgtgtattccacccttgagaagcacatgaaaaaatggcatggtgagcatctgctgaccaacgatgtgaaaatcgagcaggcagaaagaagctag

SEQ ID NO: 215653 - DNA, 1365 bp, synthetic construct
  misc_feature 1..1365: note = Description of Artificial Sequence: Synthetic coding sequence
  source 1..1365: mol_type = other DNA
atgcctaggtgccctgccggagccatggacgaaggacccgtcgacctccgcaccaggccaaaagcggcaggactaccgggagccgcactgcccctccgcaagcgacctctgcgggctccctcaccagagccagctgcgccaaggggagcggcaggcctagtagtgccattagaccctctcaggggcggatgcgacttacctgcagttccaggccctccccacgggcttgcgcgacctgaagcgttgtactaccctggcgctttgttacccctttaccctactagggctatgggctccccgttcccactggtcaacctccctactccactgtaccccatgatgtgtcccatggagcaccctctttcggccgacatcgctatggccacacgggcagatgaagacggagatacacctctccatatagccgttgtccagggtaatctgcccgctgtgcatcgccttgtcaacctcttccaacaggggggtagagagctggacatctataataacctgaggcaaacacccctgcacctggccgtgattacaactcttccttcagttgtcagactcctcgtgactgcaggcgcaagtcccatggctctagataggcatgggcagaccgcagcccatctggcgtgtgagcatagatctcctacgtgtctgagagccctgctggacagtgcagcacccggtacccttgatttggaggcgaggaactacgatggtttgaccgcactgcacgtagccgtcaatactgaatgtcaggagaccgtgcagctgctactagaacgaggggctgacatcgacgcggttgacattaagagcggtaggagccctctaattcacgccgtggagaacaactcgctgtcaatggtccagctgctgctacagcacggagctaacgtgaatgcccaaatgtactcaggttcttctgcgttgcacagcgctagtggacgcggtctgctaccactcgtacgcactctggtgagatcaggcgctgatagctccctcaagaactgccacaatgacacccctctgatggtggcccgttcacgccgagtcatcgatatccttcgcggtaaggccacacggcctgcctcaacctcgcagccagaccccagccccgatcggagcgccaacacctccccggagtcttcctcccggctcagcagtaatggattgctttccgcctccccgtcatcttccccttcacaaagtcctccaagagacccccctgggttcccaatggcccctccaaacttctttctgccatcccctagcccccctgcttttttgccgtttgctggggtgcttcgcggtcccggtagacctgttcctccaagccctgcgcctggtggttcatag

SEQ ID NO: 215654 - DNA, 1071 bp, synthetic construct
  misc_feature 1..1071: note = Description of Artificial Sequence: Synthetic coding sequence
  source 1..1071: mol_type = other DNA
atggaggaaggaagggaaaggaaccgatcctggccgccagccgaatgccagagcctgccgcgagtgagattgtttacaccaaccaaggaggagaccgcccaaaggggtgaagtgttcggccaggggcatcccgctagagctttgctcccgctctatcccaccagggccatggggtcaccattccccctggtgaacctcccaacacccctgtatcctatgatgtgtccaatggagcacccattatccgctgatatagccatggctactcgggcagatgaagacggggacacccccctgcacatcgctgtggtccaagggaacctacctgccgtgcaccgactggtgaatcttttccagcagggaggtcgtgaactggacatctacaacaatcttaggcaaaccccactgcacctggcagtgatcaccacgttaccctccgtggtgcgcttacttgtgacagccggagcttctccaatggcacttgacagacacggtcagacagctgcccacctggcttgcgagcacaggtcacctacatgtttgagggcactgctcgattcagctgccccaggcaccctggatctggaagcccgtaactatgacggcctgaccgctctccacgtggccgtgaacacggagtgccaggagacagtgcagctcctgcttgagagaggtgccgacattgacgccgttgatatcaagagcggacgtagtcctctgattcatgccgtggagaacaacagtttatccatggtccagttactcctgcagcatggcgctaacgtcaacgcacagatgtacagtggaagctccgcactgcattcagcaagtggaagagggctgctaccactggttagaactttggtacgcagcggcgctgacagtagcttgaaaaactgtcacaacgatacccctttaatggttgcgaggtctcggagagtgagcaggggctcttgcggccacgccccatgtaccagagtctctgctggatggctccaggcctctgtccccgaaagaaggggtgtaagggtgtccgtccctctacggggaggcgagtgggtttcactttag

SEQ ID NO: 215655 - DNA, 1440 bp, synthetic construct
  misc_feature 1..1440: note = Description of Artificial Sequence: Synthetic coding sequence
  source 1..1440: mol_type = other DNA
atgggctccccagccgcaccagagggagcacttggttatgttagagagtttacacgtcactcatccgatgtcttggggaacctgaatgaattgaggctgcgaggaattttgacggatgtgactcttctcgttggcggacaacctctgcgcgctcataaagccgtgttaatcgcctgttccggatttttctatagtatcttccgaggccgagcaggggtgggggtcgatgtcttgtccctgcccggagggccagaggcgagaggcttcgccccattgctcgacttcatgtatacctcaaggctgcgccttagtcccgcaaccgcgcctgctgtgcttgcagcggctacgtaccttcagatggagcatgtcgtgcaggcttgtcacaggttcatacaggcttcctatgaaccccttgggatttcactgaggccactcgaagcagagccaccgaccccacccacagcccctcctccagggtcaccccgtcgctccgaagggcatccagaccctcccaccgagtcccgcagctgtagccagggccctccatccccagctagtcctgatcccaaagcctgcaattggaagaagtacaagtacattgtccttaatagccaggccagccaggccggatcactggttggggaaagatcaagcggccagccttgccctcaagcaaggctaccatctggagacgaggcttctagcagtagcagtagttcaagtagctcctcggaagagggaccgatcccaggaccacagtcccgcttgtcgcccactgctgctactgttcaattcaagtgtggggctcccgcatccaccccatatctcctgacaagtcaagcgcaggacacctcaggaagccccagcgagcgtgccagacctctgcctggcagcgaattctttagttgccaaaactgcgaggccgtggccggatgttcctccgggttggattcgctggtcccgggtgatgaagacaagccctacaaatgtcagctgtgtagaagctcctttcgctataaaggtaaccttgcatctcatcggactgtccacacaggggaaaagccttaccactgcagtatttgcggagccaggttcaatcggcctgctaatctgaagactcacagtcggatccattccggagaaaaaccctacaaatgtgaaacttgcggtagtcgctttgtacaagtggcccatcttcgagctcatgtgttgattcacacaggggagaaaccctacccatgtccaacctgcggcacacgcttccggcatctgcaaacccttaaatcacacgtgcggatccacacgggtgagaagccgtaccactgtgatccatgcggccttcacttccggcacaagtctcagttgagactgcacctgcggcagaaacatggcgctgccacaaataccaaggtacattatcacatcctcggtggaccctag

SEQ ID NO: 215656 - DNA, 129 bp, synthetic construct
  misc_feature 1..129: note = Description of Artificial Sequence: Synthetic coding sequence
  source 1..129: mol_type = other DNA
attcacacgggagagaaaccatacccctgtccgacctgcggtactcgcttcagacatctccagacgttgaagtctcatgtccggatccacactggagagaaaccatatcacgaacccgtcactagctag

SEQ ID NO: 215657 - DNA, 633 bp, synthetic construct
  misc_feature 1..633: note = Description of Artificial Sequence: Synthetic coding sequence
  source 1..633: mol_type = other DNA
atgtcaggaaggagtgttagagccgagacgcgcagcagagcaaaggatgatattaaacgagttatggccgcaatcgagaaggtgcggaaatgggaaaaaaaatgggtaacagtcggtgacacttctctgcggatctacaaatgggtccccgtaacagagcccaaagtagacgataaaaataagaacaagaaaaagggtaaggacgaaaagtgtgggtcagaggtaacaacacctgagaatagcagctctcccggaatgatggacatgcatgatgacaactccaaccagtcctctattgccgatgcttctcctataaagcaggagaatagcagtaattccagtcctgccccagagccaaactctgccgttccatccgatggcacagaagcaaaggtggacgaggcccaagcagatggcaaagaacatcccggtgccgaagatgcctctgatgagcagaactctcaatcctctatggaacattcgatgaactcaagcgaaaaagtggatagacagccgtcaggcgattcaggactcgccgctgaaacatccgcgatcagccaggatttagaaggggttcctccgtccaaaaaaatgaagctggaagcttcacagcaaaactctgaggagatgtag

SEQ ID NO: 215658 - DNA, 696 bp, synthetic construct
  misc_feature 1..696: note = Description of Artificial Sequence: Synthetic coding sequence
  source 1..696: mol_type = other DNA
atgtctggccgatctgttcgggctgagactcgaagtcgggcaaaagacgacattaaaagagtaatggcagccatagagaaggtgcgtaagtgggagaaaaagtgggtgacagtgggtgatacatctctgcgaatctacaaatgggttcctgtcacagagcccaaggtggacgacaaaaacaaaaataagaaaaagggtaaggatgagaaatgtggcagcgaggttacaacgcctgagaactcctcctcccccggtatgatggacatgcatgatgataacagcaatcagtccagcatagccgacgctagtccgattaagcaggagaactctagcaattcgagtcccgctcccgagccgaactctgctgtgccttccgatggcacggaagctaaggtggatgaggcgcaggctgatggaaaggaacacccaggagccgaagacgcgtcggacgaacagaattcccagtcttccatggagcactccatgaacagctcagagaaggtagatagacagccttcgggcgatagcggcctggccgctgagacaagcgcaatcagtcaggttcccagaagtaggagccagcggggatcccagatcggcagggagccgattggactttctggcgatctggaaggcgttcctcccagcaagaaaatgaagctggaggcaagccaacagaattccgaggagatgtag

SEQ ID NO: 215659 - DNA, 528 bp, synthetic construct
  misc_feature 1..528: note = Description of Artificial Sequence: Synthetic coding sequence
  source 1..528: mol_type = other DNA
atggctagcaggaaggcgggaaccaggggaaaagtggcagccaccaaacaggcacagagaggaagtagcaacgtcttttcaatgtttgaacaggcgcagatacaggaattcaaggaggccttctcatgcatcgaccagaatagagacgggatcatctgcaaagcagacctacgggaaacctattcacaactgggcaaagtgtctgtccctgaggaggaactcgatgctatgctccaggaaggcaaaggacccataaacttcaccgtcttcctcaccctgttcggtgagaaacttaacggaacggaccctgaggaggcgattctgtcggctttcaggatgtttgacccatctggtaaaggcgtggtgaacaaggatgaatttaaacagcttctgcttacccaggctgacaaattttcccctgccgaggtagagcagatgttcgccctgactcccatggatctggccggtaacattgactataaaagcttgtgttacatcatcacccacggtgatgaaaaagaagaatag

SEQ ID NO: 215660 - DNA, 438 bp, synthetic construct
  misc_feature 1..438: note = Description of Artificial Sequence: Synthetic coding sequence
  source 1..438: mol_type = other DNA
atgagcggcaggagcgtgcgggctgagactcgctccagggctaaagatgacataaaaaaggtgatggcggctatagagaaggttcgaaaatgggagaaaaaatgggtgaccgtcggggacacatccctacggattttcaagtgggtgcccgttacagactctaaggaaaaggagaagtccaaaagcaattcaagcgccgctagggaacccaacgggtttccttctgacgcctcggctaattcatccctgctacttgaatttcaggagccctcgctgccatcttccgaggtggccgatgagccaccaaccctgacgaaggaggaaccagtgccgctggagacacaagtggtggaggaagaagaagacagcggggcaccacccttgaagaggttttgtgttgaccagccaactgttcctcagaccgccagcgagtcttag

SEQ ID NO: 215661 - DNA, 867 bp, synthetic construct
  misc_feature 1..867: note = Description of Artificial Sequence: Synthetic coding sequence
  source 1..867: mol_type = other DNA
atgaaggataggacacaagaactccgctcagccaaagattcagacgatgaggaagaagttgtgcatgtcgatcgcgaccatttcatggatgagtttttcgagcaggtggaggagatacgagggtgtatcgaaaaacttagcgaagatgttgagcaggttaagaagcagcactccgctatcctggccgcacccaaccccgatgaaaaaaccaagcaggaactcgaagacctgaccgctgatattaagaagacagccaacaaagtgagatctaaactcaaagctatagaacagagcatcgaacaggaggagggtctcaatcggagtagcgcagacctgagaattcgcaagacacagcactctacattgtcccgaaaatttgtcgaggtaatgaccgagtataatgctacacagtcaaagtacagagaccgttgtaaggaccgtatccagaggcaattggaaataacaggcaggactacgactaacgaagaattagaggacatgctcgagagcggtaagctcgcgatctttactgacgacataaagatggactcccagatgacaaagcaagcactcaacgaaatcgagacccgtcacaacgaaattatcaagctggagacgtcaatccgtgagttacatgacatgtttgtggatatggcaatgctggtcgagtcccaaggcgaaatgatagacaggatcgaatacaatgtggagcactcagtcgactacgtcgagcgcgctgtgtccgatactaagaaggccgttaaatatcagtccaaagccagacgaaagaagattatgattatcatttgttgtgttgtacttggcgtggtgttggctagttctataggcggaactctgggcctgtag

SEQ ID NO: 215662 - DNA, 729 bp, synthetic construct
  misc_feature 1..729: note = Description of Artificial Sequence: Synthetic coding sequence
  source 1..729: mol_type = other DNA
atggccggacgtacggtcagagcagagacaaggagtagagccaaagacgacattaaaaaggttatggccacgatcgaaaaagtacgcagatgggagaagcgctgggttactgttggcgacactagcctgaggatctttaagtgggtgcccgtggtggacccgcaggaggaagagcggagaagagccggagggggagcggagcgttctagaggaagagaacgcaggggcaggggagcttccccccgaggaggaggaccccttatcttgctggatctgaacgacgagaactccaatcaatcctttcactcggagggcagtctccaaaagggaacggagccttctcctgggggtacacctcagcccagtcgtccggtgtcacccgcagggccacctgaaggggtgcctgaagaggctcagcccccaagacttggtcaggagcgcgacccaggcggtattacggcgggatcaactgatgagcctcctatgctcacaaaggaagagccagtcccagaacttctagaggctgaggactctggtgtgcgaatgactaggagagccttgcacgaaaaagggctaaagactgaacccctgagaagactccttccacggcgaggcctccgaaccaacgttcgcccatcaagcatggcggtcccggatactcgcgcaccaggcggaggtagcaaagccccacgggctccaaggactataccacaggggaagggacgttag

SEQ ID NO: 215663 - DNA, 1680 bp, synthetic construct
  misc_feature 1..1680: note = Description of Artificial Sequence: Synthetic coding sequence
  source 1..1680: mol_type = other DNA
atgcacagcttcatccacgctgccatgggcatggttatggcttggtgcgcagcggtgatcacccaaggtcagtacagctttctggtggtgccctgtactggaaccaattctttcggaagccccgcagcccagacctgcctgaacgaatatcacctttttttcctgttgactggtgctttcatgggctattcctacagtcttttatacttcgtgaataacatgaactacctgccctttccgatcatccaacagtataagtttctgaggtttcgccgaagcctacttttgctggtgaaacacagttgtgtggaaagtctgtttttggtgcgcaacttctgtattctgtactatttcctgggatatattcctaaagcctggatttccaccgccatgaatctgcatattgacgagcaggtgcatcgcccactggacactgtgagtggcctattgaatctctccctgctgtatcatgtgtggttgtgcggtgtgtttctactgaccacatggtacgtgtcatggattctgtttaagatctacgcaaccgaggctcacgtcttccctgtccagcctcctttcgccgagggatctgatgaatgcctacctaaggtgctcaattccaaccccccacctattattaaatacttggctctccaagatctgatgctgttgtcccagtacagtccctcacgcagacaggaggtttttagtctctcacagcccggtggacacccgcataattggacagctatttcacgggaatgtctgaacttattaaatgggatgacacaaaaattaattctttaccaggaggccgctgctaccaacggaagagtctctagctcctacccggtggaaccaaaaaaattaaatagtccagaggaaactgcttttcaaaccccgaagagttcccagatgccgcgacccagcgtgccccctctggtgaagacaagtctgttttcatcgaaactaagtacaccagatgtggtgagtcccttcggcaccccatttggatcctcagtcatgaaccggatggccggaatttttgacgtcaatacttgttacggaagcccacaatcaccccaactgatcagaagggggccacgcctgtggacctcagccagcgaccagcagatgactgagttttccaacccatcaccaagtactagtataagtgccgagggtaagacgatgcgccaaccgtccgtgatttactcgtggatccagaataaaagagagcagattaaaaacttcctcagtaaacgcgtgctgatcatgtacttttttagcaagcacccagaagcctcaattcaagcagttttcagcgatgcgcaaatgcacatctgggctcttgaggggctgagccacttggttgccgcttcatttactgaggaccgtttcggtgtggtacagaccacgctccccgcaatcctcaatacccttttgaccctgcaggaggccgtcgacaaatatttcaaactgcctcatgcaagttccaagcctcctagaatttccgggtctctagttgacacatcatacaagaccctccggtttgcctttagggccagcctgaagaccgcaatttatcgaatcaccacgacgttcggagaacacctgaacgccgttcaggcctctgccgagcatcagaagcgtttacagcagttcctagaatttaaggaatag

SEQ ID NO: 215664 - DNA, 4499 bp, synthetic construct
  misc_feature 1..4499: note = Description of Artificial Sequence: Synthetic coding sequence
  source 1..4499: mol_type = other DNA
atgagaatcctggccaacaaaactcgcctgccccacccacgcaggagagaggccccaggaagccctcctctaagtccaagaggacattgcccacctgcacctgctaaaccaatgcaccccgaaaataagctgaccaatcacgggaagaccgggaatggtggagcccagtcacagcatcaaaatgtgaaccagggacccacgtgtaacgtgggatccaagggggtcggtgccggtaaccatggcgctaaagctaatcaaattagcccatcaaactctagcctgaaaaacccacaggccggagtcccaccattttccagtctgaagggtaaggtgaagcgagatagatctgtatccgttgactctggcgaacagcgagaagccggaacacctagcttggacagtgaagccaaagaggtggcacctcgtagcaagagaagatgcgtcttggaacggaaacagccgtactctggagatgaatggtgttctggacctgattcagaggaagacgataagccaatcggagccacgcataactgcaacgtggcagatccagcaatggccgctccacagttgggaccaggccagactactcagctgcctttgtctgagagctcggtgcccggtgcccctcacggacccccaccaggccttcgcccagacgcacccggtggaggagggggaggcggaggcgttcccggaaaacctccaagccaattcgtctatgtgtttaccactcacctcgcgaatacagcggctgaggctgtgctacaggggagggccgatagcattctggcttatcatcagcagaacgtgcctcgggcaaagctggaccaggcccctaaggtgcctcccaccccagaacctctgcccctctcgacgccctccgctgggaccccacagtcacagcccccacccctgccaccaccgccaccacccgctccgggatctgctcctcccgctcttccacctgagggcccaccagaggactcaagtcaggacctggcgccaaacagcgtgggagccgcttccacaggcggaggaaccggaggaacccaccctaacacaccaactgccacaacagccaataaccctttaccgcctgggggtgatcctagcagcgccccaggccctgccttgcttggcgaagcggctgcgccaggaaacggtcagcgaagtctggtcggatcagaagggctgtccaaggagcagcttgaacacagggagaggagtcttcagacgctcagggacatcgagcgcttactgctgaggtccggggagaccgagccgttcttgaagggtccgcctggaggcgctggagaaggtgggccaccagcgcaagcccctcctccaccccagcagccacctacagcacccccatctggactaaagaagtacgaagaacccctgcagagtatgatcagccagacccagtccctgggcggtcctccacttgagcacgaagtgcccggtcatccacccggaggggacatgggccagcagatgaatatgatgatacagaggcttggccaagactcgctaacacctgagcaagtagcttggcgtaagctccaggaagagtattacgaggagaagcggaggaaggaggagcagataggtcttcacggctcaagaccacttcaagacatgatgggcatgggtggaatgatggtgcgtggacccccacctccctaccattccaagccaggcgaccagtggcctccgggaatgggcgctcagctgcgtggaccaatggacgttcaggaccccatgcagctaaggggcggaccaccctttccagggccaaggttccctggtaaccagatacagcgcgtgccgggtttcggtggcatgcagtctatgccaatggaggtgcctatgaatgcaatgcagaggcccgtaaggcccggtatgggctggaccgaagacctccctcctatgggcggtccctcgaatttcgctcagaataccatgccttaccccggaggtcaaggggaagcggaacgtttcatgacccccagagtgcgcgaggagcttttacgacaccagttgttggaaaaacgctctatgggtatgcagcgtcccctgggcatggctggaagtggaatgggtcagagcatggagatggagcgaatgatgcaagcccacaggcagatggatccagctatgtttcccggacaaatggctggcggagaaggattggcgggtacccccatgggcatggagtttggcggagggcgtggtcttctgtcccctcccatgggacagtccggccttcgggaggttgacccaccgatgggcccaggcaatctcaatatgaacatgaatgtgaacatgaacatgaatatgaatcttaatgtgcagatgacaccccagcagcagatgctgatgtctcaaaagatgagggggccaggggacctgatggggccacaggggttatcacctgaggaaatggcgagggttcgcgctcaaaacagcagtggtgtcatgggcggtccacagaagatgttaatgccaagccagtttccgaaccagggccagcagggcttcagcggtggacagggcccataccaggccatgtctcaagacatgggaaatacccaagatatgttttctcctgatcagtcttcgatgccaatgagtaacgtggggactactaggctcagtcatatgcctcttcctcctgcctccaatccgcctggcaccgtgcatagcgccccaaataggggcctcggaaggcgacctagtgacctcaccatctctattaaccaaatgggctcaccaggcatgggacacctgaaaagcccaaccctgtcgcaggtacatagccctctcgtaacaagcccgtcagcgaatttgaaatcaccacaaacaccatcacaaatggtgccactgcccagtgccaaccccccaggacctctaaagtcaccgcaagtgcttggtagctccttgtctgtccgaagcccaaccggtagcccaagccgactcaaatctcctagtatggctgtcccaagtcccggatgggtcgctagccccaaaaccgctatgccatccccgggagtgagtcagaacaagcaaccaccattgaacatgaacagtagcaccaccctaagtaacatggaacaaggaaccctaccccctagcggacccagaagttcaagtagcgcacctcccgctaaccctcccagcggactcatgaacccctccctgccctttacgagcagcccagaccctaccccttctcaaaaccccctcagccttatgatgacccagatgagtaagtatgcaatgcctagcagcacccctctgtaccataatgccattaagacgattgcgacgtccgacgacgagctgttacccgatcgcccactgctgccaccccctcccccaccccagggctcgggccctgggatctctaactcacagccgtctcagatgcatttgaatagcgcagccgctcagtcacccatggggatgaatctcccaggtcagcagcccctgagccacgagccgcctcccgcaatgctgccgtctccaactcctctcggcagtaatatcccactccatcctaacgcacaggggaccggtgggcctccacagaattccatgatgatggcaccaggtgggcctgatagtctaaacgctccatgcggccctgtcccttctagtagtcagatgatgcccttcccccctagacttcagcagccccatggtgcgatggccccaacagggggtggaggaggcggaccagggctgcagcaacattatcctagcggaatggctttaccacccgaagatctgcccaatcagcctcctgggcctatgccaccacaacagcatctaatggggaaggccatggccggacggatgggggacgcctatccaccaggggtcctcccaggagtggcttcagtcctcaacgatccggaattatcagaggtaatcaggcccactcctaccggaataccagaatttgatttgagcaggatcatcccttccgagaagccttcctccacgctccagtactttccgaaatcggagaaccagccccctaaggctcagccgccaaatctccacctcatgaacctccaaaatatgatggcagagcagactccctcacggcctcctaacctgcctggacagcagggagtacagcggggtctcaacatgagtatgtgccacccgggtcagatgtctttactgggacggaccggcgtccccccacagcaggggatggtaccccatggtctccatcagggtgtaatgtccccccctcagggtctgatgacccagcagaactttatgttgatgaaacaacgcggagtgggaggcgaggtgtattctcagcctcctcacatgctgtccccccagggctcgcttatgggccctccccctcagcagaacctgatggtttcacatccattacgacagagatcggtgagcctggactcacagatggggtatcttccagccccaggagggatggctaaccttcccttcta

SEQ ID NO: 215665 - DNA, 4188 bp, synthetic construct
  misc_feature 1..4188: note = Description of Artificial Sequence: Synthetic coding sequence
  source 1..4188: mol_type = other DNA
atgcggattctggctaacaaaacccgcctgcctcacccgcgtcgtcgggaagcacccggtagccctcccttgtcacccagaggtcattgccctcctgccccagctaagccgatgcaccccgagaataagcttactaaccacggcaaaaccggaaatggcggagcgcagagccagcatcaaaacgtgaaccagggacctacttgcaacgtcggctctaagggggttggagccggtaaccacggtgctaaggctaaccagatctctcctagcaattcttcgctcaaaaacccccaggccggtgtacctcctttctcttctctgaaaggcaaagtcaaacgagacaggtccgtgagtgtagactctggggagcaacgggaggccggaacccccagtttggatagcgaagctaaagaagtcgctcccaggagtaagcggagatgcgtcctggagaggaaacagccctacagtggcgatgagtggtgttccggcccagattccgaagaggacgacaagcccattggtgccacccataattgtaatgtggcagaccctgccatggccgcacctcaattgggtccaggccagactacccagctgccactgtcagaatcttccgtgcctggggctccacacggccctccacccggtctgaggcctgatgctcctggcggtggcggagggggtggaggcgttcctgggaaacctcccagccaattcgtgtatgtatttacgacacatcttgctaataccgctgctgaggctgtgctgcagggaagagctgatagtattctagcctaccatcaacagaacgtaccgcgagctaaactggaccaggcacctaaggtgccaccaacccccgaacccttgccactgagtacccctagtgccggtactcctcagtcacagccaccaccattacctccacctcccccaccggctcctggctccgcaccaccagcacttccccctgaggggccacctgaagacagctcacaggacttggcaccaaactcagtcggcgcagcctcaactggcggaggcaccggtggaactcatccaaacactccaacggccaccactgccaacaaccccctgccgccaggaggagacccctcgtccgcgcctggtcctgcactattaggcgaagccgctgcacccggtaacgggcagcgatccctggtggggtccgaaggacttagcaaggagcaactggagcatcgggagagaagccttcaaaccttaagggacattgagcggctgcttctcagaagtggcgagacggagccgtttttgaaaggacctcctgggggagccggagaggggggtccacccgctcaagccccaccccctccacagcaaccaccaaccgctccaccttctgggctcaagaaatatgaggagcccttgcagtccatgatttcccagacacaatccttgggtggtccacccttagaacacgaggtgcctgggcaccctcccggaggagacatgggccaacagatgaacatgatgattcaacgtctgggccaagactcgttaactcccgagcaggtcgcttggcgcaaattgcaggaggagtattatgaagagaagcggaggaaagaagagcagatcgggttacatggctcacgacctctgcaggatatgatgggcatgggaggcatgatggtgcggggtccccctcctccgtaccattcaaaacccggagaccaatggccccctggcatgggtgcccagctcagaggtccgatggatgtgcaagatcccatgcagctgcgcggaggccctcccttccccggaccccgatttcccggaaatcagatacagcgcgttccagggttcggtggaatgcagagcatgcctatggaagtgccaatgaatgccatgcagagacctgtgcgcccaggaatggggtggacagaggatctgcctcccatgggcggtcctagcaattttgcccagaatacgatgccctacccaggtggacagggcgaggccgagcgtttcatgaccccgagggtgagagaggagctgttacgacaccagcttctggagaaacggtcaatgggcatgcagcgaccacttggaatggcaggtagtggtatggggcagtcaatggagatggagaggatgatgcaagctcacaggcaaatggatcctgccatgtttccaggacagatggccggtggcgagggcctggcgggtaccccaatgggcatggaatttggcggagggagggggctgctgtcgcctccaatgggacaatccggattgagagaagttgacccgcctatgggtccaggaaacctgaatatgaacatgaacgtgaacatgaacatgaatatgaacctcaacgtccaaatgacgccccagcagcaaatgctgatgtctcagaaaatgcgtgggccaggtgatttaatgggccctcagggcctctctcccgaggaaatggcaagggtgagagctcagaatagctcgggagtgatggggggaccccagaaaatgcttatgccaagtcaatttcccaatcagggccagcagggattctctggaggccaaggcccataccaagctatgtcccaggacatgggcaatacacaggatatgttttctcctgaccagtcaagtatgcccatgtcaaacgtaggcacgaccaggttgtctcatatgccattgcctcccgcttctaaccctccaggtacagtccactcagctcccaatcggggtttgggcaggagaccaagcgacttaaccatcagcataaaccaaatgggtagtcctgggatgggccatttgaagagtcccaccctttctcaggttcattcccctttggtcacttcaccatcagctaaccttaagtctccccagacccccagccagatggtaccactccccagcgccaatcctccgggaccccttaagagcccacaggtgttaggctcatcattaagcgtgagaagccccaccggatcaccttcaaggctcaaatctccttctatggccgtgccttccccagggtgggtcgccagtcctaagacagcaatgccatcccccggagtaagtcagaataagcagccacccctgaacatgaattcaagtacaaccctgtctaacatggaacaaggaaccctgccgccatccggccctagaagctctagcagtgcaccaccggctaatcccccatccggccttatgaatccctccttgccttttacttcatcccctgatcccactccatcacagaatcctctgtccttgatgatgacccagatgtccaaatatgctatgccaagcagtacacccctctatcataatgctattaaaacgatcgccaccagcgatgacgaactgcttcccgaccgaccgttgctacctcccccacctcctccacaaggtagcggcccaggtatcagcaattcacaaccaagccagatgcatctcaactcggcagccgctcagtccccgatgggaatgaatctccctggccagcagcccctgtcacacgagccaccccctgccatgctccctagccccacaccgctgggcagtaatattccactgcaccctaacgctcagggaaccggtggccctccacagaacagcatgatgatggccccaggcggtcctgacagcttgaacgctccatgcggaccggtgccatcttctagtcagatgatgccgtttcctcccaggctccagcaacctcacggtgcgatggcccctactggaggtggcggtggaggcccagggctgcagcagcactatccttctggtatggccctccctcctgaggatttacctaaccagcctcccggaccaatgcctccccagcagcatttgatggggaaggccatggcgggacgaatgggtgacgcttacccccctggtgtgctcccaggtgtggcatctgtccttaatgaccctgagctttcggaagtgatcagacctactccgaccgggatacctgaatttgacctatcccggataattcctagcgaattcctacgaaccaggcccttttccttctgtctctatcttttaagaattctgtctctgttgatgtggttaacaccgctcccacccctgcccgcaggcggttggccaggcggacaagtccccgctggcgctgttaatcgcgcactcaggttttgtgccggattatgtgtgtgctgcatctcagttttttag

SEQ ID NO: 215666 - DNA, 4365 bp, synthetic construct
  misc_feature 1..4365: note = Description of Artificial Sequence: Synthetic coding sequence
  source 1..4365: mol_type = other DNA
atgagaattctggccaataagactcgacttcctcatcctcgtaggcgagaagcaccaggaagtcctcctcttagcccgaggggtcactgtccccctgcccctgccaaaccgatgcatcccgagaataaattaaccaatcacggaaaaaccggaaatgggggagcacagtctcagcatcagaatgttaaccaaggaccaacgtgtaatgtggggtctaagggcgtgggcgcaggcaaccacggggctaaggctaaccagataagtccatcaaacagttctctaaaaaacccgcaggccggagtccccccattctcatctttgaagggaaaggtaaaacgcgatcgcagcgtgtccgtggactctggcgagcagcgagaggccggtaccccaagcttggattccgaagcaaaagaagtggcccctagatccaaacggaggtgcgtgctcgagcgcaaacaaccctactctggcgacgagtggtgttcgggaccggactcagaagaagacgataagcccattggtgctacacataactgcaacgtggcagatcccgcaatggctgcaccccagctggggcctgggcagactacccagctcccactgtccgagtcttcggtgcccggagcaccacatggaccccctcccggactgcgaccagatgctcccggagggggaggcggtggcggtggagtgcccggtaagcccccaagtcagtttgtgtacgtattcactactcatctggcaaacaccgccgcagaggctgtactgcagggcagagccgactccattctcgcttaccaccaacagaatgtgccacgagcaaaactagatcaagcacccaaggtacctccgacgcccgaacctctgcctttgtcaaccccttctgccggtacaccacagtctcagcctcctcctcttccaccaccaccaccaccagcccctgggtctgcgcctcccgctctaccgccagagggccctccagaggatagctctcaggacctagctcctaactcggtgggagccgcttctacgggagggggtactgggggaacccatcccaatacaccaactgctacaactgctaacaacccgctccccccagggggtgatccgagctccgcaccagggcctgcacttctcggagaggcagccgcaccaggtaatggtcagaggagcctggtaggcagcgagggactgtcaaaggagcagctggagcatcgtgagagatcactccagaccctgcgtgacattgagcgcttactgctacgctccggtgagactgagcccttcctgaaggggccacccggaggggcaggtgagggcggaccacccgcacaggctcctccacccccacagcagcccccaacagcgcctccttccggactaaaaaagtacgaggaacccctccagtccatgattagccaaacccaatccctgggtggccctccactggagcacgaggtccccggacaccccccagggggagacatggggcagcagatgaatatgatgatacaacgccttggacaggacagcctaacacctgagcaggtggcttggaggaagctccaggaagagtactatgaagaaaaacgccgtaaggaggaacaaataggcttgcacggctcaaggcctttgcaggacatgatgggtatggggggaatgatggtgagaggccctccaccaccctaccattctaagcctggagaccagtggccccctggaatgggggctcagctccgagggccaatggatgtgcaggatcctatgcaactgagagggggtcccccttttccaggtccacggtttccagggaaccagatccaacgggtgcccggtttcgggggaatgcagtcaatgccaatggaggtgcctatgaatgccatgcaacgaccggtgaggcctggcatgggctggactgaagatctgccaccaatgggtgggccatctaactttgcgcagaatacaatgccgtaccctggcggtcaaggtgaagccgagaggttcatgacgccaagggtgagggaggagctcctgagacaccagctgcttgagaaacggagcatgggaatgcagcgtccactcggtatggcaggatccggcatgggccagtctatggagatggaacggatgatgcaggcccacaggcagatggaccccgcaatgttccctggccagatggccggaggtgaaggcttggccggtacccccatggggatggaattcggcggaggtcgcggattattaagtccccctatggggcagtccgggctccgcgaggtggaccccccaatggggccaggaaacctcaatatgaatatgaacgtaaatatgaatatgaacatgaacttgaacgtccagatgaccccccaacagcagatgcttatgagccaaaagatgaggggacccggtgatctcatgggaccgcagggactaagtcctgaagagatggccagagtacgggcacaaaactccagcggggtgatgggcggtccacagaaaatgctgatgcctagccagttccccaatcagggtcagcaggggttcagcggagggcaggggccttaccaggccatgtctcaggatatgggcaacacacaagacatgtttagccccgaccagtcttctatgcccatgagcaacgttggtacaacaaggctgagccacatgcccctgccccctgcttctaacccgccagggactgttcacagcgcgcctaatcgtgggctgggacgcagacctagcgacttaactatatctatcaatcagatggggtctcccggaatgggccacctgaagtcacctacgcttagtcaggtacactctcccctcgtcacaagtcccagcgctaacctgaagagtcctcagaccccgtcccagatggtccctctgcccagtgccaaccccccaggaccattgaagtccccgcaggtgttaggctctagtttgagcgttcgatcccccactgggtcaccaagccggctgaagtcgccctctatggccgtgccctcccctggatgggttgcaagccctaaaacggctatgccctctcctggagtcagtcagaataaacagcctcccctgaacatgaattctagcacaacattatccaatatggaacagggcacactcccgccatccgggccacggtctagcagtagtgcacctcctgccaaccctccgtcaggcctcatgaatccttcactcccatttacctctagcccagatcctacgccctctcagaatcccctgagtctgatgatgacccagatgtctaaatatgcgatgccttcctctactccactgtaccataatgcgataaagactatcgctacgtccgacgacgagctcctgcctgataggccgcttctgccccctcctcctccccctcaagggtccggacccggtatctccaactcccagcctagtcaaatgcatcttaacagcgcagcagcacagagcccaatgggaatgaaccttccagggcaacagcctctgtctcatgagcctccccctgccatgttgcctagtcccactcccttgggcagcaacatacccctgcatcccaacgcccaggggaccgggggaccaccacaaaatagcatgatgatggcacccggaggtccagattcactcaatgcaccatgcgggcctgtcccgtcttccagccagatgatgcccttccccccacggctgcaacagcctcacggagcaatgatggctggcagaatgggcgacgcttacccaccaggggttctacctggcgtggcatctgtgctgaacgacccggaactgagtgaggtcataagaccaacccctaccggaatccccgagttcgacctctcgcgcatcatcccatctgagaagccgtctagcacactgcaatactttcctaagagtgaaaaccaaccgcctaaggcccaacctccgaacctccatctaatgaaccttcaaaacatgatggctgagcagaccccatcccggccaccgaatctccccggacagcagggtgtccaaagaggtctgaacatgtcaatgtgtcatccgggtcaaatgtctttgctaggcagaaccggagtccctccacagcaagggatggtgccacatggactccaccaaggagtcatgagccctcctcagggcctgatgactcagcaaaattttatgctcatgaagcagagaggagtgggtggggaagtgtatagtcagcccccacacatgctctctcctcagggcagtctgatgggaccaccccctcaacagaatctaatggtctcccatcccctgaggcagagatccgtgtccctggattctcagatgggctacctgcccgctccgggtggaatggccaacctgcccttttag

SEQ ID NO: 215667 - DNA, 1401 bp, synthetic construct
  misc_feature 1..1401: note = Description of Artificial Sequence: Synthetic coding sequence
  source 1..1401: mol_type = other DNA
atgagcacaagatcagtcagctcttcgagctaccggaggatgttcggcggtccaggaaccgcctcccggccatcgtcctccagatcatatgtaacaacttcaacgaggacctactccctcgggagtgcactgagacctagtacgagccggtcactgtatgcctcctcccctggcggtgtgtatgcgacacgaagcagcgccgtcaggctgcggagttctgtccctggagtgcgtctgttgcaggactccgttgactttagtcttgccgacgcgattaatactgaatttaaaaacacccggacaaatgaaaaggtcgaactgcaggaactcaacgacaggttcgctaactatatcgacaaggtccgcttcctggagcagcagaacaagatccttctcgctgagctggaacagctgaagggccagggcaagtctcgtctcggagatctttatgaggaagagatgcgggagctcaggcgacaggtggatcagctgactaacgacaaagccagagttgaggtcgaacgcgataacctagccgaagacatcatgcgacttagagagaagctgcaggaagagatgcttcagcgcgaggaagccgagaacacactgcagtcatttcggcaggacgtcgataacgcgagtctggccagattggatcttgagaggaaagtggaaagtctgcaggaggagatcgcctttttgaaaaagctccatgaagaggaaatccaggaattacaggcacagatccaggagcaacacgtccagattgatgtggacgtctctaaacccgatctgaccgctgcacttagagatgtacggcaacaatatgaaagcgtagccgctaagaacttacaagaagctgaggagtggtacaagtcaaagtttgcagacttgtctgaggcagctaatagaaacaacgacgcactgcgtcaggctaaacaggagtccacagaatacaggagacaagtgcagagcttgacttgtgaggttgacgcgctcaagggaactaatgaatccttagagagacaaatgcgcgaaatggaggagaattttgctgtcgaagccgctaattatcaggacaccattggaagactgcaggacgaaatccagaatatgaaagaggaaatggccagacacctgagggagtaccaggatctactcaacgtcaaaatggccctggacatcgaaattgctacctaccgcaaactactcgagggagaggaaagtaggatttccttacccctgcccaactttagttctttaaatctgcgggaaaccaacttggacagcctgcctctggtcgatactcatagcaagaggaccctgttgattaaaaccgtcgagacacgcgacggccaagttattaatgagacttctcagcatcacgacgacctggagtag

SEQ ID NO: 215668 - DNA, 1302 bp, synthetic construct
  misc_feature 1..1302: note = Description of Artificial Sequence: Synthetic coding sequence
  source 1..1302: mol_type = other DNA
atggataagctcaataagataaccgtgccagcaagtcagaagctgagacagctccagaagatggtgcacgatattaaaaataacgagggcggaattatgaacaaaatcaagaagctcaaagttaaagcgcctcctagcgttccgcgacgcgattatgcgagcgagagtccagcagatgaggaggagcagtggtccgacgactttgattcggattatgagaacccagatgaacattccgattccgaaatgtacgttatgcccgctgaagagaacgcggatgactcttacgagccaccccctgtcgaacaggaaactcgccctgtgcaccctgccctccccttcgcgaggggagagtacattgataatcgatcatcacaaaggcattcaccccctttctccaagacactcccttctaagccaagctggcctagcgaaaaggccagactgacgagtacgctccccgctttgaccgctttacagaagccacaggtgccacccaaaccaaagggcctgctggaggatgaggccgattacgtggtccccgtggaagataatgacgagaactatattcacccaacagaatcatcaagtccgcctcccgagaagggccgaaactcaggcgcttgggagactaagtccccccctccagcggctccctcccccttaccaagagctgggaaaaagcctaccaccccgctgaagacgaccccagttgccagtcaacagaacgcgtcttccgtctgtgaagaaaaacctattccagctgagcgacaccggggatcgtcccaccgacaagaagcagtccagtctccagtgtttccgccagctcaaaaacaaatccaccaaaaacccatccccctccccagattcactgagggtggcaatcctacagtcgatggacctctacctagcttctccagcaacagcaccatctcagaacaggaagccggtgtcctttgtaagccctggtacgcgggagcctgcgatagaaaatccgccgaggaggcacttcataggtcgaacaaggacggctccttcttgattagaaaaagttccgggcacgactccaaacaaccctacacccttgttgtgtttttcaacaagagggtttacaatattcctgttcgtttcatagaggccacaaaacagtatgccctgggcaggaagaagaatggggaggaatactttggaagcgtggccgaaataatcagaaatcatcagcatagtcctttggtgcttatcgatagtcagaacaacactaaagatagcacacgcctcaagtatgccgtcaaggtttcatag

SEQ ID NO: 215669 - DNA, 525 bp, synthetic construct
  misc_feature 1..525: note = Description of Artificial Sequence: Synthetic coding sequence
  source 1..525: mol_type = other DNA
atggacaagttgaataagatcaccgtcccagcatcccagaaactccgacagctgcagaagatggtgcacgatattaaaaacaatgagggtggcattatgaacaagatcaagaagctcaaggttaaggcccctcctagcgtgccacgcagagactatgctagcgagtctcctgccgacgaagaggagcaatggtcggatgacttcgattcggactacgagaacccagatgagcactctgattcagagatgtatgtgatgcctgccgaggagaatgccgatgattcctacgaacccccacccgtggaacaggaaacaaggccagtccaccctgctctgccttttgctcgcggtgagtacattatcttcttatgcgacctgctcaaacaacagaataacatgccctgggcggaaaggaagatggtgaaaagcaccctggaggtgctacttaagtcttccggcattatcaacatcgttctgtggttcctgcttacagtacgaattactcagaagatccccccagattag

SEQ ID NO: 215670 - DNA, 558 bp, synthetic construct
  misc_feature 1..558: note = Description of Artificial Sequence: Synthetic coding sequence
  source 1..558: mol_type = other DNA
atggacaaattaaataaaattaccgtaccagcttctcaaaagctgaggcagctgcagaaaatggtgcacgatatcaagaataatgagggcggtattatgaacaaaattaagaagttgaaggttaaagcacctccatccgttcccagacgagactacgccagcgaatcacccgcagatgaggaagaacagtggagtgacgattttgactccgattacgaaaaccccgacgagcatagtgattccgagatgtatgtcatgcccgctgaagaaaacgccgacgatagctacgaaccgcctcctgtggagcaagagacccgtccagtccatccagctctcccctttgcaagaggcgagtatatagacaatagatctagtcagaggcactcccctcctttcagcaaaactttgccatctaaaccatcttggccatccgagaagtacttcggttcagttgccgaaattatccggaaccaccagcattcacctctcgtcctgatcgatagtcagaataataccaaagattcaaccagactaaagtacgcagtgaaggtctcttag

SEQ ID NO: 215671 - DNA, 204 bp, synthetic construct
  misc_feature 1..204: note = Description of Artificial Sequence: Synthetic coding sequence
  source 1..204: mol_type = other DNA
cttgatagttattcctgtctgctgcaactgccaaataggatggacaagctgaacaagatcaccgtccctgcatctcaaaagctgcgccaattgcagaaaatggtacatgatattaagaacaacgaaggcggaatcatgaacaagatcaaaaagacggccaccatgaaaatacagatgagcaccaggacacagcgttgtacttag

SEQ ID NO: 215672 - DNA, 1215 bp, synthetic construct
  misc_feature 1..1215: note = Description of Artificial Sequence: Synthetic coding sequence
  source 1..1215: mol_type = other DNA
atggataaactgaacaagatcactgtgccagcctcgcagaagttgcggcagcttcagaaaatggtgcatgacattaaaaacaatgagggcggaataatgaataagattaagaaactcaaagtgaaagcccctccgtctgtgccgcgtcgcgactatgctagtgagtcccctgctgatgaggaggaacaatggtctgatgatttcgatagtgattacgagaaccccgacgaacatagcgattccgagatgtacgtaatgccggctgaggagaacgcagacgactcatatgaacctcctcccgtagagcaggagaccagacccgtgcatccagcactcccctttgctcgcggagagtacattgataaccgctcatctcagaggcacagtccaccgttctctaagaccctgccatcgaagccgagttggccttccgaaaaagccagactcacctccactctgccggctctcacggccctacagaagcctcaagtccccccaaaacctaaagggcttctcgaggatgaggccgactatgtcgtgcctgtagaggacaatgatgagaactacattcacccaaccgaatcgtccagcccccctcctgaaaaggcaccaatggtcaacagatccactaaacctaatagctccaccccagccagccccccaggtactgcctccggacggaattccggggcatgggaaaccaagagccctccccctgctgccccatctccgttgccaagagccggaaaaaaacccactactcctttgaagacaacccccgtcgcttctcagcaaaatgcttcttccgtgtgtgaggaaaaacctattcctgcagaacgccacaggggatcctcacaccgccaggaggcagtgcagtcccctgtcttccctccagcccagaagcaaatacaccagaaaccaatccccttgccccgtttcacagagggcggaaatcctactgtggatggtccgctcccttccttttcctcaaatagtacaatttccgaacaggaagcaggcgtcctctgcaagccctggtacgccggagcctgcgaccgcaagagcgcggaagaggctctgcacaggtctaacaagtatttcggttctgtggctgagattattcggaatcaccaacactctcccctggttctgatagatagccagaataacaccaaggattctacccgtcttaagtacgccgttaaggtgtcttag

SEQ ID NO: 215673 - DNA, 1266 bp, synthetic construct
  misc_feature 1..1266: note = Description of Artificial Sequence: Synthetic coding sequence
  source 1..1266: mol_type = other DNA
atggataagctgaataaaatcacagtgccggctagccaaaaacttcgtcagctgcagaagatggtccacgatataaaaaataatgagggcggtatcatgaataaaatcaaaaaactgaaagtgaaggcccctccaagcgtgcctagaagagattatgcgtccgagtctcccgcagatgaagaagaacagtggtccgacgattttgacagtgattacgaaaaccctgatgagcattctgacagcgagatgtacgttatgcctgcggaagaaaacgccgacgatagctatgagcccccacccgtcgagcaggagactaggcctgtgcatcctgctttaccctttgccagaggggagtatattgataacaggtcgagtcaacgacactctccccctttttcaaaaaccttgcctagcaagccttcatggccttcggagaaagcccgactgaccagcacgctccccgctctcacagcactgcaaaaaccacaagttccaccaaaacctaaaggattactggaagatgaggctgattacgttgtgccggtcgaggataacgacgagaactacattcaccccacagagtccagttctcccccacccgaaaaagcccctatggtgaaccggagcacaaaacccaactcgtctacccccgcttcgccacccggaaccgcctctgggagaaattccggagcctgggaaaccaaatctcctcctccagcagccccatctccactcccgagagccggtaagaagccaacaacgcccctgaaaaccacccccgtggctagtcaacagaatgcatctagcgtctgtgaggagaagcctattcctgcagagcgtcaccgaggctcctcgcacagacaggaggccgtccagtctcctgttttcccccctgctcaaaaacaaatccaccaaaagccaatccctctcccacggttcacagagggcggaaacccgaccgtggacggtccattaccatcgttcagctcaaattcaacaatcagtgagcaggaagccggagttctatgtaagccctggtacgccggagcctgcgatagaaagagtgctgaggaagccctccatcggagcaacaaagacccccaacccccacttccttccaagcagtgggagactcgaaaactgcagtatttcgggagtgtagctgagatcatacggaaccaccagcactcacctcttgtcttgatagactcgcaaaataacacgaaggacagtacccgtttaaaatacgctgtaaaggtttcctag

SEQ ID NO: 215674 - DNA, 630 bp, synthetic construct
  misc_feature 1..630: note = Description of Artificial Sequence: Synthetic coding sequence
  source 1..630: mol_type = other DNA
atggataaattgaataagatcactgtgccagcctctcagaaactgcgccaactccagaagatggttcacgacatcaagaataatgaggggggaatcatgaacaaaatcaaaaaactgaaggtgaaggctcccccttccgtgccacgtagagactatgcgagcgaaagccctgccgacgaggaggagcaatggagcgatgatttcgattccgattacgagaaccctgacgaacactctgacagtgagatgtacgtcatgccggcagaagaaaacgccgatgactcctatgaacccccacccgtcgagcaggagacgcgccctgtccacccagccctgccctttgcacgcggtgagtatattgataataggagttctcagcggcactctccccctttctcaaagacattgccaagtaagccgtcgtggccctccgagaaggcacgtctgacctccaccctgcccgcactgactgctctgcagaaacctcaggtgccaccgaagcccaaaggactgctcgaggacgaagccgattacgtcgtgccagtcgaagacaatgatgaaaactatattcaccccaccgaaagctctagccctccacccgaaaagggtaaaaatcagagacaccattag

SEQ ID NO: 215675 - DNA, 900 bp, synthetic construct
  misc_feature 1..900: note = Description of Artificial Sequence: Synthetic coding sequence
  source 1..900: mol_type = other DNA
atggataaacttaataagataacagtgccggcaagtcaaaaactgcgccagctgcagaaaatggtacacgacattaagaacaatgaagggggtataatgaacaaaattaagaagttgaaagtgaaggcgccaccttctgtaccgcgtcgagattacgcgtccgaatccccagccgatgaggaggaacaatggtcggacgacttcgatagtgattatgagaaccctgatgagcattcggactcagagatgtacgtgatgcccgcagaggaaaatgctgacgactcctacgaaccgccacccgtggagcaagaaacccggccagtacaccctgctctgcccttcgccaggggcgaatacataggaaggaactcaggggcttgggaaaccaagtcacctcctccagccgcaccttccccactcccgagagcgggaaagaagcctacaaccccccttaaaactacaccggttgccagccagcaaaatgcctctagtgtatgtgaggagaaacctatcccagcggagaggcaccgcggttcttcccacagacaggaagcggtgcagagcccggtgttccccccagctcaaaagcagatacatcagaaaccaataccactgcctcgatttacagaagggggtaaccctacagttgacggaccattgcctagtttctccagcaattccactatttcagagcaagaggccggagtgctgtgtaaaccttggtacgcaggcgcttgcgacagaaaatcagccgaggaggccctccaccggagcaataagtattttggctccgtggcagaaattattcgaaatcaccaacacagtccccttgtcttgatagacagccaaaataatactaaggactcaacgcgcttaaagtacgctgtgaaagttagttag

SEQ ID NO: 215676 - DNA, 2358 bp, synthetic construct
  misc_feature 1..2358: note = Description of Artificial Sequence: Synthetic coding sequence
  source 1..2358: mol_type = other DNA
atgctccctgctgctcctggaaaaggtttaggttccccagatcccgcaccttgtggccctgccccaccaggcaacacgaaagacatcattatgatctacgaggaagacgctgaggagtgggcgttgtacttgaccgaggtgtttctgcatgtcgtgaaaagggaggccattctgctgtaccgcctggaaaatttcagcttcaggcatctcgaactgttgaacctgacatcatataagtgcaaactgctgattctctctaatagcctactgagagacctgacacccaaaaaatgtcagtttcttgaaaaaatcctccactcaccaaaaagcgtggtgactttgttatgtggagtgaagagctcagatcagctctacgagttattaaacattagtcagtctcgatgggaaatttcgacagaacaggagcccgaagactacataagcgtgatccaaagcatcatctttaaagactccgaggattattttgaggttaacataccaacagacctcagggcaaagcactctggagaaattagcgagcgtaaagagattgaggaactaagtgaagcttctagaaataccattcctctcgccgtggtcttgccgactgaaataccgtgcgaaaaccctggcgagatatttatcatacttcgggacgaagtgattggtgacacggtagaggtggaattcacatcctctaacaaaaggatcagaactcgcccagcgttatggaacaaaaaggtatggtgtatgaaggcactagagttccccgctggctccgttcatgtaaatgtgtattgtgatggtattgtaaaggctactaccaagatcaaatactatcctacagctaaagccaaagagtgtctcttccgcatggctgatagcggggagtctctttgtcagaattctattgaggagctggacggtgtcctgaccagcatttttaagcacgagataccatactatgaatttcagtcattgcaaacagagatctgcagccagaacaagtatacacattttaaagagctccccacactactgcattgcgcggcaaaattcggcctgaaaaatcttgccattcacctgctgcaatgctccggggctacttgggcttccaaaatgaagaatatggaagggtccgaccccgcacacatagccgaaaggcacgggcataaggagctgaagaagatcttcgaagacttctctattcaggagattgatatcaacaatgaacaggagaacgactacgaagaggacatagcgagcttcagtacctacatcccttccacacagaatccagcgttccatcacgaatccagaaagacatacggtcaatctgcggatggagcagaagctaatgaaatggagggtgaaggcaaacagaacggatccgggatggaaaccaagcacagccccctggaggttgggtccgagagctcagaggaccagtacgacgacctctacgtgttcattcccggagctgaccccgagaacaactcacaagagcctctgatgtccagcagacccccactccctcctccaagacctgtagcgaacgcctttcagttagaacgtccgcacttcacgctccccggtactatggtcgagggacagatggagcgctcacaaaattggggccaccccggagtgcgacaggaaactggagacgagccaaagggcgaaaaggagaaaaaggaagaagagaaggagcaagaagaagaggaagacccttataccttcgccgagatcgatgattcagagtatgacatgattctggctaacctgtctatcaagaaaaaaaccggaagcagaagctttattatcaatcgcccaccagcccctaccccacggccaacgtccatcccccctaaggaagaaaccacgccttacatcgcacaggtgtttcagcagaaaacagccaggaggcaaagtgatgatgataaattctgcggtctacctaagaaacaagatcgggctcgtattgaaagtcctgcattctccaccctgcgcggttgcctcacagatggtcaggaagagttaatcttgctgcaagagaaggtcaagaatggaaaaatgagtatggacgaagccctggagaaattcaagcactggcagatggggaagagcggactggagatgattcagcaggaaaaacttcgccagttgagggactgtattatcggaaagcggcctgaggaagaaaatgtgtacaacaagctcaccatcgttcaccatccgggagggaaagaaacggcccacaacgaaaataaattttataacgtacacttttcaaacaaacttcctgcacgccctcaagttgagaaggaatttggcttctgttgcaaaaaagaccattag

SEQ ID NO: 215677 - DNA, 1959 bp, synthetic construct
  misc_feature 1..1959: note = Description of Artificial Sequence: Synthetic coding sequence
  source 1..1959: mol_type = other DNA
atgctccccgctgcgccaggcaaggggttagggtcgccagatcccgctccatgcggccctgccccacctgactctgaggactattttgaggtgaacattcctaccgatcttcgtgccaaacactcaggtgagatctccgagcgcaaggaaatcgaagagctgtcggaggcaagccggaataccatacctctggccgtggtgctccccacggaaatcccttgtgagaacccaggcgaaatatttataatcctcagggatgaggtgatcggcgataccgtggaggtggagtttacctcctctaacaagcgaatcagaacgcggccagcactttggaacaaaaaggtttggtgcatgaaggccctcgagtttcccgcaggttcggttcacgtcaatgtgtattgcgatggaattgtcaaagcaactacaaagatcaagtattatcccactgccaaagccaaggagtgtctgttcaggatggccgattctggagaaagcttgtgtcaaaacagtatagaggagctggatggtgtcctaaccagtatatttaagcacgagatcccttattacgaattccagtcattgcaaactgaaatttgctcacagaacaaatatacgcatttcaaggaactgcccacccttctgcactgcgcggctaaattcgggctgaagaatctagctatccacttactgcaatgctctggtgcgacgtgggcttccaagatgaaaaacatggaaggaagcgacccggcacacatagctgagagacacggacacaaagaattaaagaaaatttttgaggattttagcattcaggaaatcgacattaataatgagcaggagaacgattatgaggaggacattgcgtctttctccacatacattcccagtactcagaatcccgcatttcaccacgaaagccgtaaaacttacggccaatcggctgacggtgctgaggcaaacgagatggagggagagggcaaacaaaatggtagcggtatggagactaagcactcccccctggaagtaggcagcgaaagctctgaagaccagtacgacgacctatacgtcttcatcccaggcgcagatcctgaaaacaacagccaggaacctctgatgagtagcaggcccccactgccaccacctaggcccgtcgctaacgcatttcagctggaaaggcctcattttacccttcctgggactatggtcgagggacagatggagagatcgcagaactggggacacccaggggtgaggcaagaaacaggagacgagcctaagggggaaaaggagaagaaggaggaagaaaaagaacaggaagaggaggaggacccttatacgttcgcagagatcgatgactccgagtacgatatgatactcgccaatttgtccatcaagaagaaaaccgggtcacgttcattcattattaatagaccacctgcacccaccccacgtcccacctcgatcccacctaaagaggagacaaccccatacatcgcccaagtcttccagcagaagactgccagacgccagtcagatgacgacaagttctgcgggctgccaaagaaacaggaccgcgcacgcattgaaagtccagcattttctacgctgcgtggctgtctgaccgacggccaggaggagctgatccttctccaagagaaggtgaaaaacggaaagatgtctatggacgaggctttggagaagttcaagcactggcagatgggtaaatcaggccttgagatgattcagcaggagaagctgagacagctccgtgattgtataattgggaagagacccgaggaggaaaatgtgtataataaactgaccatagtgcaccatcctgggggtaaagagaccgcacacaacgagaacaaattttacaatgtgcacttttccaacaagctgcctgctagaccccaagtggagaaggaattcggattctgctgcaagaaggaccattag

SEQ ID NO: 215678 - DNA, 2268 bp, synthetic construct
  misc_feature 1..2268: note = Description of Artificial Sequence: Synthetic coding sequence
  source 1..2268: mol_type = other DNA
atgatatacgaagaagatgcagaggaatgggccctttatctgaccgaagtattccttcatgtggtaaagcgcgaggcaattttgctgtacaggctcgagaatttctcctttaggcacctggaattgttaaatctaacgagctataaatgcaaacttctgatcctgtctaattctttgctccgcgatctcactcctaagaagtgccagtttctggaaaagatcctacactcgcccaaatctgtcgttaccctgctgtgtggagtgaagagtagcgaccagctgtatgaactcctcaatatttcccagtcccggtgggaaattagtactgagcaggagccggaagattatattagcgtgatacagtcaattatcttcaaggactctgaagattattttgaggtgaatatccccactgacctccgggcaaagcattctggcgagattagtgagcggaaagagattgaggaactgtctgaggcttcccgaaacacaatccccctggccgtcgtgctccccactgagataccctgtgaaaatccaggagagatcttcatcatactcagggatgaagtgatcggcgacaccgtagaggtcgagtttactagctccaacaagcggatcaggacacggcctgccttatggaacaaaaaagtgtggtgcatgaaagctctcgagttcccagccggttcagttcatgtgaacgtctattgcgatggcatagtgaaggctaccacaaagatcaagtattaccccacagcgaaagccaaggagtgtctcttccgaatggctgactctggagaatcactgtgtcagaactctatcgaagagcttgatggtgtcctgacctccatcttcaaacacgaaataccctactacgaatttcagagcttgcagacggagatctgctcccagaacaaatacactcatttcaaggaattaccaaccctgctgcattgtgctgccaaatttggcctcaaaaacctggcaattcatctgctccaatgcagcggcgcaacatgggctagtaagatgaaaaacatggaaggcagtgatccggctcatattgctgaaaggcacgggcacaaggagcttaagaagatttttgaagatttttcaatccaagaaattgacatcaacaacgaacaggagaacgattacgaggaggatatcgcctctttcagcacatacattccaagtacgcagaatcctgccttccatcacgaatcccggaagacctacggacaaagcgctgatggagccgaagcaaacgagatggaaggagaagggaagcagaatggatctggcatggagacgaaacatagccctcttgaagtgggctccgaaagttcagaagatcaatatgatgacctttatgtctttatacctggcgctgaccccgagaacaattctcaggaacccctaatgtcgtccaggcctccactgcccccacccaggccagtcgccaacgcattccagctagagcgccctcacttcacactgccaggtacaatggtggaggggcaaatggagaggtcacagaattgggggcaccccggtgtgaggcaggagacaggcgacgaacctaagggcgaaaaagagaagaaagaagaggaaaaggaacaggaggaagaagaggacccttacacatttgctgaaattgatgactcagaatatgatatgatcctcgccaacctgagcatcaagaaaaagaccggatcacgatctttcatcatcaataggccgccagctcctacccccagaccaacttcaattccccctaaagaggaaacaaccccttatattgctcaggtttttcagcaaaaaactgcgaggagacagtctgacgatgataagttctgtggactgcccaagaagcaagacagagcccgtatagagagccccgctttctctacgctgcgcggatgtctgacagacggccaggaagaattaattctgttacaggagaaggtgaagaatggcaaaatgtctatggacgaagctcttgagaagtttaagcattggcagatgggcaagtcaggactcgagatgatccaacaggaaaagcttcgccagctcagggattgtatcatcgggaaaaggcctgaagaggaaaatgtgtacaacaagctgaccattgttcatcacccgggagggaaggagactgcccataacgagaataaattctataacgttcacttctccaacaaactgcctgctcgaccacaggttgaaaaagagtttgggttctgttgcaagaaggatcattag

SEQ ID NO: 215679 - DNA, 2313 bp, synthetic construct
  misc_feature 1..2313: note = Description of Artificial Sequence: Synthetic coding sequence
  source 1..2313: mol_type = other DNA
atggtcaactgccatttaaaaatcgggaataccaaggacatcatcatgatctatgaggaggacgccgaggaatgggctctctaccttacagaggtgttcttacacgtcgtgaagcgcgaagcaatcctgctgtacagattggaaaacttttcctttcgccatctggaactcctgaatctcacgagctacaagtgcaagctactgatcctttctaactccctcttgcgggatcttactcctaagaagtgccaattcctggagaagattctccacagcccaaaaagtgtggtgactctgctgtgcggcgtgaagagcagcgatcaactgtatgaactgctcaatatctcccagtccagatgggagatttcgacagagcaggaacctgaggattacatcagcgttatccaaagcataattttcaaagatagcgaagactactttgaggtgaatatacctaccgacctgcgcgctaagcattctggggaaatttccgagcgaaaggaaatcgaagagctatctgaagccagcaggaataccattcctctggcagtggtgctgcccactgagataccttgtgaaaaccccggagagatcttcataatcttaagagatgaggtaattggggacaccgtagaagtcgaatttacaagctcgaacaagcggatccgcacaaggccagcattgtggaacaagaaggtgtggtgcatgaaagcgctagagtttcccgctggcagcgtgcatgtgaatgtctactgcgatggaattgtgaaagctaccactaagattaagtactatcccacagccaaggctaaggagtgcctgtttcggatggccgattcaggagagagtctgtgccagaacagtatcgaggaattagatggggtcttaacatcgatttttaaacatgagataccttattatgagttccaatcactccaaacagagatatgttcccagaacaagtacactcattttaaggagctgcccacactgctacactgcgcagctaagttcgggcttaagaatctagcgattcatttactgcagtgctctggcgcaacctgggctagtaagatgaagaatatggaaggctcagatcctgctcacatcgccgaacgccacggccacaaggaactaaaaaagatcttcgaagacttctccatccaggagatcgatatcaataacgagcaagagaatgactacgaggaagatatagcaagcttcagtacctatattccaagcactcaaaacccggctttccatcacgagtccaggaagacttatggtcaaagcgctgacggtgcagaggcaaatgaaatggagggcgagggtaaacaaaatgggagtggaatggagacaaagcacagtccgctggaagtggggtctgaatcttccgaagaccaatatgatgacctctatgtattcatccccggtgccgaccctgagaataactcccaggaacctctgatgtcttcaagaccacccctgcctccgcctagaccagtggctaacgcctttcagctcgaacgaccccactttacattgccgggtacaatggtggaggggcagatggaacgatcccagaactggggccatcctggggtcaggcaggagacaggcgacgaaccgaagggcgagaaagagaagaaggaggaagagaaggagcaagaagaggaggaagatccctacacatttgccgagattgacgatagtgagtatgacatgatcctggctaatttgtctataaaaaaaaagaccgggagccggtcattcatcatcaacagaccacctgccccaaccccgcgaccaacctccattcctcccaaagaggagaccactccctatattgcacaggtatttcagcagaagaccgctcggcgacagagcgacgatgataaattctgcggcctccccaaaaaacaagatcgggcaagaatcgaaagccctgccttttcaacgctgagaggctgcctaaccgacggtcaagaagaactgatactcctgcaggagaaggttaagaatggcaaaatgagcatggacgaggcccttgagaagtttaaacattggcaaatggggaaaagtggcctcgaaatgatacaacaggaaaagctcagacagctcagggactgcatcataggcaagaggccagaagaagagaacgtttataacaagctgaccattgtacaccatccaggtgggaaagagacagcacacaacgagaataagttctacaatgtgcacttcagtaataagttgcccgctaggccacaagtggaaaaggagtttggtttttgttgtaagaaagaccattag

SEQ ID NO: 215680 - DNA, 1959 bp, synthetic construct
  misc_feature 1..1959: note = Description of Artificial Sequence: Synthetic coding sequence
  source 1..1959: mol_type = other DNA
atgctaccggcagctccgggaaaagggctgggctctcctgaccctgccccatgtggtccagcccctcccgacagcgaagattatttcgaggtaaatatccccaccgatctgagagcgaaacatagtggagaaatttcggaaagaaaagagattgaggaactcagtgaggcaagccgaaatacaataccactggcagttgtgctgccaactgagatcccatgtgagaatcccggagaaattttcatcatcctgcgcgacgaagtgatcggtgacacggtagaagttgagttcacttcatcaaacaagaggatcaggacccggcctgcactgtggaataaaaaagtttggtgcatgaaggctcttgaattccccgctggctcagtgcacgttaatgtctactgtgatgggatagtcaaagctactaccaagatcaaatactatcctacagctaaagccaaagagtgcctgttcaggatggctgacagtggcgagtctctctgccagaactcaattgaggagttggatggagttctcaccagcatatttaagcacgaaattccatactatgagtttcagtctctgcagaccgagatctgttcccagaacaaatatacccattttaaggagcttcctacactgctccattgcgccgcaaaatttggacttaagaacttggcgatacatcttctacagtgctcaggtgctacgtgggccagcaaaatgaagaatatggaagggtccgaccctgctcatatcgccgaaagacacgggcataaggaactgaagaagatctttgaggatttctcaattcaagagatcgacataaacaacgaacaagagaatgattacgaggaggacatcgccagcttttcaacatacatacccagcactcagaaccccgcttttcaccatgaatctagaaaaacttatggtcagagcgctgatggggcagaggcgaatgaaatggaaggcgagggcaagcagaatggttcaggcatggaaaccaagcactctcctctggaagtggggtcagagtcctcagaagaccagtatgacgacctgtacgtgttcatcccaggcgcagaccctgaaaacaacagccaggaacctctgatgtctagccgccctcccctacccccacccagacctgtggccaatgctttccagttggaacggcctcacttcacactgcccggtacaatggtcgaggggcaaatggagcggtctcagaattgggggcacccgggagtgcgacaggaaacaggcgatgaacctaaaggagaaaaggagaagaaggaggaggagaaggaacaagaagaggaggaggacccatatacctttgcagaaatcgatgactccgagtatgatatgatcctcgccaatttgtccattaaaaaaaaaacgggaagtcgaagctttattatcaacaggccccctgccccaactccacgacctacgtccattcctcctaaggaggaaaccactccctacattgcccaggtcttccagcagaagaccgctcgtcgtcaatcagatgatgataagttctgtgggcttccgaaaaagcaggatagggccaggattgagagtcccgcattttccaccctccggggttgcctgactgatggccaagaggagttaatactcctgcaggagaaggtcaaaaatgggaagatgtccatggacgaagctcttgagaaatttaaacactggcaaatggggaaaagcgggttggagatgattcaacaggagaagctcagacagctgcgcgactgcattatcggcaaaaggcctgaggaggagaatgtgtataacaagcttacaatagtgcaccatccaggcggtaaggagactgcccacaacgaaaacaagttctacaatgtacacttctccaacaaactcccggctcgcccacaggtagaaaaagaattcggcttttgttgcaaaaaagaccactag

SEQ ID NO: 215681 - DNA, 516 bp, synthetic construct
  misc_feature 1..516: note = Description of Artificial Sequence: Synthetic coding sequence
  source 1..516: mol_type = other DNA
atgcatccattctacactcgagccgcaacaatgattggcgagattgctgccgctgtctcgttcatttccaagttcctgcgcactaagggactgacttctgagcgtcagctgcagactttttcccagtcgctgcaggagttactggcagagcattacaaacaccattggtttcccgaaaaaccctgtaagggatccggctaccggtgcatcaggattaaccataagatggacccactcatcggacaggccgctcagcggatcggactaagttcacaggaactttttcggctgctcccaagcgagctaacgctatgggtggatccctatgaagtgagttacagaattggagaagacggatccatttgtgtcctctacgaggcaagccccgctggcggatcgacacagaacagcaccaatgttcaaatggtcgactctcgcatctcttgtaaagaagagcttctgcttggcagaacctccccctcaaaaaattataacatgatgactgtttccggctag

SEQ ID NO: 215682 - DNA, 672 bp, synthetic construct
  misc_feature 1..672: note = Description of Artificial Sequence: Synthetic coding sequence
  source 1..672: mol_type = other DNA
atgcgagatgaaatagcaacaacggtgtttttcgtgacacgtctggtaaagaagcatgacaaattaagtaagcagcagattgaagacttcgcggagaaattgatgacaatcttattcgagacttatcggtctcattggcacagcgattgtccgagcaaagggcaagcattcaggtgcatacgaattaacaataatcagaacaaagaccccatactagagcgagcctgcgtggagtccaacgttgatttcagccacctgggactgcctaaggagatgaccatttgggtcgaccctttcgaggtatgctgtagatacggggagaagaaccacccttttactgtggcttctttcaagggtcggtgggaagagtgggaactgtaccaacaaatatcttatgccgttagcagggcaagtagtgatgtgagctccggcacttcatgtgatgaggaaagctgttcaaaagaaccaagagtaattcccaaagtgtctaatccaaaatcaatatatcaggtggagaaccttaagcagccctttcagagctggctacagatcccacgcaaaaagaacgtggtggacggcagggtaggacttttaggcaatacctaccacgggagccagaagcatcctaagtgttaccgacccgcaatgcatcgccttgatcgaatcctctag

SEQ ID NO: 215683 - DNA, 483 bp, synthetic construct
  misc_feature 1..483: note = Description of Artificial Sequence: Synthetic coding sequence
  source 1..483: mol_type = other DNA
atgcgggatgagattgcgaccaccgtattctttgtgactcgtttggtcaagaaacacgataagctcagcaaacagcagatcgaggattttgctgagaaactaatgacgatactctttgaaacttacagatcgcactggcattctgattgccctagtaaaggccaggccttccgttgtatcagaattaataacaaccagaataaggatcctattttagaacgcgcatgcgttgagtctaacgtcgatttttcccatctggggctaccaaaggaaatgactatctgggtggacccatttgaggtgtgctgcagatacggggagaaaaatcatcccttcacagtagcgagctttaagggtcggtgggaggagtgggaattgtaccagcagatctcttacgctgtctcgagggcatcctcagacgtaagctctggaacatcctgcgatgaggaatcctgctcaaaagaacctcgtgtgattccctag

SEQ ID NO: 215684 - DNA, 1188 bp, synthetic construct
  misc_feature 1..1188: note = Description of Artificial Sequence: Synthetic coding sequence
  source 1..1188: mol_type = other DNA
atgagtttagtggacttgggcaagaagctgttagaagcagcacgggctggccaggatgatgaagtgcggatcctcatggccaacggggcacccttcacgaccgactggttggggacctccccattgcatctcgccgcacagtatgggcactacagtaccacggaggtcctgttacgagcaggagtgtccagagacgcaaggacgaaggttgataggactcctctgcacatggccgctagtgagggacatgcctccattgtggaagttctcctgaagcacggagccgacgtgaacgccaaggacatgttgaaaatgactgctctccactgggctacagagcataatcatcaggaagttgtcgaattattgataaaatatggcgctgacgtgcatactcagtctaaattctgtaagacagcattcgacatatcaattgacaacggtaacgaagatctcgccgagatcctgcagatcgctatgcaaaaccagatcaacaccaacccagagtcacctgatactgttaccattcatgctgccactcctcagtttatcatcggcccaggcggagttgtgaacctgacagggctggtgtctagtgaaaactccagtaaggccaccgacgaaaccggcgtaagcgctgtgcaattcgggaacagctccactagcgtgctggcaacactggccgcactggcagaggccagcgcacctctcagcaacagcagcgaaactcctgtagttgctacagaagaggtagttacagccgaaagtgtggatggtgctatccagcaggtggtttcatcgggcggacagcaagtgatcaccattgtcaccgacggcattcaattgggaaatctgcattcaatacctacctcgggcatcggacagccgattatcgttacaatgcctgatggccagcaggtgctcactgtcccagccactgacattgcagaggaaacggtgatctctgaggaaccccctgccaaaaggcaatgcattgaaatcatcgagaaccgagtagagagcgcagagattgaggagagagaggctctccaaaagcaactggacgaggcaaatagggaagcccaaaaatatcgccagcagttgctgaagaaggaacaggaggccgaggcttatcggcagaagcttgaggctatgacaaggctccagacgaacaaagaagccgtatag

SEQ ID NO: 215685 - DNA, 555 bp, synthetic construct
  misc_feature 1..555: note = Description of Artificial Sequence: Synthetic coding sequence
  source 1..555: mol_type = other DNA
atggagcctagccagtgcgtcgaggagctggaggatgacgtcttccaacccgaagatggggaaccagtaactcagcctggaagtcttctgtccgctgacttgtttgcacagtctctgctggactgtccccttagcagactgcagttatttcccttgactcactgctgcggtcccggtttacggccaacatcacaagaggataaggcaacccagaccctgtcccccgctagtccatcacagggagtgatgctgccctgtggggtaaccgaggaaccacagcgcctcttctacggtaatgcaggctatcgtctccccctccccgcatcctttcccgctgtattgccaattggagagcagccacccgaaggacagtggcaacaccaggccgaggtgcaaatcgccagaaagctgcagtgtattgccgaccaattccacaggttgcacgtgcagcaacaccagcagaatcagaatagagtttggtggcagatactattattcttgcacaacttggccctaaatggcgaggagaaccgcaacggtgccggaccacggtag

SEQ ID NO: 215686 - DNA, 555 bp, synthetic construct
  misc_feature 1..555: note = Description of Artificial Sequence: Synthetic coding sequence
  source 1..555: mol_type = other DNA
atggaaccttcgcaatgtgtggaagagctggaggatgatgtgtttcagcccgaggacggcgagccagtgacacagccaggtagtctattgtcagcagacttgtttgctcagtcccttctggactgccccctgtctcgtctgcagctgtttcctctcacccactgttgcggacccggactgcgccctacctcccaagaggacaaggctacacagacactaagccctgctagcccttcccagggggtgatgctgccttgcggggtgacagaggagcctcagagattgttttacgggaacgctggatatagactgcccctgccggcttcatttcccgctgtgctgccaataggagagcaacctcccgaaggccagtggcaacaccaggcggaggttcagatcgctcgtaaattgcaatgtatagcggaccaattccacaggctgcacgtacagcagcatcaacaaaaccaaaatagagtatggtggcagatcctgcttttcctccataacctggccttgaatggagaagaaaatcggaacggagctggacctaggtag

SEQ ID NO: 215687 - DNA, 492 bp, synthetic construct
  misc_feature 1..492: note = Description of Artificial Sequence: Synthetic coding sequence
  source 1..492: mol_type = other DNA
atggagccgagccagtgcgtcgaggaactcgaggacgatgtgttccaacctgaggatggcgaacctgtgacccagcccggttccttgttgtctgcggacctttttgcccagtccttgctcgattgtcctttatcgcggctgcagctgtttcccctgactcactgctgcggccctggactaaggcctaccagtcaggaggataaagccacacagactctcagccccgcatctcctagtcagggcgttatgctaccctgtggagtaacggaggagccccagcgcctgttttacgggaacgccggatacagacttccgctgcccgcttctttccctgctgtgctgcctattggggagcagccacccgaaggccagtggcagcaccaggcggagcatcagcaaaatcaaaaccgagtttggtggcagattttactcttcttacacaatctagccctgaacggggaggagaataggaacggtgccggaccacggtag

SEQ ID NO: 215688 - DNA, 186 bp, synthetic construct
  misc_feature 1..186: note = Description of Artificial Sequence: Synthetic coding sequence
  source 1..186: mol_type = other DNA
atggagccttcccagtgcgtggaggagcttgaggacgatgtctttcagcctgaggacggcgagcccgttacccagcccggttcactactgagcgctgacctttttgcccagtccctgcttgactgcccattgagccggctccagctgtttcccctgacacattgctgcggtcctggcctgcgttag

SEQ ID NO: 215689 - DNA, 390 bp, synthetic construct
  misc_feature 1..390: note = Description of Artificial Sequence: Synthetic coding sequence
  source 1..390: mol_type = other DNA
atggagcccagccagtgcgtcgaagaactagaggacgacgtgttccaacccgaggatggagagcctgtaacccagcccggttctctcttatccgcagatttgttcgcccagtccctgctagactgccctctgagtcggcttcagttgtttcccctgactcattgttgcggtccagggttacgccctaccagccaagaagataaggccactcagactctgtccccagctagtccctctcagggggtgatgctcccttgtggtgttaccgaggagcctcaacgccttttctacgcccctgcagagcccaagagctgcgtagtggccgatccccctctcccagcgcagccttgttttgagtggaggcgtgaacaggagagaggcaggccctag

SEQ ID NO: 215690 - DNA, 42 bp, synthetic construct
  misc_feature 1..42: note = Description of Artificial Sequence: Synthetic coding sequence
  source 1..42: mol_type = other DNA
atggagccatcccagtgtgtggaggagcttgaagatgactag

SEQ ID NO: 215691 - DNA, 555 bp, synthetic construct
  misc_feature 1..555: note = Description of Artificial Sequence: Synthetic coding sequence
  source 1..555: mol_type = other DNA
atggaaccctcgcaatgtgtagaagaactggaagacgatgtgtttcagcccgaggacggcgagcctgttacacagcctggcagccttcttagcgctgatctgtttgctcagtcgttacttgactgcccactgtccaggcttcagctgtttccactaactcattgttgcggcccaggcttacgcccaacttcccaggaagataaagccacacaaactctaagtcccgctagcccaagccagggtgtcatgctgccatgtggcgtgacggaagaaccacagcggttgttttacggaaacgcaggctacaggttgccgctgcccgcatcattccccgcagttctgcctatcggcgaacagcctccggagggacaatggcagcaccaggcagaagtacagatcgccagaaagctgcagtgtatcgcagatcagtttcatcgcctccatgttcaacagcaccagcagaatcagaatagggtttggtggcagatcctgctcttcctccataatctcgctctaaacggcgaggagaatagaaatggagctggaccacgctag

SEQ ID NO: 215692 - DNA, 555 bp, synthetic construct
  misc_feature 1..555: note = Description of Artificial Sequence: Synthetic coding sequence
  source 1..555: mol_type = other DNA
atggagccttctcagtgcgttgaagagctcgaagacgacgtgtttcagccagaagacggggagcccgtgacccagcccggttcgttgctttctgcagatctcttcgcccaatcactcctggactgtccactttccagattgcaattgttccctctgacccattgctgtgggcctggactgaggccgactagccaggaagacaaagcaactcagacactgtcaccggcaagccctagtcagggtgtgatgctgccctgcggcgtgactgaagagcctcagaggctgttttacggcaacgccggatatcgattgccattgcctgcttctttccccgctgtgttaccaatcggagagcagcctccggagggacaatggcagcaccaggctgaggttcaaatcgcgagaaagcttcaatgtatcgctgaccaatttcaccgcctgcacgtgcaacagcaccagcaaaaccaaaaccgggtgtggtggcagattctgctcttcctgcataatttggctctcaatggcgaagagaaccgtaatggcgctgggcctagatag

SEQ ID NO: 215693 - DNA, 585 bp, synthetic construct
  misc_feature 1..585: note = Description of Artificial Sequence: Synthetic coding sequence
  source 1..585: mol_type = other DNA
atgtcccaaaatggcgctcccggaatgcaggaggagtcacttcagggttcctgggtggagctccatttctccaacaacggcaatggaggtagtgtgccagcgtccgtctccatttataacggggatatggagaaaatcctgctggacgcgcagcatgagagcggcagaagtagttccaagagttcccattgtgactccccacctaggtcccaaaccccccaagacaccaatcgcgcatcagagactgacacccactccatcggtgagaaaaatagcagccagtctgaggaggatgacatagagcggagaaaagaggttgaaagcatacttaaaaaaaactccgactggatatgggattggtcctcccgcccagagaatatccctcccaaagagttcctgttcaaacatcccaagcgtacagccacgctgtctatgagaaatacctcagtgatgaagaaggggggaatcttcagtgccgagtttctcaaggttttcctgccatctctgctcctctcacacctcctcgcgattggacttggcatctatatcgggaggagactcactacctcaacatcaaccttctag

SEQ ID NO: 215694 - DNA, 543 bp, synthetic construct
  misc_feature 1..543: note = Description of Artificial Sequence: Synthetic coding sequence
  source 1..543: mol_type = other DNA
atgtctcagaatggggctccaggaatgcaagaggagtccttgcaaggatcttgggtggagcttcatttctccaataacggcaatggaggatcagtgcctgcctccgtgagtatttataatggggacatggagaaaatcctcttagacgcccagcatgagagcggcaggtcaagcagcaaaagtagccactgtgactctcctccgagatcacagacgcctcaggatactaatcgagcgtccgagaccgacacacattctatcggtgaaaaaaatagctcacagagcgaagaggacgacatcgagcgcagaaaggaagtggaatctatcctcaaaaagaattctgactggatttgggactggagctccagacctgagaacatccccccaaaggaattcctgttcaaacatcctaagcgaacagctactctgtccatgagaaatacatctgtcatgaagaagggcggaatcttttcggctgagtttctcaaagtgtttctgccgtctttactgttgtcccatctgttggccatagggctgggctag

SEQ ID NO: 215695 - DNA, 1071 bp, synthetic construct
  misc_feature 1..1071: note = Description of Artificial Sequence: Synthetic coding sequence
  source 1..1071: mol_type = other DNA
atgtctaggccactgttgattacattcactccagcaaccgatcccagtgacctctggaaggatggccagcagcagccccagccagaaaaacccgagtctacgctggatggagccgcagctctcgcattctacgaagctttaatcggcgatgagtcttcggcccctgattctcagaggtctcaaaccgaacctgcaagggaacggaaacgcaagaaaaggaggatcatgaaggctcccgcagcagaggcagtggccgaaggagcttcagggcgacacgggcagggaagaagcctggaggccgaggacaagatgactcatcggatacttcgggcagcacaggagggcgatctaccagagttaagaaggctcctggaaccacatgaggccggaggggctggcggaaacatcaatgcacgcgatgccttttggtggaccccactgatgtgcgccgctcgagccggacaaggcgctgccgtgagctaccttctgggcaggggggcagcctgggtcggggtgtgcgagctgagcggacgcgatgcagcgcagctggcagaagaagccggattccctgaggttgcacggatggtgcgggagagtcatggggaaacccggtcccctgagaaccgctctcctacaccttcactccagtactgtgagaactgcgacacccatttccaagactctaatcaccgaacgtcaaccgcccacctcctgtccttgagccagggccctcagcctccaaatcttccactgggcgtacccataagtagtccgggttttaagttacttctgcggggtggctgggagccgggaatggggctggggcctcgcggtgaagggagggctaatccaatacctactgtgctgaaaagagaccaggaagggctcggttaccgctccgcgccacaacccagagtgactcactttccggcttgggacaccagagctgttgccggtcgcgaacgccctcctcgagtagccactctgtcctggagggaagagcggcgaagagaggagaaggaccgagcatgggagcgagacctccgaacttacatgaatttggagttttag

SEQ ID NO: 215696 - DNA, 3399 bp, synthetic construct
  misc_feature 1..3399: note = Description of Artificial Sequence: Synthetic coding sequence
  source 1..3399: mol_type = other DNA
atggagcctaacgattcaacctccaccgccgtagaggaacccgatagcttagaagtgcttgtgaaaacccttgatagtcaaactagaacatttatcgttggagcgcagatgaacgtgaaagagttcaaggagcatattgcagcctccgttagcataccttctgagaagcagagactcatttatcagggacgtgtgctgcaggacgacaagaagctgcaggagtataacgtcggagggaaggttatccacttagtcgagcgtgcccctcctcagacgcacctgccctctggcgcatcatccggaacaggaagtgctagcgctactcatgggggtggcagtcccccaggaacgagaggacccggagcctcggttcacgacagaaacgctaactcctacgttatggtagggaccttcaaccttccatcggacgggtccgccgtggacgtccatatcaacatggaacaggcgcctatacaatccgaaccccgtgtgagactcgttatggcacagcacatgattcgtgatattcaaacactcctgtctagaatggagacactcccttacctccaatgtaggggtggccctcagccccagcatagccagccgccaccccagccacccgcagtaacgcccgagcctgtggccctgtccagccagacatcagaacctgtagaaagcgaggccccacctcgtgagcctatggaagcggaggaagtggaagaacgcgctcctgcccaaaaccctgagctcacgcccggtcccgctcccgctggtcctactccagcaccggaaactaatgctcccaatcatccatcccctgctgaatacgtggaggtgctgcaagagctgcagaggctcgagtctcgtcttcaaccttttttgcagagatactacgaggtgcttggcgcagccgcaacaacagattacaacaacaatcatgaagggagagaggaagaccaacgtctgattaacttggtgggggagagccttaggctgttgggaaatacctttgtggccttaagcgacctgcgttgcaacctcgcctgtaccccccctcgtcacctgcacgtggtgcgtccaatgagtcattacacaactccaatggtccttcaacaggcagccatccctatccagatcaatgtgggcaccaccgtaacaatgactggtaacggcaccagacctcctccgacccccaacgctgaagccccaccacccggaccaggccaggcatcatcggtagccccaagctcaaccaacgtggagagctccgcggagggtgcacctccccctgggccagcaccccctcccgcaacatcccacccccgtgtgatccgcatctcacaccagtccgtcgagccagtggtaatgatgcacatgaatatccaggatagtgggacccaacccggaggcgtgccttctgcccctactggccctctggggccacctggacacgggcaaacattgggacagcaggtccctgggtttcctactgcacccacacgtgtggtgatcgccagacccactcctcctcaggcgcgacccagtcaccccggtggacccccagtgtctgggaccctgcagggggcaggtctcggaaccaacgccagtctcgcgcagatggtgtccgggcttgtcgggcagcttttgatgcaacctgtcctggtggcccagggcacccccggtatggccccacctccagctcccgctaccgcgtcggcctccgccggaaccacaaacacagccaccacagccggacccgcacctgggggacccgcacagccaccgcctacaccacaaccatctatggctgatctccagtttagccaactccttggaaacctgctgggcccagccggaccgggagcgggtggttcaggagtggcatccccaacaatcaccgtggccatgcccggagtgcctgctttcctccagggaatgaccgacttcctgcaagcaactcagactgctccacccccacccccacctccgcctcctccccctcccgcacctgagcagcagaccatgccccctcccggttcaccctccgggggagccggaagccctggcggactcggattagagtcactctcgcccgaattttttacctccgtggtgcagggggtgctgagcagccttctgggctctctcggcgcaagagctggtagcagcgagagcatcgccgcatttattcagagactgagcggatctagtaacatattcgaaccgggagcagacggagctctgggattctttggagcactccttagtcttctgtgccagaacttctcaatggtggacgtagttatgctcctacacggacactttcagcccctccagaggttacaaccccaactgcgttctttctttcaccagcactacctgggcggacaagaacccactccctctaatatcaggatggcgacacacactctgattaccgggcttgaagaatacgtccgcgagtcattcagcctcgtccaggtccaacctggcgttgacattattaggacaaatttggaattcctacaggagcagtttaattctatagctgcacacgtgctgcactgtaccgattcaggctttggcgcaagattgctagagctgtgtaatcaagggctctttgagtgcttggccttaaatttgcattgcttgggcggacagcagatggagctcgcggcagtgattaatggaagaatcaggaggatgtcaagaggggtaaacccttctttggtttcctggctgacaaccatgatggggctgcggctccaggtcgtgctagagcacatgccagtaggcccagacgcaattctgcgatacgtacgcagggttggcgacccaccccagccactgcccgaggagccgatggaggtgcagggagccgaaagggcaagccctgagcctcaacgagaaaatgccagcccggctcctggaactactgcagaagaagccatgtcaagaggccctccacctgctcccgagggtggatctcgtgacgaacaggacggggcaagtgctgaaactgagccatgggccgctgctgtcccccctgaatgggtccctataatacagcaggatatccagagccagaggaaagtgaaacctcagccccctctatccgacgcatacttgagtgggatgccggcaaagcggaggaagacaatgcagggcgaagggccacagcttcttttgtcagaagccgtctctcgcgcagcgaaggcagcgggagcaagaccactgacaagcccagagtcactgagcagagatttggaggctcctgaggtgcaagagtcttaccggcagcaactacgatcagatattcagaaacgactccaggaggaccccaattatagccctcagagatttccaaatgcccagcgggcatttgccgatgacccatag

SEQ ID NO: 215697 - DNA, 3234 bp, synthetic construct
  misc_feature 1..3234: note = Description of Artificial Sequence: Synthetic coding sequence
  source 1..3234: mol_type = other DNA
atggagccaaacgactccaccagcacagccgtggaggaacccgacagcctcgaggtgctggtgaagaccctggacagccagactcgtaccttcatcgtaggcgcacagatgaacgtgaaggaattcaaagaacacattgcagcctctgtgagcatccccagtgagaagcagagactgatctaccagggccgtgtgctgcaagacgacaagaaactgcaggaatataatgtaggcggaaaagtgatccacctcgtagaacgcgcaccgccacaaacccatttgcccagcggcgcatccagtggaaccggctcagccagcgccactcacgggggtgggtcaccgccaggaacccgcggtcccggagcttccgtacatgacaggaacgctaattcctatgtgatggtcggaaccttcaatctgccaagcgacgggtctgcagtggatgtgcacattaacatggagcaggctcctattcagagcgagccgagagtgaggttggtgatggcacaacacatgatccgcgacatccaaaccctccttagtcggatggagtgccgaggtgggcctcagccacaacatagtcagccaccccctcaaccccctgctgtaacaccggaacccgtagctcttagctcccaaacctcagagcctgtggagagtgaagcccctcccagagagcccatggaggccgaggaggtggaagaacgggctcccgctcagaacccagagttgacgcctgggccagctccagcaggtcctacaccagccccagagacaaatgctcctaatcatccttcccccgctgaatatgtcgaggttcttcaggaactccagcgtttagagtctagactacagccattcctacagcgctactatgaggtgttaggagccgctgcgacaacagactacaataacaatcatgaaggacgggaggaagaccaacgcttaatcaaccttgtgggagaatccctgagattgctgggtaacacattcgtggctctgagcgatctccgatgtaacctcgcctgtactccacctcgccacctgcatgtggtgagacccatgtcccactacactacccccatggtacttcagcaggctgcgatcccaatccagatcaacgttggtacaacagtgaccatgaccggaaatggcactaggccaccaccaacacccaatgcggaggcccctccccctggccctgggcaagcatcttccgtggccccttctagcacaaatgtggaaagctccgcagagggtgcaccaccccctggtcctgcgcctcctccagctacaagccacccaagagtcattcgaatcagccaccagagcgttgagccagtagtgatgatgcacatgaatatccaggactcaggcacacagccaggaggcgtgccttccgccccaactgggcctctgggcccacccggacatgggcaaactctcggccagcaggtgcctggattccctacggcacccactcgggtggtaattgcacggccaacacctcctcaggcccgtccctctcacccaggcggacctccggtgtccggcacgctgcaaggcgctggcctggggaccaatgcctcactagctcaaatggtgtctggcctggttggccagcttctgatgcaacccgtgttggtcgctcaggggaccccaggaatggccccaccgccagcccctgccactgcgtccgcatcagccggaaccacaaacacggcaactacagctggccctgcgcctgggggacctgcccagcccccacccactcctcagccctccatggctgatcttcagttctcccaactgctgggcaacctgctcggcccagcaggacctggcgcaggagggtcaggagttgcctcacccaccatcacagtggctatgcctggcgttccggcattcttacaaggtatgacggatttcctgcaggccacccagacagctcctccgccacctcctcctccaccccctcctccccctgctcctgagcagcagaccatgcccccaccagggtccccttcggggggtgccggatccccaggaggacttggtcttgaatctctgtctcccgagttcttcacatcagttgtgcagggcgtattgagcagtcttctcggatcattgggcgctcgagccggaagctctgaaagtattgccgcttttatccagagactttccggaagctcaaatatttttgagcctggggcagatggggctctcggcttctttggagcattgctgagtcttctatgccagaacttttccatggtagatgtagtcatgctgctgcatggacacttccaaccccttcagcggctgcagccgcagctgcgcagttttttccaccagcactacttgggcggacaagaacccaccccgagcaacatccgcatggcgacacataccctgatcacgggtctcgaggaatacgtgagagagagtttttccctggtacaggttcaacccggtgtggatataatacgcaccaacttagagtttctgcaggaacaatttaactcaatagctgcgcacgttttacactgtacagattccggtttcggggctcgattgttggagctttgtaaccagggactctttgagtgtctggctctcaaccttcattgtctggggggtcagcaaatggagttagctgccgttatcaacggccgtatcagacgcatgtctcgcggagttaatccttccctagtttcctggctcacaaccatgatgggcctacggctccaggtggtgctcgagcatatgcccgtcggccctgacgccattttgcgctatgttaggcgagtaggagaccctccccagcctctccccgaggagccgatggaagtgcaaggcgctgaacgcgctagtccggaaccccaacgtgaaaatgcctccccagctcctggaacaacggctgaggaggcaatgagtagggggcctccaccagcgcctgagggaggcagtcgggacgagcaagatggggcatctgcagagacggagccttgggcagccgcagtgcccccagaatgggtgccgatcatacagcaggatatccagagccagaggaaggtgaagccacagccccctctgagcgacgcttacctgagtggaatgccggctaaaagacggaagctccgcagcgatatccaaaagcggttgcaggaggaccccaactacagtccccagaggttccctaacgctcaaagagcctttgctgatgatccatag

SEQ ID NO: 215698 - DNA, 3399 bp, synthetic construct
  misc_feature 1..3399: note = Description of Artificial Sequence: Synthetic coding sequence
  source 1..3399: mol_type = other DNA
atggagcccaatgactctacatctaccgcagtggaagaaccagactctctggaggtgctggtgaagactcttgactcacaaacccggacattcatcgttggcgcacagatgaatgttaaggagttcaaggagcacatagccgcatccgtcagtattcccagcgaaaaacaacgactgatataccaaggcagagtcctgcaagatgataagaagctgcaggaatataacgtcggaggaaaagtcatacacttggtcgaacgagctccacctcaaacccacttgcctagcggcgcatccagcggcacaggctccgccagtgcaacccacgggggaggcagtcctcccggaactcggggtccgggtgcctctgtgcacgatcggaatgcgaattcatatgtgatggtgggaacttttaacctgccctctgatggcagtgccgtggatgttcatatcaatatggaacaggccccaatccagtccgagccacgtgttaggctggtgatggctcagcacatgatccgcgatattcaaaccctgctgagccggatggagaccctgccctatttgcagtgtcggggaggcccacagccacagcatagccagcctccacctcaacccccagctgtgacccctgagcccgtggctctgtcaagtcagacatccgagcccgtggagtccgaagcgccaccacgggagccgatggaagcagaagaagtggaagaaagggcccctgcccaaaatcccgagctgactcctggcccagcccctgccggtcctaccccagcgcctgaaaccaatgctcccaaccatccaagccctgctgaatatgttgaagttttgcaagagctgcagcgcctagagtccaggctgcagcccttcctccagagatactacgaagttctcggggcagccgcaactacagactacaataataatcacgagggcagggaagaagatcagagactgatcaacttagtcggtgagtcactgagactcttagggaatacgttcgtcgctctgtccgacctccgatgcaacctcgcctgcaccccaccgagacaccttcatgtggtgaggccaatgtcacactacacaaccccaatggtgcttcagcaggcggcaatcccaatccagattaacgtgggcactactgtgactatgactgggaatggaactagaccccctccaacgcccaacgccgaggctcctccacctggaccagggcaggcgagcagcgtggctccctcttcgaccaacgtggaatcctcagccgagggagccccacccccaggcccagcaccccctcccgctacctcccatcccagagtcatacggatctctcatcagtcggtggagccagtggtgatgatgcatatgaatatccaggactctgggacacaacctggcggtgtcccctccgcacccaccgggcctctgggcccacccggacatggacaaacactcggtcagcaggtgcctggctttccgacggctcctacccgggtggtgatcgctagaccaacaccccctcaggcacgtcccagccatcccggtggccctcccgtttctggaacgctgcagggggctgggttaggcaccaatgcctccctggcacaaatggtgtctggactggtgggacagcttctgatgcagcctgttcttgtggctcaaggtacgcctgggatggcaccccctccagccccagccacagcctcagcttctgctggcaccacaaacaccgctactacagccggtccagctccagggggtccggctcaaccccctcctactccacagccttcgatggccgatctgcagttcagccagctcttggggaaccttctcggcccagctggaccaggggcaggaggaagtggcgtcgctagcccgacgattacagtggcgatgccgggagtacccgcttttctgcagggaatgaccgacttcctgcaggctacccagaccgcccctccccctcctccaccccctccccctccgccaccagccccagagcagcagactatgccacctcccggaagccccagcggaggagcaggcagtcccggagggctcggcctggaaagtctgagtccagagttcttcacatcagtggtgcagggcgtcttgtcatctctgctcggctctctgggtgccagggccggaagttcggaatctatagccgctttcatccagaggctgagcgggagctcaaacattttcgagccaggggcagacggggctctaggtttctttggggcactgttgagtctgctctgccagaacttcagcatggtcgatgttgtgatgctgctccacgggcatttccagcctctccagaggctgcagccccagcttaggtcctttttccaccagcattatttggggggtcaggagccaacacccagcaatatacggatggctacccatacccttatcacgggtttagaggagtacgttagagagtcatttagcctagtccaggtgcaacccggagtcgacatcatccggactaatcttgaattcctccaagagcagttcaattcaatcgccgctcatgtgctccattgcaccgattcaggctttggggcacgcctgctcgaactgtgtaatcagggcctttttgagtgcctggccctgaacttacactgcctggggggacagcagatggagttggcagctgtcattaatgggaggatcagacgcatgtccagaggagtcaatccaagccttgtgagttggctaacaacaatgatgggcctcagacttcaggtggtcttggaacacatgcctgtgggaccagatgcaatcctccggtacgtgagaagggttggggacccacctcagcccctcccagaagagcctatggaagtacaaggtgctgagagggccagcccagagccccaaagggagaacgcttctcctgcccctggcaccacagccgaagaggctatgagccgagggcctccccctgcccctgaggggggttcaagagatgaacaggatggcgcaagcgccgaaaccgagccttgggctgcagcagtgccgccagaatgggttcctatcattcagcaggatatccagtcccagagaaaggtgaaaccacagccccctctgagcgatgcatatctgtcgggcatgcctgcaaaacggaggaaaacaatgcagggcgaggggccacagctgcttcttagcgaggccgtatcccgagccgcaaaagctgctggagctagaccattaaccagccctgagtcactgtctcgcgacctcgaagcccctgaagtgcaggagtcttatcggcagcaactcagaagcgacatccagaaaaggctccaggaggaccctaattactcaccccagcgctttcccaacgcccaacgggcattcgcggatgatccctag

SEQ ID NO: 215699 - DNA, 3381 bp, synthetic construct
  misc_feature 1..3381: note = Description of Artificial Sequence: Synthetic coding sequence
  source 1..3381: mol_type = other DNA
atggagcctaatgattctactagtacagcagtcgaggagccggattctctagaggtcctagtaaaaactctcgattcacagactagaacatttatcgtgggcgctcagatgaatgtaaaggaattcaaggagcacatcgccgcatccgtgtccatacctagtgagaaacaacggttgatctatcagggacgggtccttcaggatgacaagaaactccaggagtacaatgtcggcggaaaggtgatacatttggtggaaagagcaccgcctcagacccatttaccaagtggagctagctccggcacagggtccgcctcagcgacccacggaggtggcagccctccaggaacccgcggaccaggcgcatcggtacacgatcgcaatgctaacagctacgttatggttggtacttttaacctccccagcgacggtagcgccgtcgacgtgcacatcaatatggaacaagctccgatacagtctgaacctcgagtgaggttagtcatggcgcagcacatgataagagatatacaaaccctgctgagtaggatggaatgcagaggcggaccacagcctcagcatagtcagcccccacctcagccacccgctgttactccagagccagtcgcgttaagttcgcagacaagcgagcccgtcgagtccgaagcgccacctcgggaacccatggaggctgaggaggtggaggagagagcccctgcccagaaccctgagctaacaccagggcctgctcccgcagggccaacccccgcaccagaaaccaatgccccaaaccatccctctcccgctgagtacgttgaagtgctgcaggagttgcagaggctagagtcgaggctgcagccatttctgcaacgctactatgaggtgctgggagccgctgctactacagactataacaacaatcatgagggaagggaggaagaccaaagacttattaacctggtgggcgaatccttaaggctgctgggaaatacttttgttgcccttagcgatctcagatgtaacttggcttgcacaccgccaaggcatctgcatgtggttcgccctatgtcccactatactacaccgatggtgctccaacaggctgcgattccgatccagatcaatgtgggaacaacagtcacaatgacagggaacggtacccgtcctccaccaaccccaaatgctgaggctccgcctccaggccctgggcaagccagtagtgtggccccttcctcgacaaacgttgaatccagtgccgagggcgcacctcctcctgggcctgcccctcccccagccacatcccaccctcgagtgatccgtatcagtcatcagtcagttgagccagtcgttatgatgcacatgaatattcaggacagtgggactcagccaggtggagtgcccagtgcgcctactggcccactaggtcctccaggccacgggcagactttgggacagcaggtgccaggcttccctaccgcgcctacgcgagtcgtgatagcgagacctactcctccccaggccagacccagccacccgggaggaccacccgtgagtgggactctgcaaggagctggactcgggacgaatgcttctctggcccagatggttagcgggctggtcggacagctccttatgcagccagtgctcgtcgctcagggaactcccggaatggcacccccacccgctcccgctacagccagtgcctctgcaggtacaaccaacacagctaccacggcgggacccgctcccggtgggccagcgcagccgccacctacaccccaacccagcatggccgatctgcagtttagtcagttgctgggcaatttactcggtcctgctggacccggagctggtggctcaggcgtggccagccccactatcaccgtagcgatgcccggtgtgccagccttcttgcagggcatgaccgatttcctgcaggccactcagacagcaccccctcctccaccccctcctccaccgcctccccctgcacccgaacagcagacaatgccccctcctggctctccttccggcggagcgggttcccccggaggcctgggcttggagtcactgagtcccgagtttttcacctctgtggtgcagggagtgttaagttctttattaggctcactcggcgctcgcgcaggttcatccgagtccatcgcagcttttattcagcgcttatccggctcctctaacatcttcgagccgggagccgatggagctttagggttctttggggcactgctgtccctcctctgtcagaatttctctatggtggatgtggtcatgcttctgcatgggcactttcagccactccagagactgcagccacagctgcgctccttcttccaccagcattacctcggaggccaagagcccactccttcaaacatccggatggcaactcatacactgattaccgggctggaggagtacgtccgcgagagctttagcctggttcaggtgcagccaggcgtagatattatcagaacaaatctcgagttcctgcaggagcagtttaatagcattgccgcacatgtgctgcactgtactgactctggttttggcgcacgcctgctagaactctgcaatcagggtctatttgagtgccttgcactgaacctccactgtttgggagggcagcaaatggagctggccgcagtaatcaacggcaggatcagacgcatgagcagaggtgtgaatccgagcctggtctcctggctgaccacaatgatgggtcttcgattacaggtcgtcctggaacacatgccagttgggccagacgcaatactccgctatgtccgcagagtgggggaccccccacagcctctgcccgaggagcctatggaggtgcagggggcagaacgggcatctccagagccacaaagagagaatgcctcacccgcaccaggtacaaccgcagaagaggctatgagcaggggccctccgccagcccctgaaggcggatcacgggatgagcaggacggcgctagtgcggaaactgaaccctgggcagcagcagtcccgccagaatgggtgcccatcatacagcaagacatccagagccagaggaaggtgaagcctcagccaccactctccgacgcttacctatctggcatgcctgccaagcgacgcaagaccatgcagggtgagggacctcagctgctcctgtctgaagcggtttcaagagcagcaaaagccgcaggagccagaccacttacaagccctgagagcctgtctcgggatttggaggctcctgaggttcaggaaagctaccggcagcaactccgctctgacattcagaagaggctccaggaagacccaaactactccccccagcggtttccgaatgcacagagggccttcgccgatgatccctag

SEQ ID NO: 215700 - DNA, 3381 bp, synthetic construct
  misc_feature 1..3381: note = Description of Artificial Sequence: Synthetic coding sequence
  source 1..3381: mol_type = other DNA
atggaacccaatgactcaaccagtaccgcagtggaagagcctgatagtttggaggtgcttgtgaagaccttagacagccagacacgaacatttatcgtgggggctcagatgaacgttaaggagttcaaggagcacattgccgcttcggttagtatcccctccgagaagcaacgcctaatatatcaagggagagtgctacaggatgacaagaaacttcaagagtacaacgtcgggggaaaagtgattcacctggttgagcgtgccccaccccaaacacacctcccttccggtgctagtagcggcaccggatctgcttccgctactcatggaggagggtcccccccaggtacacgtggacctggagcctccgtgcatgatagaaatgccaatagctacgttatggtcggtacattcaaccttcccagcgatggctccgccgtggacgtgcacattaatatggagcaggccccaatccagtctgaacctagggtgcgattggtgatggcccagcacatgataagagacattcagaccctcttaagcagaatggagtgccgaggcggacctcagcctcagcattctcaaccccctcctcaaccccctgccgttacccccgaacccgtggccctgtcatcacaaacaagtgaaccagtcgaaagtgaggcccctcctcgagagcccatggaggcagaggaagtcgaggagcgggctccagctcaaaaccctgaattaacgccgggtccagcacccgctggccctacccctgccccagaaactaatgctcctaatcatccaagtcctgcagagtacgtggaagtattgcaggagcttcagcgtctggaatccagattgcagcccttcctgcagcggtattacgaggtgttaggggcagcggcaactactgattataacaataatcacgagggaagagaggaagaccagaggttgattaatcttgtgggcgaaagcctgcggctcctaggaaatacttttgttgcactcagtgatctgcgatgcaacctggcatgtactccacccagacacctgcatgtcgtcagacccatgtcccattatacaacacctatggtactccagcaggcagccatccccatccagatcaatgtcggcacaacagtaacaatgactgggaacgggaccagacctcctcctacccctaatgctgaagcacctccaccaggccctggccaggcctcctccgtggcaccttcctctaccaacgtggagtcttccgccgagggcgctcctccacccggaccggctccacctcctgcgaccagccatcccagagtcataagaatctcgcatcagagcgtggagccggtggttatgatgcatatgaacattcaagatagcggcacacaaccaggcggagtcccgtcggcacccacaggccctctgggccctcccggacatgggcaaaccctggggcagcaggtgcccggatttcctactgcaccaactcgtgtggttattgcacggcctacaccaccacaagccaggcctagtcatccaggaggcccacctgttagtgggaccttgcaaggggcagggctcgggactaatgcctcgttggctcagatggtgtcgggactggtcggccagttgcttatgcagcccgtcctcgtcgctcagggcaccccaggcatggctcctccccctgctccagccacagcttctgcctctgctgggacaacaaacactgccacaaccgccggtcctgcacccggtggaccggcacagccgcctccaacaccccagccttcaatggctgatctgcagttctctcaactgcttggcaatctgctgggacctgctgggcctggcgctggcggtagtggcgtcgctagtcccaccataacagtcgccatgccgggagtgcccgcatttcttcaaggaatgaccgatttccttcaggcgactcagaccgcccctcctcctccccctcctccacccccaccgcctcctgctccagagcagcagacaatgccaccccctggttctcccagcggcggagccggttcacctgggggactcggccttgagtcattgtctcctgagttcttcactagcgtggtccagggcgttctctcttctctccttggatccctcggcgcaagggctggttcttctgagagtatagctgctttcatccaaaggctatcggggtcctccaacatttttgagccgggtgccgatggcgctttggggttctttggcgctttattgagcctgctctgccaaaattttagcatggttgatgtagtcatgctgctccacggacactttcagccactgcagaggctccaaccacagctgcggagcttctttcaccaacattatcttggaggacaggaacctactccatccaatatcagaatggccacccatactctgatcaccgggctggaagagtacgtgcgcgagtcattcagcctggtccaggttcagcccggagtcgatatcatacgtactaatctggaatttctgcaggagcagtttaatagcattgctgcccacgtcctgcactgcacagacagcggctttggagctcgactcttagaactttgtaaccaaggattatttgagtgtctggcccttaatctgcactgcctgggagggcaacaaatggagctagcagcagtcattaatgggcgtatcagacgcatgagcagaggagtaaacccgtcactggttagctggctcacaactatgatgggtcttagactgcaggtggttttggaacatatgccagttggaccagacgcgattctgagatacgttaggcgggtgggcgatcctccacaacctctccccgaagagccaatggaggtccagggggctgaaagggcctctccagaaccgcagcgcgagaatgccagccccgcacccggtacgaccgctgaggaagcaatgtcccggggaccgcctccagcccctgaagggggatccagggacgaacaggatggagcgagcgcagaaacggagccgtgggctgctgcagtgcccccagaatgggtgccaatcatccagcaggacattcagagccagcgcaaagtgaagccccaaccaccgttaagtgatgcttacctgtcagggatgcccgctaaacgtcggaagaccatgcaaggcgagggcccacagctgctcctgtcagaagcagtttcccgggctgccaaggctgctggagcgagacctttaacgagtcctgagagcctgagtagggacctggaggctcccgaggttcaggagtcatatcgtcaacaactgaggagtgacattcaaaaaagactgcaagaagaccctaattattctccccagcggttcccaaacgcccagcgggctttcgccgacgacccatag

SEQ ID NO: 215701 - DNA, 3381 bp, synthetic construct
  misc_feature 1..3381: note = Description of Artificial Sequence: Synthetic coding sequence
  source 1..3381: mol_type = other DNA
atggaaccgaatgattccactagcaccgccgtggaagagcccgactcgctcgaggtgttagtgaaaacccttgattcgcaaactcgaaccttcatcgtgggcgcacagatgaatgttaaggaattcaaagagcacatcgcggcttccgtgtctattccaagcgagaaacagagactgatctaccaaggccgtgtcctgcaagatgataaaaagctgcaggagtataatgtcggtggaaaggtcattcaccttgtggaacgtgcgcctccccagacccatctgccttcaggcgcttccagtggcacagggtcggcctcagctacgcacggcggagggtcccctcctggaacccgagggcctggtgcttcggttcacgatagaaatgcaaatagctatgtaatggtaggaacctttaatctgcctagcgacggctccgccgttgacgtgcacatcaacatggaacaagcccctatccagtccgaacctagagtacgcctggtgatggcccagcacatgattagggacatccaaactcttctcagccgaatggagtgcaggggtggaccacagccgcaacacagccagccgccaccccaacccccagctgtcaccccagaaccggtggccctgagcagccagacatcggagcctgtggagtccgaggcgccacctcgtgaaccaatggaagccgaggaagtggaagagagggcgccagcacagaatcccgagctgacccccggaccagctccagctggcccaacaccggctcctgaaactaatgcccctaatcaccccagccccgcagagtacgtcgaggtgctgcaagaacttcagagacttgaatcccggctgcaaccctttttgcagagatactacgaggtcctgggcgcagcagctacaactgactacaacaacaatcatgagggacgcgaagaggatcagcgtctaataaacttggttggcgagagccttagattgctcggcaacacatttgtcgccctaagtgatctgcggtgcaacctcgcctgtactccacctaggcacctgcacgttgtgaggccgatgtcccattacacaacgcctatggtgctgcagcaggctgctattccgatccagatcaatgtcggcacgacagtaaccatgacaggcaacggcacacgccctcctcccacaccgaacgccgaagctccaccacccggtccaggccaagccagtagtgtagcaccgtcctctaccaacgtggagtcctctgcagaaggagcccctcccccaggacctgcccctcccccagccactagccatcctcgggttatccgcatttcgcaccaatcagttgaacctgtagtcatgatgcacatgaatatacaggatagtggaacgcagcctggcggtgtgccatctgcacccacgggaccgctggggcctccagggcacgggcagactttaggacagcaggtgccagggttccccactgcgccaacaagggtggtcattgccaggccaactccccctcaggccagaccatcgcacccgggtggtcctcccgtctctggaaccctccagggggctggactaggcaccaacgcttctcttgctcagatggtaagcggtctagtcggccaactgctgatgcagcccgttttagtggcccagggaaccccaggcatggcacctccgcctgctccggcaactgcttcagccagcgctggcaccacgaacaccgccacaacagctggacctgctcccggtggtcccgctcagccccctcctactcctcagccgagcatggccgacttgcagttcagccagctcttgggcaacttgctgggcccagcaggcccaggtgccggtggaagcggtgtggcaagccctaccattaccgtggcaatgccgggtgtgcccgctttccttcaggggatgactgacttcctgcaagctacccagaccgccccacctcctccgcctccgcctccaccgcctccccctgccccagaacaacaaaccatgccaccacccggttctccatcaggcggagcaggaagcccaggtggccttggcttggaatcattgtcccctgagttctttaccagcgtagtccagggcgtgttatcctcgttgttaggcagtcttggagcaagggcaggctcctctgagtctatcgctgcttttattcagaggctgtctggatcgtccaacatctttgagccaggtgccgatggcgctctgggattcttcggggcactcttaagcttactctgtcagaacttttccatggtcgatgtggtgatgctactgcacggccattttcagccattacagcgcttgcagccacaattgcgttctttcttccaccagcattatctgggcggtcaggagcctactcccagtaatattagaatggcaacacataccctcatcactgggctagaagaatacgttagagagtctttttccctagttcaggtgcagcccggagtggacattatccgcactaatttggagttcctgcaagagcaatttaacagtattgctgcccatgtccttcactgcacagatagcggctttggcgcacgcctgctggagctctgcaatcagggtctcttcgagtgtctagccctgaacctgcattgtcttgggggtcagcagatggagctggcagccgttatcaacgggagaatacgcagaatgtccaggggcgtgaatccgagcctagtgagttggttaacaacgatgatgggactgcggctgcaggtagtgctggagcatatgcccgtgggcccagacgccatccttagatacgtgaggcgagttggtgacccgcctcaacccctgcccgaggaacccatggaagtgcagggcgcagaacgcgctagccccgaaccccaaagggagaacgcttctcctgcacctggaacaacggcagaagaggccatgtctcggggacctcccccagcccctgagggaggtagcagagacgaacaggatggggcatctgctgagaccgaaccctgggctgcagctgtgccaccggaatgggtgcctattatccagcaagatatccagtctcaaagaaaggttaaaccacaacccccattgagcgatgcttatttaagcggaatgcccgctaagaggagaaagactatgcagggagagggaccccaactactcctatcggaggctgtgagtcgagcagccaaggctgcaggcgctcgtccgctgacctctccagagtcattgtcccgggatttggaggcgcctgaagtccaggagtcttaccggcagcagctaagatctgacattcagaaacggttacaggaggacccgaactactcccctcagcggttccccaacgcccaaagggcgttcgccgatgacccatag

SEQ ID NO: 215702 - DNA, 3489 bp, synthetic construct
  misc_feature 1..3489: note = Description of Artificial Sequence: Synthetic coding sequence
  source 1..3489: mol_type = other DNA
atggaacccaatgattctacgagcaccgccgtggaggagcctgactcattagaagtcctagttaagacactggactcgcaaacccgaacatttatcgttggcgctcagatgaatgtcaaagaattcaaggagcacattgccgcttcagtgagtatcccctccgagaagcagagacttatctatcagggacgagtactgcaggacgataaaaagctgcaggagtataacgtaggaggaaaagtaattcaccttgtcgagcgcgctccccctcaaacccatttaccctccggggcaagcagtggaactggctccgcaagtgctacgcatggcggtggaagtcctcccggtacaaggggacccggagcttccgtccacgacagaaacgctaacagctacgtgatggtcggcacctttaacctgccttccgatggatcagcggtagacgttcacattaacatggaacaggcccctatccagagcgagcctagagtgcggcttgttatggcgcaacacatgatccgggatatccagacgctcctaagccgcatggaatgtcggggtggccctcagcctcagcactcccagcccccaccccagcctcccgctgttactccggagccagtggctctgtcttcgcagactagcgagccagttgagtccgaagcgccacctcgagaacccatggaagcagaggaggtggaggaaagagctcctgcccagaacccggaacttacaccaggcccagcacccgcaggccctacaccagcaccggaaacgaatgctccaaaccaccccagtcctgctgaatatgttgaagtattgcaggagctgcagcggttggagtcccgcctccagccctttctacagcgttactacgaggttcttggagccgctgccactaccgactacaataataaccacgagggacgcgaagaggaccagcgcctgatcaaccttgtcggagagtctcttcgtttactgggtaatacttttgtagcactgagcgatctacggtgcaacctagcgtgcacaccaccaaggcatcttcatgtggtccgacccatgagccactacaccactcctatggtgttgcaacaggccgcaattcccattcagattaacgtgggcactacggtcacaatgaccggaaatggcacccggcctccccctacccccaatgcagaagccccaccccctggccctggccaggcttcctcagttgccccatccagcactaacgtggagagcagcgcagagggcgctcctcccccaggaccagctccacccccagcaaccagtcatcccagggtgattcggatatcccatcaaagtgtggagccagttgtgatgatgcatatgaatatccaagattccgggacccagcccggaggagttcccagtgcgcctaccggacctttgggtcctccagggcatgggcagactttgggatctacccttatacagttaccttccctccctcctgaatttatgcacgcggtcgctcatcagatcacgcatcaggccatggtggccgctgtcgcctccgcagcagccggacagcaagtgcctggatttcctaccgcccctacacgtgtggttatcgctaggcctacccccccacaggcccgacccagtcacccgggaggccctccagtcagcggtacattacagggcgctggattgggcaccaacgcgtcattggcccaaatggtcagcggtttggttggccagctgcttatgcaaccagtacttgtcgcccagggaacgccgggtatggccccacctccagcgcctgccaccgcaagtgcgtccgctggcactacaaacaccgcaaccacagctggaccggctcctggaggcccagcccaacctcccccaaccccccagcccagcatggcagatttacagtttagtcaactgctgggaaacctcctgggccctgctgggccaggagccggtggtagtggtgtagcctcccctactatcacagtggcgatgccaggagtgcccgcattcttgcagggaatgactgattttcttcaggctacacagaccgctccaccgcctcctccaccacctccaccaccgcctccagcaccagagcagcagaccatgcctcctcctgggtccccctcagggggagccggttctccgggaggactaggactcgagtccctctctcccgagtttttcacatctgttgtgcaaggcgtcttgtcttcgctgcttgggtcgctcggagctcgcgcaggtagctccgaaagcatcgcagcgtttattcagagactatcaggatcatcgaacatatttgaacctggcgctgatggggctcttggttttttcggtgcacttctgagtttgctgtgtcagaactttagtatggtcgacgttgtgatgctgctccatggtcatttccagccccttcagcgccttcagccacagctgcggtcttttttccaccagcactacttgggcggtcaagagccgacgccgagtaacatcagaatggctactcataccctgatcaccggcctcgaggaatatgtgagagagtcatttagcttagtgcaggttcagcccggagtcgacattattaggactaatttagaattcctgcaggaacaatttaactccatcgccgctcacgttttgcattgcactgatagcggatttggtgcccgtttgttggagctctgtaaccagggtctctttgagtgtctggctttaaacctgcattgtttgggtggccaacagatggagctcgcagcagttatcaacggtagaatcaggcgcatgtccagaggcgtaaacccctcgctcgtcagttggctcacaacaatgatgggcctgaggctgcaagttgtcctggagcacatgcccgtgggccctgacgccatactgagatacgtcaggagagtcggcgacccgcctcaacctctccctgaagaacctatggaggtacagggtgctgagcgggctagccctgagccacagagggagaatgcatcacctgcccctggaaccaccgcggaggaggctatgagtaggggccctccaccagccccagagggtgggagccgagatgagcaagatggagcaagcgctgaaacagagccttgggcagccgcagttccaccagagtgggtaccaattatccagcaggacattcaaagccaaaggaaggtgaaaccccagcctcccctcagtgatgcttacctttccggcatgcccgctaagaggcggaaaactatgcagggcgagggtccacaacttcttctatccgaggctgttagccgggcagctaaagccgctggagccaggcctctaacctctcctgaaagcctgagcagggacttagaggccccagaggtgcaagaatcctatcggcagcagctgaggtccgacatccagaagcgcctgcaagaggatccaaattatagccctcagcgattcccaaatgcccagagagccttcgccgacgatccctag

SEQ ID NO: 215703 - DNA, 738 bp, synthetic construct
  misc_feature 1..738: note = Description of Artificial Sequence: Synthetic coding sequence
  source 1..738: mol_type = other DNA
cctccacggcacctacatgttgtgcgtccaatgtcgcactatactacacctatggtattgcaacaggccgcaatccctatccagattaacgttggcactaccgtgacgatgacagggcctgcgcctccaccagccaccagccatccgagagtcatcagaatatcgcatcaaagcgttgaacccgttgtgatgatgcacatgaacattcaggacagtgggacacaaccaggcggagtaccttccgcccctactgggccactggggcctccaggccatggccagactcttggccagcaggttccaggtttccctaccgctccaaccagggtcgtgatcgctcgacccacacctccccaggccagaccctcccacccaggtggccctcctgtctccgggacacttcagggcgcagggctgggaacgaacgcatcgctggctcagatggtgtccggcctagttggccagcttctgatgcaacctgtattagttgctcaggggacaccagggatggccccacctcctgccccagccaccgcttccgccagcgccggaacgacaaacacagctaccactgccggaccagcacctggtggtccagcccagcctccacctactccacagccaagtatggccgaccttcaattcagccaacttctgggcaacctgttgggtcctgccggaccgggtgcgggagggtctggggtggcatctcctaccattacggtggccatgccatag

SEQ ID NO: 215704 - DNA, 3381 bp, synthetic construct
  misc_feature 1..3381: note = Description of Artificial Sequence: Synthetic coding sequence
  source 1..3381: mol_type = other DNA
atggaaccaaatgactccacgtcaacagctgtggaggagcccgacagtctggaggtacttgtaaagactctggactctcagacgaggacattcattgtaggggcacaaatgaacgtcaaagaattcaaggagcacatcgctgcttcagtaagcataccctctgagaaacagagactgatttaccagggaagagtgctacaggatgacaagaaactgcaagaatacaacgtgggaggtaaagtaatacatcttgtggagcgggctcccccacaaacgcacctgccatcgggggcatcgtcaggtacaggtagtgcctccgccactcacggcggaggttctccacctggcactcgtgggcctggcgctagcgtgcatgaccgcaacgccaacagttatgtcatggtcggcacatttaaccttccctccgacggtagtgcagttgacgtgcacataaacatggaacaggctcctatccagtcagaacccagggttcggctcgtgatggctcagcatatgattagggacatccagaccctgttgagtcggatggaatgccgaggcggtccccagccccagcattcccagcccccacctcaaccccctgctgtgaccccggagccagttgctctcagcagccagacttccgaaccagtcgagtccgaagctccgccacgtgaacctatggaggcagaggaagtggaagaaagggcccctgctcagaatcctgagctgaccccgggacctgctcccgcaggaccaacaccagcccctgaaactaatgcgcctaatcacccctcaccagcagagtacgtggaggtgctgcaggagctccagcgcttggagagcagactgcagccattcttgcaaaggtactacgaggtgctgggagcggctgccacaactgattacaacaataatcatgaaggcagggaagaggatcagcggctgattaacctggttggagagtccctgaggctcctcggaaatactttcgtagctctgtccgacctccgatgcaatctggcctgtacgccacccagacacctccatgtggtccggccaatgtctcactacaccacaccgatggtgctgcagcaagccgcaattccgatccaaatcaatgtcgggaccactgtgaccatgacaggaaacggaacccggccacccccaactcctaacgccgaagcccctccacctggacccggtcaggcaagctccgttgcacccagcagcactaacgtggaatcttccgccgagggggctccaccaccaggtccagcaccacctccagccacgtcacatcccagagttatccgaatctcccaccaatccgtggagcctgtcgtgatgatgcacatgaacatccaggacagtggtacccagcccggaggggttccttctgcccctaccggccctttgggcccacccggacacggacagacactcggccagcaagtacccggtttccccaccgcccctacccgggtggtgatcgcccgacccactccgcctcaggctaggcccagccaccccggagggcctccggtttcaggaaccctgcagggggcagggctcggcaccaacgcctcactagcccagatggtgagcggactggttgggcagctgctcatgcagcccgtgctcgtggcacaaggcacccccggtatggcccctccccctgcaccggcaacagcctcggcatcagccggaacaaccaacactgctaccacggcgggtccggctcccggtggccctgctcagcctccacccaccccacagccatcgatggcggacctgcagttttcacaactgctggggaatctgttgggacccgcaggacctggtgctggtggccctggcgtggcatctcccaccattacagtggccatgcccggagttccagcgttcttacagggaatgaccgatttcctgcaggcaacccagacggctcccccacccccaccaccgcctccgccaccacctcccgctccagagcagcagacgatgcctcctcccggatcccctagtggaggtgctgggagcccgggtgggctcggcctggaatctctttcacctgaatttttcacctccgtcgtccagggggtgctgtcaagcttgcttgggagtctcggagctcgcgcaggttcgtccgaatctatcgcagccttcatccagcgcttatctggatcttccaacatattcgagcccggagcggacggagcgctggggttttttggcgctttattatcgctcctgtgccaaaatttttccatggtggacgtcgtgatgctacttcatgggcactttcagccactacaaaggctccaacctcaactcagatcctttttccaccagcattatctggggggtcaggagccgacaccaagcaatatccgaatggccacacataccctgatcactggactggaggagtacgttagggagtctttctctctagtccaggtgcagccaggagtggatatcatacgcacaaaccttgaatttctgcaggagcaatttaatagcattgccgcacatgtcttacactgtaccgattccggtttcggggctagactgctcgagctctgtaaccaaggattgttcgagtgcctcgctcttaatctgcactgcctcggcggacagcaaatggagcttgcggcagttatcaacggtcgcattaggcggatgtctcgtggcgtgaatcccagcctcgtgagttggctcacgactatgatggggctgagactgcaggttgtgttagaacacatgccagtgggcccagatgcaatcttacgatacgtgcgtcgcgttggagatccacctcagccacttcccgaagagccaatggaagtgcagggtgcagagagagcctctccagagccccaaagagaaaatgcatcgccagcccctggtactactgcagaagaggccatgtcaaggggacctccccctgctccagaaggcggatcaagggatgagcaggacggcgctagtgcggaaaccgagccctgggcagccgcagtgccgccagagtgggtccccatcatccagcaagacattcagtcccagaggaaggtgaaaccacagccaccactctccgacgcctatctatccggcatgcccgctaagcgccgtaaaacgatgcagggcgaggggcctcagctgctgctgagtgaagctgttagccgcgcagcgaaggccgctggagcgcgtccgttaacctcccccgagagcctatccagagacttggaggctccggaggtgcaagaaagctatcgtcagcagctgagaagtgatattcagaagaggctccaggaggaccccaactactcaccgcagcgctttcccaacgcacaaagagccttcgctgacgatccatag

SEQ ID NO: 215705 - DNA, 789 bp, synthetic construct
  misc_feature 1..789: note = Description of Artificial Sequence: Synthetic coding sequence
  source 1..789: mol_type = other DNA
atggagccaaacgattccacatccactgcagtggaggagcctgattctttggaagtcctggtgaagacgctcgattcacaaacccgtaccttcatcgtcggggctcagatgaacgtgaaggagtttaaagaacacattgccgcatccgtctctataccttcagaaaagcagcgccttatttatcaaggcagagtgctccaagatgacaaaaagctccaggagtacaatgtgggcggaaaagttatccatctggtggaacgggcaccaccacagacccacctcccctcgggggcaagtagcggcacaggcagtgcttccgcaacacatggaggcggatcgccccctggaactagaggcccaggggcttccgtgcacgatcgcaacgctaattcttacgtgatggtcggaacatttaacctgcccagtgacggttcagcagtagacgtgcatattaacatggagcaggcccctatccagagcgaacccagggtgaggttagtaatggcacagcacatgatcagggatattcagacccttctctcaagaatggaatgcagagggggtccccagccacagcattcccagcctccacctcagcctcccgcagtaaccccggaacccgtcgccttgagctcacagacatcagaacccgtggaatctgaagctccgcctagggagcctatggaggcagaagaggtggaggagagagctccagcacaaaatcccgaactgacccccggacccgcacccgcagggcctactcctgccccagaaactaacgcgccatag

SEQ ID NO: 215706 - DNA, 717 bp, synthetic construct
  misc_feature 1..717: note = Description of Artificial Sequence: Synthetic coding sequence
  source 1..717: mol_type = other DNA
tcctctgctgagggcgcacccccaccaggccctgcaccgccacccgcaacctcccatcctagagtgatcagaatttcccatcaatccgtcgagcccgtcgtcatgatgcatatgaacatccagggcccactgagtttgtctccgtgcccggactcaggaactcaacctggtggggttccctcagctccaaccgggcctcttgggcctcccggacacggacaaactctgggacagcaggtcccgggattccctactgcaccaacacgagtagtgattgcacgccctacccccccacaagctcgcccttcccacccgggagggcctcctgtctcaggaaccctgcagggagcaggccttggcacaaacgcaagcctcgctcaaatggtgtcaggtctggtggggcagctgttgatgcagccggtgttggtcgcacaagggacacccggtatggccccacccccagccccagcaacggcaagtgcgagcgctggtactactaacactgctacaacagccggacccgcaccgggagggcctgcccagcccccacccacccctcagccaagcatggctgatctgcagttttcccagctgttgggaaatctcctcggccctgcaggcccaggggctggcggacccggagtggctagtccaacgatcacggttgcgatgcctggcgtgcccgcttttctgcaggggatgacggactttctgtag
